United States Patent Application Publication US 2005/0228172 A9 - sequence listing, part 95

SEQ ID NO: 433779 - DNA, 673 bp, Homo sapiens
caactccaggtcttaattatattaatgaagaccaattctgatttttttcttgcccaaattactatctgaggggtctggggagtcatgccctacaaatcataaattctcatcagatgggtttatttaatcctatacattgtgacttactttccaatctggctctggcataacatgagacaaggaagaaaaggcaaaatastttatcccaaaacacgtttcttgacatattttgaaatggccctgcaaagctgttctttgtagggaaaattttgcatctgtaaagaatgtctattaacatagctacatctttttctttcagaccctcccaatcctaaagagattaactaaaatctgaataggaaacatttgttgtctatagtctctaagggcagccactaaaagacgtcaaaggaactttggtctccacaatctttatcttaaccagaacatccctatatccctatagtctggaaccaacaacccgctgcccccaaaagcatttgtaaaatgtataaaacaaagctgctccctgaccaccttgggtacatgttttcaggaccttctgagggctgtgtcacaggccgtggtcactcatatttggctcagaataaatcttttcaaatattttacagagtttggctcttctcattgacatgtatttatttattttaga

SEQ ID NO: 433780 - DNA, 673 bp, Homo sapiens
caactccaggtcttaattatattaatgaagaccaattctgatttttttcttgcccaaattactatctgaggggtctggggagtcatgccctacaaatcataaattctcatcagatgggtttatttaatcctatacattgtgacttactttccaatctggctctggcataacatgagacaaggaagaaaaggcaaaatactttatcccaaaacacgtttcttgacatattttgaaatggccctgcaaagctgttctttgtagggaaaattttgcatctgtaaagaatgtctattaacatagctacatctttttstttcagaccctcccaatcctaaagagattaactaaaatctgaataggaaacatttgttgtctatagtctctaagggcagccactaaaagacgtcaaaggaactttggtctccacaatctttatcttaaccagaacatccctatatccctatagtctggaaccaacaacccgctgcccccaaaagcatttgtaaaatgtataaaacaaagctgctccctgaccaccttgggtacatgttttcaggaccttctgagggctgtgtcacaggccgtggtcactcatatttggctcagaataaatcttttcaaatattttacagagtttggctcttctcattgacatgtatttatttattttaga

SEQ ID NO: 433781 - DNA, 673 bp, Homo sapiens
caactccaggtcttaattatattaatgaagaccaattctgatttttttcttgcccaaattactatctgaggggtctggggagtcatgccctacaaatcataaattctcatcagatgggtttatttaatcctatacattgtgacttactttccaatctggctctggcataacatgagacaaggaagaaaaggcaaaatactttatcccaaaacacgtttcttgacatattttgaaatggccctgcaaagctgttctttgtagggaaaattttgcatctgtaaagaatgtctattaacatagctacatctttttctttcagaccctcccaatcctaaagagattaactaaaatctgaataggaarcatttgttgtctatagtctctaagggcagccactaaaagacgtcaaaggaactttggtctccacaatctttatcttaaccagaacatccctatatccctatagtctggaaccaacaacccgctgcccccaaaagcatttgtaaaatgtataaaacaaagctgctccctgaccaccttgggtacatgttttcaggaccttctgagggctgtgtcacaggccgtggtcactcatatttggctcagaataaatcttttcaaatattttacagagtttggctcttctcattgacatgtatttatttattttaga

SEQ ID NO: 433782 - DNA, 568 bp, Homo sapiens
atgtttcaggatggtttctgatcaagagcagtgctgcaatgacagcatgctactgcgtggctgggtttgctcacacacactgatcacagctaattatctgaatatatgctggctacttttcccattagaggagtcccacgtaattaggggacacaggttaccatccttgctttgggcacatccctgcccttctctggccgtcaatcttcctaactgtccagtgagaaaagtggtagctggtccstaaggggtctcccatcttggacattctatggttctctgccagtggtcaataggaattccaagggaggtaggttctcgcagtaggcagcacctgctctagtgcaagtggcttgggaacatgcttgaagctttcccctacagcctcttaaaatggctggtcaaccttttggtggcagtcgcgaagccttctgcacacagcaagggttcagttcaacaaatgcctattcagaacctgctgtcttccaggaattataaagccttagcttcattctcaaaaaaaaaaaaaaaaaaacaaaaaacaaaaaacaaaaaacaaaaaaaaaca

SEQ ID NO: 433783 - DNA, 632 bp, Homo sapiens
accctttttttgaatactgggagattaagacttaaagaggtttaaagcaacttgtctcattacagaggaagggatcgagacaggatttgaacctgtacagcttgataccaaataacttgtgcctagcagtgagttacttattcaggggtcagggccaggccttcattagggcaggctggacatacggacttttccatgctgctaggtttaacaggctggtatygcttccccatctcttgtcactaaaaactcaattagcagcttgaggctgtgtcctcacatcacaccttctcattgatcactcagactgtgagtgagaaagattttaaagctggttggctttgcaaagcatagagcagcaaccattgagcatatgcttctgtgggtatatatttattcagcttatgttgagtataattttggatggtatgcatattttattttttgttgcagagagcaatttaaaagaagaaaaaaaatccttctctgaatggagacagatgccatatatgttggaccctcaggggattgaaaaggatgaggttcccaagtccagtgttctggggacggacgtgggtggaaggaaactcacaagtgatgggaatccaggatcaactgcaacacccacagca

SEQ ID NO: 433784 - DNA, 539 bp, Homo sapiens
aattcccttctttactggctattcttatgtccttttccaatacagttccaatttccttctttactgactattcctatgtccttttccaatacttagcctctttagcttcctctggatctcttggatgcagtggaggagaaataaatactggacattgatagagggtaaagagaagaaagtgcccctctcttcatgcttcctgacattggggacattcgccttatccctagggaactattctcagccttgggagggtgtcttctgatgaattaagagaatgagctttggagtttgacagagtttggagtttcctctgcctttacctggctggttggatttgggcaagtttctcatactttctgactctatttcctcatggataaaatgggagtaataataatgctttccttataaggtagctgtgaggatttccagggccaggcacataattagtactgaaatgttctctctatatatcygtatcagtaatactaggcctgatattatttatagcatttattcatttattttttagtagc

SEQ ID NO: 433785 - DNA, 539 bp, Homo sapiens
aattcccttctttactggctattcttatgtccttttccaatacagttccaatttccttctttactgactattcctatgtccttttccaatacttagcctctttagcttcctctggatctcttggatgcagtggaggagaaataaatactggacattgatagagggtaaagagaagaaagtgcccctctcttcatgcttcctgacattggggacattcgccttatccctagggaactattctcagccttgggagggtgtcttctgatgaattaagagaatgagctttggagtttgacagagtttggagtttcctctgcctttacctggctggttggatttgggcaagtttctcatactttctgactctatttcctcatggataaaatgggagtaataataatgctttccttataaggtagctgtgaggatttccagggccaggcacataattagtactgaaatgttctctctatatatccgtatcagtaatactagrcctgatattatttatagcatttattcatttattttttagtagc

SEQ ID NO: 433786 - DNA, 580 bp, Homo sapiens
gcatttccttcttctttttttttttttttttgcctatactagtttgagtttagtttctatcacttgtaatcctgagaattctaatcactaaaatttctaattgcccattcacatctgaagagctattaatctttgagtctcagatatagtttcattgcattatttcattctagaagcttcttcgtattgatctcctgacctttgtctgtttctcagctggtgtgtagctgcactaagggccaagtgtgtgttctgtctcccttgggtcttgttcagagagcctagtccagagcaggattcctatccctggttctatccttcccttcttctttcttttttctttatttactgagatgggtacttctggggtgttgagccgaatcaacagattccctgggttctccctcagttttttaagaaacataaactgaaaaacyagtctgtgctataacgtgtcacaggtgacttaataaagctaagtacagcatacagtaaagatactgtatggaaaagagggtcacctgcggggagggaaaaggcttcataaaggagatgtctctggaaagatgttcacttgttt

SEQ ID NO: 433787 - DNA, 541 bp, Homo sapiens
ctccccctgccctgggatttagggagccttctcagcccctaatagcatgagccacagtgtaraacagtagataagagggcaagtttgtctggagtcagactgccctgaggaggaatcccagcttcactcagtatgagaccttgggcaagcctcttctttttgagacagagtctcactctctcacccaggctggagtgcagtggcgcgatcttggctcactgcaacctccgcctcccagttcaagcaattctcctgcctcatcattccaagtagctgggactacaggaatgtgctaccatgccagactaatttttgtatttttagtagagattgggtttcaccatgttggctaggctggttttgaacttctgacctcaggtaatccagagaccttgggcaagtctcttaaaccctgagcctcaattttctcatctgtaaaatggggatattaatacctaactagcagaggtagcatgagtgatagattagggagcaaatgtgtcaaatgccaggcacacagtaagtgcctaacagctggtaa

SEQ ID NO: 433788 - DNA, 541 bp, Homo sapiens
ctccccctgccctgggatttagggagccttctcagcccctaatagcatgagccacagtgtagaacagtagataagagggcaagtttgtctggagtcagactgccctgaggaggaatcccagcttcactcagtatgagaccttgggcaagcctcttctttttgagacagagtctcactctctcacccaggctggagtgcagtggcgcgatcttggctcactgcaacctccgcctcccagttcaagcaattctcctgcctcatcattccaagtagctgggactacaggaatgtgctaccatgccagactaatttttgtatttttagtagagattgggyttcaccatgttggctaggctggttttgaacttctgacctcaggtaatccagagaccttgggcaagtctcttaaaccctgagcctcaattttctcatctgtaaaatggggatattaatacctaactagcagaggtagcatgagtgatagattagggagcaaatgtgtcaaatgccaggcacacagtaagtgcctaacagctggtaa

SEQ ID NO: 433789 - DNA, 585 bp, Homo sapiens
ttgcttgataaagcagtggcagggttggagtaaattgaaaaaattcactttcaaaaagttctgtgggtaaaatgctatcagactacatcacatcctacagcaaaatcttttgtgaaaggaagaatcagttgttacaacaaacttcactgttgtcttattttaagaaattgccacagccacttcagccttcagtaactaccaccctgatcagtgagcagctgtcaacactgaagcaataccctgcaccagcaaaatgattatggctcactgaagattcagatgaccattagcttttttttaagcaataaaatatttcttaattaaggtatgtacattattttttaaacatgatgcaattgtacacttaataaactatagagtaaaaaataacttttatatgcactaggaaacaaaagtatttgtgcaattcactttattgtgatatttgctttattacrgtgttctggtacctaacacacaatatctctgaggtgtgcctgtatacagaaaagagcaaaacaaacatgtgctttgtccctctggggcttacagttgttgggacaagtaagttcctcttcaaagact

SEQ ID NO: 433790 - DNA, 585 bp, Homo sapiens
gccaacgggatctgcttagattgtgcggtctaaccccagccaataggggaaggacacagaaacaggaactgcattarggttaaaaaccccttccctcctttgttaggtgtgctcttgctattgtaaccagtgcaagcagcacccttctgcagaagtaaatgtgccttgctgagaaattttctatctaagtgtgggtttttttttggctatgctgagcacttgtttccaacacaggtagttattggaacagtcactcaacaaataactgccttaatatcaatatgtgtgtctatatctatggctatagctatgtctatgttatatctgtatctatgtgtatatatctatagctatacatctatgcctatgcccctatctatacctaaatttataattacaaactgtgatagatgctttaaaaatactgaatacagtaagatcatatggcagaggggccaatctaatctagggatttggggatgggagtgtggagtgaggcagatttccctggagagtatgagaccctgaaaccaaaccagcctgtggtatggtgaggtttcatcacacccaggctgtccccaggag

SEQ ID NO: 433791 - DNA, 582 bp, Homo sapiens
aggtttgttacataggtaaatgtgtgtcatggtggtttgctgcacctatcaacccatcacctaggtattaagccccgattgtattagctatttatcctgatgctctccctccccacaatcccccctcaaggtcccagtgttgttcctctccctgtgtccatgtgttctcattgttcagctcccacttatatgtgagaatatgmggtgtttggttttctgttcctgtgttagtttgctaaggataatggcttccagctccatccacgtccctgaaaaggatttagtctcattcctttaaaacacccttaatttttgtatttttagtagagacagggttttgccattttggccaggctggtcttgaactcctggcctcaactgatccaccagacttggcctcccaaagtgctgggattacagatgtgagccattctgcttgggctggaggctcattcttgaggaagagaaggaagcaaaagaaaaaaaagaagaggaaaaaagaaggcaagagggagcagggaactgccatgtctcaccactatctctctggatatgtggatgtggccttcctctcatatgcct

SEQ ID NO: 433792 - DNA, 582 bp, Homo sapiens
aggtttgttacataggtaaatgtgtgtcatggtggtttgctgcacctatcaacccatcacctaggtattaagccccgattgtattagctatttatcctgatgctctccctccccacaatcccccctcaaggtcccagtgttgttcctctccctgtgtccatgtgttctcattgttcagctcccacttatatgtgagaatatgaggtgtttggttttctgttcctgtgttagtttgctaaggataatggcttccagctccatccacgtccctgaaaaggatttagtctcattcctttaaaacacccttaatttttgtatttttagtagagayagggttttgccattttggccaggctggtcttgaactcctggcctcaactgatccaccagacttggcctcccaaagtgctgggattacagatgtgagccattctgcttgggctggaggctcattcttgaggaagagaaggaagcaaaagaaaaaaaagaagaggaaaaaagaaggcaagagggagcagggaactgccatgtctcaccactatctctctggatatgtggatgtggccttcctctcatatgcct

SEQ ID NO: 433793 - DNA, 631 bp, Homo sapiens
cgtctctttctcaagcagttgctatttaaaataaattagttgagaaagtaaccttcatgtgtgagaaagtcatgcccaaattgacagagtcttagcttaggaacggttttaaggtgtagatgccagtcttatataccagcatttacagtactgtggtttgagggctgatgaattgttgacctggctggtgagagtgggtggggtggctgggagctggttgctggaagctctgagaatgaagaggtgagagcaaaagagagaaggcagatgaagccaagctggtcccggtcagattgcactgacttttaatctattttttttttcattataaaagtaatacattgctgctggaaggcatttggacaacatcgaaaagtaaaaagaaaaacaaatccattaatcccactgcagagagggcactgtaatcgttattttgctgtctttgwtccaagcatgaatgctctttctctagataacctcatggctcaaatgtcacctgctcagtgtcatgggatgactgcctaatatgaggactgtcatatttagcaaataaaaataaaggcacccaattaaatttggattttaaacagcaaatttcttttggtatacacacttcccaaatagtgcaatt

SEQ ID NO: 433794 - DNA, 580 bp, Homo sapiens
aatccaataatctgaaatttgaaatgctccaaaattggaaactttttgagtgcgacatgacacctcaggtggaaaattccataccttttctttctgccggttcaatgtacacacactttatttaatgcacaggattgttaaaactattgtatacaattcccttcaggctatatgcataaggtgtatatgaaacatatgaatttcatgtttagacttgggtcccatctccaggatatttctttatgtctatgcaaatattccaaaatctgaaaaagtcagaaatctgaaacacttctctagtcccaagcatttcagataaggggatactcaacttgtacttagtaagcaccrggggtcaagtctttgctaggagaccaaagggatgctctgtatctattcataagagggtggaagtggaagcggtcatggttttggcacaggggcaaaggatgtgagttagaactggatcctggaaggctttctgaaaggagtttggtagtagtatcctatcaaggtcttagtaatctgggcatagtttctgcagaatcaaattctcctatattcaacaggacagcaaatg

SEQ ID NO: 433795 - DNA, 474 bp, Homo sapiens
atgagaacagcatggggacaccatcccagtgatccaatcaccttcctcccttgacacatgtggattacaattcgagatgagatttgcgtggggacacagagccaaaccatatcagtgtgttaatgagggggctaccaggtgggcaacaagaactcgatctcgttatggtctctctgagagactgggtaagatacaaccctgaatctttctgtgaaggggcaagaaatgtggcatatttttctaccaacctcctgttcatcttttgctgtggattgtgcctaaggccatcatcactgcccacctgytcccaaaaaaataacctcaggcagacagatttaggtgcagcgcactgaaggtgcaggtgacagctgtcaaggaccaaatgtagatgggaaggacacatggcaagtggtaataccaggcgaaggactgcaagatcaagctctgtgctctgtgacgattgtcaagtcaatc

SEQ ID NO: 433796 - DNA, 544 bp, Homo sapiens
atggtgatcttttctgtgcttagcttacggaagtcagggttttyaaccaggcaccagtgagcatctgagcagattcaaagatgcttcccaagatgagggctggagagaacacaccaccaagtttgtttaccttaaatggcaacaatcaacctttctttccctggttcctgaataacccatgactatctttccaggtaaccagaggaactccctgtacccagtttcctcatctataaacacagagatgataataataatactgacctcacaggggagttgctatgagtgatagatgaggtaacacatgaagttacttagaggccaggcgcagtgtctcatgcctgtaatcctaacactttgggaggttgaggcaggcagattgtttgagcccaggagttcaagaccagcctgggaaacaccgcaaaactctgtctctacaaaaaatacaaaaattagcctggcatggtggtgtgcacctgtagtcccagctacttgagaggccgaggtgggaggatcacctgagcccaggaggtcgaggtcaggg

SEQ ID NO: 433797 - DNA, 569 bp, Homo sapiens
atattaagtagccatataagtaaatatatataattacatgaggtagtaagtgttttgaaggaaaaatgaagagttgcatgaaacattttaaaagagcgagccggtgctgtgactcatgcctgtaatctcagcacattgggaggctgaggtgagactaggagctcaagactggcctgggcaacatagtgagaccccatctctacaaaaaatttaaaaattagctgggcacagtgtcatgtgcctgtagtctcagctactcaggatggaagatcgcttgagcccacgagttcagggytgcagtgagctatgattgcaccactgcactccagcctgggcaacagagcaagactctgtctcttaaaaaaaaggaggagagagaaagagagctgactgaattgtgaatttctggagttgtgggagggcttccccggataaataggagttttgcaggaaaagtgtgaggcaaagagcattccaggcagaaagaacagccattagacggacccgaggcaggaaagctttgtcatcttctggaaaaaagaaaaacaaagtgaaaaagaaagcagggt

SEQ ID NO: 433798 - DNA, 591 bp, Homo sapiens
ctaattttagaatcagtttgatgctgtacagagtttatagtatgggggctattgatgaaatatggagttgccccattcaggtacatattaagtctcttcatttattacataacaatttaaaagcaattgcagtaggtgctttgcaggaaacctattcagtcctttgagaacacagaattgggaaggccttccttggtctaggccagcagcaggaatgagggggtttgagaaactggaaggctttcttccagaaatcatgtgttggtttactctggaaactgataaggaattagtgaagcaaagttggggttgggggtgagtcttgcaaacacagcaagaacagtatgtgttaaggtcctggggccacagagaaaccaacatggccgcaagagcagagtgatgtcaggaggcaggcatggggcatctcctctcgcaggcctgcagctggaatttccttctgtagttgatasaaaactgtcaccctccaagtcctaatcctgaccttaactgggagcaagaaagacacagactcacagagccagggattgtctgagtaatgagggtccttagaggtcacttaagtccacccat

SEQ ID NO: 433799 - DNA, 610 bp, Homo sapiens
gttaggccctactgggaggtgtcttcctgtcaggatacacgggggtgagcgacccacttgaggaggcagtctgacccttagcagagcttgarcactgtgccaggacatctgctgctgtcttcagagccatcaggcagggacatttaactctgctgaagttgtgcccacagccaccccttccccccaggtactctgtcagcccctgacttcgactgctgccttattttcagagatgccctgcccagagagaaggaatctagagaggcagtctggccacagtggacttgctgagctgtggtgggctccgcccatttctaacttcccagtggctttctttacactgtgagggtaaaactgcctacccatgcttcaccaatggcagacatccctcccctcaccaaacttgagcttcccaggtcaacctcagactgctgtgcctacagcgagaatttcatgccagtggatcttagcttgctaggctccattcaagtgggacccaccaagctataccacttggctccctggcttcagtcccctttccaggggagtgaatggttctgtctcagtggcattccaggtgccaccgtgttatgaaaaaaaactgcggcta

SEQ ID NO: 433800 - DNA, 610 bp, Homo sapiens
gttaggccctactgggaggtgtcttcctgtcaggatacacgggggtgagcgacccacttgaggaggcagtctgacccttagcagagcttgaacactgtgccaggacatctgctgctgtcttcagagccatcaggcagggacatttaactctgctgaagttgtgcccacagccaccccttccccccaggtactctgtcagcccctgacttcgactgctgccttattttcagagatgccctgcccagagagaaggaatctagagaggcagtctggccacagtggacttgctgagctgtggtgggctccgcccatttctaacttcccagtggctttctttacactgtgagggtaaaactgcctacccatgcttcaccaatggcagacrtccctcccctcaccaaacttgagcttcccaggtcaacctcagactgctgtgcctacagcgagaatttcatgccagtggatcttagcttgctaggctccattcaagtgggacccaccaagctataccacttggctccctggcttcagtcccctttccaggggagtgaatggttctgtctcagtggcattccaggtgccaccgtgttatgaaaaaaaactgcggcta

SEQ ID NO: 433801 - DNA, 585 bp, Homo sapiens
gtgaacaggcaacctacagaatgggagaaaatttttgcaaccctcttgtctgacaaagggctaatatccaggatctacagagaactcaaacaaatttacaagaaaaaaaacaaacaaccccatcaacaagtgggcaaaggatacgaacagacacttctcaaaagaagacatttatgcagccaacagacacatgaaaaaatgctcatcatcactggccatcagagaaatgcaaaccaaaaccacagtgagataccatctcacaccagttagaatggcaatcagcaaggggatttcaagtttggaagttaattggaaccattctctaagggtaaacgctttaacatgggccataataagcaggatatagagttcaatctagcatgcactatccattaaaggrgccttgctcaaatgcaaatattatagtttttcccaagatccatccttctaggagccacagaggccacataagtctaggaagtcaaagggaaatcacaagtggaggactagagtcacatgggtaagcatgactaatctcaattgcttagttcctctggtcctgtatttttaaatggctgcagggtt

SEQ ID NO: 433802 - DNA, 570 bp, Homo sapiens
ccagaggaaggaataggcacccatctttgctgttctccagcctccttgtgtcacatcaccatgtgctggagagacccagatgaatatggcaggaaatggacccccagcaaactgctgcaggcttatagaaaagggacctaactatcgaaagaaaaacaaacagaaagcaacaacaacagcatcaacaaaaaagtccccacaaaaacctcatccaaagatcagcagcctcaaagatcaaaactggacaaactcatgaasatgagaaagaatcaatgaaaaaatgctgaaaactcaaaaagccagagtgcctcttctccaaatgattgaaacacctccccagcaaaggcacagatctggacaggggttgagatggacaaattgacagaagtaggctttagaaggtgggtggtaacaaactttactgaggtaaaggagcatgttctaagccgatgcaaagaagctaagaaacataataaaaggttataggagctgttaactagaataaccagtttagagagaaagataaatgacctgatggagctgaaaaataaagcgcaagaacttcataat

SEQ ID NO: 433803 - DNA, 607 bp, Homo sapiens
tattaccaaacatttaaagatgaagtaataccagtcctactcaagctattacaaaaaatagaggaagagggaatactttcaaagtcattccaggaagccagtattatcctgataccagaaccaaccaaagattcatatgaaaacaactacagagcaatatcactgttaaacattgatgcaaaaatcttcaacaaaatactagcaaactgaattcaacagtacattacaaatgtccatsatgaccaagtgggatttattcctgagaggcaaaaatggttcaacatatgcaaatcaatcagtgtaatacattgtttcaacagaatgaagaataaaaacaatatgatcatttaattgatgctgaaaagcatttgataaaatttaacatcccttcatgataaagactctcaaaaaattgggaatagaagaaacatacctcaacataataaaaagcacatatgacagacccacaactagtacatactgaatgggaaaagacagaaagcttttgttctaagatctggaacaagatgaggatgcccattttcaccatagttattcaacatattactggaagtctgagctagagcaatcagacaaaagaaaaata

SEQ ID NO: 433804 - DNA, 277 bp, Homo sapiens
gtgatttctgcatttccaactaaggtacctggttcatctcattgggactgattggacagtgggtgcagcccatggagggcaagctggaggagggcagggcatcacctcacctgggaagagcaaggggccaggggatttccctttcctagccaagggaagctgtgacagtctgtacctggaaaaatgggacactcccacscaaatactgtgcttttcccaaggtcttagcaactagcagacaaggagattctctcccatgcctggcttggcagtttgc

SEQ ID NO: 433805 - DNA, 556 bp, Homo sapiens
gtgcccctctgggacgaggcttccagaggaaggatcaggcagcaatatttgctgttctgcaayattttctgttctgcagcctccactggtgatacccaggaaaaatctggagtggacctccagcaaactccaacagacctgcagctgagggacttgactgttagaaggaaaactaaccaacagaaaggaatagcatcaacatcaacaaaaagaacatctacaccaaaaccccatctgtgggtcactaacatcaaagaccaaaggtagataaaaccacaaagatggggagaaaccagagcagaaaagctgaaaattctaaaaaccagagcacttcttctctaaaggatcacagctcctcaccagaaatggaacaaagctggacagagaatgactttgacaagttgacagatgtaggcttcagaaggtcagaaataatgaaaaacttatctgagctaaaggagcatgttcaaacccattgcaaggaagctaaaaaccttgaaaaaagttagacaaatggctaactaaaataaacagtgaagagaagaccttaaatgac

SEQ ID NO: 433806 - DNA, 556 bp, Homo sapiens
gtgcccctctgggacgaggcttccagaggaaggatcaggcagcaatatttgctgttctgcaatattttctgttctgcagcctccactggtgatacccaggaaaaatctggagtggacctccagcaaactccaacagacctgcagctgagggacttgactgttagaaggaaaactaaccaacagaaaggaatagcatcaacatcaacaaaaagaacatctacaccaaaaccccatctgtgggtcactaacatcaaagaccaaaggtagataaaaccacaaagatggggagaaaccagagcagaaaagctgaaaattctaaaaaccagagcacttcttctctaaaggatcacagctcctcaccagaaatggaacaaagctggacagagaatgactttgacaagttgacagatgtaggcttcagaaggtcagaaataatgaaaaacttatctgagctaaaggagcatgttcaaacccattgcaaggaagctamaaaccttgaaaaaagttagacaaatggctaactaaaataaacagtgaagagaagaccttaaatgac

SEQ ID NO: 433807 - DNA, 586 bp, Homo sapiens
gacataccatgtcatgccagtcagaatggctattattaaaaagtcaaaaatcaacagatgctggcaagattgtggagaaaaatgaaaacttttacactgttggtgggagtgtaaattagtttcacggtggtttgcactgtgaaagacagtgttgtgatttttcaaaaatccagaggcagaaataccatttgacccagcaatcccattagtaggtatatatccaaaggaatatatatcattctattataaagatatatgcatgcatatgtttattgcagcactactcgcaatagygaagatatggaatcaacctaaatgcccatcaatgataaactggataaagaaaatgtggtacatacacaccatggaatactatacagccataaaaaggaatgagatcatctcctctgcagggacatggatggagttggaagccatcaccctcagcaaactaatgcaggaacagaaaacaaaataccacatgttctcacttattagtgggagcttgatgatgagaacacatggacacctagagggaagcaacacacactggggcctcttggagcagggagctgggggagggaga

SEQ ID NO: 433808 - DNA, 594 bp, Homo sapiens
actaatatttgtacactaattttttatccttaaattttactgaaattgttagtcagttctacgagccctctgacagagtctatgaggttttctaggtatagaawcatattgtctgtgaagagagttagttttacttcctgtcttcttatttggatgctttttatttctttctcttgcctgattgctctggctaggactttcaatactatattgattaagagtggtgtgagtgggaatccttgtcttgttctagttctcaagagtaatggttccagcttttgcctgttcagtataatgttggccacggattttcatatatggctttaatattttaagaagccactatgttaaactaaattcatgcactaggccttaacaaaccagaccaaaccaaaaagagtcactcatactaactacaacataatcaaactaaaagttaaaagaaaaaaatatcaaaacagaacaagttttttttttctctctctcttaaaaatactggagggaaggtggaacaatatgacaacatagaaggctccaataatcatcccccctgacaggacaccaatttaacaactatctgttagaaaaaaaaac

SEQ ID NO: 433809 - DNA, 609 bp, Homo sapiens
tcaggacgagaggggagcccacttccctaatagtgagttataggccaggcagcattaaatacaagctgcctgaggcccttaagccttaatggaccatcagtggtagtcttgtagaacttcccaggggtctgtcatggtggtggccatggagtgagactcttctgcctttggaaagggtaggaagagtgggaaggactgcatcttgtagtttgagtgccatctcagccacagtaccacaaaacaccaggtatacttctaaagattttgactctagtccctggstcctgacaggacttttggactcacctatggcctagaggacctcaccatcctggagggaaggacacaagctcggctggcgttgccacctgctgagtgcagagccttagggttttgagcaaacatatggtattgtttattcaagactgttttttttctaacagatagttgttaaacaaagcatagttacagaagcccatgggtgggatcaggtgctgtgttggcttcaggtttgaaccagtgcagtcatagtggtggaggccacagggttgcttgtgtcacccacctgcagcttcagatggctcaaaagagagagactttgtttgtttg

SEQ ID NO: 433810 - DNA, 609 bp, Homo sapiens
tcaggacgagaggggagcccacttccctaatagtgagttataggccaggcagcattaaatacaagctgcctgaggcccttaagccttaatggaccatcagtggtagtcttgtagaacttcccaggggtctgtcatggtggtggccatggagtgagactcttctgcctttggaaagggtaggaagagtgggaaggactgcatcttgtagtttgagtgccatctcagccacagtaccacaaaacaccaggtatacttctaaagattttgactctagtccctggctcctgacaggacttttggactcacctatggcctagaggacctcaccatcctggagggaaggacacaagcycggctggcgttgccacctgctgagtgcagagccttagggttttgagcaaacatatggtattgtttattcaagactgttttttttctaacagatagttgttaaacaaagcatagttacagaagcccatgggtgggatcaggtgctgtgttggcttcaggtttgaaccagtgcagtcatagtggtggaggccacagggttgcttgtgtcacccacctgcagcttcagatggctcaaaagagagagactttgtttgtttg

SEQ ID NO: 433811 - DNA, 490 bp, Homo sapiens
tccaagaaaacataacctcaccagatacactaaataaggcaccagagaccaatcctaaagaaacagaaatatgtaacctttaagacagagaattcaaaatagctctgtttaggaagctcaaagaaattcaagataacacagaaaaagaattcagaattctatcagataaagctaayaaaaagattgaaataattttttaaaaatcaagaagacatcttggagtttaacaatccaattggcatgctgaaaaatgcatcaaagtcttttaataacagaactgatcaaactaaagaagaattagtgagcttaaagatacgctatttaaaaatacacagtcagaggagacaaaaataaaaataaaaagcaatgaagcactgctataagatctaaaaaacaaccccaaaatggaaagtctaagagttactggccttaaagaggaggtagagaaagagataggatagaaagtttattcaaaggaataaaaacagag

SEQ ID NO: 433812 - DNA, 582 bp, Homo sapiens
ggggaatcacatatgaccaggaggtgaattattattgtcatttcctttgtgaaatgtgtcacttgtcatctcttgatttacccaaggcagggagagagaaagagaaaaagggagttgatcagacacttcccattaagataagtattaataaatttcttctgatcaccatggcccagatacctatggagggatctggaaaggtccagtgttcaggaacaaccctatcatttakgcagtgttaggccaattgaatacttccaatcaaaagaacctattctgtttcctttgagtcttttaaaagggcaaatgtcttgaaaacgtttattcttagagttttgggggttttgttgttggttgttgttgttgcttctatcttggctgcatttttcataggtcatctaacctctcttttcctagcatctttgagcatttggataaattaagctgtcttgcatttcccacctccacccttgctcatggccgcattcgcctctcaaaattcccctgagccttctgaggactttttttttaacttttattttagatacagggagtacatgtgcaggtttgttacatgggtat

SEQ ID NO: 433813 - DNA, 573 bp, Homo sapiens
acatgtgcaggtttgttacatgggtatactgcaattaagtagtgagcatagtactcagtaggtcgtttttcaacccacgctcctctccctccttccccactctagtacactgtgtctactgttcccatgtttatgtcaatggatgctctatgtttagctcccacttataagtgagaaagtgcggtattaggtttttctattcctgtattaatttgcttaggattatgactgagaccaactcttatccttcacgctgttaagtagctctgatcttcaagattagccagaaggaatctgtacactctgcaagtgtttcagtggcactttgtttatactgctyatggggcatttgagttcattgccttaaattgcaggtaatttgttataaatttgcctcctctagaaagtcacaggttttgtaagggaaagaactgggtcttgtctgttgacctatcctataggatatttccgtattggcagcagctcatatttccatgtattttgtgcatcacttgagcagaatttgtcccactgaaataatacctacatgtctttttaaatcaaattagtaat

SEQ ID NO: 433814 - DNA, 592 bp, Homo sapiens
tgtttggaagagaaaaataacagtcattaacacatgattagccatatgaaagcatatatttagacatgatctaagttggaaacacaaaggaaaaagattatccaaatcttgatcttgtgtttacagtaacacaaaagcagagcatgaattcaaacacttaatgttcatccctcttatggatgattgttccaktatttccctacaggttacagctgctcctggacatagtttttttttccaaattcagacctccaataactctaggtggcatttagctaaaacagctttcctaccctcttacctttctccctttttgtgcttaacactatgagggccagcacagcctcttcacattctattttctttcatttcttactttcattttactcaaaagaaagagatctaagaactgacccaggaaataataatcatttttatctagagcaagcatagtattaatggctctgaattgtcatttattaatcatttttctttgttttctagtgataacatactgtcaactcagcagtagataggtattagcatatgtggtggtcaatacaagtgatacagagtatggagaatagcagat

SEQ ID NO: 433815 - DNA, 571 bp, Homo sapiens
ttttttgactgtgttgatatctaattctgaatgaaggtagaaggtgttgcataattctgtctgcctagcatgggagggatgaaccctttctggaagaagatgaacctcatctgacattctgcattttttcatacatcataactggcacttaaccaaaatttatgagtcactccaaagacagaactaagtgagcacaaaaagaatagagaagggagaaaagattataaaaacaaccacaatacagaacattatcttccttattttaygaagccaacatttcctcaatatcagaaatctgacaagaaaattttgaggaagaaaaattgcaaaccaatgtctcttgtaaatataagttcaaacatcctgaaaatcatagcaaataaaacccagctgtgtatgtctctgtgtgcacatttgtgtgtattttaactaatatatatattatatctatagacaggacaaaatatatggccatatcgattgatgcagagactccatttgatcaaattgtatacacattcaagaccaaaaaaagtcatcaaaagtagaaggcaaccttctctaatctgat

SEQ ID NO: 433816 - DNA, 571 bp, Homo sapiens
ttttttgactgtgttgatatctaattctgaatgaaggtagaaggtgttgcataattctgtctgcctagcatgggagggatgaaccctttctggaagaagatgaacctcatctgacattctgcattttttcatacatcataactggcacttaaccaaaatttatgagtcactccaaagacagaactaagtgagcacaaaaagaatagagaagggagaaaagattataaaaacaaccacaatacagaacattatcttccttattttatgaagccaacatttcctcaatatcagaaatctgacaagaaaattttgaggaagaaaaattgcaaaccaatgtctcttgtaaatataagttcaaacaycctgaaaatcatagcaaataaaacccagctgtgtatgtctctgtgtgcacatttgtgtgtattttaactaatatatatattatatctatagacaggacaaaatatatggccatatcgattgatgcagagactccatttgatcaaattgtatacacattcaagaccaaaaaaagtcatcaaaagtagaaggcaaccttctctaatctgat

SEQ ID NO: 433817 - DNA, 562 bp, Homo sapiens
ttatgtggagcttatgtggaaattgaagccctgagttgagaatttgaagccctgagatcatccttttctatccccactttctccagagcagttaggagcagccagccagtcattatattcattatttttactaacatgtcttaaggtatcaaatatgtggcactcagaccttgccctttataaatatttaattatgagaktccaatggcagtatcttgcatatttctattgccacattatgccatgaccaatgatttcattatcactggaaataaagtcattagtgcctttaaatctaatcagataagagaaccaatttcagacagaccagaactaatttagaaaactcatccttaagattctgttcctttagaaccactctacatactaaaatctgtgttattgaggtttcttcagagaaacagaaccaatacgaaacacacacacacacacacacacacacacacacacacacacacggattggcttactgtttgtatgggctgacaagtccaaaatctatagggcaaccatggaggctggaaactcttcggcaaaaaca

SEQ ID NO: 433818 - DNA, 400 bp, Homo sapiens
tgagccacaatcatgccaatgcattccagcctgggtgacagagtaagactctgtctgagaaaaaaaaaagaatttagtcacactcaatattgcctgcagactcattatgaactcggaaatgtgcaaaagataacatggtaacatatccaagattatggagaaagagaacagattgacaagacaagatggggccagccattattatattccagatgtgaggtaatagtcaacttgatctagtraacaagcccaggaatgaataagaatatagaaattgaagagacactacagacatgaagacagagagtttggacattaaccacctatacaggatgaaggagagagtaagggcaatggagatgcttaggacaagggactgaatgaactgagttcttatatt

SEQ ID NO: 433819 - DNA, 518 bp, Homo sapiens
tttgcatatgaatatccagttttcccaacaccttttgctgaagagtgctttccccattgtatgttcttggcacctttgtcaaaaatcaattgattatagatgtgtgggcttatttcagggttctctaygcttttcctttaatcagtgtgtctatttttatgctaatgctatgcagttttgcttactatagctttgtaacatattttgcagttcagtggtgtgatgcctccagctttattctttttgattaatttgctttagttatttggggtcttttgtggttccatacaaattttaagattttttttctatttctgtgaagaatgagattaaaattttgatagggattgcactgaatctgtatattgctttgggtaatatggacatttttccactattagtttttccaatccatgaacatgggatatctttgcctttatttgtgtcatcttcaatttctttcatcaatgatttgtagttttcagtatatagatctttctcttccttgattaaattta

SEQ ID NO: 433820 - DNA, 518 bp, Homo sapiens
tttgcatatgaatatccagttttcccaacaccttttgctgaagagtgctttccccattgtatgttcttggcacctttgtcaaaaatcaattgattatagatgtgtgggcttatttcagggttctctacgcttttcctttaatcagtgtgtctatttttatgctaatgctatgcagttttgcttactatagctttgtaacatattttgcagttcagtggtgtgatgcctccagctttattctttttgrttaatttgctttagttatttggggtcttttgtggttccatacaaattttaagattttttttctatttctgtgaagaatgagattaaaattttgatagggattgcactgaatctgtatattgctttgggtaatatggacatttttccactattagtttttccaatccatgaacatgggatatctttgcctttatttgtgtcatcttcaatttctttcatcaatgatttgtagttttcagtatatagatctttctcttccttgattaaattta

SEQ ID NO: 433821 - DNA, 579 bp, Homo sapiens
aatagacaccatttcttagagcaggaaattccttttttttctttgaatattgaaataaggaaataaaaggactccatctgtcaatttaactttttctgtctgctctatttgtagtttaggtttgaaatgaaagtttcttattacttttattttaggcaaaccaatctatcttcttatttgtgttaatttgtgttagattttttcttgtataacatagatgacttttgcctgtttacatttgttccatcaacctgaattttcccataccctttctgtctttagtctccccctctgctggtactacacacagttactttaactactcrttatatagaagatgttttctggttcctattttctcccttcctctatcaatcaattgtctacaagcttttcagacagatgttattttgcactgatgacctgaattattaggtggttttaaatgtggcctctttaattttttttgttttctcttcaaaataacaggcatcttgggtcagaattgtgtaaagaaaggcagtgcggtaaatgcagtatttggaaaaccattattaaacaagctagggtggaatgatt

SEQ ID NO: 433822 - DNA, 460 bp, Homo sapiens
tcctatcaatttcacatctaggaaccatgattaattagccagtgccagagtgctacatgagtcagattattctgattgctgttttgcttctgctgtccattacagtaactacayccaccttgcctttgatgctcgagtgccacaacttagcccctgccacctcagaatccaattattcccattgtatttaacttttgtagttgagtgactgtgattctcactgttagatatgacatacagagaatagcaattacagggctcttcaaagaggcaggtgctgccctcacaaatctatttcacaaagcactggtcaagggtatattttctgcaccctcccagctgggatgagtatgtctaaagtaactaatccactccaccatcccaatctccctaagcctgtggatcccttcctttacattaaagcaaggaagatcaggcatgtccagcttgctcacaatgg

SEQ ID NO: 433823 - DNA, 460 bp, Homo sapiens
tcctatcaatttcacatctaggaaccatgattaattagccagtgccagagtgctacatgagtcagattattctgattgctgttttgcttctgctgtccattacagtaactacacccaccttgcctttgatgctcgagtgccacaacttagcccctgccacctcagaatccaattattcccattgtatttaacttttgtagttgagtgactgtgattctcactgttagatatgacatacagagaakagcaattacagggctcttcaaagaggcaggtgctgccctcacaaatctatttcacaaagcactggtcaagggtatattttctgcaccctcccagctgggatgagtatgtctaaagtaactaatccactccaccatcccaatctccctaagcctgtggatcccttcctttacattaaagcaaggaagatcaggcatgtccagcttgctcacaatgg

SEQ ID NO: 433824 - DNA, 475 bp, Homo sapiens
caaactttaaaaaagaagggaattctgtcatttgtgacaacatggatagaattggagaacatcatgctaactgaaataagtcaggcacagaaagataaatactgaatgaactcactcatatgtggaatctaaaatgattgaactcgtagagacagtagaatggtggttacagaggctgggggatgggaggaatggggagataatagtcaaaggatacaaaatctcagacgggaggaatatcttttttcattttttgagttctattgcacagcatagtgaatagttcataatagagtatcatacatttcaaaattgctaagagagtacatttcaagtgttyatcattaaaaatgctaaggatttgaggtgatgggtatgttaaccagcttcatttaattattctacattgttaataaactataatttcactttgtaccccataaatttatacaattgtaaattgtcaacttacagt

SEQ ID NO: 433825 - DNA, 588 bp, Homo sapiens
  misc_feature (1)...(588): n = A,T,C or G
agtgacttacataagcagtgagaaccaatcagccactcaacgggtcatattctacctgtaccctattgatcaggaaacagccaatgaactcttaagggttgctgaggcacagaagagcttttaaacattctccaaaacagagttttgagggaagcaatattattaatcaaaacaggaaaagccttatagagctaaaaaaggatagctctaataatttattcagcagcatttataatcttctactatgtgtcaggcactttgccnagcacaagggaaagatagattaaaatatataacatatacgttatgtgtatatatatgtataactayatatacataacatatatttacatatccctgccactaaaaatatataatctgcatgaaacataatactttatttcaaacatattaagcttagcatttaaggtaagagcttagaaagataatcaaaggtaatattcatcttttatattatattctattttactgttttaaaagcatttcagtagtaccttgatccagtttgttttctcaccatacacctccacggaaatccagacacatatttctgcaatttctattttg

SEQ ID NO: 433826 - DNA, 568 bp, Homo sapiens
tgtcctcccaccatgattctgggcttgcccctgtgactttctttagccatgggaaattagctgggatgcaagtagaggcttgaaaagtacttattcaatttcacttacttttgcgtctctgcctttgttatgagaagatcgtgtctgagctagctctttagtggcagaaggatgagaaaaccttctcagcagtctcctcaaccccattgagtctaaatcaactgaataccagctggccacagatgtgagtctaaccaaggccagctgagccaatcattcaagccctgcctagaccagctgaccacagccaactcacaaactcagaaataataagcattttaagccactgagctttgagggtggttttgtacctggcagtggctaactagtacattccataattactagggcattttgcttattttattcttgttccaacttcttrgtcaaaaaatgacttttattctgatttataaatatgtttttgagatcaagatagctgactgaatgcccttgtttacttcttctccctcccaatatcttcttttaaatgacaaaataaatataa

SEQ ID NO: 433827 - DNA, 523 bp, Homo sapiens
cctgcctcagcctcccgagtagctgggactacagtcgcccgccaccacgcttggctaattttttctatttttgagtagagacggggtttcaccatggtagccaggatggtctcgatcttctgaccttgtgatctgccygcctcggcctccgaaagtgctgggtttacaggcgtgagccaccgtacccggcctcttctccctttttaataattaattataattaaaggaagggtctagccgtttacaaatttacattatttgtctgttaatgagcaatttcataatgagcagtttcatgcagtgttacaccagtctgaagaaatatcctctgtactgcaaatttccggagccatatttcaactttaaggtattaaatccttttgtgtaagttcaaagtagttttatacacccttcatttttacctattgagatatgaaggcccttcctcttactttcagatattgttgtccatgttaaaattaaactaatttcccacaacatttgtatttgtctatagattgtc

SEQ ID NO: 433828 - DNA, 373 bp, Homo sapiens
cttgaatcctgacctcaggtgatccgcccacctcggcctcccaaagtgctggcattacaggcttgagccaccacacccagcctccattctgaatttttttttttttttttttttgagaaggagtyttgctcttgttgcccaggctgggattaagtgctgggattaccagcatgagccaccgcgcccggccattctgaatttttaatttttaatggtacatgttacaaatttacttatctattttgaaaagatacccattttcagctaagagttatttcttcataaagttttttgcaagtaaaaattgaaaatttttttttacttttgtttttagtgacagggtctcactatcacccaggcttgagtgcagtgg

SEQ ID NO: 433829 - DNA, 605 bp, Homo sapiens
atttatgattttagaattagaattctttataatacagaaatcacaaattatatgataggtttcatagattttaattacattaataggaaagactactataagacagatgacaccataaagagataagagacaaaccacaaataatatttgcaacatataacaggaagtgtttaggatatgcaagtaaataaaagttgataatgaaaacggataatataagagcaggctattaccaagagagaaagaaatgtctratgaacagacaaggatgattagaaatcagtaatacaaatgaaaatcagatttcatttcacagctgtcatgttgataaaaatttaggagactacatattgtcattgattcaaaatgtttctcaaggtaagctttttgtggtgtgttttcagctattaaacgaatcgtgattgggcctctttttaaaacgtttctgacaacatgattcaaattgatattatttattgctctttgacttgtttatcttaccttaaattcagcaaaagcgattttgactagcaaactgatgctttagattgtatgctcccaagagtctgattctagttgttgtattaagaatagtgtaccttttt

SEQ ID NO: 433830 - DNA, 615 bp, Homo sapiens
ttcatgtctgattctaaaggaaatcttgttgcctgtactttttctttctttcytttttttcccctttttttgagtctcgcactgtcgcccaggctggagtgcagtagtgcaatctcagctgactgcaatctctgtgtcccgggttcaagcgattctcctacctcagcctcctgagcagctggggttacaggtgcatgccaccatgcctggctaatttttatatttttagtagagactgggtttcaccatgttggtaaggctggtctccaactcctgaccttgtgatctgcccgccttggcctcccaaagtgctgggattgcaggcgtgagccaccacatctggctttttttttttttttttttataaacagtttcacttcgtcacctgggctgaagtacagtggtgtgatcttggctcactgcaacatctgccccccgggtttaagtgattctcattccttggcctcccgagtagctgggactagaagtgtgcgccaccacacctggctaattttcttatttttagtagaaacgtggtttcaccatgttggccaggctggtctcgaactcctcacctcaactgatcatctgcctcggactaagtgctgggattac

SEQ ID NO: 433831 - DNA, 615 bp, Homo sapiens
ttcatgtctgattctaaaggaaatcttgttgcctgtactttttctttctttcctttttttcccctttttttgagtctcgcactgtcgcccaggctggagtgcagtagtgcaatctcagctgactgcaatctctgtgtcccgggttcaagcgattctcctacctcagcctcctgagcagctggggttacaggtgcatgccaccatgcctggctaatttttatatttttagtagagactgggtttcaccatgttggtaaggctggtctccaactcctgaccttgtgatctgcccgccttggcctcccaaagtgctgggattrcaggcgtgagccaccacatctggctttttttttttttttttttataaacagtttcacttcgtcacctgggctgaagtacagtggtgtgatcttggctcactgcaacatctgccccccgggtttaagtgattctcattccttggcctcccgagtagctgggactagaagtgtgcgccaccacacctggctaattttcttatttttagtagaaacgtggtttcaccatgttggccaggctggtctcgaactcctcacctcaactgatcatctgcctcggactaagtgctgggattac

SEQ ID NO: 433832 - DNA, 568 bp, Homo sapiens
aaccagtccctggtgccaaaaagctcagggactgctgctctagaggatggaaaagggataagatagagctccarttcctgaagcactgcatgagggaaagtgaattcccatccaaaatactttcactggacagatatatgggggagaaatcacttctattatgttaagccactttacttcagggaattaggttataggaactagcattactctaacacatgaagcaccaagttttgatcccagtattaagttgcctcttggcacctaggctactacaagtatatactgtcagtcttgaaaatgatatggaatctcaagtatgttctatgtaacattatttctgcaaatgttttgagaaaaaagggaattctatatacaaataaatttgggcaacgttgtataaccacagtagtatattaacctgtctgagaaactgcagtttaattttgtttaatatggaattcccatagaacagatctactttataaaattccaaattagactttcaaacttttagactttcaagccagatttttttccagtgatggccacataacggtttcctgca

SEQ ID NO: 433833 - DNA, 568 bp, Homo sapiens
aaccagtccctggtgccaaaaagctcagggactgctgctctagaggatggaaaagggataagatagagctccaattcctgaagcactgcatgagggaaagtgaattcccatccaaaatactttcactggacagatatatgggggagaaatcacttctattatgttaagccactttacttcagggaattaggttataggaactagcattactctaayacatgaagcaccaagttttgatcccagtattaagttgcctcttggcacctaggctactacaagtatatactgtcagtcttgaaaatgatatggaatctcaagtatgttctatgtaacattatttctgcaaatgttttgagaaaaaagggaattctatatacaaataaatttgggcaacgttgtataaccacagtagtatattaacctgtctgagaaactgcagtttaattttgtttaatatggaattcccatagaacagatctactttataaaattccaaattagactttcaaacttttagactttcaagccagatttttttccagtgatggccacataacggtttcctgca

SEQ ID NO: 433834 - DNA, 568 bp, Homo sapiens
aaccagtccctggtgccaaaaagctcagggactgctgctctagaggatggaaaagggataagatagagctccaattcctgaagcactgcatgagggaaagtgaattcccatccaaaatactttcactggacagatatatgggggagaaatcacttctattatgttaagccactttacttcagggaattaggttataggaactagcattactctaacacatgaagcaccaagttttgatcccagyattaagttgcctcttggcacctaggctactacaagtatatactgtcagtcttgaaaatgatatggaatctcaagtatgttctatgtaacattatttctgcaaatgttttgagaaaaaagggaattctatatacaaataaatttgggcaacgttgtataaccacagtagtatattaacctgtctgagaaactgcagtttaattttgtttaatatggaattcccatagaacagatctactttataaaattccaaattagactttcaaacttttagactttcaagccagatttttttccagtgatggccacataacggtttcctgca

SEQ ID NO: 433835 - DNA, 568 bp, Homo sapiens
aaccagtccctggtgccaaaaagctcagggactgctgctctagaggatggaaaagggataagatagagctccaattcctgaagcactgcatgagggaaagtgaattcccatccaaaatactttcactggacagatatatgggggagaaatcacttctattatgttaagccactttacttcagggaattaggttataggaactagcattactctaacacatgaagcaccaagttttgatcccagtattaagttgcctcttggcacctaggctactacaagtatrtactgtcagtcttgaaaatgatatggaatctcaagtatgttctatgtaacattatttctgcaaatgttttgagaaaaaagggaattctatatacaaataaatttgggcaacgttgtataaccacagtagtatattaacctgtctgagaaactgcagtttaattttgtttaatatggaattcccatagaacagatctactttataaaattccaaattagactttcaaacttttagactttcaagccagatttttttccagtgatggccacataacggtttcctgca

SEQ ID NO: 433836 - DNA, 608 bp, Homo sapiens
tcctaactctatatttcctagtcaagacattgcaatgaagcattgaaatgctcacgcttcttccaagactcaataattgcttgatttttatttttctaaggtctgtccagtcctggattcttgactacaatgtttcacttagcattaggaacaaacygagggatttgcccattcctcaaagccaaacttcattaagcaagactggctaactctttctaacagggaaggtgctctgtctcctttgattaaccccaaattgggcagaatttgtgtttcaaacccagaaacttctgaaaataagagggatgggggaagaagctactaacaattacaccagaacaacaggcaggaaccaggctctcttggggcaaactggaacatttaaacacctccatctgaatcaacaaccagtcatcaactcttgtatcatttgtgacaccaaaggataagttctcctcactattctctaactaaatggaggatacaacgagtgttaaaatacatgatattcctatataaatgtaagggcaaatttattgtgattgcttcttataatttccttcatttcaagcacagtgaagaaaaaataggctatcgatcacaaaggc

SEQ ID NO: 433837 - DNA, 608 bp, Homo sapiens
tcctaactctatatttcctagtcaagacattgcaatgaagcattgaaatgctcacgcttcttccaagactcaataattgcttgatttttatttttctaaggtctgtccagtcctggattcttgactacaatgtttcacttagcattaggaacaaactgagggatttgcccattcctcaaagccaaacttcattaagcaagactggctaactctttctaacagggaaggtgctctgtctcctttgattaaccccaaattgggcagaatttgtgtttcaaacccagaaacttctgaaaataagagggatgggggaagaagctactaacaattacaccagaacaacaggcaggaaccaggctctcttggggcaaactggaacatttaaacacctccatctgaatcaacaaccagtcatcaactcttgtatcatttgtgacaccaaaggataagttctcctcactattctctaactaaatggaggatacaaygagtgttaaaatacatgatattcctatataaatgtaagggcaaatttattgtgattgcttcttataatttccttcatttcaagcacagtgaagaaaaaataggctatcgatcacaaaggc

SEQ ID NO: 433838 - DNA, 435 bp, Homo sapiens
attctgtttttaaacatttctccatgcaatcttgattattcttatggactatggaggaaacacttttgacccttatgataacctgtgaagtcagtaagcatcaggataaaattgggacctcttaacagactcctgtactccagctgaatctccrgtttgggcttacaatttcttctcctaatatgttggtgatacatgttttggtagagaatattattctcaaaaattgctccatgtggctaggcacagtagctcatacctgtaatcccagcacttcgggaggccaaggtgggaagatggcttcaacccaagagttcaagaccagcctggccaacatgtgacctcatctatgcagataatttaaaaattagtcagtcatggtggcatgcatctgtagtactagctacccaggaggctgtggtgggaggattgctt

SEQ ID NO: 433839 - DNA, 435 bp, Homo sapiens
attctgtttttaaacatttctccatgcaatcttgattattcttatggactatggaggaaacacttttgacccttatgataacctgtgaagtcagtaagcatcaggataaaattgggacctcttaacagactcctgtactccagctgaatctccggtttgggcttacaatttcttctcctaatatgttggtgatacatgttttggtrgagaatattattctcaaaaattgctccatgtggctaggcacagtagctcatacctgtaatcccagcacttcgggaggccaaggtgggaagatggcttcaacccaagagttcaagaccagcctggccaacatgtgacctcatctatgcagataatttaaaaattagtcagtcatggtggcatgcatctgtagtactagctacccaggaggctgtggtgggaggattgctt

SEQ ID NO: 433840 - DNA, 664 bp, Homo sapiens
attaagtggtcagtgaaatcaaacacaacatctgctctcctggttctggcaattcagtgatggagacttgagaatcaaataataaaatgatcccacaaataaatgtactattgcaactgttgttagaactatgaaaaaaagtataatgtgctaagagaaggaataaaactgggggctgtcataggcaagggagtcagggaaggctgctttccgaaatgaaatctgaattgagatctaaacctatcaccttttccttaatcccacctctccgtatgtgttctccatctctgtaaatggcttcacaatctatttgctaaaatgagaaatacagaactcagctytgacttctctctctccctcatctcccactcaatcatcagatcctgcctatctacaaaaattattttctttttgtccacttagataagccttttctctgccaccagccaacgtctttatctggaataactcaacagcctcctaattagttttcttctgcctcaggtcttgctcgccttccgaccttgccaatcacaattcatttcccacaatgcaacaaaaataatctatcaaaaatacaaatataatggagtcacaatcctatgttaattttttggacactcccattgcctttaggatgaaatataaaaccttaagatggctt

SEQ ID NO: 433841 - DNA, 588 bp, Homo sapiens
tgcaatgtttttataaactattgtgctgtttttttaaattggctctttatgtcttatcttttttgttcttggtcaggcttgccaggagtttgtcaatttttttagtctaagtttcaaagatacaactttcagctttgtttttcctattgtatctgttttgtatttctttaaacaggatttgcaactattcctacacttaataaatttctattattattattatttacttagtctctctgggtttaatttactactttttcctaaattcttgagatggatgcatagatagstggttttcagtgtttcttagttttgaatatatacatctaaggataaaactgttcctctgtacatggcctcagtcgcattccacacattttcatacttggtattttcattactatcagttcaaaaatttttgaccatcagttttcttctttgaacaaagggttatttaaatgtgtgttcaataattttccaacattttgaggttcttcaaatatcctttgttatctatttttagctgaattttactgtggtcatggaatatctgatcaaaatctgtgtaatttcaatctgtgtggatct

SEQ ID NO: 433842 - DNA, 588 bp, Homo sapiens
tgcaatgtttttataaactattgtgctgtttttttaaattggctctttatgtcttatcttttttgttcttggtcaggcttgccaggagtttgtcaatttttttagtctaagtttcaaagatacaactttcagctttgtttttcctattgtatctgttttgtatttctttaaacaggatttgcaactattcctacacttaataaatttctattattattattatttacttagtctctctgggtttaatttactactttttcctaaattcttgagatggatgcatagatagctggttttcagtgtttcttagttttgaatatatacatctaaggataaaactgttcctctgtacatggcctcagtcgcattccacacattttcatacttggtattttcattactatcagttcaaaaatttttgaccatcagttttcttctttgaacaaagggttatttaaatgtgtgttsaataattttccaacattttgaggttcttcaaatatcctttgttatctatttttagctgaattttactgtggtcatggaatatctgatcaaaatctgtgtaatttcaatctgtgtggatct

SEQ ID NO: 433843 - DNA, 588 bp, Homo sapiens
tgcaatgtttttataaactattgtgctgtttttttaaattggctctttatgtcttatcttttttgttcttggtcaggcttgccaggagtttgtcaatttttttagtctaagtttcaaagatacaactttcagctttgtttttcctattgtatctgttttgtatttctttaaacaggatttgcaactattcctacacttaataaatttctattattattattatttacttagtctctctgggtttaatttactactttttcctaaattcttgagatggatgcatagatagctggttttcagtgtttcttagttttgaatatatacatctaaggataaaactgttcctctgtacatggcctcagtcgcattccacacattttcatacttggtattttcattactatcagttcaaaaatttttgaccatcagttttcttctttgaacaaagggttatttaaatgtgtgttcaataattttccaacattttgaggttcttcaaatatcctttgttatctatttttagctgaattttactgtggtcatggaatatctgaycaaaatctgtgtaatttcaatctgtgtggatct

SEQ ID NO: 433844 - DNA, 485 bp, Homo sapiens
aaaattatcttactatttatatttatatccctaagcaatatattgtttggtttgcttgtcttgaactttataaaaatacatactttttctagtcttctgagacttgcctttttccctcaatattgtggttctgagatttatccatgttattgtgaatagctctaattcatttattcttctatacatatattctattatctattttgttttcaatgggcatttgtttgagttttatctttttttgaattacaaacaagttgctgtggatattcttgtgcgtgtctcatattggcaatagtcaacagattctctaaggtatacaaataggaatgagatgtttgtgtaagagaatgtgtacattttctacttttctagataatgcctggttgttttatatagttgrtatatcaatgtgcacactcacaaacaattgcttatgggttccctttgattcgtgtattcactaatattgatactgccaaact

SEQ ID NO: 433845 - DNA, 376 bp, Homo sapiens
aagtaattcatatttatttaaataaataacttttggtattgattctaataggtaataattgatatatttcatgattcctttccttttttctattatgctttataaaytatgcttactttttggctctgtagttatttgcaaattagaatatttaaagataatttatattagataacattttaaatattctaaaattgttttttccttccttagcacttctaatcttagattggttttcctttattggcgatttcatttttctaattgttctagtcataaatctttgagtcatctttggctcatatccttctttcacacacaacatataatctgtaatgagttcccattggctctaactttatatttagcacaaaat

SEQ ID NO: 433846 - DNA, 585 bp, Homo sapiens
aattccaacggactcatgtttgtggtcaatggacacaattgcagtaaccagttgacaataaccggagggaactccaagtgttttggtgtcacctgtgtgtcttgtataagtgcacacacacayatacacacacacacacatatatacacaaagatgtatatacatatacatacatacatatactacatatacctcccaggtgattctaatgatgatcctcataacagtttttgaggctgatgttgtttcctttgttcagcagtaaagtttgttgccaaactttaggatgcattaaaattacctggagtgcttgtaaaaacacagagtgatgggcccaacttcacggtggataattcaagggatctggagtagtgcctcagaatttgcatttttaaaaagttcccaagtgatgctgatgtgttaggttggagaccacactttgagaactacacgtatgaaggatgaaagaggttcaaggatttgaagcaacataatgacttttccaaattcacaaagctaaaaaagacgagacttgaaactggtgttctgattttaaacacattgattttaaaagtatactagtgt

SEQ ID NO: 433847 - DNA, 605 bp, Homo sapiens
gaaaaataaatagactatgcatccccagctcttacattattaggacacaattcgtatttcttcagggtttttttttgaaaaatttttaaaagaaggagagtatgaagattaatcaaaattattatctattgagtaggctgcaatcagggaattatccaagstgtacttaggaagagtccaagctttctcacattcagtggtctcaaattagcagcagcagcagcatcacctggaaacttgttagaaacacaatttcctgggtctcactccagagctcctgatttaaaaattctgcaggtagagctcaggaatctatgttttcacaagtcctctaggtaatactaaatgtattttagaatccagtaatttatttctgggcagaataaaggacatggaaagcctcattcaaaaccattttttctcacaaaagtatgtaaaaatatgttggaaatgcaaatagtatggctgattgtagagggaaattaatacaattttgctagttcaggtctgattcttctattttgttccacatgatcgaggtgattctactcatctcttaacaggactaaagatagtatgttgccatattaattagagtttgactg

SEQ ID NO: 433848 - DNA, 605 bp, Homo sapiens
gaaaaataaatagactatgcatccccagctcttacattattaggacacaattcgtatttcttcagggtttttttttgaaaaatttttaaaagaaggagagtatgaagattaatcaaaattattatctattgagtaggctgcaatcagggaattatccaaggtgtacttaggaagagtccaagctttctcacattcagtggtctcaaattagcagcagcagcagcatcacctggaaacttgttagaaacacaatttcctgggtctcactccagagctcctgatttaaaaattctgcaggtagagctcaggaatctatgttttcacaagtcctctaggtaatactaaatgtattttagaatccagtaatttatttctgggcagaataaaggacatggaaagcctcattcaaaaccattttttctcacaaaagtatgtaaaaatatgttggaaatgcaaatagtatggctgatwgtagagggaaattaatacaattttgctagttcaggtctgattcttctattttgttccacatgatcgaggtgattctactcatctcttaacaggactaaagatagtatgttgccatattaattagagtttgactg

SEQ ID NO: 433849 - DNA, 590 bp, Homo sapiens
ccagtttaaaataagcatctcactttagaaagaagtttccctaaatagtccatgatagcagatttacaaaaaagtagactataaacaatatgagagtgttctaaaaggatttcaagaactgaaagtgtaagtgagcaggacatgtggtatataagataggaaatactttcattcattttcttttggatcattttacccatttgatggctatttttttttttacttgggcagaccaaatggcgttatggggtttgggatttgaagagggaagatsatttacagataaccaacaattctctgattacttgtagttctattaaaaatttccaatatcctatcatatagttcagcataagaataaaacccttcttagttcacttaaagctttttcctctccctatctcaggcctgttgcaggctataaagttgtcatgaaaaaggtaagcatggtagattcctgtccatcttcccatctaacatttctactgctctgtctctgtgcattgggctaattgaggcttctccaggatttcaaataagggaaaggaggagacacaggaggcaaggaatggtctccattaacgcgaaac

SEQ ID NO: 433850 - DNA, 613 bp, Homo sapiens
ctaggcattggctttgagcgtcaccttaacccagtgtgaccttaatttaacttgattacatctgcaaagaccatgttttcaaataaagttacgttcacagggatgggggtaagggcttatacataattttgggggcatacaattcaacccactacagagaagatagacaaaaaatatgtcaaataattcaatggagctgcaaatcgaagtaacttcttgttrtgagatggacttgaacattttggttaataacctaataaattaaaaatctaaacatcatttcatagataatttgtaatcatattatcagtagtgtttttgttggtatccattcctagacacagatggctcaatctggaagaaatgataataaaagccaaattattatttttaatgagactcgagcttcaaatacaaaacatttgggctcaagggattattatgtttataattatagttaaaatcttcttggcttttttttttttttaaccagtacaataatttttttcaaggatgtcttcagaaaaatgatactactctgagggtaaatagcaaacatttccaatttgctctagaacatcagttccaacagaataatttttgagaatagtta

SEQ ID NO: 433851 - DNA, 613 bp, Homo sapiens
ctaggcattggctttgagcgtcaccttaacccagtgtgaccttaatttaacttgattacatctgcaaagaccatgttttcaaataaagttacgttcacagggatgggggtaagggcttatacataattttgggggcatacaattcaacccactacagagaagatagacaaaaaatatgtcaaataattcaatggagctgcaaatcgaagtaacttcttgttatgagatggacttgaacattttggttaataacctaataaattaaaaatctaaacatcatttcatagataatttgtaatcatattatcagtagtgtttttgttggtatccattcctagacacagatggctcaatctggaagaaatgataataaaagccaaattattatttttaatgagactcragcttcaaatacaaaacatttgggctcaagggattattatgtttataattatagttaaaatcttcttggcttttttttttttttaaccagtacaataatttttttcaaggatgtcttcagaaaaatgatactactctgagggtaaatagcaaacatttccaatttgctctagaacatcagttccaacagaataatttttgagaatagtta

SEQ ID NO: 433852 - DNA, 523 bp, Homo sapiens
tgaggacaacgtaaattgacatcctattgcagtttttatggaatcaaactgagttcactgaatacaaatatcaaaataacatgaatcatatcttatattatcctgcttaagctgacaaaggggattcatagacacagctgccattccttcaggcatttattcagctctctttttacaaatataagtacctactctcatcatttttatcatttatctctgaaagctgaaactggttggaccrtattttcctgcaactagagtataaacaggattttctaatagaacttggaaatatgcactcattgtaagttttattatttctccggtttcttcctgtagagtgaattggtttaggaacctctaggttacaagaatcacggcttatacgtctttgtttatatatttagaactttagttatagaaggcattctgaatgtatattgttgataatgatgaataaaacaactgattcccttaataaatgactaagaccatttcttattttttagccttttatgttttg

SEQ ID NO: 433853 - DNA, 465 bp, Homo sapiens
tgaactaggctggtccacttttaagtagattttattccacctctgccatatctctgagagagcaagaccaatccctcttcttccttctcatcctcagcctactcaacgcgaagacaatgaggatacttttatgataattcacttccacttgataaataataaatatgttttctcttccttacaattttcttaacactttcttttctctagcttactttactataagaatatattatatactacatacacaaaatgtgtgttaattgactgtttatgttattggtaagtcaacagtaagctatcagtagttaagtttttgggaagtcaaaattatacgcgagtttttactacactgggagtggtggggctcggtgccccccrgccctttcattgttcaagggccaactgttagtgtctaatgaaatattgaaaactacttgttacaataatgaattcatacataga

SEQ ID NO: 433854 - DNA, 572 bp, Homo sapiens
caggacactagagaaaggtttgggaaaagaagcagcaatgagaatttgagccaggtgaaaaaaaagtgcagaagaatatggaagaagttaggtaacttatggatgaccaagaatratttgacatgaggggtccaaaaagaattaatcttcacaatcttctggtatttgagacagtgcagaaaatagttcgagtttggagaaaggagggaagacttttctctctcataggacagctgctttctgatgggatttagtttttgaagaattctaatttatgtgagcagataggccatggaattatctgcttttccattttcttaagctatcttgggcatatcaggagtcttcggcaatataggtctgtctttcttgctaggttatgcctacttcagttgggttcttgcattttgctgcatgctggaaatagcatagttgcttttcagaaagtttgttctgtttattttgatcccagtagaaatatcattgaatttgtaagtggtcaaaattgatcttcctgcctctgacctttgtatctataatcacaggggccttgtaattagtagctgctttat

SEQ ID NO: 433855 - DNA, 550 bp, Homo sapiens
attctttatttgcttaattttttcagttgtgaccattttgtgctttcttcagcayttattctttatgcaaattccagttatttattactgtgaatttgttttctttgttcaatgtctttctgaagttttcatttcacatctcttctcctattcattatttccatactgagttcctgcattcaagttgtgtcatctccatttattaataattgcttattttttaatggaagaatgtagtcataaatttaatctgcgttgtagtacattttttctcttccatgtttctccattgtagataattttgctacttttaaaatagttttcttgtatagtatctttgtacaaaatctgtaacatgttatgatttctatagatttccctttcatagctttttgaaggaggttcctttggggacaagggggatagatttgtactctttaagcttcccttctccccttacccagatgacacagagacagacttattcctgcatatatggttgtattttgtgtgtgtgtgtctgtatgtgtgtgaagctccatctcttgtt

SEQ ID NO: 433856 - DNA, 550 bp, Homo sapiens
attctttatttgcttaattttttcagttgtgaccattttgtgctttcttcagcatttattctttatgcaaattccagttatttattactgtgaatttgttttctttgttcaatgtctttctgaagttttcatttcacatctcttctcctattcattatttccatactgagytcctgcattcaagttgtgtcatctccatttattaataattgcttattttttaatggaagaatgtagtcataaatttaatctgcgttgtagtacattttttctcttccatgtttctccattgtagataattttgctacttttaaaatagttttcttgtatagtatctttgtacaaaatctgtaacatgttatgatttctatagatttccctttcatagctttttgaaggaggttcctttggggacaagggggatagatttgtactctttaagcttcccttctccccttacccagatgacacagagacagacttattcctgcatatatggttgtattttgtgtgtgtgtgtctgtatgtgtgtgaagctccatctcttgtt

SEQ ID NO: 433857 - DNA, 573 bp, Homo sapiens
atcttcttttatttcacagtactatttttgaagtataagttgtaattttttttatcttctgtgcatttggttatatttgagaactccaagaatatctatgttgagttggttttacatatcttttacatagctttttttctatttcttttaattattctttatttgcttaattttttcagttgtgaccattttgtgctttcttcagcatttattctttatgcaaattccagttatttattactgtgaatttgttttctttgttcaatgtctttctgaagttttcatttcacatctcttctcctattcattatttccatactgagttcctgcattcaagttgtgtcatctccatttattaataattgcttattttttaatggaagaatgtagtcatawatttaatctgcgttgtagtacattttttctcttccatgtttctccattgtagataattttgctacttttaaaatagttttcttgtatagtatctttgtacaaaatctgtaacatgttatgatttctatagatttccctttcatagctttttgaaggaggttcctttggggacaaggg

SEQ ID NO: 433858 - DNA, 587 bp, Homo sapiens
aagttcatagcattaaatgcctacatcaaaaagtctgaaagagcaaaagtagacaatctaaggtcacacctcaaggacctagagatacaagaacaaatcaaactcaaaacccagcagaagaaaagaaataacaaagatcagagcagaactaaatgaaattgaaacaaaaaataaaaaagataaatgaaacaaaaaactggttcttagaaaagataaataaaattgatagactgttagtgagattaaccaagaaaggaagagagaagatccaaataagttcaattagaaatgaaacaggagatattacaactgataccacagaaataacaaaaggtcgttcaatgttactatgaacacctttatgcacaaaaacctagaaaacatagaggagatggataaatttctggaaagatacaactctcctaaattaaaccaggaagaaatagcaactctgaacagacgagtaacaacaaagaattgttaccaatcctaytgacactatttcaagagagagaaatagggaatcctctgtaaatcattccatgaagctggtatcaccctaataccaaagccaagaaaggacataa

SEQ ID NO: 433859 - DNA, 514 bp, Homo sapiens
gcgaaacaactctggagacatcgcattacatgacttcataccgcaaggccatagtcactaaaacagcacagtactggtataaaaataggcatatagacmaaaggaacagaatatagaacccggaaataaaatcaaatacttacagtcaacttgatcttcaacaatgcaaagaaaaacataaagtggggaaaggacactctattcaacaaatggtgctgggataattggctagccacatgtagaagaatgaaactggatcctcatctctcaccctatatgaaaatcaactcaggatggatcaaagacttaaatataacacctgaaaccataaaaattctagaccataacattggaaaaacccttctggacactggcttaggctaagacttcatgataacccaaaaacaaatacaacaaaaacaaagataaatagatgggacttaattaaacaaaagcttctgcacagcaaaagaaacaatcagcagagtaagcagacaacccatagagtgggaga

SEQ ID NO: 433860 - DNA, 636 bp, Homo sapiens
ttatccatttctggtttattttattcctttttccatctgcgctcttttctcggatttttttatgacagaagaacgttctttaggagctctaatagtatagctatctggtggcaaattatttcgktttttatttgtctgaaagtttcttgaattgctctcatatttgaaagatattttcattgagtatggaattcaagatgaacattttttttttcacagcattttaaaattttaattctcttttagcttttattcttgccatcttgaacatgatatgctttcttcctggctactcttaaatttctttatttttgtatttcagatgtagtgtttccatgagtctatttttgttggttggttgttttatcctatgtgggggaaggggtcactgagcttcttgaatatatgggttgattactttctttaattttggaaaactggaaaaaccatagccatgatcttaatattttttttcttccctatgctctgttttttctctgaatctggggctccaatgtaaacatatgttgaatacagaaacacatacacaaacacaaatacttggctcttttctggtttttattctgtacttccagttaaataatttctcttagcttctctttgggtgtattcacc

SEQ ID NO: 433861 - DNA, 510 bp, Homo sapiens
actgaacatcatagcttagcctaacttaccttaaatgtactcaaaacatttgcattaaccaaaaattgggcaagttcatccaacacaaagcatattttatagtaaagtgttgaaaatctcatgcaatttactgaatactatactgaatgtgaaaaacacattcagtatgtgtgtatggttgtatgagtactcttctactgaatgtgtatcactttcaacaccattgtaaagttgaaaaattttaagttgaactgttgcaagtaagggaccatctgtgtttttaaaatgacctaagttagtaaaactctgacaattaaattaattaatttactaaacttctacaaaacattttatgtactttttcaactttattttaggttcaaggaatacatgtgcaggtttgttacrtgggtaaattgtatgtcgctgaggttttatgcatgataatcttgtcaaccaagtaatgaggatagtatccagcaggaggtagtcttccttccttccttcctt

SEQ ID NO: 433862 - DNA, 587 bp, Homo sapiens
tactcactggagttcattactttctgaaactgtttcctgttgaacagctttaatggttagaaatttctttgttatactgatcccaggcatgcatcacggtgatttctaataattgacaaaattattccccagttttcttaatctcttctctacctgacctgrttcatagtaatatatttatattcctcaatatgcattctactatagcaatatttattttttcattctcattggagaattgtggataatgtattgacttcagaaaatatacatgtgtaatcagtatacaggtagactactgtgagggccaccttagagggctgtttttggaagctcaggatccaataaatctaacacccaagacccatgattagctcttcatgggtagttgaggtctttcaggggggtttatttttggttagttacctatcttaatctttttggttcatatctcttatggggagagaggtagggagggacatggaaaatatcctatcaaacctccatttataattgtgctcactatcttataaataagacaagtaaatttttctaaaacttcggaagttttcttgataattatatag

SEQ ID NO: 433863 - DNA, 587 bp, Homo sapiens
tactcactggagttcattactttctgaaactgtttcctgttgaacagctttaatggttagaaatttctttgttatactgatcccaggcatgcatcacggtgatttctaataattgacaaaattattccccagttttcttaatctcttctctacctgacctggttcatagtaatatatttatattcctcaatatgcattctactatagcaatatttattttttcattctcattggagaattgtggataatgtattgacttcagaaaatatacatgtgtaatcagtatacaggtagactactgtgagggccaccttagagggctgtttttggaagctcaggatccaataaatctaacacccaagacccatgattagctcttcatgggtagttgaggtctttcaggggggtttatttttggttagttacctatcttaatctttttggttcatatctcttatggggagagaggtagggagggrcatggaaaatatcctatcaaacctccatttataattgtgctcactatcttataaataagacaagtaaatttttctaaaacttcggaagttttcttgataattatatag

SEQ ID NO: 433864 - DNA, 546 bp, Homo sapiens
tacaaaaaaaaaaaaaaaatctgttaaattagtcgaacmcggtggcatgtgcctgtggtgggaagctactacttgggaggctgagatgggaggatcacttgagctcaggaggtcaaggcttcagtgagccatgatcacaccactgctctccagcctgggcaacagagtgagaccctgtcttgaaaaatatgaataatttttaaaataaaaggttgagtaacaccatcctaaaatgtaggtgttctcatgaattccgtggtacaggctcagagaggcaagctaatttccccaaagtcacacagcaagtaatgtgaattcttgtgtagagaaagaattcaaacccacatctatctaaagccaaaagccacaccctaaatgacgtctgaatcatctgcagacattaagtcagcaacagtagtaagaatgtcctccagatctcgccctcaaaccagcaggaacggtggcttctgatagcttggtagaaatgcaaactcaggccctgccccagacctactgaatgtgaatccgcaaggcgccctcatgact

SEQ ID NO: 433865 - DNA, 650 bp, Homo sapiens
accttgcggtgctcaattagactttctttatttggaaataggaagccacaaaccatgcagattttgtaaggagaggagatgctctcggccgcgtgcacctggacgacctcgttgatcgttgctggactactctccaagccttgctgcagtttgcttctggcccccgatttgccattatgtgtccgcatgtgatttttaagaaaccaaggctccttgaatcttcttccgcacatgttacacccgtaagtgaaagaatctttgtgtgttctcatgtggatctcaacatcaaaagcgactctaaatgtctgcccrcatacctcacagctaaattcattttccttgcaattcttttccttgggaggttctgttcgcacttgacttttatcaagcggactgagatactctgcttcaacccgaagaactgctggttcacagagggtaggccggtgttgcattaagacatgtttattaaggtcttctgaatgtgtgaaggtctggctgcagaacatgcaatccaagggcatatacccctcgatttggatgacatttttttcttgtgtagctcggaatggaacaacagcggtccctttcattgacaaggcatcctccatctccatcggactgccaagagagctgccaatcacttctgg

SEQ ID NO: 433866 - DNA, 576 bp, Homo sapiens
gatgtgaggacgggtatagtggctcacacctatactcccaatgctttgggaagccgaagtgggtggatcacatgaggccaggagttggagaccagcctggccaacatggtgaaaccccttatctgctaaaaatacaaaaattagctgggcatggtaatacacacctgtaatcccarctatttgggaatcacttgaacccaggaggtggaggttgcagtgagccaagatcgcaccactggtccagcctgggcaacagagcaagtctcccctctccgcccaaaaaaataagaaatatgatggagtgttatttcccactcagggaaacagcataacttagttactgaaaatatttattaatagaaagatgttttggttccaattctcaattatctgggttaaagaagttaccatcactctccacacaagaccttgtaggattatttcactgcggtgaaggacaatgaaggaggttcagtgggaaacgatcttaggacagaggaagcttccactttgcctgggagggtgaacagcctgggagacctggagatgagggcaggcattctaggccaaggggtc

SEQ ID NO: 433867 - DNA, 583 bp, Homo sapiens
gtgtgtccttcaccaataaaagtcatatcttgtcctctacttcctccttctgtaggcaaataaagacaattctaaaggactagctttcctcatcacgccaaatcattaaaattccaaacaaacagattattaatcctattctaacaattaaaataaatgatgaatctgccttggaactactgacaactstattttaaataacttactgcctcttgaatttaaatataaccgattaaaaatggcagcaacatcagggttaagaaacaaaacgaaacactattagtctccagaaccctgaacaaaacaatatctaaaataaatatgacttcccagaaggaaaaaagttatctaccattaaggacacaccttaaaagttcttagcacacattaagtaagcacaaactagtggcttgcctgttatattttcagacaaaaagcaatgaggttattcctctgcacttgtcactgcagacacatcaaggcttttagaaactacatctattactcgttgtctaagtatcataaaacttagcattttaagtcttgtttgatatcaatcaagaaagaacatccacttcagggg

SEQ ID NO: 433868 - DNA, 608 bp, Homo sapiens
ttaaatataaccgattaaaaatggcagcaacatcagggttaagaaacaaaacgaaacactattagtctccagaaccctgaacaaaacaatatctaaaataaatatgacttcccagaaggaaaaaagttatctaccattaaggacacaccttaaaagttcttagcacacattaagtaagcacaaactagtggcttgcctgttatattttcagacaaaaagcaatgaggttattcctctgcacttgtcactgcagacacatcaaggcttttagaaactacatctattactcrttgtctaagtatcataaaacttagcattttaagtcttgtttgatatcaatcaagaaagaacatccacttcaggggaaagaagtacagtaaaataagaacattgtaaatctccttcttgacatatacaaaagagaaggtaaaaggcctcctaagacccctacctagtggccaggcctggacggcagctgttgctacctcgccttttcttttgttgagcttaatctcatgtcaagtcattcaaccaactcaaaagcaatgaagacataattgaatcaacctgaactaaatcagacctaggcttcttaaaacatacagctt

SEQ ID NO: 433869 - DNA, 632 bp, Homo sapiens
caattaaaatatggaaactccaaaagtaacaggagaacactggaagcatttggttttgtaataaaagctaggaactcatactgcacaaagtgaaaattgaaaatcgaacgttggtcttcctatgcttagctccacccacaagaaatccagcttcgccatcactccctgcgtaggccatctctaaaggagtcaggtgctactagatgccagcaaaaaaacaaagaatggaaccaaaagagaagctctgcacatggtacttggagaaggggcagaaaatccccacttcaccttctttcaatgcagcaaacatcagctacacctcatttttcacaatcatccaaacaggccctccttaagacatatttcctagtatgcgcttataaaatcacaccattatctctaatttaatcctagtgatataaggcctcttcgtttagccaacatctgattttctatccagatcctgccagtcacagcatgctcagatctagtaacataacaaaaaaaaaaaaagaaaaaaaaaaamaaaacttctgatttgctgtatttaacacttactggaatcctcttttgagactcagccttaattagaagaacagaatgaggtaggatcttcttatttcacaagacgt

SEQ ID NO: 433870 - DNA, 545 bp, Homo sapiens
cccatcatttccacctcctggacagctgcagttgagactcaactgtcctcaccccttctcctcctatttctgggaccccttgtggagaatataggacaccagcccacattatcatggacttgggtaaatgctgtgctaaatcttgggttagatttggagcttgatgctgtgaacagcagagggattggaatatgggggtcctagcttcctgctcacctactmtcagccatacaggtatgggggaaggtcagctctatagctacagatggtgaataagacatggctggggccgggtgcggtggctcatgcctgtaatcccaacactgtaggctgaggtgggtggatcacctgaggtcagtagtctgagaccagcctggccaacgtggtgaaaccccatctctactaaaaatacaaacattagctgggcacggtggcaggtgcctgtaatcccagctactgaggaggctgaggcagaagaatcacttgaacccaggaggtggaggttgcagtgaaccaagatcgcaccactgcactccagcctgggt

SEQ ID NO: 433871 - DNA, 436 bp, Homo sapiens
aattctcctgcctcagtctcctgagtagctgggatyacaggcgcctgctaccgcgcccggctaatttttttgtatttttaatagagatggggtttcaccatgttggccaggctggtcttgagctcctgacctcaggtgatacacccgccttggcctcccaaagtgctgggattacaggcatgagccactgtgcccagcctaaataattactttgaacaatctcattaaaaataagctttaaagtatatttaaagcttccttcttccttctcttcctccttccttcaaccttttgcagaggaaatcaccatcctgaagtgggagtgcatcccaccgatgcatttttgtgtgtgttttctccacagaaggatatatccacaagcaatacatactatttgcatgtttaaaaatgtacataaatgatgccatattattct

SEQ ID NO: 433872 - DNA, 501 bp, Homo sapiens
gggacagttgaagtcttgccacagtcctccatcccacactgagccatttagtttctcatccttcccaccaagaggcaatccttatattgaagtaggtatgtagtatttacatcagtgttttaataccttcattacaaaactaataccacattcttctttcatctctactatagagttatgtataaaattaaaataacatatagtattggtttgggtatttaaaraattgcaaacacagtatgctactgtacagtttctatgttttcacactatcactctctctcatcatgttttggagacctagccatgtaaatatacatagatgtcgtcaatccattttaaatgttctttattatgccactgtataaatatgccagaatgtatctattcccaattgattttcaaatatatcaaggtatatttgtttccaacattttccctattaaagtgttacaaagaactttcttacccatatctccatgtgcacctgtgtttggaact

SEQ ID NO: 433873 - DNA, 523 bp, Homo sapiens
ctggaatcaggagaccactagattgcctaaggaggggtgagccagcccaggtcaggaagggaacaggtcagaactcccacactggtcagcagatcagtagagggatctgtgtatagccactgccctcctccagcctgggcaaaataggaagactctgtctctatcataaaaaataaataaaagaccaaaggkgggtggtagaggaagtcctccatttggtctcttaggccaggatggggtagggctggagggaaagaccatctgagtctctgactgtacctgatgtggctcacagaggactttcctacctctttggttctttagggagttctgactcaggatttcttagcaatggccaattcttctacatacaaatctgtttctttcttttcctttccatgccccatctttggacatccagtcatgaaagggaggccagtagatttatcagtttatagataggaaaagaaaacatgtggctttggttataagtgcacttaagaagtcgtatttggccgggcgt

SEQ ID NO: 433874 - DNA, 523 bp, Homo sapiens
ctggaatcaggagaccactagattgcctaaggaggggtgagccagcccaggtcaggaagggaacaggtcagaactcccacactggtcagcagatcagtagagggatctgtgtatagccactgccctcctccagcctgggcaaaataggaagactctgtctctatcataaaaaataaataaaagaccaaaggtgggtggtagaggaagtcctccatttggtctcttaggccaggatggggtagggctggagggaaagaccatctgagtctctgactgtacctgatgtggctcacagaggactttcctacctctttggttctttagggagttctgactcaggatttcttagcaatggccaattcttctacatacaaatctgtttctttcttttcctttccatgccccatctttggacatccagtcatgaaagggaggccagtagatttatcagtttatagataggaaaagaaaacatgtggctttggktataagtgcacttaagaagtcgtatttggccgggcgt

SEQ ID NO: 433875 - DNA, 560 bp, Homo sapiens
ggcctcctctggaagcaggtgctcggcccctgcatcaaatcccagacctggccctgccatcctgccttcttctcctctccctggtagttttctcagaaaaatgagagggcttaggcctctgacagatgatttgcctgggaagcccagcaagtcagcaggcaaagacgcacacatctctgttgatgcagctttgataaatgacattcccctgtaaccccaagtctgcacgacaaaggtggcgccctcccctcctaacagcaccgcctaccattcgctgtgtgcgcttgacaggggtttaaaggatcatcrctctgctttctcatgaaaaagagtttttgttttttttttttactgcttattcaatgatcataatttgagacagcaaaatataaaatatcaagtcaccctattgaataaacacatttctaattaaaatggtggagagaggctatgctggctggaggaggggatcaaggatacgagacccatctgttattgtttggacctcactttgagggagtcataaaaggcaagctgtgcagacagaaactccacttggc

SEQ ID NO: 433876 - DNA, 560 bp, Homo sapiens
ggcctcctctggaagcaggtgctcggcccctgcatcaaatcccagacctggccctgccatcctgccttcttctcctctccctggtagttttctcagaaaaatgagagggcttaggcctctgacagatgatttgcctgggaagcccagcaagtcagcaggcaaagacgcacacatctctgttgatgcagctttgataaatgacattcccctgtaaccccaagtctgcacgacaaaggtggcgccctcccctcctaacagcaccgcctaccattcgctgtgtgcgcttgacaggggtttaaaggatcatcactctgctttctcatgaaaaagagtttttgtttttkttttttactgcttattcaatgatcataatttgagacagcaaaatataaaatatcaagtcaccctattgaataaacacatttctaattaaaatggtggagagaggctatgctggctggaggaggggatcaaggatacgagacccatctgttattgtttggacctcactttgagggagtcataaaaggcaagctgtgcagacagaaactccacttggc

SEQ ID NO: 433877 - DNA, 582 bp, Homo sapiens
tatactttaaagcaccaaaatgttactttgtagagctaattccatgtccaaagagtttttcaaagacttttttcttaggactagagttcaacattttgcccagggaaatcaatccccagacccaaaggactaagtttggcttaagatcgtaaatatctgagtttgcaggaggcattcaattcacaaactcaatgtcacttccaccagaagaatcccagcaatctggtcagtgtgccttgtggggaagtctgccatgacctttggggtgggccacaaaaaacttaagttcattcctttgggaagtctgggttttagaagtcattttgctcacaagaccaataatcccgagttcatttttccattaaaatgcagcatcttttgagcatttccaggcaatgtatgaaaagatgtacttgaagagatgcctgctctgstttgaaattttaaactgactacaaaatgttctcacttaagagtgttcttgggagatgttggtaaaagggtacaaagtttcagttgtgtaggatggataaattattttttaaaaaagaatgttttgagatccctaactcaaaattggag

SEQ ID NO: 433878 - DNA, 629 bp, Homo sapiens
ctcaccccatgtcagcagcttgctgtgttttaaacacaaagacagaggaaaacttactgaaataatttcaggatgggctgcagatcgactcaagtaaaaccagttcagttgttggaatgaaagagcatgtgaaaacccagagtaaaccagcaataattccctcactgtgctcagcacaccgaaaggccgccttctttttctgcattaacaactrctgcttgaccaaacttaagccaggctcccgaacccagaccagcaaagtccatctgtgcacttccttgcagaaggcagttttagcaagaaccctactaaggcagtttagccaaaacctcttgccctcaatacctaatcaggttcctcaaccctcaccatctcccaggtgatgtctggtcacctggcctgtcttcagcaataatcctgtgaggtcagtttagccagatacccctcactcctgaaggttcctcttcgtgattttccatccaccaaacccaccctgctccttagctatgaatccccacttgcccatgcggtattcagagtggagcccagttttacacagaggtctctttttctgtattgcagcaatgctgaataaactgtgtttaccccgttaactgctgtccggctct

SEQ ID NO: 433879 - DNA, 536 bp, Homo sapiens
atgaagaatattaggtaaatggtgaatgtaacattacggcatcatagctttcctaaatgaagactgtatgcctcttgctggagctgtaaggagcatccatcactattrggtgctggaaaattcctctcccaagggaattcatcagttctctacttcaccctggtcacattgctacgtctccggaccacctgggatcgagtgacatatggacgagctctaaagtcctctacaaattcatacaacgtgaagagtgagcctctgacagtcacagcagtggcatttcccaagcacccaacctaaagggaagtccaagctaattttaaaaaccctgctcttaaatgggatctaaatgaaaatctcactgctcctggcccttcttgctttggcggatacacatgggccagatgcttgggccaagtcctaacccaggtgattagaatctgactctttcgcttctggtcccacattcaaaagccctaacgaaagtacatctagattttgtactaaagggttgatttgattagttccaccctaaa

SEQ ID NO: 433880 - DNA, 471 bp, Homo sapiens
tcttctttcccttattagaggccaatgcgaacctacattaattaaacagaggaaagaggaaaagaaasaaagaaagagagaggagttttatgagccccccctctcctgccccatggcaactagaaatctatttcactaccagttttaaatgtcagaagatttttcctggatcttgacaatacaacatgtttttttgttatcgctatattatatcatatcacttcttcacctatgcccaagttctctctttataattattattgattttattattgactctcttggagttccacatacaagtgaagttctttggagtcaagagtattcttctatacacatagactatgaaatggctttgtttccaatatgtgtttccagtaaaaagcaagattaagtacactcttatttattgtgctctccccgtgctgaaaatccaagtccaccttaggtgttcttttgccagaatagcat

SEQ ID NO: 433881 - DNA, 471 bp, Homo sapiens
tcttctttcccttattagaggccaatgcgaacctacattaattaaacagaggaaagaggaaaagaaagaaagaaagagagaggagttttatgagccccccctctcctgccccatggcaactagaaatctatttcactaccagttttaaatgtcagaagatttttcctggatcttgacaatacaacatgtttttttgttatcgctatattatatcatatcacttcttcacctatgcccaagttctctctttataattattattgattttattattgactctcttggagttccacatacaagtgaagttctttggagtcaagagtattcttctatacacatagactatgaaayggctttgtttccaatatgtgtttccagtaaaaagcaagattaagtacactcttatttattgtgctctccccgtgctgaaaatccaagtccaccttaggtgttcttttgccagaatagcat

SEQ ID NO: 433882 - DNA, 471 bp, Homo sapiens
tcttctttcccttattagaggccaatgcgaacctacattaattaaacagaggaaagaggaaaagaaagaaagaaagagagaggagttttatgagccccccctctcctgccccatggcaactagaaatctatttcactaccagttttaaatgtcagaagatttttcctggatcttgacaatacaacatgtttttttgttatcgctatattatatcatatcacttcttcacctatgcccaagttctctctttataattattattgattttattattgactctcttggagttccacatacaagtgaagttctttggagtcaagagtattcttctatacacatagactatgaaatrgctttgtttccaatatgtgtttccagtaaaaagcaagattaagtacactcttatttattgtgctctccccgtgctgaaaatccaagtccaccttaggtgttcttttgccagaatagcat

SEQ ID NO: 433883 - DNA, 562 bp, Homo sapiens
aatgtggaatgatagacaacagagacttggaaatttcaggagggtgggaggaggggatgatgagaaattatgtaatgagtacaatgtacatttttcaggtgatgtatattctaaaacccttacttcaacactatgtactttatggaggtaataagattatatttgtatcccataaatttacataaataaaaaattgccttctgtacttactttagcccagttattgttaggttcaacattcagcactttactyaaattttctatagctttctggacctttttttgatatttatatatagtagtgtggcacagaagtgctaatatttaccaaaataaaagttatatttttaattaaaaattaattaaaaggttgtagaatctcaggatggaatgcagactgttacaaatttatctagctctattatgaaccatacaaaataacttcagtgagggacttaagggaaagggtgctagtcaaagtgatattgaaaatgagtgcagtctcttaagatgaaaggcaaaagaaacttgtacgaaggcatttaatttagttgataaagat

SEQ ID NO: 433884 - DNA, 514 bp, Homo sapiens
tggctgcttcctctttgccttctgctatgactgtaygttttctgaggcttccccatccttgcttcctgtacagcctgtggaactgtgaggcaattaaagctcttttctttataaattacctaggatcaggtagttctttataacaatgggataatggactaatatagatgtttacatatagaaatatttaaagatatgtgtctacatatgtgtaagaatatacacattgtttctttgctctctcatcttagagagctatgaaaaaattgatactcccttagctacaggcacagctagcacttaaatattgatttcatatatagaaagcagggcgtctttgaaagtggctgattctaagaatggggaagaaaatacacaagatgagcctgggacatcctctagtgccagaaattatgaaaatactaacaaaaatctatttgtgagatatgtcaaacaagcacaggggccaagtgaaaggtctttcaatttctagaataattttagcaacacaata

SEQ ID NO: 433885 - DNA, 514 bp, Homo sapiens
tggctgcttcctctttgccttctgctatgactgtatgttttctgaggcttccccatccttgcttcctgtacagcctgtgsaactgtgaggcaattaaagctcttttctttataaattacctaggatcaggtagttctttataacaatgggataatggactaatatagatgtttacatatagaaatatttaaagatatgtgtctacatatgtgtaagaatatacacattgtttctttgctctctcatcttagagagctatgaaaaaattgatactcccttagctacaggcacagctagcacttaaatattgatttcatatatagaaagcagggcgtctttgaaagtggctgattctaagaatggggaagaaaatacacaagatgagcctgggacatcctctagtgccagaaattatgaaaatactaacaaaaatctatttgtgagatatgtcaaacaagcacaggggccaagtgaaaggtctttcaatttctagaataattttagcaacacaata

SEQ ID NO: 433886 - DNA, 535 bp, Homo sapiens
gtgtgtgtgatggagtttcgctcttgctgcccaggctggagtgcaatggcatggtttcagctcactgcaacctccgcttccaaggttcaagcaattctccygcctcagcctcccaagtggctggaattacaggggccaaccaccacaccaggcatatctttgtatttttagtagaaactgctttcaccacgttggccaggctggtctcgaactcctgacctcaagtgatctaccccctcggcctcccaaagtgctgggattacaggtgtgagtcactgtacccagtttgtctttataaatcttatagaaatatttaacttttaaaatcaaccacatacaattaagactttgataaagtaattaagaagtaaagcaacggaaaaagcaatttttaaaaacatatatgaatgattgaaagccaggagtaaaattaagaattgtattaaaatatcagtattaaaattagctatataaatatttaattaatgcagctaaattgttaacaaacaaaatttccagaagaaaagtatgttaa

SEQ ID NO: 433887 - DNA, 535 bp, Homo sapiens
gtgtgtgtgatggagtttcgctcttgctgcccaggctggagtgcaatggcatggtttcagctcactgcaacctccgcttccaaggttcaagcaattctcccgcctcagcctcccaagtggctggaattacaggggccaaccaccacaccaggcatatctttgtatttttagtagaaactgctttcaccaygttggccaggctggtctcgaactcctgacctcaagtgatctaccccctcggcctcccaaagtgctgggattacaggtgtgagtcactgtacccagtttgtctttataaatcttatagaaatatttaacttttaaaatcaaccacatacaattaagactttgataaagtaattaagaagtaaagcaacggaaaaagcaatttttaaaaacatatatgaatgattgaaagccaggagtaaaattaagaattgtattaaaatatcagtattaaaattagctatataaatatttaattaatgcagctaaattgttaacaaacaaaatttccagaagaaaagtatgttaa

SEQ ID NO: 433888 - DNA, 535 bp, Homo sapiens
gtgtgtgtgatggagtttcgctcttgctgcccaggctggagtgcaatggcatggtttcagctcactgcaacctccgcttccaaggttcaagcaattctcccgcctcagcctcccaagtggctggaattacaggggccaaccaccacaccaggcatatctttgtatttttagtagaaactgctttcaccacgttggccaggctggtctcgaactcctgacctcaagtgatctaccccctcggcctcccaaagtgctgggattacaggtgtgagtcactgtacccagtttgtctttataaatcttatagaaatatttaacttttaaaatcaaccacayacaattaagactttgataaagtaattaagaagtaaagcaacggaaaaagcaatttttaaaaacatatatgaatgattgaaagccaggagtaaaattaagaattgtattaaaatatcagtattaaaattagctatataaatatttaattaatgcagctaaattgttaacaaacaaaatttccagaagaaaagtatgttaa

SEQ ID NO: 433889 - DNA, 535 bp, Homo sapiens
gtgtgtgtgatggagtttcgctcttgctgcccaggctggagtgcaatggcatggtttcagctcactgcaacctccgcttccaaggttcaagcaattctcccgcctcagcctcccaagtggctggaattacaggggccaaccaccacaccaggcatatctttgtatttttagtagaaactgctttcaccacgttggccaggctggtctcgaactcctgacctcaagtgatctaccccctcggcctcccaaagtgctgggattacaggtgtgagtcactgtacccagtttgtctttataaatcttatagaaatatttaacttttaaaatcaaccacatacaattaagactttgataaagtaattaagaagtaaagcaayggaaaaagcaatttttaaaaacatatatgaatgattgaaagccaggagtaaaattaagaattgtattaaaatatcagtattaaaattagctatataaatatttaattaatgcagctaaattgttaacaaacaaaatttccagaagaaaagtatgttaa

SEQ ID NO: 433890 - DNA, 585 bp, Homo sapiens
ctgctttgtaatattgctcctagcagccaagggggaaagaaatcttttcttgaagagcgatctgtgtccatagcaaaatgtttttttcttagctcttgtaaaatcgaaattgtttgcttttgaatttttttaaatgattcctttaagattcttcataccaagatatcacaaggtcaaggaattttataaagaagtatttctatttatgtcatttcctatatttatctatacataaatcagcactaaaacatgcctttgatactaacaacttgattggtttgtgaaccaaatctgtcatgcaaatacatacggctgtttttagataaattctaaaggtattaccaaatcatttaattttattgtgtatctcaatattctggttgatgtataagtttaaatagaacaaactatttgacattgaaatgttctttatcaaaggagaaggaatacaattttaaagccataacgagtgacacatagttctgaatgatttattrgctgtctgccagtctgaaatggctgccagtcaatgttacatgtgacatctttcagatagtgtgaactcttttatgcaagtacctttca

SEQ ID NO: 433891 - DNA, 292 bp, Homo sapiens
gcaagtacctttcactataaaattacagctgaagatgatgaagagaaaastgtggtgtttatcttaatgggctgaaagacctatttcaacagtgacagtaattcagaaaaatagtctgaagtctagtatttcaataatgttattttcatagattttaatctctaaagacaatgcttcagttttgtagaaaatgacttttctaatcatcctggatttcaaaattctttccattacttaatatttaaatcactggcagaacttggcatgaggactagagacctgtcaccaagca

SEQ ID NO: 433892 - DNA, 586 bp, Homo sapiens
taaaattggtaagtatatctttatataactatatccttacaacttgtctcaaccttcgtcagattaatcctagcaaaactgtaaaatgtctcagtaaaaatctaaatgaatttttcataacaagtgctggcaayagattttaaatatgttctgatcattatttgtctcttgttggcatggagaaaatcctttttttttttttttcagcctggggaatcccaaactatatctctagtaacaaggaaaccattttaccggaatttttattaactaacatggaaaagttttgtcaattaatcagacttcactgtccatatcactttcaaccttttcggaaggtagaaagatggaattctgaaactaaagttggtaaagttcacagagatcgtcaaacttgcatggtctaaggtatttcttctttctgtggttcataagttagtaacagctaaaccaagtgtctaggaatattagctctgattctagaaatctacacttatttaactaaatgctgtaaggactcaggaaatccattctttcaacaaaagttactgaagactttccccattagtatcctaaacaatgtctg

SEQ ID NO: 433893 - DNA, 586 bp, Homo sapiens
taaaattggtaagtatatctttatataactatatccttacaacttgtctcaaccttcgtcagattaatcctagcaaaactgtaaaatgtctcagtaaaaatctaaatgaatttttcataacaagtgctggcaacagattttaaatatgttctgatcattatttgtctcttgttggcatggagaaaatcctttttttttttttttcagcctggggaatcccaaactatatctctagtaacaaggaaaccattttaccggaatttttattaactaacrtggaaaagttttgtcaattaatcagacttcactgtccatatcactttcaaccttttcggaaggtagaaagatggaattctgaaactaaagttggtaaagttcacagagatcgtcaaacttgcatggtctaaggtatttcttctttctgtggttcataagttagtaacagctaaaccaagtgtctaggaatattagctctgattctagaaatctacacttatttaactaaatgctgtaaggactcaggaaatccattctttcaacaaaagttactgaagactttccccattagtatcctaaacaatgtctg

SEQ ID NO: 433894 - DNA, 586 bp, Homo sapiens
taaaattggtaagtatatctttatataactatatccttacaacttgtctcaaccttcgtcagattaatcctagcaaaactgtaaaatgtctcagtaaaaatctaaatgaatttttcataacaagtgctggcaacagattttaaatatgttctgatcattatttgtctcttgttggcatggagaaaatcctttttttttttttttcagcctggggaatcccaaactatatctctagtaacaaggaaaccattttaccggaatttttattaactaacatggmaaagttttgtcaattaatcagacttcactgtccatatcactttcaaccttttcggaaggtagaaagatggaattctgaaactaaagttggtaaagttcacagagatcgtcaaacttgcatggtctaaggtatttcttctttctgtggttcataagttagtaacagctaaaccaagtgtctaggaatattagctctgattctagaaatctacacttatttaactaaatgctgtaaggactcaggaaatccattctttcaacaaaagttactgaagactttccccattagtatcctaaacaatgtctg

SEQ ID NO: 433895 - DNA, 514 bp, Homo sapiens
tacttaattcatttctcacatttacatatcataaaaaattcttattacawattcaagctcctatcacatctacctcttcctctatgtgataaggtcttcattttatatccccaaaagtgattaatagcagaatggagctgaaagcaatcaataaactcaatcaaccttaatgactgctactggatttgtggtaccagaacctattgattattacagcaatcttgacataaactaacatattgatgtggtagtcagaataatggctcttcagagatgatggggtcctaatccagataatttataagtttgttagcttacctggcaggacagagtttgcaaatgcaattagagttaaggattttgaaatggagagactatcatagattttagatggccaaatgcaatcgtaagattctttacatgtagaagagggagatataaaaggagaatgtgaagacttgctccttcatttgtagctttgaaggtgaaggaaaggaactgttatgaactgaat

SEQ ID NO: 433896 - DNA, 514 bp, Homo sapiens
tacttaattcatttctcacatttacatatcataaaaaattcttattacatattcaagctcctatcacatctacctcttcctctatgtgataaggtcttcattttatatccccaaaagtgattaatagcagaatggagctgaaagcaatcaataaactcaatcaaccttaatgactgctactggatttgtggtaccagaacctattgattattacagcaatcttgacataaactaacatattgatgtggtagtcagaataatggctcttcagagatgatggggtcctaatccagataatttataartttgttagcttacctggcaggacagagtttgcaaatgcaattagagttaaggattttgaaatggagagactatcatagattttagatggccaaatgcaatcgtaagattctttacatgtagaagagggagatataaaaggagaatgtgaagacttgctccttcatttgtagctttgaaggtgaaggaaaggaactgttatgaactgaat

SEQ ID NO: 433897 - DNA, 514 bp, Homo sapiens
tacttaattcatttctcacatttacatatcataaaaaattcttattacatattcaagctcctatcacatctacctcttcctctatgtgataaggtcttcattttatatccccaaaagtgattaatagcagaatggagctgaaagcaatcaataaactcaatcaaccttaatgactgctactggatttgtggtaccagaacctattgattattacagcaatcttgacataaactaacatattgatgtggtagtcagaataatggctcttcagagatgatggggtcctaatccagataatttataagtttgttagcttacctggcaggacagagtttgcaaatgcaattaragttaaggattttgaaatggagagactatcatagattttagatggccaaatgcaatcgtaagattctttacatgtagaagagggagatataaaaggagaatgtgaagacttgctccttcatttgtagctttgaaggtgaaggaaaggaactgttatgaactgaat

SEQ ID NO: 433898 - DNA, 514 bp, Homo sapiens
tacttaattcatttctcacatttacatatcataaaaaattcttattacatattcaagctcctatcacatctacctcttcctctatgtgataaggtcttcattttatatccccaaaagtgattaatagcagaatggagctgaaagcaatcaataaactcaatcaaccttaatgactgctactggatttgtggtaccagaacctattgattattacagcaatcttgacataaactaacatattgatgtggtagtcagaataatggctcttcagagatgatggggtcctaatccagataatttataagtttgttagcttacctggcaggacagagtttgcaaatgcaattagagttaaggattttgaaatggagagactatcatagattttagatggccaaatgcaatcrtaagattctttacatgtagaagagggagatataaaaggagaatgtgaagacttgctccttcatttgtagctttgaaggtgaaggaaaggaactgttatgaactgaat

SEQ ID NO: 433899 - DNA, 479 bp, Homo sapiens
ctttcagtctgttgggaaggcatgattggttttgaaatgtgagaaggacatgatacttgggaggggccagaggagaaataatatggcttggccctctgtccccacccaaatctcatctcaaattgtaatcccctcatgtcaagasaggggcctgggtggaggtgactggatcatgggagcagatttccacatgctattctcatgacagtgagtgagttccaagagatctgatggtttaaaagtgtgtggcacttccctccttgtgctctctctctcctggtgccatgtcaagaagaaccttgtttcccctttgccttccaccatgattttctgagtttcctgagtcctcccattcatgcttcctgtaaagcctgaagaactatgaatcaattaaatctcttttcttcataaattactcagtctcaagtcattctttatatcattgtgaaaattcactactacggttagcaatcttaaag

SEQ ID NO: 433900 - DNA, 479 bp, Homo sapiens
ctttcagtctgttgggaaggcatgattggttttgaaatgtgagaaggacatgatacttgggaggggccagaggagaaataatatggcttggccctctgtccccacccaaatctcatctcaaattgtaatcccctcatgtcaagacaggggcctgggtggaggtgactggatcatgggagcagatttccacatgctattctcatgayagtgagtgagttccaagagatctgatggtttaaaagtgtgtggcacttccctccttgtgctctctctctcctggtgccatgtcaagaagaaccttgtttcccctttgccttccaccatgattttctgagtttcctgagtcctcccattcatgcttcctgtaaagcctgaagaactatgaatcaattaaatctcttttcttcataaattactcagtctcaagtcattctttatatcattgtgaaaattcactactacggttagcaatcttaaag

SEQ ID NO: 433901 - DNA, 479 bp, Homo sapiens
ctttcagtctgttgggaaggcatgattggttttgaaatgtgagaaggacatgatacttgggaggggccagaggagaaataatatggcttggccctctgtccccacccaaatctcatctcaaattgtaatcccctcatgtcaagacaggggcctgggtggaggtgactggatcatgggagcagatttccacatgctattctcatgacagtgagtgagttccaagagatctgatggtttaaaagtgtgtggcacttccctccttgtgctctctctctcctggtgccatgtcaagaagaaccttgtttcccctttgccttccaccatgattttctgagtttcctgagtcctcccattcatgcttcctgtaaagcctgaagaactatgaatcaattaaatctcttttcttcataaattactcagtctcaagtcattctttatatcattgtgaaaaytcactactacggttagcaatcttaaag

SEQ ID NO: 433902 - DNA, 479 bp, Homo sapiens
ctttcagtctgttgggaaggcatgattggttttgaaatgtgagaaggacatgatacttgggaggggccagaggagaaataatatggcttggccctctgtccccacccaaatctcatctcaaattgtaatcccctcatgtcaagacaggggcctgggtggaggtgactggatcatgggagcagatttccacatgctattctcatgacagtgagtgagttccaagagatctgatggtttaaaagtgtgtggcacttccctccttgtgctctctctctcctggtgccatgtcaagaagaaccttgtttcccctttgccttccaccatgattttctgagtttcctgagtcctcccattcatgcttcctgtaaagcctgaagaactatgaatcaattaaatctcttttcttcataaattactcagtctcaagtcattctttatatcattgtgaaaattsactactacggttagcaatcttaaag

SEQ ID NO: 433903 - DNA, 605 bp, Homo sapiens
cgtaagcctaaaatatcagatgacttttattattttcagaatgtagtcaaaatcaacataaagttacattaacacttggtttactgtattataatgctagctttgtgtcatatctatctagagagtacactgaatagcttaaaccaagtagaaggtgatttcttgcttacatatcagtttaccgttaagtaattttggctaaagacgcatctttcctgcaaaaaataattcaagttaatgaaggatctactattaccaaattgtatcttcccagattactttgtatatatcaccattccagaagacaaaagactactcatgaaatacaatttgcacacttctttatatatgaaaaattcacttctcttcactgtgtaaacaacttaaagttttgcccagttactgcctacaacttaagagttcaggatgtttcatgacgtgcagttctctcccttaggccactatatgacttaacgaggactagtgtcctataaagtcaaaasacaaattatctgtaaaatctaagttaccatggtgaagctcctatcagaagacaaagaagtctgcatagcactgacaaaaatatttctgagcaatacaaatat

SEQ ID NO: 433904 - DNA, 401 bp, Homo sapiens
accactttaaggtcatttgaaatcatagacttgaaagagaaaacaacttccctgatkagttctttgcttcagggctgggttccttgttttttatgaacacagtaggatttaatttctgagcagctttttcaacctaatcagaaaaacctgagcttttctgtcactggataattccaccattactagactttttgttcacaagtggtttccaacaaggaatgattttgtttccacagaacacttgtcagtgtctggagacattttgaattataatgattaggtggtgatgctactggtatgtggtggtatagcctagagatactattaatatcctacaatgcaaagaataacctcccacagaatgcaggaatatcaggcataaaatgtcaataatgctaagg

SEQ ID NO: 433905 - DNA, 582 bp, Homo sapiens
acatttatttatttattgcatctagtttataaccaaacatacagttctttcctaggtataattctaaagtctgcctcatttccttcttttttctcctccccaacacacatatgcttctctgactgtaaagatgaccactttaaggtcatttgaaatcatagacttgaaagagaaaacaacttccctgattagttctttgcttcagggctgggttccttgttttttatgaacacagtaggatttaatttctgagcagctttttcaacctaatcagaaaaacctgagcttttctgtcactggataattccaccattactagactttttgttyacaagtggtttccaacaaggaatgattttgtttccacagaacacttgtcagtgtctggagacattttgaattataatgattaggtggtgatgctactggtatgtggtggtatagcctagagatactattaatatcctacaatgcaaagaataacctcccacagaatgcaggaatatcaggcataaaatgtcaataatgctaaggtttagcaactcaactctatccactttctttccactctaaagacaggat

SEQ ID NO: 433906 - DNA, 401 bp, Homo sapiens
accactttaaggtcatttgaaatcatagacttgaaagagaaaacaacttccctgattagttctttgcttcagggctgggttccttgttttttatgaacacagtaggatttaatttctgagcagctttttcaacctaatcagaaaaacctgagcttttctgtcactggataattccaccattactagactttttgttcacaagtggtttccaacaaggaatgaytttgtttccacagaacacttgtcagtgtctggagacattttgaattataatgattaggtggtgatgctactggtatgtggtggtatagcctagagatactattaatatcctacaatgcaaagaataacctcccacagaatgcaggaatatcaggcataaaatgtcaataatgctaagg

SEQ ID NO: 433907 - DNA, 401 bp, Homo sapiens
accactttaaggtcatttgaaatcatagacttgaaagagaaaacaacttccctgattagttctttgcttcagggctgggttccttgttttttatgaacacagtaggatttaatttctgagcagctttttcaacctaatcagaaaaacctgagcttttctgtcactggataattccaccattactagactttttgttcacaagtggtttccaacaaggaatgattttgtttccacagaacacttgtcagtgtctggagacattttgaattataatgattaggtggtgatgctactggtatgtggtggtatagcctaragatactattaatatcctacaatgcaaagaataacctcccacagaatgcaggaatatcaggcataaaatgtcaataatgctaagg

SEQ ID NO: 433908 - DNA, 404 bp, Homo sapiens
ggtgaccactgttgacgaacatagactcaaaaattctcaacaaagtactagcaaactgaatccatcagcagcrtatcaaaaaattaatctactatgacaatacaggctttattcctgggatgcatggctggttcaacatatgcaaatcaataaatgtgattcaccagataaacagaattaaatcaaaaaccatatgatcatctcaatggatgccggaaaagctttcaattaaatccagtgccccttcatgaaaaaacaaaacaaaaaaaaaaccctcaacagttgaggcttcaaataagcatacttcaaaataaaaaagagctatctacaacaaacccacagccaatataatactcaatgggcaaaagctgaaagcattctcctctagaaatgaaacaagccaa

SEQ ID NO: 433909 - DNA, 540 bp, Homo sapiens
aatttgtagattcaaggctatctccatgaaactaccaatatctttcttcacagaattagaaaaaaactactctaaatttatatggaacacccccaaaagccagaatggccaaagcaattctgagcaaaaataataaagccagagaggcrtcatactacccaatttccagctatactataagtgtacactaaccatgatactgttacaaaagcagacacttaagccaatggaacagaatagaacactcaaaaacaaagctgcacacttaccaccatctggatcgtggacaaggccaacaaaaacaaacaatggggaaaaggcaccctattcaataaatggtgctgggataattcgctagccataagcagaagagtgaaactggatgcttaccttccaccatacacataaattaattcaagatggattaaaggttaaaatgtaagacttcaaattatgaaaactctaaaacaaaacctaggaaatatttttctcgacattggccttggcaaataatttttggctaagtttctaaaaacaatt

SEQ ID NO: 433910 - DNA, 540 bp, Homo sapiens
aatttgtagattcaaggctatctccatgaaactaccaatatctttcttcacagaattagaaaaaaactactctaaatttatatggaacacccccaaaagccagaatggccaaagcaattctgagcaaaaataataaagccagagaggcatcatactacccaatttccagctatactataagtgtacactaaccatgatactgttacaaaagcagacacttaagccaatggaacagaatagaacactcaaaaayaaagctgcacacttaccaccatctggatcgtggacaaggccaacaaaaacaaacaatggggaaaaggcaccctattcaataaatggtgctgggataattcgctagccataagcagaagagtgaaactggatgcttaccttccaccatacacataaattaattcaagatggattaaaggttaaaatgtaagacttcaaattatgaaaactctaaaacaaaacctaggaaatatttttctcgacattggccttggcaaataatttttggctaagtttctaaaaacaatt

SEQ ID NO: 433911 - DNA, 540 bp, Homo sapiens
aatttgtagattcaaggctatctccatgaaactaccaatatctttcttcacagaattagaaaaaaactactctaaatttatatggaacacccccaaaagccagaatggccaaagcaattctgagcaaaaataataaagccagagaggcatcatactacccaatttccagctatactataagtgtacactaaccatgatactgttacaaaagcagacacttaagccaatggaacagaatagaacactcaaaaacaaagctgcacacttaccaccatctggatcgtggacaaggccaacaaaaacaaacaatggggaaaaggcaccctattcaataaatggtgctgggataattcgctagccataagcagaagagtgaaactggatgcttaccttccaccatacacayaaattaattcaagatggattaaaggttaaaatgtaagacttcaaattatgaaaactctaaaacaaaacctaggaaatatttttctcgacattggccttggcaaataatttttggctaagtttctaaaaacaatt

SEQ ID NO: 433912 - DNA, 256 bp, Homo sapiens
agttgatttttacaacattgcaagatatcaaattactagaaatttatgcaatttatattataggccatggacagacagagattttattaccaagatgtattctcttccatttccattgttgtttgcacactgattatttccaaccaatyaattacaacccctttatatcccatactgaaagatctgaggagctgccaacacacaccaacatgctagtctttttcaacaactttcctggcagggtgcagtggctcat

SEQ ID NO: 433913 - DNA, 523 bp, Homo sapiens
agagcttattttatagccccatttccacaaataatagcaaaggtacatatatctgatgttttacacactcattattgtttctcttaaaatttgttgcttatactattttaaaaagcaagcctatagattgttgtgtgtatatacatatacacacaacatatatatatgtgtatatatatatatatatatatatatagcagcaagcaagagaatgggcctcttcctactgaggtttaacatttgcatgyatatgtatattttgattcacatagacttattgttctttaattacgtgaacagtgattcctggttacattattggaaaatggaagcaatgctcaaagagcatcacctaaatttccatcatattttgctctcaatatattttgtacatccaaatatattgtgattaatctgcatacatttttgctgttctaggtgacgctgatatgaggctaggtaatacacgaccttagtctgcatgttgtacttgtgtaacacacataattttacagtgctaaca

SEQ ID NO: 433914 - DNA, 523 bp, Homo sapiens
agagcttattttatagccccatttccacaaataatagcaaaggtacatatatctgatgttttacacactcattattgtttctcttaaaatttgttgcttatactattttaaaaagcaagcctatagattgttgtgtgtatatacatatacacacaacatatatatatgtgtatatatatatatatatatatatatagcagcaagcaagagaatgggcctcttcctactgaggtttaacatttgcatgcatatgtatattttgattcacatagacttattgttctttaattacrtgaacagtgattcctggttacattattggaaaatggaagcaatgctcaaagagcatcacctaaatttccatcatattttgctctcaatatattttgtacatccaaatatattgtgattaatctgcatacatttttgctgttctaggtgacgctgatatgaggctaggtaatacacgaccttagtctgcatgttgtacttgtgtaacacacataattttacagtgctaaca

SEQ ID NO: 433915 - DNA, 417 bp, Homo sapiens
taatcttattattatcaaattaataaacagctttcagatattctgcttctccctgttactagatcaggataatgtcatttatgtacaggcatctcctgcttactcagttcagcattgatcaataaatattttagacttccattcaaaacacttccatttttcttttgcccatattctttttattcagtgctrcctattttcaaatacacaacactttgtcaaacaaattccaacattagattggatctagttggtatcaaagtagtaatacacattgccattcctaatcctcaatgcattgatcctgaaaattatttgtaagaatagaaaaatactggatatttcaaaataagtctcattttgttgcttacacatgaaagactggaattaaccaacataaccattacaaggtgattg

SEQ ID NO: 433916 - DNA, 417 bp, Homo sapiens
taatcttattattatcaaattaataaacagctttcagatattctgcttctccctgttactagatcaggataatgtcatttatgtacaggcatctcctgcttactcagttcagcattgatcaataaatattttagacttccattcaaaacacttccatttttcttttgcccatattctttttattcagtgctacctattttcaaatacacaacactttgtcaaacaaattccaacattagattggatmtagttggtatcaaagtagtaatacacattgccattcctaatcctcaatgcattgatcctgaaaattatttgtaagaatagaaaaatactggatatttcaaaataagtctcattttgttgcttacacatgaaagactggaattaaccaacataaccattacaaggtgattg

SEQ ID NO: 433917 - DNA, 590 bp, Homo sapiens
ttgactttattaaagaccattttaaggatctttgcagctgacagcagtgacttttttacctcctacaaagtttcaactgacagtcttattgtctctgactttcccaaattaatgacataattagtcaccagggctttggctgctcaatagggatttagtaagcaatgagtcatatgttggggaacacttcaacaaacaaaatgttggcagagaaagatgtatgaatcagctaggaagaaacactattctatcattgaggatctttctaatattagatatcacagaaaaattttcatatagattaccatatragtgagccaaaatctctaggaacaaaaaagctttgtataattataactccttgccatgatttaacttaaaatttctttacttatttagcaattctataaacaagaatcatttctgttaaggatactaaggagactgttcctattgaatcagaacatttaaaagaaataattgaggaactcacacatgtaaaacgtcattaaccaaactaaaataaaatgtgagggcataaacttaaccagaaatgtttaaaacctatataaaaaaaaaactagaaaaca

SEQ ID NO: 433918 - DNA, 590 bp, Homo sapiens
ttgactttattaaagaccattttaaggatctttgcagctgacagcagtgacttttttacctcctacaaagtttcaactgacagtcttattgtctctgactttcccaaattaatgacataattagtcaccagggctttggctgctcaatagggatttagtaagcaatgagtcatatgttggggaacacttcaacaaacaaaatgttggcagagaaagatgtatgaatcagctaggaagaaacactattctatcattgaggatctttctaatattagatatcacagaaaaattttcatatagattaccatataagtgagccaaaatctctaggaacaaaaaagcttwgtataattataactccttgccatgatttaacttaaaatttctttacttatttagcaattctataaacaagaatcatttctgttaaggatactaaggagactgttcctattgaatcagaacatttaaaagaaataattgaggaactcacacatgtaaaacgtcattaaccaaactaaaataaaatgtgagggcataaacttaaccagaaatgtttaaaacctatataaaaaaaaaactagaaaaca

SEQ ID NO: 433919 - DNA, 590 bp, Homo sapiens
ttgactttattaaagaccattttaaggatctttgcagctgacagcagtgacttttttacctcctacaaagtttcaactgacagtcttattgtctctgactttcccaaattaatgacataattagtcaccagggctttggctgctcaatagggatttagtaagcaatgagtcatatgttggggaacacttcaacaaacaaaatgttggcagagaaagatgtatgaatcagctaggaagaaacactattctatcattgaggatctttctaatattagatatcacagaaaaattttcatatagattaccatataagtgagccaaaatctctaggaacaaaaaagctttgtataattataactccttgccatgatttaacttaaaatttctttacttatttagcaattctataaacaagaatcatttctgttaaggatactaaggagastgttcctattgaatcagaacatttaaaagaaataattgaggaactcacacatgtaaaacgtcattaaccaaactaaaataaaatgtgagggcataaacttaaccagaaatgtttaaaacctatataaaaaaaaaactagaaaaca

SEQ ID NO: 433920 - DNA, 593 bp, Homo sapiens
tcttaaaatacatataacatttgtaagaatagtttttatgtaaaaataattatagttcactataactatgttaaaaatagacatagccaggcaagtcgctcatgcctgtaacccagcactttggtaggctgaggcgggcagatcacttgaggccaggagttcaagaccagtctggccaacatagcgaaaccccatctctaataaaaatacaaaaattagccgggcatggtggcccataccttgtaatsccagctactcaggaagctgtggcaggaagattgctggaacccgggaggcggagtctgcagtgagacaagatcatgccactgcactccaacctgggtaacagaatgagactctgtctcaaaaaaaaaaaaaagaaaagaaaagaaaagaaaaaaatagacacagatgaagggtgtctttgattatgcaaatagattacccatcttgtactcactgtgtttatttcaataaatgatccacagaatatgctacttttgatttatagttttcttctccttcaccgctgtggactgggaaaatatttcttattatttctgctgcagagtagcaaaaaattatgagccaga

SEQ ID NO: 433921 - DNA, 593 bp, Homo sapiens
tcttaaaatacatataacatttgtaagaatagtttttatgtaaaaataattatagttcactataactatgttaaaaatagacatagccaggcaagtcgctcatgcctgtaacccagcactttggtaggctgaggcgggcagatcacttgaggccaggagttcaagaccagtctggccaacatagcgaaaccccatctctaataaaaatacaaaaattagccgggcatggtggcccataccttgtaatcccagctactcaggaagctgtggcaggaagattgctggaacccgrgaggcggagtctgcagtgagacaagatcatgccactgcactccaacctgggtaacagaatgagactctgtctcaaaaaaaaaaaaaagaaaagaaaagaaaagaaaaaaatagacacagatgaagggtgtctttgattatgcaaatagattacccatcttgtactcactgtgtttatttcaataaatgatccacagaatatgctacttttgatttatagttttcttctccttcaccgctgtggactgggaaaatatttcttattatttctgctgcagagtagcaaaaaattatgagccaga

SEQ ID NO: 433922 - DNA, 593 bp, Homo sapiens
tcttaaaatacatataacatttgtaagaatagtttttatgtaaaaataattatagttcactataactatgttaaaaatagacatagccaggcaagtcgctcatgcctgtaacccagcactttggtaggctgaggcgggcagatcacttgaggccaggagttcaagaccagtctggccaacatagcgaaaccccatctctaataaaaatacaaaaattagccgggcatggtggcccataccttgtaatcccagctactcaggaagctgtggcaggaagattgctggaacccgggaggcggagtctgcagtgagacaagatcatgccactgcactccaacctgggtaacagaatgagactctgtctcaaaaaaaaaaaaaagaaaagaaaagaaaagaraaaaatagacacagatgaagggtgtctttgattatgcaaatagattacccatcttgtactcactgtgtttatttcaataaatgatccacagaatatgctacttttgatttatagttttcttctccttcaccgctgtggactgggaaaatatttcttattatttctgctgcagagtagcaaaaaattatgagccaga

SEQ ID NO: 433923 - DNA, 611 bp, Homo sapiens
taatcccagctactcaggaagctgtggcaggaagattgctggaacccgggaggcggagtctgcagtgagacaagatcatgccactgcactccaacctgggtaacagaatgagactctgtctcaaaaaaaaaaaaaagaaaagaaaagaaaagaaaaaaatagacacagatgaagggtgtctttgattatgcaaatagattacccatcttgtactcactgtgtttatttcaataaatgatccacagaatatgctacttttgatttatagttttcttctccttcaccgctgtggactgggaaaatatttcttattatttctgctgcagagtagcaaaaaattatgagccagaaggaagaccactacaacaagcaaaatctctgagtaatcataaaatgaagaactatttcctgttgggattcattgtgamgaatttgattttaaattcttggtgttggcattttatttttaaaatttagctttcttgcctattctgaaattgtcaaaaattcagaaaaacaatcatcatcatttgcttgctgatcaatggagacctaatgatttttaggctgtgagactacagtaataaataaataaataaaaaagttgatac

SEQ ID NO: 433924 - DNA, 611 bp, Homo sapiens
taatcccagctactcaggaagctgtggcaggaagattgctggaacccgggaggcggagtctgcagtgagacaagatcatgccactgcactccaacctgggtaacagaatgagactctgtctcaaaaaaaaaaaaaagaaaagaaaagaaaagaaaaaaatagacacagatgaagggtgtctttgattatgcaaatagattacccatcttgtactcactgtgtttatttcaataaatgatccacagaatatgctacttttgatttatagttttcttctccttcaccgctgtggactgggaaaatatttcttattatttctgctgcagagtagcaaaaaattatgagccagaaggaagaccactacaacaagcaaaatctctgagtaatcataaaatgaagaactatttcctgttgggattcattgtgacgaatttgattttaaattcttggtgttggcattttatttttaaartttagctttcttgcctattctgaaattgtcaaaaattcagaaaaacaatcatcatcatttgcttgctgatcaatggagacctaatgatttttaggctgtgagactacagtaataaataaataaataaaaaagttgatac

SEQ ID NO: 433925 - DNA, 611 bp, Homo sapiens
taatcccagctactcaggaagctgtggcaggaagattgctggaacccgggaggcggagtctgcagtgagacaagatcatgccactgcactccaacctgggtaacagaatgagactctgtctcaaaaaaaaaaaaaagaaaagaaaagaaaagaaaaaaatagacacagatgaagggtgtctttgattatgcaaatagattacccatcttgtactcactgtgtttatttcaataaatgatccacagaatatgctacttttgatttatagttttcttctccttcaccgctgtggactgggaaaatatttcttattatttctgctgcagagtagcaaaaaattatgagccagaaggaagaccactacaacaagcaaaatctctgagtaatcataaaatgaagaactatttcctgttgggattcattgtgacgaatttgattttaaattcttggtgttggcattttatttttaaaatttagctttcttgcctattctgaaattgtcaaaaattcagaaaaacaatcatsatcatttgcttgctgatcaatggagacctaatgatttttaggctgtgagactacagtaataaataaataaataaaaaagttgatac

SEQ ID NO: 433926 - DNA, 621 bp, Homo sapiens
atttttaggctgtgagactacagtaataaataaataaataaaaaagttgatacttccttctatcgagggaaattgagcatttttctcatagtcctaagtcaccagatcaagggatatatgtaatacttgagtgttgacattttattaatttttatatttaactagagctgtaaagttgaaacaaatgggtcaatgcaatagcccataaaatattttaaaaacacataaaagaaatatcactaaaatttaaacataaaaaaaatacaaaaaaaccctgagctataggaagggaagtatcctctaaatgcccaagttgaaggtagtcctcttagaaaggcacagaaagaagcagtgtttgatgggaacgtgatttttcaagtattttgaattttcaaactcaccacattaactgagtaaaatgaaaaaaatatataaacttcctctgaggcagaaaaaacatttggcattttcaagatagarttataataaaaatatctcgccccaatagaatacaaagaagcatccttaagcaaatagaaggcatctacggaaatatcacactgaagtttgaactaataaattattcatttaagatccagaagaagacaaagtgtcctcttt

SEQ ID NO: 433927 - DNA, 585 bp, Homo sapiens
ctattcatgaggaatctgccactgtcactcaaatgctgcccatttagccgacctctaacattggaatcaaattttagcatgagatttggtgggtacaaacagtatattcaaactatagcacttaccatatggttctgcaatcgtgctacttggtatttacccaaaggagctaaaaacttatgtccacataaaaagctgcaaaaggatgtttatagcagttttattcataatgaccaaaacttggaagcaaccaagatgttcctcagtaggtgaatggatayataaactgaggaatatccaaacaatggaatattatatagagctaaaaagaaatgagctataaagacatggcagaaacttaaatgcttgttactaagtgaacagaaaatccactgtatgattccaaccatatgacattctcaaaaaggccatatgatggggcagtaaaaagatgaatggttgccaaatgttagagagagggagggataaataggcagagcacagaggatttttagcgcagtgaatctactctgcatgaaactaaaatgagagctacatttgtttaaatgcagtttggaaacgtga

SEQ ID NO: 433928 - DNA, 544 bp, Homo sapiens
ttttaaataggtgcagtaaaggcagtaattgaggcctacactgaagggaaagatgaggcatgtgactatggctgggctattccaggaaaagacttataaagccttgagtcaggagtagtgcatttggcatgtggcagaatagaaaaaaccaaggtaaggaaggacaggacacagcttctcctgaccatgcagaggaatttgaattatgtgatccataaattcccaatggtttaattattaaacaaaaatatataattatataagttgtgacttgcatttatttacatgaaaacatctctatattttctgtaaaataatgctttatttggggcaatgtatttaagatatatattgatgatctcmgtgaaaacacatctatcaccattatctaaatgtttgaaaaacacatgtaaatataacttcattctttaaaattaatattgtaacagcaaatatgtggaggggcttcactaaatgaatacaggtggaccttgtcccagaactgaatgattgttttaatacgtgagtttgtggagatgaactg

SEQ ID NO: 433929 - DNA, 601 bp, Homo sapiens
caaataatttgggtcaagatatctcatttcatgtttcttagttataaaatattttggttgtgagtagatttgaaagagcatgcgaatgcaaaaactacttattaaaatgagagcatccaaatcatggtggcagtgaacgttcagcagcatctgaggaaaatgccatatccatcatagacacattcataawtttcttttgattaggctttgcgatcttcaatggaaattttcagggccattgaaaaaatctcacacattttttttctgtctcaatcttaattcttcagagaataattaaggaaagtgaatagctctgttaggcatttctcaatcatctttaaatgggtcatggttttaaataggatgtgtcaaattgaaattatatgaactaaattatacctaagttacactgtaccgtctgcttaatgacttctttacagggggtcagtgagtcatcaactattaattgcaattcatctttgaaacagtcaaaatcaatgtatatttttcactaaagtcaaataagtagcctcaagaaacactgaaaaagaggtaactaaataacagtcataaatattcagtatctataagcaaacaaaaa

SEQ ID NO: 433930 - DNA, 601 bp, Homo sapiens
caaataatttgggtcaagatatctcatttcatgtttcttagttataaaatattttggttgtgagtagatttgaaagagcatgcgaatgcaaaaactacttattaaaatgagagcatccaaatcatggtggcagtgaacgttcagcagcatctgaggaaaatgccatatccatcatagacacattcataattttcttttgattaggctttgcgatcttcaatggaaattttcagggccattgaaaaaatctcacacattttttttctgtctcaatcttaattcttcagagaataattaaggaaagtgaatagctctgttaggcatttctcaatcatctttaaatgggtcatggttttaaataggatgtgtcaaattgaaattatatgaactaaattatacctaagttacactgtaccgtctgcttaatgacttctttacagggggtcagtgagtcatcaactattaattgcaattcatctttgaaacagtcaaaatcaatgtatatttttcactaaagtcaaataastagcctcaagaaacactgaaaaagaggtaactaaataacagtcataaatattcagtatctataagcaaacaaaaa

SEQ ID NO: 433931 - DNA, 491 bp, Homo sapiens
ttttgttttcacatgcacacacatatgagtgctctcatacaggaakaagtaaattaatttacatttgtataaacatagtactgttctgctggttttctattaagtaaaggaagactcctaatagaatggatgctttctttgctagaaaaagaattcatgtgatattggctgatttgtgatccccccaattcatatattgaatccctaaatctgagtaccacagaatgcaacccatttggagacaagatatttaaagaagcaattaagtaaaaaataggcaataagatgagttctaatccaatatatctggtgtccttttaaaaagagattaagacagacagagacaccagacaaatgcacacactaagagacaatcacgtgaacacacagcaagaaggcagccatctgcaagccaaggagaggcctcagcaaaaaccaaacccgctgacaccttgatgtcagatttcccaactccagaactgtgggaaaat

SEQ ID NO: 433932 - DNA, 491 bp, Homo sapiens
ttttgttttcacatgcacacacatatgagtgctctcatacaggaagaagtaaattaatttacatttgtataaacatagtactgttctgctggttttctattaagtaaaggaagactcctaatagaatggatgctttctttgctagaaaaagaattcatgtgatattggctgatttgtgwtccccccaattcatatattgaatccctaaatctgagtaccacagaatgcaacccatttggagacaagatatttaaagaagcaattaagtaaaaaataggcaataagatgagttctaatccaatatatctggtgtccttttaaaaagagattaagacagacagagacaccagacaaatgcacacactaagagacaatcacgtgaacacacagcaagaaggcagccatctgcaagccaaggagaggcctcagcaaaaaccaaacccgctgacaccttgatgtcagatttcccaactccagaactgtgggaaaat

SEQ ID NO: 433933 - DNA, 609 bp, Homo sapiens
tgcttacacttgctaaactggacaccacagaccaaagctgggacataaatctagtagaacaaaatgtcaatattcattattggttatagcttaatatagaagtacagacacccgctgattttactctctgcaccagcacatcctcaacaaagaattcagggcacactgtcacaatggargctatagccattgaagttgtgagcaatacctatgactcagcggagagttgaagatttgaggagctttcttttgggagaaccagagctatatgaaatgaaaggagaaataaaaatgtcactgcagaaggaagaattagaatctttattctaggattggcagactgtaccagtaattcgtgaatattgtttgggagatgcgtgtgcttccagtctgagccagctgggaaatcttctgggtttttctaaagaatactgtcccattatcctcagagtgaatcatgaggactctgagttcttagagaggaaaggagattaaacagcatcaggatgacataaattttgtttgagaatatagaaatattattaattccaaagttattaacactgtccaatacattaagaataaaacttgttaaagatgataaattat

SEQ ID NO: 433934 - DNA, 600 bp, Homo sapiens
aagttttataaaaaattgttatgatccctattaaggatttaaggttttttcaacttgtggctatttaaacatcatcatcagggtcattcttgatgcraattttttttttgccaaaatgaactgtaagaaaaaatgtaaaatataataaaaaagtaaaaaagatatgtaagtttataaagaaacactgaattacccttaggaaaaaatgccccaacaaatgatgagttcatgtcctttgtagggacatggatgaagctggaaaccatcattctcagcaaactatcgcaaggacaaaaaaccaaacactgcatgttctcactcataggtgggaattgaacaatgagaacacttgggaacatcacacaccggggcctgttgtggggtgggggctgggggagggatagcattaggagatacacctaatgtaaatgacgggttaatgggtgcagcacaccaacatggcacatgtatacatatgtaacaaacctgcacgtgtgcacatgtaccctagaacttaaagtataattaaaaaaataaaacaaaatgcctcaacatactctctcaatgttctctggacaatcagtttttatctcgacaatc

SEQ ID NO: 433935 - DNA, 600 bp, Homo sapiens
aagttttataaaaaattgttatgatccctattaaggatttaaggttttttcaacttgtggctatttaaacatcatcatcagggtcattcttgatgcgaattttttttttgccaaaatgaactgtaagaaaaaatgtaaaatataataaaaaagtaaaaaagatatgtaagtttataaagaaacaytgaattacccttaggaaaaaatgccccaacaaatgatgagttcatgtcctttgtagggacatggatgaagctggaaaccatcattctcagcaaactatcgcaaggacaaaaaaccaaacactgcatgttctcactcataggtgggaattgaacaatgagaacacttgggaacatcacacaccggggcctgttgtggggtgggggctgggggagggatagcattaggagatacacctaatgtaaatgacgggttaatgggtgcagcacaccaacatggcacatgtatacatatgtaacaaacctgcacgtgtgcacatgtaccctagaacttaaagtataattaaaaaaataaaacaaaatgcctcaacatactctctcaatgttctctggacaatcagtttttatctcgacaatc

SEQ ID NO: 433936 - DNA, 600 bp, Homo sapiens
aagttttataaaaaattgttatgatccctattaaggatttaaggttttttcaacttgtggctatttaaacatcatcatcagggtcattcttgatgcgaattttttttttgccaaaatgaactgtaagaaaaaatgtaaaatataataaaaaagtaaaaaagatatgtaagtttataaagaaacactgaattacccttagraaaaaatgccccaacaaatgatgagttcatgtcctttgtagggacatggatgaagctggaaaccatcattctcagcaaactatcgcaaggacaaaaaaccaaacactgcatgttctcactcataggtgggaattgaacaatgagaacacttgggaacatcacacaccggggcctgttgtggggtgggggctgggggagggatagcattaggagatacacctaatgtaaatgacgggttaatgggtgcagcacaccaacatggcacatgtatacatatgtaacaaacctgcacgtgtgcacatgtaccctagaacttaaagtataattaaaaaaataaaacaaaatgcctcaacatactctctcaatgttctctggacaatcagtttttatctcgacaatc

SEQ ID NO: 433937 - DNA, 600 bp, Homo sapiens
aagttttataaaaaattgttatgatccctattaaggatttaaggttttttcaacttgtggctatttaaacatcatcatcagggtcattcttgatgcgaattttttttttgccaaaatgaactgtaagaaaaaatgtaaaatataataaaaaagtaaaaaagatatgtaagtttataaagaaacactgaattacccttaggaaaaaatgccccaacaaatgatgagttcatgtcctttgtagggacatggatgaagctggaaaccatcattctcagcaaactatcgcaaggacaaaaaaccaaacactgcatgttctcactcataggtgggaattgaacaatgagaacacttgggaacatcacacaccggggcctgttgtggggtgggggctgggggagggatagcattaggagatacacctaatgtaaatgacgggttaatgggtgcagcacaccaacatggcacatgtatacatatgtaacaaacctgcacgtgtgcacatgtaccctagaacttaaagtataattaaaaaaataaaayaaaatgcctcaacatactctctcaatgttctctggacaatcagtttttatctcgacaatc

SEQ ID NO: 433938 - DNA, 646 bp, Homo sapiens
ttcagcatcgagttactgtaactgctgtcattgatgcctcttcttctaaaatgagatgccatcacttgtaaaattatttttaaaagatatatttttaaatgaagaagtctttttatatgtcaaataatttactttagatgtttaaaatagtatagctcacaaaaaatgttggctyataacaacttctactgagtatgtaagaaaatggttttgaagttcaatctttttttaaaaaaaaagttgtatgaatgtattcaaaatttacatgaacactcagctatgtatactataaatattttccaaactccatgagctgattaattaaaacagatcctctagccaggaagacaagcatatgaatacaacagtctttcttttatcaattctcctgaaatatctagtatagcacataataatttttatatatgagtgaaggtggtttctatgtccaattagcaataattgtgcctcaggtcatcttcattgactatgatactgccactctgaaaagctgtctacatccaaatattgatttaatttggcaaaaaaacaggcaggcttagaaagtgttttagaacaggacaattaaataatataatattttctataatatttcattttcttatttcttctcaagatctcacga

SEQ ID NO: 433939 - DNA, 555 bp, Homo sapiens
ctatgcacctaagattcagggatgcaatgagaatgataaaactgctctatcagctgatttatgtgagaattaaatcagccaatgcatgtaaattccttaacttggtccyacacagaaaattctttaacgtgttaaccaatactctgtatgaagtgaatgatatcatgtatattattttgcaaactcctattttgcatataggtgcagacatagcttcaggtaaatacatgcaaactaacttatcttttaatatcttaaaatttttccattataaggatacaaaaactattctaccaattacctgttgaagaaactcatgtttaattccggtttattttgccatcataaacaatgctgtgaaagcattcttgtatatcgaggatcacatatatgcctttacttctgtaggatagattctttttaaaaatattttaacttttattttaggttcaagggtggacttttaatctagatgctcagactagcacatatgtatacttttgcactatgaaaatatcaataatttttttctccaagtgtagtaacttacagttg

SEQ ID NO: 433940 - DNA, 555 bp, Homo sapiens
ctatgcacctaagattcagggatgcaatgagaatgataaaactgctctatcagctgatttatgtgagaattaaatcagccaatgcatgtaaattccttaacttggtcccacacagaaaattctttaacgtgttaaccaatactctgtatgaagtgaatgatatcatgtatattattttgcaaactcctattttgcatataggtgcagacatagcttcaggtaaatacatgcaaactaacttatcttttaatatcttaaaatttttccattayaaggatacaaaaactattctaccaattacctgttgaagaaactcatgtttaattccggtttattttgccatcataaacaatgctgtgaaagcattcttgtatatcgaggatcacatatatgcctttacttctgtaggatagattctttttaaaaatattttaacttttattttaggttcaagggtggacttttaatctagatgctcagactagcacatatgtatacttttgcactatgaaaatatcaataatttttttctccaagtgtagtaacttacagttg

SEQ ID NO: 433941 - DNA, 555 bp, Homo sapiens
ctatgcacctaagattcagggatgcaatgagaatgataaaactgctctatcagctgatttatgtgagaattaaatcagccaatgcatgtaaattccttaacttggtcccacacagaaaattctttaacgtgttaaccaatactctgtatgaagtgaatgatatcatgtatattattttgcaaactcctattttgcatataggtgcagacatagcttcaggtaaatacatgcaaactaacttatcttttaatatcttaaaatttttccattataaggatacaaaaactattctaccaattacctgttgaagaaactcatgtttaattccggtttattttgccatcataaacaatgctgtgaaagcattcttgtatatcgaggatcacatatatgcctttacttctgtaggatagattctttttaaaaatattttaacttttattttaggttcaagggtggacttttaatctagatgctsagactagcacatatgtatacttttgcactatgaaaatatcaataatttttttctccaagtgtagtaacttacagttg

SEQ ID NO: 433942 - DNA, 606 bp, Homo sapiens
tgatgcaacagaaaagaaaaatctattttctcaggagactgggttgtagaaatttgcataagtaatgaggagccaaatgttaatcaccaagacaatggggcaaatgtctccagggcatgttagagaccctcacagcagaccctcccatcacaggccaggaggcttagaaggaaaaatgctcttgtgagtccagaaccccctgctgtgtgcagcctaggaacctggtgccctgcatcccagctgctcctgccacaggtaaaaggggccaaggtacacctcaggccatggcttcagagggtgcaagttccaagcctttcaggttctaggtggtgttaagcctgcagatgcaccgaagaattaacgttcatgaacctccgcctagatttcagaagatgtatgaaaatgcctggaaatccaggcaagtttgctgtgcacgggagcggggggccctcatggataacctctgctagggcagtgtcaaagggaaatatggggttggagcccccacacagagtccccactggggtactgccaagcagagctgtcacaaaggggccaccatcctccagaccccrgaatggtagatccactgacagcttgcactgt

SEQ ID NO: 433943 - DNA, 410 bp, Homo sapiens
ggtgagcaaagcagttgttgtgggcacttctcttcatgatgatgttcagtcatttaggtctctgtggaatggctggcaggaggccctaatggtgacagaaatcccagtgactactgtcctactggctctggttgggagcctttcctagcagtcctaccatgactggcctcttggatccactctgaattcttctacttctctttgcagtagaaagrcattaactgatatttctctttccaaatttctttgcaatgttttctgtagaagaactgaacattaaataaatattatttctagaactcagttttcgcaaaagatagcatttcagtcccacaagagcaatatttatatcattgcaactatggggcttcggtgggaaaaggatgacaatatttttccatttggatagc

SEQ ID NO: 433944 - DNA, 583 bp, Homo sapiens
atatgtaagcagggtttagaacccctgccctagacacgggtccagcaccacgttctctcaaaggccttgcagctgggcttcmgcctcagctgctacaaatgaaagctaccctgagacccccagaagaggttcttgggctggccctgctaattcatttcatctgactcttcttgattgaagggatgaacgtttattctattgattcattcaattctaacattttgtaccacatctcactcatttcttgtggaggggggtgtactgcaatatcgtcacttcttggccttttctgtccccccagggctaggccaggcttccttggagctgtagcgtgtcatcactgactcaaggccaccttgatgcctagatttttctgcttcatctaagcatacccagtcattcttcttacattggcagctggcttccctcacccagacccgtaaccagcacctgccctcaacacggtgcagctgctgaagtacctggtgtgttttgttctgcttcagtcattcaaatgccaaattctgacctcagctaccatctcaccccactccccatgcatttgactccatccgctgttctc

SEQ ID NO: 433945 - DNA, 455 bp, Homo sapiens
  misc_feature (1)...(455): n = A,T,C or G
taaaacaatactcattattatttctcaccatgtctgggatttttcatgaggctcagttggatgttggctcagctggcagccatctgaaggcttgtttggagtgacgggatccacttccagggtagtttattcccgtgactgtcacactggtgccagctgttgtggaggcctcagttgcactctgtgggggtcttgctgcagagtgatctaaccatgcagcagctggcttycccagaagccaaggcagcagctgcaatgcattttattacttattcttagaagccacacaccaccacttctgcagtatcctattggtcacacaggttggttctattcactgtgaaaagggaccacatangggcatggattccaggagtgaggatctctgggggccagctcaaggacagctaccacatatctactacacttttccttctttactgtcgacctangca

SEQ ID NO: 433946 - DNA, 569 bp, Homo sapiens
gtgcaagccccaagccttggcagcttccacatggtgttgggcctgtgggtgcacaggagacaagaattgaggtttgggaacctagatttcagagtatgtatggaaatgcctggatgtccaggcagaagtctactgcaggggtggagatcycatgaagaacttctgctagggcaatgtggaagggaaatgtggggttgcagccctcacacagagttgccattggggcactgcctagtggaactgtgagaagacggccaccatcctccagaccccagaatggtagatccacctggcttgcaccatgcacctggaaaagccacagacactcaatgccagcctgtgaaagcagccaggaagggggctgtgccctgcaaaaccacaggggtggagctgcccaaggccatgggaccttgctgcttgcatcagcatgacctggatgtgagacatggagtcaaaggcaatcattttggagctttaagattgaatgactgctccactgaattttggacttgcatggggcctgtagcccttctgttttggccaatttatccaactgcctgtacccccac

SEQ ID NO: 433947 - DNA, 557 bp, Homo sapiens
atgggaccttgctgcttgcatcagcatgacctggatgtgagacatggagtcaaaggcaatcattttggagctttaagattgaatgactgctccactgaattttggacttgcatggggcctgtagcccttctgttttggccaatttatccaactgcctgtacccccactgtatcttggaagtaactaacttgcttttgattttacaggctcctaggcagaagggtcttgccttgtctcagatgagactttggacttggacttttgggttaatgctggaatgaattaagcctctgggggactgttgggaaggcatgattggttttgaaatctgaaaargcatgagatttgggaagggccggtggagaatgatacggtttagctctgtgtccccacccaaatttcatctcgaattgtaatccccacctgtcaagggaggcacctgtaatccccatgtgtcaagaaagggaggtgactggatcatggggacgatttcccctatgctattctcatgaaaggagtttgcatgagatctgatggctttataagtgcttgacagt

SEQ ID NO: 433948 - DNA, 644 bp, Homo sapiens
ttttacaattgttttagttgttttgtttttaggggagtcatcaaagtgtagagtataatattttcctaaggccagagcttgtctgctatacccagatgaggctagtaactctaagccatgactgaataccaaagctagtgtcatgctttcctttcctgttagtttttattttatcatctaatatgctccatccataattagtcctatgatgtgagtccgagtgattgttctgcttctattttcagtaagataggaaaaatggttatcttctctttgtccactctcaagcagttttatggttcttaatttaagtccacagggtattgagctcctctaagaaaaytgtatatgagcctggtgatatatgcattgttggtacacagagctttgtataacagctgtgatcctgaaaaactggacaaaaagaaaaacttttccaatgtacattccaggagctctctatttatggtagttcatggtcaacctggcaactaaagaatactcttactaaacaaataatagcatgaacatttatctgttccaaggattggcaaactacagcccatgggccaaatctgggctggaccaccatctgtttgtgtaaacaagttttattgcaacacagccatgctcattagtttatg

SEQ ID NO: 433949 - DNA, 510 bp, Homo sapiens
ctgcttctattttcagtaagataggaaaaatggttatcttctctttgtccactctcaagcagttttatggttcttaatttaagtccacagggtattgagctcctctaagaaaactgtatatgagcctggtgatatatgcattgttggtacacagagctttgtataacagctgtgatcctgaaaaactggacaaaaagaaaaacttttccaatgtacattccaggagctctctatttatggtagttcatggtcaacctggcaactaaagaatactcttactaaacaaataatagcatgaacrtttatctgttccaaggattggcaaactacagcccatgggccaaatctgggctggaccaccatctgtttgtgtaaacaagttttattgcaacacagccatgctcattagtttatgaatagtccaggatgcttttgtgctacaacagcacagttgagttgttgcaacagagaacatatgaactgcaaagcctgaaatatttattacatggc

SEQ ID NO: 433950 - DNA, 509 bp, Homo sapiens
tagggtaggtatcaataattactcataaaagatgagaattattggttccctagaagtcattttcccattctaggcatggtgccttttaggggacagagctctgactgaactttatatgtcctccttagttagttacttagggtcttgatttcttctggaggctgtatttstcatttaaattttgctagatattatgcatattacttaagttttcacacttaatggcataaatctgtccctagtattccctctcaattttctaatctcctctgtaactgcagtctatttatatgtcctcagtaaatatttgttgagtctgatagtttttggttacgatcatggactagtgcagtgagggcagttggatattttcctcctgggaggacatctgggattcacaatctggatgtttggtatcatgagacaatctccctgccctggcttggggggccacccatgggttaaggcataagtaacaattcctgacaagagtggagtcattaatgtct

SEQ ID NO: 433951 - DNA, 540 bp, Homo sapiens
ttgttgagtctgatagtttttggttaygatcatggactagtgcagtgagggcagttggatattttcctcctgggaggacatctgggattcacaatctggatgtttggtatcatgagacaatctccctgccctggcttggggggccacccatgggttaaggcataagtaacaattcctgacaagagtggagtcattaatgtctggagcaggaagctgaggggagttgtgtttttctcttgcctcaacattgtaggaggagagagaatcctttctaggcatcagggtcatccctgagcactcctggtgtgattttagggttctccaaggcccactgtggttctaatttcctgccaccatccctgaacatcccaccattcatatcctcagtgtagaaaacagagatggtaactttgactccagaaggtcaccattcacatgaccacttaggagaaaaggagaagggagaacttccagtattttatccaaattctttattcgtcactcagctagcccagacgtcttcttaggaagcattggaag

SEQ ID NO: 433952 - DNA, 540 bp, Homo sapiens
ttgttgagtctgatagtttttggttacgatcatggactagtgcagtgagggcagttggatattttcctcctgggaggacatctgggattcacaatctggatgtttggtatcatgagacaatctccctgccctggcttggggggccacccatgggttaaggcataagtaacaattcctgacaagagtggrgtcattaatgtctggagcaggaagctgaggggagttgtgtttttctcttgcctcaacattgtaggaggagagagaatcctttctaggcatcagggtcatccctgagcactcctggtgtgattttagggttctccaaggcccactgtggttctaatttcctgccaccatccctgaacatcccaccattcatatcctcagtgtagaaaacagagatggtaactttgactccagaaggtcaccattcacatgaccacttaggagaaaaggagaagggagaacttccagtattttatccaaattctttattcgtcactcagctagcccagacgtcttcttaggaagcattggaag

SEQ ID NO: 433953 - DNA, 527 bp, Homo sapiens
tggagcttgcagccattggatacattgctcaagcggactctgctggtatgcagtagtgtcaggatgagaatccaggaagttgggacttcaaaagtaacactgttaatcaccacgctgtctttttcagctgttaggcctttagatttctaaagaagtaaatatacactagactttcacatggaacaaagtacttcaaaggagtacatatatttttatgtggccacatacattcctatttttgtttatcttggtttctaaatccttaaaaagtttccatctcttttttaggtttgctaatgtttatcatcatgaataaagataacacaaatggttgtaacatagtgccaytaaaaaaaatccaatattgtcatgaatgtgacaaaagactcccaatccccttgtgataaattggcacaagctttctgaagaacatttaacaataagtcattatgattcattactctgtgaggaaggaatcataagagatatttatcttaatgttattataatagcaaaaaaaaaaaaga

SEQ ID NO: 433954 - DNA, 577 bp, Homo sapiens
ccctactttcttcacgttttgtcttccttccttaaacagcttaagttccttgatcaatcataataatcactcctttgcatacacctctcttatttgcctcaatttgacttcaacttacttgtgtggcaaaatgctaattctggtaaaatttaactcctcttaacgagtctatgcccagctggcagcatttggataaatacacaaccatgctgaccagtctcatgttaaatgtgtaatctctaatttcaagtaagcttttaatgttcttgccaatcatattatgtttctctagtccattttatrttttatgtaaaaatggattttcttagatgacaatttatttcttctctttcctcaaatcttcaactcttctcccattcctcaccctcagatgagatcttgattcctacctcacagagaaaactaaatcaatcagaagagactggctacaatctccagccaattctctcttattactatggttgatctgagcattctctttacaaaggccaatccatccaacagtgccaagattccattccctctcactgttcaaagatgttacttccactatttg

SEQ ID NO: 433955 - DNA, 614 bp, Homo sapiens
cctggtgtcactctgtgactatggtaatggcatagtagggaatacwgcttcccactttgctatctctaggttaggagaaccaataacagttcacccaaaatatccacatttcttggaggcttatcctttgcgtattcactgaagaaggaaaggaaagaaatgaagggaacccattaggtggccctgtgcttcgtattccatttgcagtgtctcattcagtcctcacaatagtgctgaaagtagatcatatcctcatttgacagataaggatattgaggctgggcaaaagtgaataacttgtccaatgtcccatatgcagtaaggaaaagaaacagtatctgacctcaggtctgtctgtctctttcctcctataaaagatgaatacatacctttaaagtcctccaagttacccagcctcggagattaaaataaattttatttccaagatatctctatttttcttcctccccgctaactagcttcttaagttcccatgtgaatattgtcattcatttccttaattattaaacatgttttgttttaaactggtaaataatgtttaataaaggttttattattattttaaaaacatttttaatgaagttctttccatt

SEQ ID NO: 433956 - DNA, 614 bp, Homo sapiens
cctggtgtcactctgtgactatggtaatggcatagtagggaatacagcttcccactttgctatctctaggttaggagaaccaataacagttcacccaaaatatccacatttcttggaggcttatcctttgcgtattcactgaagaaggaaaggaaagaaatgaagggaacccattaggtggccctgtgcttcgtattccatttgcagtgtctcattcagtcctcacaatagtgctgaaagtagatcatatcctcatttgacagataaggatattgaggctgggcaaaagtgaataacttgtccaatgtcccatatgcagtaaggaaaagaaacagtatctgacctcaggtctgtctgtctctttcctcctataaaagatgaatacatacctttaaagtcctccaagttacccagcctcggagattaaaataaattttatttccaagatatctctatttttcttcctccccrctaactagcttcttaagttcccatgtgaatattgtcattcatttccttaattattaaacatgttttgttttaaactggtaaataatgtttaataaaggttttattattattttaaaaacatttttaatgaagttctttccatt

SEQ ID NO: 433957 - DNA, 556 bp, Homo sapiens
tatccaacattcattgtaaaagaagtctcagatgaacagaaacaatggaaagaaaattactcaaagtaataggatatttccttaatctaaagacgaatgtgagactatagataaaattgccaatcaagggccaagcaagaattatgagcaaagccaagacattatattctagtgatatctgtgatctcccaaagttaatgaaagacattgtgacagtttcaggtaggagaggatgagaaaaatatttggttaatggcctaggttggtagctagctagccagatccttgttctttctttcacttattttttttattcattcaacaaatgtttatagagcacttactatrtgccaaaaattttgttaggtaataatagacacagtggagtaaaaatagtctgatgacagaagtaaacaataatcacattataaataaaaataaattacacctgtgataacttctaccatggagtgttttatagtgctgagagcatattacaaagggatttttgacttaatcagggaaggcatcccataagtagcggtaagtaaagtgt

SEQ ID NO: 433958 - DNA, 639 bp, Homo sapiens
caagggtttctgcataataataatggtcttcctacggagggtctgagtgatccaggccacctgggtctgagtcacaaagcctgcatgcaatacttattattcactaatttatttctggttataaaagtaaatcgtatcctatgtcaatgttttatagtatacagaatcatttaagtaaggttacaaaagtgattctgaacttgaccaccaccattttgacatacttccatccagtgtatttttttcttgtgccaatatagcatagtggctaagaacaaaggcctctggaggcatccagatttagagtaagatcccagctccgtcattcctagctgtattgcccagagaagtttcttgacctctttgaacctcagtttcctcatttgtaaaatacaggcagtcccatctcgtaaggttattgccagggactacatgagaagtatattcaatgaggttattagcacagtgccaattatatgacagacctcagtagatactggctattgcatgctacatgtgtgtatacatgcatttaaatgtatatagtagtattatataattgatatcatactcaagtttcccttatcctttaaatttaacrtctaacattttaaccataaggttatatcactgtatact

SEQ ID NO: 433959 - DNA, 565 bp, Homo sapiens
gatcccagctccgtcattcctagctgtattgcccagagaagtttcttgacctctttgaacctcagtttcctcatttgtaaaatacaggcagtcccatctcgtaaggttattgccagggactacatgagaagtatattcaatgaggttattagcacagtgccaattatatgacagacctcagtagatactggctattgcatgctacatgtgtgtatacatgcatttaaatgtatatagtagtattatataattgatatcatactcaagtttcccttatcctttaaatttaacatctaacattttaaccataaggttatatcactgtatacttacctgtttgtttgattttagtcattcatgttattaccatgattttcatattgataatttgataacttatattgacagaagtgagaagtaagacactcagaagtaagcaagagaggaaaagaaggcacactcgttcaatttttcttctttctcagggtagtcagtgtttcrtttttgatgataacgtatggaaaaatagctaaaatctacatctaaggaatttaaaccattcata

SEQ ID NO: 433960 - DNA, 540 bp, Homo sapiens
gattcttcttctgcttctgcatcagccttccaagtagctgggattacaggcacatgccaccacccctggctaagttttgtatttttagtagagatggggtttcactatgttggtcaggctggtctccaactctttacctccagtgatctgcctgcctcagcttcccaaagtgctgggattacrggcatgagccaccatgcccgacctgttgtatattcattttcaaatattctacaatatgtacttcttattctcatcatcataaaatagcaataaatattactgtttttaaaatgaaagaagataaagaaaaactatgaatcataagcacactttagagagtacaattatacagggagtttaaaaaccatcaaaattatccttaaggacaatgtctgcatcttaaatgagagacctcctagactgcaagtgcatgcagcttgcacaaaggggccctcactatcattctgatcattaaattctttttttttttaacttgcgaaatctgttttattcaagtttctttcaagccaagtggct

SEQ ID NO: 433961 - DNA, 518 bp, Homo sapiens
gagggcctatttaactgggcacatgtgtctgaggcttcatctgataatgttctatatcacacttctgacaccaaatatgggagaggacttctcatatcaactaagtctccaactctctctacacaaacttggtgtcccacaattcagttcatttctgacactaactacaaatagttagcacagactctgctagggctcagtctcacaagrtctgcatcagtttagacaccaatcatgtgtctaagccacctatacttttgaccaataggctataagtcagggggctcactcaacctcttcctaaggtttgataatttgctatgatagcccatacaactcaggaaaacaattcacaaattattactgggttatcgtaaaggatacaactcagaaacagctaaatgagatagatgtatagggcaaggtatggctgcaggagcttccatacccagtctgggcacaccaccctccaagcacttcatcaatgggctcaccaactagaagctctctgaattcca

SEQ ID NO: 433962 - DNA, 518 bp, Homo sapiens
gagggcctatttaactgggcacatgtgtctgaggcttcatctgataatgttctatatcacacttctgacaccaaatatgggagaggacttctcatatcaactaagtctccaactctctctacacaaacttggtgtcccacaattcagttcatttctgacactaactacaaatagttagcacagactctgctagggctcagtctcacaaggkctgcatcagtttagacaccaatcatgtgtctaagccacctatacttttgaccaataggctataagtcagggggctcactcaacctcttcctaaggtttgataatttgctatgatagcccatacaactcaggaaaacaattcacaaattattactgggttatcgtaaaggatacaactcagaaacagctaaatgagatagatgtatagggcaaggtatggctgcaggagcttccatacccagtctgggcacaccaccctccaagcacttcatcaatgggctcaccaactagaagctctctgaattcca

SEQ ID NO: 433963 - DNA, 578 bp, Homo sapiens
cctttaaagaactttcttaataactctacctagcagattctccttaaatctcaaagatctgaactatgacacatgaccaaccttatctgtgagggaggattaggaatttcttagcaaaggagataaataaatggatactgggtggaccactagcggtctctacctcgactgyagaggtagagattatacctcaaatgcagcccaaaattttatataaagagtagttctaccatagctggaaaaccacaagtgatatttattttttgttttattttgaaaacattttattattttgctttcttcccacttttacattttcctacattgaacatctgttatacttgtaatcagatgaaatgttatatatgagtagccagaactattatactagagatataaactaattcagagggattagtcctaccaggtatcaaataatgttttaggccgggtgcagcggctcatgcctttaatcccagcactctgggaggccgaggcatgtggatcacttgaggtcaggagtttgagaccagcctggccaacatgggaaaaccccgtctctactaaaagtacaaaaa

SEQ ID NO: 433964 - DNA, 626 bp, Homo sapiens
tgttatacttgtaatcagatgaaatgttatatatgagtagccagaactattatactagagatataaactaattcagagggattagtcctaccagrtatcaaataatgttttaggccgggtgcagcggctcatgcctttaatcccagcactctgggaggccgaggcatgtggatcacttgaggtcaggagtttgagaccagcctggccaacatgggaaaaccccgtctctactaaaagtacaaaaattagtggagcatggtggtgtgcacctgtagtcccagctactcgggaggctgaggcaggagaactgctctaacccagaaggtggaggttgcagtgagccgagattgtgccactgcactccagcctgggtgacagagcgagactccattcaaaaaacaaacaaacaaaaataatgttttaaagttttcataaacaaaatgaacaatagtagaaaattgatcactagtaccaataaaagtttcccaaaacaaatatatatgtatgtatgtgtatatatacatgtttgtatacacacacatacacatgcacacatatataaatgtactataaggcaaaattttaaaaatagtttattcaagattgataagtatctaaagtataac

SEQ ID NO: 433965 - DNA, 650 bp, Homo sapiens
gttttgtgggccaggcccagggcctcccagctgtgtgcagcctagggacttggtgccctacatcccagctgctccagcagtggctaaaaggggccaaggtacagcttgggccattgctttaaagggtgcaagccccargccttggcagcttccacgtggtgttggtcctgcggatgcacagaagtcaagaattgaggtttgggaacctctgcctatatttcagaggatgtatggaaatgcctggatgtccaggcagaagtttgctgcatgggtggagccctcatggaaaacctctgctagggtggtgaggaaggaaaatgtggggtcgaagccctcacacagagtccctactggggcacggcccagtggagctgcaagaagagggccaccatcctccagatgacaaaatggtagatccactgacagcttgcaccaggtgcctggaaaagccatggacattcaacatcagcctgtgaaagaagccaggaggggagctataccctgcaaagccacagggtagagctgcccaaggccatgggagcccacctcttgcgtcagtgtgacatggagtcaaaggatgtcattttggaactttaaggtttaatgactgccatagtagattttgaacttgcatgtagtctgtagcctct

SEQ ID NO: 433966 - DNA, 650 bp, Homo sapiens
gttttgtgggccaggcccagggcctcccagctgtgtgcagcctagggacttggtgccctacatcccagctgctccagcagtggctaaaaggggccaaggtacagcttgggccattgctttaaagggtgcaagccccaggccttggcagcttccacgtggtgttggtcctgcggatgcacagaagtcaagaattgaggtttgggaacctctgcctatatttcagaggatgtatggaaatgcctggatgtccaggcagaagtttgctgcatgggtggagccctcatggaaaacctctgctagggyggtgaggaaggaaaatgtggggtcgaagccctcacacagagtccctactggggcacggcccagtggagctgcaagaagagggccaccatcctccagatgacaaaatggtagatccactgacagcttgcaccaggtgcctggaaaagccatggacattcaacatcagcctgtgaaagaagccaggaggggagctataccctgcaaagccacagggtagagctgcccaaggccatgggagcccacctcttgcgtcagtgtgacatggagtcaaaggatgtcattttggaactttaaggtttaatgactgccatagtagattttgaacttgcatgtagtctgtagcctct

SEQ ID NO: 433967 - DNA, 612 bp, Homo sapiens
cagacagctcaacgcctcagttatgtaaacaagaggtatctacgtagatacatagctagattcctagatagatggtatctattatatcccagatggttttctaggtcagggaatatactggaagatctggatttgaatacagacttcagtttgaatggagcttgacaagtcaattactttcaagtttaagttcctcctctgggaaatagcacaaatagcacacatgacaccacttcataggatgtgctraagagtaactggcttaatgctgttaacctcccaaccttgttcgtatgacagtgctttctgaggctgaaaatctgatcttcccaggtttgaccagttgctctgtttagctaaggtcagcctgtttattatttgggacagtcccaagagaggcaagattagcatcctttgaactgaaaggaacccttctcatctggagggtgaagaaggaagaacagaatgtcctggtggcatttagaatggaatctctagcccttctccttggacactgtttgcgtcatgaaaaaaactgtaatatggagacgctgtctccagcaagaaatttatggctatatttcaatagtttgttcaaatttagaccatgcc

SEQ ID NO: 433968 - DNA, 612 bp, Homo sapiens
cagacagctcaacgcctcagttatgtaaacaagaggtatctacgtagatacatagctagattcctagatagatggtatctattatatcccagatggttttctaggtcagggaatatactggaagatctggatttgaatacagacttcagtttgaatggagcttgacaagtcaattactttcaagtttaagttcctcctctgggaaatagcacaaatagcacacatgacaccacttcataggatgtgctaaagagtaactggcttaatgctgttaacctcccaaccttgttcgtatgacagtgctttctgaggctgaaaatctgatcttcccaggtttgaccagttgctctgtttagctaaggtcagcctgtttattatttgggacagtcccaagagaggcaagattagcatcctttgaactgaaaggaacccttctcatctggagggtgaagaaggaagaacagaatgtcctggtggcatttagaatggaatctctagcccttctccttggacactgtttgcgtcatgaaaaaaactgtaatatggagacgctgtctccagcaagaaayttatggctatatttcaatagtttgttcaaatttagaccatgcc

SEQ ID NO: 433969 - DNA, 513 bp, Homo sapiens
ggtaacagtgactatttcagaacaatgtggttgtgggattatttgatttcttgtttggcttataatttcttaagcagatacacaataatagagtatctcctttgttacaagargagattatttttaaaaagcaaaaaacaaaagaacgaggaaccaatataatttagaaaaaaaaaagattttaaaaaaattttagaaaaaaagaaattttaaatcctaaatgaatgttacccaacatttttaatgaaagttaacgtttactagaaacttgctatttgacagccactgttcttagtgctttaaatgtattaatatatttgtttttcataacaacccaaaaggtagacactattactattttcattttacaatgagggaacacataagaggttacgtaaattgcctgacatcatacaactagcaagtggttgagcttactacacaacactgttataaaacccaagctttcaatcacaacattaaatattatcaatattaatattcttagctaaa

SEQ ID NO: 433970 - DNA, 579 bp, Homo sapiens
tttctgtcctgtgcccctccttttttcctttctgtgcatttgtcatgaattaagtctgcttattttattcctccagttttcttgaaacaagtttttgtatcttactgatttaccttttcctttaaaaattgtattggtatcttttccattgctttaatctttatttcttcttctttccaggacttctgtccttttttagttattaagctatttttttcttttatttcattcatgtaataaacactctggcagaaataataacattttaaataccattgtagattgatatgtatatgccttttgcaaagtattactatttttcctgcatttgcctttgaagccacacatttcaacattctcacctattaatattattactagagtctatttamatctcttaaaccataatttataatatgagatttcacaagatacacttgtggctctgagttatttcaaaactgatatttctgtgcattctgacattttattccttttagaaacaaattcagttggctgtagaattaatatcgttctgcttaacaactttgtgcatgacatattaactgattttgttgt

SEQ ID NO: 433971 - DNA, 620 bp, Homo sapiens
tctggaactcagattcctgggggttcagattttttctcagtggatcctcacacaatacatctttatctaagtccatacatgatctgagtttatttctgatatagcaggaacccaaattctcctgaaaacgaacagggaagagaaaataacagtctactctataccagcttatcttaattcagactaattggtagttagggcattggaggaatggtgtgaattcttgaaagtagattttcgctgtctgctggaaaactctgcctgaaatccccaaatctgcctcatgtaacagcttgacatctttggtgggaaacctgccatttcttattcatagtgtctccaggcaaccaagacaaaaatgtagaaattttcctagactttgccctctctttcatcatcagttttctattagttttacttcctaaaatcctcctgctgacatcctcttcccttcaacccaagagccaatgactcaacctctaccgttgcccaccctgtctattakctggccttcctctcatttcagacctgaacagattctgtaggatacaacgacagtaaggcggtccttagtcacagttctggttcataaatagcgaggtcagcatttaggactgaga

SEQ ID NO: 433972 - DNA, 552 bp, Homo sapiens
aggccaggaagatcactggagactggcctgggcaacatagcaagaccccatctctacaaaaaatttttaaaaaattagctggatgtggtggtacacatctgtagtcctagctacttgggaggctgaggtgagaggattacttgagcccaggagcytgagcttacagtgagctatgatcatgccattgcactctagtctaggttacagaatgagaccctatctctaaaaaatttttttaaacaaaaaaatccccacattattttcttctcaaatagagccccaactgtcatctactcattttctctttctgtgactaaggaagtaaatgttaagaaaatgtggctggatggcttgagcccaggagtttgaggctgtgattgtgccactgcactccagcctgggtgacagagcgagatcttgtctccaaaaaaagaaagaaaaaaaaaattgtcatcagtgtacttaatggtcaggtgtaaaagcaataaggtgttttcaatttctttttctataggaactacaattaaaaacaggacaggaagaaggtctaaa

SEQ ID NO: 433973 - DNA, 518 bp, Homo sapiens
aaaaatcagaactctacattcaaagaaaaccaaattgtatatgtactttatatattaaaaagccattattttagtgccaccttttaaaaagaaagtcataatccacaaactaattttgaagttcaaagaaattgaaattttaaattttatgtaagcaaaaaatactgtatttaaaatacctagaatgcaattatctctaccttactttagaaagatttattctctcttcataaattttacattacattttcttagtgacrtttaatagtgacatgggtgcattcccacacacacccattccacccagaaatgtcatcaccagttgtaattttttaggttttttccttttaagtagagcttaaaaagaatctcttattcatctttcaaaccccactcacagtttaagaatgtttgtagaatatatttaagttacttgctagacttcctaggatctcctactggagtatttaaggatatgacaaaattaacatttttatagttgctctttctcttcctaa

SEQ ID NO: 433974 - DNA, 518 bp, Homo sapiens
aaaaatcagaactctacattcaaagaaaaccaaattgtatatgtactttatatattaaaaagccattattttagtgccaccttttaaaaagaaagtcataatccacaaactaattttgaagttcaaagaaattgaaattttaaattttatgtaagcaaaaaatactgtatttaaaatacctagaatgcaattatctctaccttactttagaaagatttattctctcttcataaattttacattacattttcttagtgacgtttaatagtgacatgggtrcattcccacacacacccattccacccagaaatgtcatcaccagttgtaattttttaggttttttccttttaagtagagcttaaaaagaatctcttattcatctttcaaaccccactcacagtttaagaatgtttgtagaatatatttaagttacttgctagacttcctaggatctcctactggagtatttaaggatatgacaaaattaacatttttatagttgctctttctcttcctaa

SEQ ID NO: 433975 - DNA, 518 bp, Homo sapiens
aaaaatcagaactctacattcaaagaaaaccaaattgtatatgtactttatatattaaaaagccattattttagtgccaccttttaaaaagaaagtcataatccacaaactaattttgaagttcaaagaaattgaaattttaaattttatgtaagcaaaaaatactgtatttaaaatacctagaatgcaattatctctaccttactttagaaagatttattctctcttcataaattttacattacattttcttagtgacgtttaatagtgacatgggtgcattcccayacacacccattccacccagaaatgtcatcaccagttgtaattttttaggttttttccttttaagtagagcttaaaaagaatctcttattcatctttcaaaccccactcacagtttaagaatgtttgtagaatatatttaagttacttgctagacttcctaggatctcctactggagtatttaaggatatgacaaaattaacatttttatagttgctctttctcttcctaa

SEQ ID NO: 433976 - DNA, 518 bp, Homo sapiens
aaaaatcagaactctacattcaaagaaaaccaaattgtatatgtactttatatattaaaaagccattattttagtgccaccttttaaaaagaaagtcataatccacaaactaattttgaagttcaaagaaattgaaattttaaattttatgtaagcaaaaaatactgtatttaaaatacctagaatgcaattatctctaccttactttagaaagatttattctctcttcataaattttacattacattttcttagtgacgtttaatagtgacatgggtgcattcccacacacacccattccacccagaaatgtcatcaccagttgtaattttttaggttttttccttttaagtrgagcttaaaaagaatctcttattcatctttcaaaccccactcacagtttaagaatgtttgtagaatatatttaagttacttgctagacttcctaggatctcctactggagtatttaaggatatgacaaaattaacatttttatagttgctctttctcttcctaa

SEQ ID NO: 433977 - DNA, 366 bp, Homo sapiens
acagccagccacaagtccaatcatttaaaaaaaaaaaaaaaacttgaatgtctattatgcctttctacatagaaatggtgtggtttcgctatctaacccttgggcaaataattctgtatacataatagcagcattacgagaaggtataaagatgtgaaaagccagagattatataagaataatttttttaaacccacctggctggaatttagctaaaatgcaattggcagtcagtctgcatgttcgtagaatctctcctctcttttgtggwgggaaaggaaaggtagagggaagggaaacacctgtttgagggagcagaggatgattccctgagcatgcaaaattctctagacttaatctctccct

SEQ ID NO: 433978 - DNA, 602 bp, Homo sapiens
aacactatctagctagaatataatagtattgcttgatttgttgcattgatttttatgactatgtgctatttataacaatgatattggtttctctatccataatgccatcacatttgctttttaagtaaaaaagtgaattgacttaaagaaaaatgttaggtaagtaatagtacaagcggtacacagataagtcagaaaatgtgcagatggtaccagcrggtagagttattgacaataagcccatagctctgtcttctgacttgataacttttcacacatgttgtgtatctggttctatagtgggattgaccactaatgagttactttaatcaggctgacacagaaaaacaaatgcgctctaatctcctttcaactggtcaagttttaactttattaggtatattaaataactcatattgctcctttgggacacacagaaaaagggggaaaattccttttgtgccaaacagtacagttctatgttaaatcccattgcagcccacaggcaaaatcccatagctgccaatgccatatcaaagaaggttctctatttccctatccctgtagctcagagttaataacacttggtttacctaattaca

SEQ ID NO: 433979 - DNA, 550 bp, Homo sapiens
tttgtttccccagagtcattcatgtagtaggcattcattatttgctaaatgaatacatggctgctctgttggtttcctargcttttgaaagttcttcctaccttattctcttccctgtccctggttgacttcccatctacatgaaccctattcccatttattttctctttattcctagagctttgacacatgccacttgaggtgacctaacaacatccacttagttagcttgatagattcttattcacatccttagtctgaatagcagggcatactcaggcacccaacatgtccacagagagaagagggagatggtgtcaccaaaaggaaaagctgcaattgccagcctatagatgccactgattaccacaccagagccaagaaacttcacatctttggactctgttttctcatccatagaaggggaatacaatattaatgtttttcaacatatctagctttatgaagctaacaggattatttaatatctctgttccaatagtagcagagtataacaaatagtaatttttaaaaagagcactctcaagtt

SEQ ID NO: 433980 - DNA, 575 bp, Homo sapiens
gtgaccccaagacctgtctgaagtccagaaccagatatattatgacagtggtatattttatttccttaaaatttaacaaatacatttcactttaattcaggtaatactttttgagtccctctatatgccaggcttgttgaaagagttgaatttgtttggaagtgtaatgtaggaaacttacatgagggccatttgcaggataggagaacaaatgaagaccctgacatttagactacctttatccttctttggatcactccatattagaaaagtgactctctggataggtattatcactaatttgcatgtataaaaatagtttatgtttactgttgcctatgttttgtgctgatttagttaataaagaaacacagaaaggaaactaagttgtcaataaaattccagcaaggagaagtaagggcaatatcaggttagctgttgtctctttaatacatagtagtgtcaagggagaagaaaaaaatcccttgtgacacmtatctatactcatttttgttgttgcgaatatgattgtaattagggctacttgtctgtctttcctgacatctcttggggag

SEQ ID NO: 433981 - DNA, 575 bp, Homo sapiens
gtggttaatttcaccaagaagatataacatttctaactttgaataccctaatactatagcttagaaaaatataaagcaaaagttaatagaactcaaggagaaattggcaaatccactggcatagcagaagatttttaaaacrtgctcaatcatggctagataaagcaaagaaaaatcataaggattgtgacagtcacagctactttcagcctgatatgtggagctttttcctttcttgaaataagtacttggctatccagaataaagaccacatttcccaacttccctgatacccaggtgtgttcatgcgactaagctcttggtaaaggaaaaaatgcagcagtgacaagtaccccttctggataatgcccttaaaaggaaaatgtggtctgtccaggtccctcctgtcttccttcctgctagctggaatagatatgtgaaggtaggagttagagatgaaccatgagatggaggcatgtgtcgaggggaagatcaacaaaataggaatgtgggccctggacactataaacctcttggattgcttatgtgatcgctgctacataagagggaagtaa

SEQ ID NO: 433982 - DNA, 577 bp, Homo sapiens
gtaaagcggactgtcgtccataatataagtggccctcatccagtcaactgaaggcctgagtagaattaaaaggctgaccttcccccagccaagtgagaattcttcccatctgatggctttaaaactgggacaacagcttttttcctgcttttggactccaactgaaacatcaactcttcytgagcatcgagtctgccagccttcacactatgacaacatcttcgatttcctgggcctccagtttgctgactcaccctgaaaatattaggacttgttagtgtccataattgtgagtctgttccttataataaatagttttctatattttatgggcatcctactcatttgttactctggacaaccctaatacagccagccatttgagaaagtaaagcaagaatgattaacaaaaaattcaaagtggtgatcacatctgttgaggacagagaggaagataattcaggcggggacagacaggggactgtaaggttcatgacaatgctccattgtttcatctgggtggaaaactttatgaatgtttacataattattagtctttaaagttactctcattata

SEQ ID NO: 433983 - DNA, 635 bp, Homo sapiens
ctctccagtacccttgcccgtctgtcttcattttatcaaatgacaaaatactaatcctgactaaattcaattagcagtctcttctcatcagcactttgttgactgaatgtaaatggtaaaaaaaacgcatagctgtactgacttgtttcattttaagttcatgtccaccaaccacctttagctatcttgcaatattactgcatttctatggtccatttattcttccactctcctaaacaattattttacattctgtcccagttcctctaagtttcgacacctcctgccactgttgattctctgctgaagatttgatttctgtttcactgagaaattagaagtaatgaaaacagaagttctctatgcttttaccaacacatcttccagtgcacctgcagctatttctactgctatatttgactgtatttgaatgtgagtttgggtgccctatagcaactatctcccatatctcctgcatcataaatttctccctcttctgaatattctcatcagtatgtaaataccctgtaatatctcccatatttaaaaaaatttaaagctttatttcgttcattwgactcatattccccttcagctataattccatttctctgctcttctttacagcaaaagtc

SEQ ID NO: 433984 - DNA, 564 bp, Homo sapiens
attatctcttacttttacaaacaccctatggtgtaggctttttatccgcatttgacggaggcagtttcatcatctctcttggatatgagaaacatccctgacttgaggcagaaagtatagaaatagctgcccactcccccctctgtggggtgcatcactgaagtgcttctgatggggtgctgcttttaccaacctggatttaaaaggtacctmttcctaagtaacttatccagcatctgcttcagcttaaagtgtcaaaattctccgttgttctttcctgttcctggtctgcatgctaagtattgccttttcccacaccctttctcctttgcattgggtcctaaggaagcctccttggctgagtatccttttgttgttatgttagatggttctttaccttccagatggaatgtactgcccctaaaagatggatctttgctgctgcctctcatctcattctacagcaaacaactgaagatagtctaaaagtaaggttcaaactccttaatatggttcatctagcaggagagtcattttattgtctttctaagtctactgaaggag

SEQ ID NO: 433985 - DNA, 367 bp, Homo sapiens
agcaatgtgtgctgggattgtcgctttcatgcaccccagttctcatatcaggtataagggagagaaaggaagwtagaaggaagggaggggacagtgggcagaaatttctgacgtggatctgcaggtatagccttaataatttgggggtaattcctggcacacagcaagacatgtcaggatctggattgtgggctcaggaatccctataaatgaatgaaggatcacaactgagcatgtggaaagataactgactcctaagagtaaatgattatagctgtaacctctctactaaaagaccaatagcatgagtattttattttcttaattgagctttaatcccaaaatggcacagcaagattttaagctt

SEQ ID NO: 433986 - DNA, 516 bp, Homo sapiens
gcagagcttcctgtatcaacatgagccctgtgattaagtgcagctcatcaaatcaaacttctcctttctggataataaatttaatcttagagtgggatggcttgttcttcctgacacctgatatcaatcaggactattccagctcatcagacatctcctaataccctaataactttgactgttcaaagagatatatccttagtatactctccttctgcacctcccctcatcataatacattataaaaattccttgtgaacattaatggcaagtatgcaccaggatcttgtcaagscaaaaactcctggaaatgctagtttttaaatcgggcttagattaaaagaaacaaaattactgatgaccttatgaagaggatgtagttactctaattctccatatccaaaccatagtaacagttttcagaataataggtgagtttcatagcatcctacagaagtgaacaattagcttttctaagtattatgaacccatggtttaaatgtatcaatgtgtttt

SEQ ID NO: 433987 - DNA, 394 bp, Homo sapiens
cctcccctcatcataatacattataaaaattccttgtgaacattaatggcaagtatgcaccaggatcttgtcaagccaaaaactcctggaaatgctagtttttaaatcgggcttagattaaaagaaacaaaattaytgatgaccttatgaagaggatgtagttactctaattctccatatccaaaccatagtaacagttttcagaataataggtgagtttcatagcatcctacagaagtgaacaattagcttttctaagtattatgaacccatggtttaaatgtatcaatgtgttttaatcttttgcagttatcactctttttttttttttttgagacagagtctagctctgtcacccaggctggagcgcagtggcatgatctcggctcactgc

SEQ ID NO: 433988 - DNA, 571 bp, Homo sapiens
gattagaatccagaagatgacagggataattcagggacatactcttatcttatgctagtagaagaagcataaagctgccggatgattttgattgctgacacccaaaaagagccatatattaaagttgtatccctcagcaatgttattccaaaccaaattttctagatatggatgaaagtgttgatattagrtatttgtgatgtgatacataatcctgaagggataatcctagggtaaggccaaggataactaccatgggtaaaaagcattagtttttgttgttgttattgttgtttttcctgacaatgaaaacagtgagtgtcccaaaagccaattatctcagaaggagcaggatctaggccacaaaatgaggactcagaaagcagctttgaagcaggtgattatggccttggacacaagaggacctagagcttgttctctctctctctcatttccagataggttggccagctttctccacatggaagtagactcagagctggactgtgaagtatccaagaagggtcccaaggaaaggggcttgacctttatggatatgagatcagtcata

SEQ ID NO: 433989 - DNA, 584 bp, Homo sapiens
ggaaccactacatggaaaatgggggtagagtatcagaggaccacggtgtaggtcctccagctggacatcaaagttcttacacaactatctgatcactgagaattagctcttaatgaccaggtcttattgaagaaattaccagtccttgcagaacttatagataatgagctaaatttgcagtactaattatcagaaaaagaagagcagtcttgccatggcaggcatggaaggagttcttttttacttccttactctccttactgctcaaacacctggtacagctggtaaggccagaattatgtaaccctcagtataaaaatgagagtatatacccagatgaataaaatccttcacctatagcaggaaaaaagtgtatttaaaattctcaaatgtaaagtacgactataaaattttgatgcaggtgccayaaatgacatggaaatcagcatcgttagtatagagcagggaatagcaaactatagcttgcaggccaaatctagcccattttctgtttttctatggcctgtgagctaagaatagtttctccattttaaatgtaaaattgcaaaatattaagggatttt

SEQ ID NO: 433990 - DNA, 572 bp, Homo sapiens
atcatacacaaaaattaacttaatggattctagatccaaatataagaactaagattataaaatgctcagaggaaaagagagacatcatcttcatgaccttggattaggcaacagtttctcagataggacacctaaaacccaagtartaaaagaaaaaacagataaattgaacttcatcaaaattaaaacttttgtacttcaaaggaagaaaggataaatgagaagataaaatgagagaaaagatttgcaaatcatatatctaataagtggcttgcattaaaaaaaatataagaaactccaacaactcaaaaataaaaagacaaatacccaatttaaaatatcaaaggatccggctagaaatttctccaaagaagatattcaaaaggccaataatcccatgaaaagatgctcaacaccattagtcattagtagaatgataatcaaaaccaagtgataccacttgatttgtgttgggatggctgtaattaaaaaaaaaagatggagaataacaagtgttagcaaggatttagagaaaggggaaatttcatacactactggtatgaatgtaaaat

SEQ ID NO: 433991 - DNA, 428 bp, Homo sapiens
tattttattttgcatagctctagctttcagttataggtctctctgcataacggaggagttgctggggccatcagaatttgtcatctactaatggtctcatcacagttatacctctgggtttagagctggggctgggatcttgggaaaaggaaagggagaaactgaggccattctcackcaagtccaaatttagaaggcctctatggccaacatcaaatgccagattataagagaggacaccttatttgaatctgtataaaatctcaaattcttaaaagtcatgatgtctaaaagaagaaaaataccaaggcatagtaataattatatttttaaggtcatgccaccagccatgtcaccagccaaatgaagaattggaaatagtttcagacatctgcccaactagaccaattataatatcccttttattt

SEQ ID NO: 433992 - DNA, 585 bp, Homo sapiens
gctttccatgtgagcttatcttcattatttgccagggaaaccaaaggtttggatggcccaagatttgtctaaagtatcctaagaatctacaaaaacaaagaacaaaacaaaacaaaaaaaactcttagaatttttctgattcaaacccataaaatgtttattatgttaactttttttattattatactttaagttttagggtacatgtgcacaatgtgcaggtttgttacatatgtatacatgtgccacattggtgtgctgcacccactaactcatcatttaacattaggtatatctcctaatgctttatactttttaatgaacgttagaatgatagcaactaccacattttagacaatcatttctgtgctatatacattatatattaattcaaacctaacacccaccttactagttaratattaataagcccattgtatagctgtggcaaatgaagtccacagaaattatgttattggactgaggccacccagcctgtaagtaatactctgtcccttgaattcagaaatgcctgactccgatgacagttctctgcccactttgtcacactaccgtttctcaaaa

SEQ ID NO: 433993 - DNA, 585 bp, Homo sapiens
gctttccatgtgagcttatcttcattatttgccagggaaaccaaaggtttggatggcccaagatttgtctaaagtatcctaagaatctacaaaaacaaagaacaaaacaaaacaaaaaaaactcttagaatttttctgattcaaacccataaaatgtttattatgttaactttttttattattatactttaagttttagggtacatgtgcacaatgtgcaggtttgttacatatgtatacatgtgccacattggtgtgctgcacccactaactcatcatttaacattaggtatatctcctaatgctttatactttttaatgaacgttagaatgatagcaactaccacattttagacaatcatttctgtgctatatacattatatattaattcaaacctaacacccaccttactagttaaatattaataagcccattgtatagctgtggcaaaygaagtccacagaaattatgttattggactgaggccacccagcctgtaagtaatactctgtcccttgaattcagaaatgcctgactccgatgacagttctctgcccactttgtcacactaccgtttctcaaaa

SEQ ID NO: 433994 - DNA, 585 bp, Homo sapiens
gctttccatgtgagcttatcttcattatttgccagggaaaccaaaggtttggatggcccaagatttgtctaaagtatcctaagaatctacaaaaacaaagaacaaaacaaaacaaaaaaaactcttagaatttttctgattcaaacccataaaatgtttattatgttaactttttttattattatactttaagttttagggtacatgtgcacaatgtgcaggtttgttacatatgtatacatgtgccacattggtgtgctgcacccactaactcatcatttaacattaggtatatctcctaatgctttatactttttaatgaacgttagaatgatagcaactaccacattttagacaatcatttctgtgctatatacattatatattaattcaaacctaacacccaccttactagttaaatattaataagcccattgtatagctgtggcaaatgaagtccacagaaattatgttattggactgaggccacccagcctgtragtaatactctgtcccttgaattcagaaatgcctgactccgatgacagttctctgcccactttgtcacactaccgtttctcaaaa

SEQ ID NO: 433995 - DNA, 504 bp, Homo sapiens
attaggcctgttcatgtcctacattaggcagaagagcaagcaagcaatagctcatatamctattaattgtttatcagatttaccgtggtctaaatcagtgctgtctaacaaaaatagaatgcaagtcacaagtgttagtcatacaatatcattttaattattctagaatttttttaaataaaacacatagaatttattttaattacatatttaatttaaccaaatatactcaaaggttatttcaaaatgtagtcaatatagaaagacattgttcacttttttttattatgtctttgaagtctcataagcagaacatttcaatttgtactggctacatttcaagtggttaatagccacatgtggccaatggctaccagtggacagcatagtcttgatagttcttggcttaactgacccaactccctatattcagaccatacctctactttatctagagatccatttatctatcaactgattgatttattgatacatcttctcaaa

SEQ ID NO: 433996 - DNA, 504 bp, Homo sapiens
attaggcctgttcatgtcctacattaggcagaagagcaagcaagcaatagctcatataactattaattgtttatcagatttacygtggtctaaatcagtgctgtctaacaaaaatagaatgcaagtcacaagtgttagtcatacaatatcattttaattattctagaatttttttaaataaaacacatagaatttattttaattacatatttaatttaaccaaatatactcaaaggttatttcaaaatgtagtcaatatagaaagacattgttcacttttttttattatgtctttgaagtctcataagcagaacatttcaatttgtactggctacatttcaagtggttaatagccacatgtggccaatggctaccagtggacagcatagtcttgatagttcttggcttaactgacccaactccctatattcagaccatacctctactttatctagagatccatttatctatcaactgattgatttattgatacatcttctcaaa

SEQ ID NO: 433997 - DNA, 660 bp, Homo sapiens
ggcagaagagcaagcaagcaatagctcatataactattaattgtttatcagatttaccgtggtctaaatcagtgctgtctaacaaaaatagaatgcaagtcacaagtgttagtcatacaatatcattttaattattctagaatttttttaaataaaacacatagaatttattttaattacatatttaatttaaccaaatatactcaaaggttatttcaaaatgtagtcaatatagaaagacattgttcacttttttttrttatgtctttgaagtctcataagcagaacatttcaatttgtactggctacatttcaagtggttaatagccacatgtggccaatggctaccagtggacagcatagtcttgatagttcttggcttaactgacccaactccctatattcagaccatacctctactttatctagagatccatttatctatcaactgattgatttattgatacatcttctcaaagaatttgagaagagctggcacttctctaaatatcctctgtcttacctatctgttcttaggctctggttaacttcaaactcctaaaaccctgactttgatgtaaagtcagaacctcttcctcttcttctgagtttagctgcctggctaccaccctgaagattctgcctgaccctaagaaaact

SEQ ID NO: 433998 - DNA, 564 bp, Homo sapiens
tcatcatctcaaacagaaactccatacctctgcatttctgtcttccaccaacccctggtaacctctctcgtactttctgtctctatgaattggtttattctaggtatctcatttaagcaaaatcatacaatatttgttttttgtgtctggcttattttatatactataatattttcaattcatgttgtagtgtgtatctaaattcccttcctttttaagtctgaataatattatatgtgtataccaaatgtatttatatattcatatgttaatgggcatttgggctgttctcaccttttggctattgtgcatatatgttggtgtacaagtatctacttgagtccctgcttccaattatttggggtatatgcctagaagtggaattactgggtcatatggtaattctatgtttaactttttcaggcacctctgtgctgtttyccacagtggcagcaccattttgcatttccaggaacaatgcgtggggattgcaatttctccacatcctcactaatgcttcttatttcctggtgctttgataatagccgtcctaatgggtgtgag

SEQ ID NO: 433999 - DNA, 564 bp, Homo sapiens
tcatcatctcaaacagaaactccatacctctgcatttctgtcttccaccaacccctggtaacctctctcgtactttctgtctctatgaattggtttattctaggtatctcatttaagcaaaatcatacaatatttgttttttgtgtctggcttattttatatactataatattttcaattcatgttgtagtgtgtatctaaattcccttcctttttaagtctgaataatattatatgtgtataccaaatgtatttatatattcatatgttaatgggcatttgggctgttctcaccttttggctattgtgcatatatgttggtgtacaagtatctacttgagtccctgcttccaattatttggggtatatgcctagaagtggaattactgggtcatatggtaattctatgtttaactttttcaggcacctctgtgctgttttccacagtggcagcaccattttgcatttccaggaacaatgcrtggggattgcaatttctccacatcctcactaatgcttcttatttcctggtgctttgataatagccgtcctaatgggtgtgag

SEQ ID NO: 434000 - DNA, 590 bp, Homo sapiens
tttttgagaaaaggtagtgtgacaaagtgggcagagaactgtcatcggagtcaggcatttctgaattcaagggacagagtattactcacaggctgggtggcctcagtccaataacataatttctgtggacttcgtttgccacagctatacaatgggcttattaatatctaactagtaaggtgggtgttaggtttgaattaatatataatgtatatagcacagaaatgattgtcaaaatgtggtagttgctatcattcttacgttcattaaaaagtataaagcwttaggagatatacctaatgttaaatgatgagttagtgggtgcagcacaccaatgtggcacatgtatacatatgtaacaaacctgcacattgtgcacatgtaccctaaaacttaaagtataataataaaaaaagaaaacataataaacattttatgggtttgaatcagaaaaattctaagagttttttttgttttgttttgttctttgtttttgtagattcttaggatactttagacaaatcttgggccatccaaacctttggtttccctggcaaataatgaagataagctcacatggaaagccaggc

SEQ ID NO: 434001 - DNA, 636 bp, Homo sapiens
acaatgtattgaatagtcgttttttaacccactgatctacaataccagttttgtcatatcacgagattacatatatacctagatctgtttctataccctttatcatactggtctatgtgctggttaatactgtcaactttattggattgaaagatacaaagtattgatcctgcgtgtgtctgtgagggtgttaccaaaggagattaacatttaagtcaatgggctaagaaaggcagacccacccttaatctggttgggcacaatctaatcagctgccagcgaggctagaatataagcaggcagaaaaatgtgaaaagagagactggcctagcctcccagcctacatctttctcccgtgctggatgcttcctgccctcaaatatcagactcaaagttcctcagttttgaaacttggactggctcttcttgttgctcagcctgcagacaacctattgtgagaccttgtgatcatgtgagttaatacttagtaaactcccctttttatatatatgtatttcccattagttctgtgcctctagagaaacctgactaatatagtctatttgtctcttcttgaaccartatgacactgtattacttataactctgtaacaaagtcttgataatctagtaaga

SEQ ID NO: 434002 - DNA, 569 bp, Homo sapiens
agggcaagaaggctgtgatgtgttttacatagaaaatatgtatgttagattagcttcattcaggcataagttatagtactattggcatatatagatatacatatagtatattatgtattttaaaacatgtgtatatttatataaaatatatatgacagtagcatggtaactcatgatggaatgcccatattttattaatatataatattaatgaatcawctatatgttcaataagctgtctttaaacagacacatttaaaacaaggctatgtattgtgttggttgacaaaaatatgactagaggctcacaggaacctacgcttgtatttcccctaggagcaggtgttcaagattggcaaattcagtgctgatgataactttatagaacataactactgtaaataatgagaactgactgtcttgtgttaataagttttaaattttcttcaacacataagaacaaggaaccaataggaaaactttatatgtgtcactctgtcttcgggaacttataatttaagaatagctgaatagaatcaaaagtataacatttactgagcactcactaa

SEQ ID NO: 434003 - DNA, 626 bp, Homo sapiens
gatgcccagataagattactacaggagatatygaacattttgacagtgtcctacaccattatgggaacggagactactaatatatttaaagcacagaattgtaactaagagaaaatgttgggtcactaataataatatgctagtatattactatagctgctatattataattatttttaaaatagccactgcataggacatccctgaactgatggtcacatggtgagcacactgtgccagaaaagcgccaatgaccaagagacagtttcactcactaggctaccactctctagtagcactgatgcaaatgcagagattgactccagcatgagcaacttgctttctaagatccagagtcttatagcacctgccagaatgggctacgtcaggtaagtgtctgtaccagcttgcaggacatgacatggaatcaaggcaatttatgaagtgtttactgtgcatctacagtgtgccaggcactctggtgggcatggagtttcagagataactgagacataagcctgcttaattatgggttatttgttgaaactcaaggctctgtcctcctaattttccttctttgaggactaattacaagtcattttaatataataataagagctttgcaa

SEQ ID NO: 434004 - DNA, 626 bp, Homo sapiens
gatgcccagataagattactacaggagatattgaacattttgacagtgtcctacaccattatgggaacggagactactaatatatttaaagcacagaattgtaactaagagaaaatgttgggtcactaataataatatgctagtatattactatagctgctatattataattatttttaaaatagccactgcataggacatccctgaactgatggtcacatggtgagcacactgtgccagaaaagcgccaatgaccaagagacagtttcactcactaggctaccactctctagtagcactgatgcaaatgcagagattgactccagcatgagcaacttgctttctaagatccagagtcttatagcacctgccagaatgggctacgtcaggtaagtgtctgtaccagcttgcaggacatgacatggaatcaaggcaatttatgaagtgtttactgtgcatctacagtgtgccaggcactctggtgggcatggagtttcagagataactgagacataagcctgcttaattatgggttatttrttgaaactcaaggctctgtcctcctaattttccttctttgaggactaattacaagtcattttaatataataataagagctttgcaa

SEQ ID NO: 434005 - DNA, 564 bp, Homo sapiens
aactgcctggctgtgaatctccatcaccaaatgccacctgcaatggttctctgagctggcaaaactctgtcagkctgcccatgtgttgtccctgagctgcttttgacctctgctgctcatctctccagctgatggaaaaaaacctttactgcttcatgtcctactgtttgtaaagtaagagggagatctttcactacagtcacttgagtatcctagtgttgaagatctagttgttgagattctttttttacaggcttgtcctgagcccatccacattttccaaggcatcagacgtaacggtttatgtctcaattccaactgcaagaagtattcaagcgtttccctgtgccccaaggaggtgccacagtatttagcactatgccactcccttttgccaacttttgactaggtgaattgaaaatacagaggcaagaaatgggtttgatagcagggaggagtagggctggatgtagagtaggagttagtcaatgctgagagtcaggctggacaaaaaaaggatctcagtgtttactctgccatgccaaaaagaatattagaaaatat

SEQ ID NO: 434006 - DNA, 534 bp, Homo sapiens
ccgtctcgttgctatggttagagtacatgctgcttctgtcttctaaccttcttacgcagcactgtggccatcactcattggtactattcatgctcctgcaaattaaagcacaggtgctgccctcctctcagggtgcttcctrtaaaactgagcaaaatgagtattcatcctgatgcattcaaaaaatatttactgaacactgatatgtgcttgtctggtatctcaagctgatttgctttatctgaaaagcgtctagtttacagatggattagctttcccttgtattatttgccaaatattctaaataaataatataaaggcagagatgctgtaaaaattataaaaatgaaggtgtcatatctcaggattctatagtcagccctttatcctttctcttctcactctacactcctccttggaatgtaaaataccctttaatgattataattagcccctaaagtctctatcatcagtccatacatgactgctgaatttcatacctatatgtgcaactactaaccagtcatcttcaga

SEQ ID NO: 434007 - DNA, 547 bp, Homo sapiens
gggctcattagtagactgcatgtagctgaaggaacaatctctgagcttgaggatatataaacagaaacttccaaaactgaaaagcaatgagaaaaaatattttttaaaaaacagaatatccaagaactgtggaacaactacaaaatgtgaaacatacacataatgggaatatcagaaggagaataaagagagcaaggaacagaagcaatatttgaaggaataatgactgagaatgttggataccaaaccacaaattcaggaaccttagagatacctcagagaacaccaaactgaataagtgcccaaaaaaatatttacacctaggcatataatcttcagctgcagaaaatcaaaggtaagaaaaaagatgaaagaagccagaggaaaaaattccttacctayagaggagtaaagataagaattatatccaacttctcctcagaaaccatgcaagcataaagagagtgaagtgaaatatttaaaatgttgagaaaaaaaaacaccactagcctagaattctccatcctgtgaaattatccttcaaaag

SEQ ID NO: 434008 - DNA, 587 bp, Homo sapiens
gtttgttcaaaataataacagcaacaatgcacttgattagaaattatgtttaagtaaagtgaatgacagcaatgggataagaggcatgaattaggaatattttattatcataaggtacttgcactacctgtgaagtgttatagagttatttgaaagtagacttggactcattgttaatgtatattgcaaattctaaggcaaccactgaaagaagtaaaaaaagaagtgtaattgatgtgctaagaaaagaaagaaaattgaatcatataaaatgctaaattaaaactacaaatggcagaaaaaagagtggaagacaaaaataggaacaaagaacaagggcaattaatagcaagcagtaacaaatatggtagatattaatccaacaatatcaataattactttaaacatcaatagtcaacatatgacaactaaaagatattgccaaagtagattaaaaacaagatccaacattatgttgtctacatgaataccacttaaatataaaaatacatrtaattaaaagtaaagggatggagaaaaatatatcacgctaacactaatcaaaagaaaactggagtagctatatt

SEQ ID NO: 434009 - DNA, 564 bp, Homo sapiens
agagagaagcatagtatcacacacatgtatttttagaaagtcttcgagttcagttttcttagagttctattcggctccacctcatttgcttcctgaacctgaaagtgtttctaaaaggaaagtgtcatccagaagagtagctaacaggatccaagtctgtctgccttacatccccacagctaccaccaaagcaccttatctggaatgttgtagtgccaatcccgattcaaggcagaaggggtttcaagacctccagcctaatactgttggactcagtgaggattacccccmcttctgggccatcatcaattttgtgcccacataaattctggcttgacctgctggcctggcttgaactcctggcctgttctccacttgtatcccagagttcaggtaatcaaatctctgtagctgatcatatttgagaagaggaagggaaatgccaatcaaaaccacaatgagatgtcatctcattccagttagaatggctactgtcaaaaaaaacaagaagaagaaatgtctacccttccccagctcaccgccagtaggaaaccttccaaagcc

SEQ ID NO: 434010 - DNA, 483 bp, Homo sapiens
caagttctctaaacatttgtgatattaattctatcaagctctaatcctttggccatcactcgtcttcttgttcttaagaagaacctctacttatcctttgccatgatgggttaaatataaaataagatataataaagtaaatgaaaagcaaggaaaactattaggtttgtacttgtgtaccaactctgagagatgattrgagatgactgaagcactgtgttgggaaggattctgaggccagatctgtactcagaggaaaggtactaatattagagcggtccatgggcatgagcaatgcacacattgtccatccttgaaagatttagagtcttactcttgagtccaaaaggccagttcacaaggacatcagtatggaaggttggtgttgcaataatacatatgaagatttggagtttggaccaactacaggctcaatatgagccagcaacatgagagcattgccagagatggcagcatgggtgg

SEQ ID NO: 434011 - DNA, 483 bp, Homo sapiens
caagttctctaaacatttgtgatattaattctatcaagctctaatcctttggccatcactcgtcttcttgttcttaagaagaacctctacttatcctttgccatgatgggttaaatataaaataagatataataaagtaaatgaaaagcaaggaaaactattaggtttgtacttgtgtaccaactctgagagatgattggagatgactgaagcactgtgttgsgaaggattctgaggccagatctgtactcagaggaaaggtactaatattagagcggtccatgggcatgagcaatgcacacattgtccatccttgaaagatttagagtcttactcttgagtccaaaaggccagttcacaaggacatcagtatggaaggttggtgttgcaataatacatatgaagatttggagtttggaccaactacaggctcaatatgagccagcaacatgagagcattgccagagatggcagcatgggtgg

SEQ ID NO: 434012 - DNA, 623 bp, Homo sapiens
gaggtccactgggtcaacagagcagccttcgtgagctcacttccaaatcctgttactgtctttgccagaaatttagaacagcctgcttcccttacctccatgtccataccccttcagagtttctgattagcactagttctcaaaacaggaatattatggttttgttttattgtattaagttcttcgggaccttaggtgttttcatccttctttgcttcttgttcagtgaaaattaattctactgcaaaagataaaggtcatacttttatgtgatgtgcctttttcagttcccactaaaactttatcaaatgtattttccccattgtctctgcagaaggaataggggaagtctcggtagtgaaaaatcccttctgttccacaaagcaccttctccttaaaatagtrccctcaagggacacaggcaggcagatgcttacagtggccaaatgatcagctgcaagagttttaggaaaacaaataaatcctctgagccctgcgggtcatacctgctctattgttttaatctatcttcagttgagtccggcaaagaccaggtcagataccggcacaatattggaaatgactccagcttgtaaagaaaaatgaaggaatgcaatgagact

SEQ ID NO: 434013 - DNA, 581 bp, Homo sapiens
tgaatgaattcccaaagacctttgggagtaaatctcagacaaccatccagaggtgaatgggagctaccttatatgactcctgagagcaaaatgtgcacccagagatagatatcatgtaatagcatgaaattgcatgtagctacaaatcagggctctcctacctgcaccctccagctgctgtgtaatcactttggagagctctttaaagtggctacaatccctcagcaataacttggaagcagttcattactctcggcatactatttgggaacctgataatagtaataataataataataataatgataataataataataaaagtaactactgtttaatgaatgtttgctatgtgtcaaaccctgtgcttagtgctttatgtacttgatcttgtttaacctttgtaacaaaggtttcattcataggtattatgaagtggattcataaataccttggaaagaccaagtaggtattatgaatmcactctacagaagaggacagtaagaatcaaatttgtggaagtctacccatctggtaagttggagatgtatcttgatgccagatctcatcactgagccagt

SEQ ID NO: 434014 - DNA, 655 bp, Homo sapiens
tatgttcatctctggccaatcagcagtaaccagaagactaagaactataagaatacatcagatctcagtcaaattatatgtctaacataactcagcagacagaacaataaacatycactactactcccataagaccaagttctttctacatgggaaacaccctacaatagaggcatttcctggaagggctattcatttttcagtgagctgtaacagttttcaaatgtctgtagatgcctctgattgcaaaaaatagtcagatcttttcattgtgaagacccctttgtcctctaaacttgctcactatctggctagagccctcctactcaaggttataccactgactgggtcaaatctgttttctggcttcaggaatgaaacataatgagccaatgtatttatctctgatgggcaaagctccaccttcaagcccttaagtgaccttgtagactctactatagtgacatcctgttgatgacaagaagtcaggggatctgagttctggccccacattttgccttccaaggccagatgctgttggccaggtcacctctcttgagactcagggattcagtatctaccctcctgttcacagaacacagacaggatcatggggatgaatgaccatgtacacttgagttgtgaaatcctctgc

SEQ ID NO: 434015 - DNA, 655 bp, Homo sapiens
tatgttcatctctggccaatcagcagtaaccagaagactaagaactataagaatacatcagatctcagtcaaattatatgtctaacataactcagcagacagaacaataaacattcactactactcccataagaccaagttctttctacrtgggaaacaccctacaatagaggcatttcctggaagggctattcatttttcagtgagctgtaacagttttcaaatgtctgtagatgcctctgattgcaaaaaatagtcagatcttttcattgtgaagacccctttgtcctctaaacttgctcactatctggctagagccctcctactcaaggttataccactgactgggtcaaatctgttttctggcttcaggaatgaaacataatgagccaatgtatttatctctgatgggcaaagctccaccttcaagcccttaagtgaccttgtagactctactatagtgacatcctgttgatgacaagaagtcaggggatctgagttctggccccacattttgccttccaaggccagatgctgttggccaggtcacctctcttgagactcagggattcagtatctaccctcctgttcacagaacacagacaggatcatggggatgaatgaccatgtacacttgagttgtgaaatcctctgc

SEQ ID NO: 434016 - DNA, 655 bp, Homo sapiens
tatgttcatctctggccaatcagcagtaaccagaagactaagaactataagaatacatcagatctcagtcaaattatatgtctaacataactcagcagacagaacaataaacattcactactactcccataagaccaagttctttctacatgggaaacaccctacaatagaggcatttcctggaagggctattcatttttcagtgagctgtaacagttttcaaatgtctgtagatgcctctgattgcaaaaaatagtcagatcttttcattgtgaagacccctttgtcctctaaacttgctcactatctggctagagccctcctactcaaggttataccactgactgggtcaaatctgttttctggcttcagraatgaaacataatgagccaatgtatttatctctgatgggcaaagctccaccttcaagcccttaagtgaccttgtagactctactatagtgacatcctgttgatgacaagaagtcaggggatctgagttctggccccacattttgccttccaaggccagatgctgttggccaggtcacctctcttgagactcagggattcagtatctaccctcctgttcacagaacacagacaggatcatggggatgaatgaccatgtacacttgagttgtgaaatcctctgc

SEQ ID NO: 434017 - DNA, 580 bp, Homo sapiens
aatgagaagaaagagaagagaartcaagaaaggggagaagcaagaatagaacccacagaacatcagtatctaaggggtttgttaaaataaaaaataaataaaataggagtttataaagtagcctacaaataagtgaccagggagataggaagaaaactaggatagaatggtgtcagtaaaagaaacggttttaagaagggaaaacttttcaataattgtaacacacgtagcgagctgcttccccagtatttaaaaggagcagtatgctgctccttttaaacaaaacccttttttcagaccatcagtggatctggtaaataaataaacaacaatttcccaggtacctttgtatcccaaagctcatccatctctggtcaattacaggcagatgcctatctacttgggggggctgccaggaaaattattattgtcctcatacaagtggccaaagaactggcacctcacttttaccctttgcattttctcctttcttccctcctaaatgattctatgcctaaaggtgcagcagctgtctaatggtcatgagtacaaaagatacaaaatagatgatggagaggaa

SEQ ID NO: 434018 - DNA, 584 bp, Homo sapiens
  misc_feature (1)...(584): n = A,T,C or G
aaacgacaaatcactttcttcaaaccacacctaatatagaacctcggtatgcaaaacagactttttaaaaagcaacagcaaagatgctatggttgaagcaggtagaagaggagtagagagtgacccacttccctctccctccccctggctacgtggctgaccctgagacagcatcataaagatggtagtcatctgctatttttaatctgtccagaatgtctttgataagagaagannncccctncncacacaaacacancacacacacacacacacacacacacacttataaattcatatcaagaacatggaagcacatcaaaaccaaagacaaaccttgcattgcaattaatgttgaccatgagatctgaagtctttggtaaaggtggttattccagcatctcagggccaagaggagtcttagtgttgagtcacccagctagtcaagccagatgcgtagcctctgtgtgatgctgcctctaatcattttccctgtacttatttcaaagagatttcataatagaggaagattactgccaaagcagataattttgtyttattttgttttgagacagggtcttgct

SEQ ID NO: 434019 - DNA, 610 bp, Homo sapiens
taagctctttagatccatgacttggcacatgtagctttaagggtcatagggctgtcattgcaaggccaagatataggcagaaaggaacaggaagtcagaagaaaaataaaaattatgagagattaaggaagggagacgggatggagcaaatatgcatattgaaggaaatgccacaatcttggtttccggtgtcttcgggggaactgtttcactagatactcaatggaccaccaacctgccactaggacaggaataccacacactcaacgctgggcaaagtgctgccctcaaaaagcaagaacagaattatatataccatgtagtggccyttaaaatgtgggatgtggcttaaaatgaacctgaatttgcatctcagctgaggaaacttagacaaactacctgacctttggaagcctcaattttctaatttctgaaatgtgggggtaataacagcaacttccaagtgcttggcacaaagtggatgttcaatagatgatgactctgcgtttcctccttgtcacttttcctgtcacagcaccacagcagcacagtcttagaggctttgcagtgccatttgctgcttttcctgaatggtgacttgaagcagcag

SEQ ID NO: 434020 - DNA, 523 bp, Homo sapiens
agcatggtccatagggatccaaaataactattttccattctacattaagaaaaaacaaaaacattggggaaagatatttcattcaatctgtttctatgagactgaacaagtcttaatggctgaatgaagattgatggtacacaatggctctcagactgaagaagatttctttacaaagttttaataaaccaggattttctataaaayggaatgcccttcctgccactggagcctggagccattcaatttagatgggtttccaaaagactggttaacatttccctggaaatgacaggaaggaaagtcagacagtgaaggactcagcagggaggaatgactgagcaaaggaacttgctgcagtgctggacttgaactccttggctgcatgactcatttaaagcacccaaggttttgtcaagggaaggtagtggtgaatagacgggagaagagtccactggacatctgcgataaactagctgccaggaaaaattgtcaaaacatccagagtattagcaaagggtca

SEQ ID NO: 434021 - DNA, 523 bp, Homo sapiens
agcatggtccatagggatccaaaataactattttccattctacattaagaaaaaacaaaaacattggggaaagatatttcattcaatctgtttctatgagactgaacaagtcttaatggctgaatgaagattgatggtacacaatggctctcagactgaagaagatttctttacaaagttttaataaaccaggattttctataaaatggaatgcccttcctgccaytggagcctggagccattcaatttagatgggtttccaaaagactggttaacatttccctggaaatgacaggaaggaaagtcagacagtgaaggactcagcagggaggaatgactgagcaaaggaacttgctgcagtgctggacttgaactccttggctgcatgactcatttaaagcacccaaggttttgtcaagggaaggtagtggtgaatagacgggagaagagtccactggacatctgcgataaactagctgccaggaaaaattgtcaaaacatccagagtattagcaaagggtca

SEQ ID NO: 434022 - DNA, 547 bp, Homo sapiens
gaggggtttgaaacatcagtggaggagtgacttcagaagtggtggacatagaaagagaactcgaattagaagtggagcttgaagatatgactgaattgctgcaatctcataataaaacttgaacagataagttgtttctcatgggtaagcaaagaaagtagtttcttgagttggaacctgatattgatgaagatgctatgaacattgttgaaatgagaacaaagaactcaagatattgtgtaaacttagttgataaagcagcagcaggatttgagaggattgactctaattttaaaagacgttctactgtgggtaaaatgttatcaaacaccatcacatcytacagagaaatctttcatgaaaggaagagtcaatggatgtggcaaacattattgtcttattttaagaaactgccacagccaccccaaccttcagcaaccagcaccatgatcatcaaccaccaacgtcgaggcaagacccccaccgggaaaaagattatcgctcgctgaagactcagatgattgctagcactttttagtaataaagt

SEQ ID NO: 434023 - DNA, 547 bp, Homo sapiens
gaggggtttgaaacatcagtggaggagtgacttcagaagtggtggacatagaaagagaactcgaattagaagtggagcttgaagatatgactgaattgctgcaatctcataataaaacttgaacagataagttgtttctcatgggtaagcaaagaaagtagtttcttgagttggaacctgatattgatgaagatgctatgaacattgttgaaatgagaacaaagaactcaagatattgtgtaaacttagttgataaagcagcagcaggatttgagaggattgactctaattttaaaagacgttctactgtgggtaaaatgttatcaaacaccatcacatcctacagagaaatctttcatgaaaggaagagtcaatggatgtggcaaacattattgtcttattttaagaaactgccacagccaccccaacyttcagcaaccagcaccatgatcatcaaccaccaacgtcgaggcaagacccccaccgggaaaaagattatcgctcgctgaagactcagatgattgctagcactttttagtaataaagt

SEQ ID NO: 434024 - DNA, 593 bp, Homo sapiens
tgccccatggcttttggttagagtcaataatgaagaggtttttgtttgtttgttttgttttgttttcccctggttcctgtatgctgcaggtagtagtcatctaactgtctggtagtcctcctgatttgcattctccagcctttggcaacattaaaaaaaaaaaaaaagctttactgaggtgtaatttacacacaacaagtttactcattttaagtacacactttgatgatttttttttttttttgagacgcagttttgctcttgttgcccaggctggagtgcaatggcgcagtctcggctcactgcaacctctacctcctgggttcaagggattctcttgcctcagcctcccaratagctgggattacaggcgcccaccaccacacccggctaatttttatatttttagtagagatggagtttgaccatgttggccaggctggtctcgaacttctgacctctggagatccgcccaccttggcctcccaaagtgctgggactataggcatgagccaccacgcctggccaatatatatacatatttttaagagacagagtctctatcacccaggctggtgtgcagtgatatgatc

SEQ ID NO: 434025 - DNA, 550 bp, Homo sapiens
cagaatcaccagagaaataaattaacacagattccggggccccgccactgctcagtctattctatgggtctagttgggagccccggaatctgtgggtttaataaaccccagaagaacccaatgaagtttggaatccaatggttaggggtgcttttttggattccttctaagtgagaaattgtgactgtggaagtgatgactcactgtgaagcrcacgggccctgaaatccaccccttcaagctgttgatctttgtatgcatttatttcctcaagatgttgctggctcttcccgggccaggaagcagatgctgtgcccggtaaggcccgtccttccagtccagcctttaccacccatgcggagtgagggtgagggctccgaaggtgcttttgaccctaatgtcataaccatggggggtggacacagatgtaaactcgaaactcttcttattattgaaaaatgtaaatatatacaaaagtaaagagaatagtataatgaatccttatttatccactacttagattcaacaattatcaagattttgccacata

SEQ ID NO: 434026 - DNA, 660 bp, Homo sapiens
ctctgaaattccaaagaaacaaaaacataagataggcacaaaatcatygggcaactaaaaaatgagatattttgtactttttgtgtatcacattagtttgaatgtcgatatgtttcactgctaaaatattaatggatttgattacagggtgctactccagaccccactgggagtattaagtactctatggaatgtgtgtcatatcctcctcctataccctactgaatttcagaaacatctggctttaaacctttcgaataaggaattgtggactcgttcaatagacacagcagtacctttggcccagacaggcaggcctggatttgaaagccctctttagttctgtggcaagaggcttcccttctctgggcatcagtttcctcctctgtagaatggagctaataatggtaacttcctcatggggaggaggggagaagggtagttgggattaaatgggataatttatatacggaatttaagaccctccctggttccccagtccgtgcacaaaaaagaatacttttcaccacataatatccccattcgttccacagaacccaggccagtaatacaacaatcaaaacatgaaagaacagaaaacaaaaaaatcattcccaataaaaggaaggcacaaaagcagagagtgacaggaaaattatc

SEQ ID NO: 434027 - DNA, 489 bp, Homo sapiens
gtgtggcaattttgcaaattccactgcctattttccaagtatttctctccattcatttatttacccatcattcatccatccattcttggcctttttttcggccaatcactgaactcatgtagggatgcaaaagagagtaagacacagcccccaagggtgagacagacaggcttttcatttagcagttcatgattaactagaagaatgttttcttgttgtaatgaaaaccccattaccatcactagatcatcaaccctgctcttaaggagatctaatccctggaggtcctcttgttgcggacagagctgggatgggcgtggtttrgcagggttagaagcagagggaggaagaacaccatgaattctgtattatgaaggcatggaatgtgtgaggtgtcccagaggaactgcagaaaatagagactggcaccagcaagaccgagctctaaatggaggaaaagccaggtgcggtggctcacacttataatct

SEQ ID NO: 434028 - DNA, 626 bp, Homo sapiens
ttttcttgttgtaatgaaaaccccattaccatcactagatcatcaaccctgctcttaaggagatctaatccctggaggtcctcttgttgcggacagagctgggatgggcgtggtttggcagggttagaagcagagggaggaagaacaccatgaattctgtattatgaaggcatggaatgtgtgaggtgtcccagaggaactgcagaaaatagagactggcaccagcaagaccgagctctaaatggaggaaaagccaggtgcggtggctcacacttataatctcagcamtttgggaggccgaggtggatggatcacgaggtcaagaaatcgagaccatcctggccaacatggtgaaaccctgtctttactaaaattacaaaaaaaattagctgagcatggtggcgcatgcctgtagtcccagctattcaggaggctgatgcaggagaatcacttgaacccaggaggtggaggttgcagtgagctgacatcatgccagtgcactccagcctggggacagagcgagactccatctcaaaaataacaaataaataaataaatagaggaaaatgctccgcactggaatagctaaatggcttcaagagaaaggagagtttcaaggaacggag

SEQ ID NO: 434029 - DNA, 603 bp, Homo sapiens
aatcactgaactcatgtagggatgcaaaagagagtaagacacagcccccaagggtgagacagacaggcttttcatttagcagttcatgattaactagaagaatgttttcttgttgtaatgaaaaccccattaccatcactagatcatcaaccctgctcttaaggagatctaatccctggaggtcctcttgttgcggacagagctgggatgggcgtggtttggcagggttagaagcagagggaggaagaacaccatgaattctgtattatgaaggcatggaatgtgtgaggtgtcccagaggaactgcagaaaatagagactggcaccagcaagaccgagctctaaatggaggaaaagccaggtgcggtggctcacacttataatctcagcaatttgggaggccgaggtggatggatcacgaggtcaagaaatcgagaccatcctggccaacatggtgaaaccctgtctttactaaaattacaaaaaaaattwgctgagcatggtggcgcatgcctgtagtcccagctattcaggaggctgatgcaggagaatcacttgaacccaggaggtggaggttgcagtgagctgacatcatgccagtgc

SEQ ID NO: 434030 - DNA, 603 bp, Homo sapiens
aatcactgaactcatgtagggatgcaaaagagagtaagacacagcccccaagggtgagacagacaggcttttcatttagcagttcatgattaactagaagaatgttttcttgttgtaatgaaaaccccattaccatcactagatcatcaaccctgctcttaaggagatctaatccctggaggtcctcttgttgcggacagagctgggatgggcgtggtttggcagggttagaagcagagggaggaagaacaccatgaattctgtattatgaaggcatggaatgtgtgaggtgtcccagaggaactgcagaaaatagagactggcaccagcaagaccgagctctaaatggaggaaaagccaggtgcggtggctcacacttataatctcagcaatttgggaggccgaggtggatggatcacgaggtcaagaaatcgagaccatcctggccaacatggtgaaaccctgtctttactaaaattacaaaaaaaattagctgagcatggtggcrcatgcctgtagtcccagctattcaggaggctgatgcaggagaatcacttgaacccaggaggtggaggttgcagtgagctgacatcatgccagtgc

SEQ ID NO: 434031 - DNA, 593 bp, Homo sapiens
gtgaaacaaacccttctcctctatgccttcaccatcccttaaacacacatgaattgtgcccctctaaaaggttaagtagcttacacatcaggctccccctataagccataccccttccagagcgatatgattgtgagctttgattatttctcatgtatttggcaaaagcaacaccaaaatgttagcagggataacactggagcagcaagaccatggctgatttccactttttgatgtggctccaacttttctttygacaacatataatttctttcgtgcatatttaactgattataaaagtttcttagaactgctattgatcaacttcaaaatcacacaaagttcggggtctaagagtaggagacatgggccaatgtctcaattttaaagcaggaaagtgggtgatcctgatatctacaaataaataagcctggacgactacagaccaataatggttcccggcaaaattatagaacaaatggtttgggaacatttcgaaaaaaatgtgaatgttgggaaaaggcaatgtgcgtccacaatgacaaaggcatgccaaaaccaatcgatttttctcttgtggttaccaagttggt

SEQ ID NO: 434032 - DNA, 593 bp, Homo sapiens
gtgaaacaaacccttctcctctatgccttcaccatcccttaaacacacatgaattgtgcccctctaaaaggttaagtagcttacacatcaggctccccctataagccataccccttccagagcgatatgattgtgagctttgattatttctcatgtatttggcaaaagcaacaccaaaatgttagcagggataacactggagcagcaagaccatggctgatttccactttttgatgtggctccaacttttcttttgacaacatataatttctttmgtgcatatttaactgattataaaagtttcttagaactgctattgatcaacttcaaaatcacacaaagttcggggtctaagagtaggagacatgggccaatgtctcaattttaaagcaggaaagtgggtgatcctgatatctacaaataaataagcctggacgactacagaccaataatggttcccggcaaaattatagaacaaatggtttgggaacatttcgaaaaaaatgtgaatgttgggaaaaggcaatgtgcgtccacaatgacaaaggcatgccaaaaccaatcgatttttctcttgtggttaccaagttggt

SEQ ID NO: 434033 - DNA, 593 bp, Homo sapiens
gtgaaacaaacccttctcctctatgccttcaccatcccttaaacacacatgaattgtgcccctctaaaaggttaagtagcttacacatcaggctccccctataagccataccccttccagagcgatatgattgtgagctttgattatttctcatgtatttggcaaaagcaacaccaaaatgttagcagggataacactggagcagcaagaccatggctgatttccactttttgatgtggctccaacttttcttttgacaacatataatttctttcgtgcatatttaactgattataaaagtttcttagaactgctattgatcaacttcaaaatcacacaaagttcggggtctaagagtaggagacatgggccaatgtctcaattttaaagcaggaaagtgggtgatcctgatatctacaaataaataagcctggacgactacagaccaataatggytcccggcaaaattatagaacaaatggtttgggaacatttcgaaaaaaatgtgaatgttgggaaaaggcaatgtgcgtccacaatgacaaaggcatgccaaaaccaatcgatttttctcttgtggttaccaagttggt

SEQ ID NO: 434034 - DNA, 562 bp, Homo sapiens
cacaatgacaaaggcatgccaaaaccaatcgatttttctcttgtggttaccaagttggtagatcaggtgagatgccaaagatatcatgcacctagatttcagyaaagcatctagaaaaacctcctatgatccacttgtagataagacagtgaaacagagtgaagctgcttgcaccactgtctatgtagccaggtggttactaccccactgaccgtacatcactccctcctttgggccgccattgtgctctgtgcatatgctctcagagcacttattaaacttgattgagttacttgtctttctactagaccaggtgtcagcaaacacacccacaggcctaacccagcccgtcacctgtttttgcagttttataggaacagccacgccacttgtctccatcttgtctatggctactttggtgccacaatggcagagttgaatagttacaacagagaatgtatggcccgcaaagctgacaatatttaccatctaggcctttagagaaaaagtgtgccaatcatgatctcttttcaagctgatgatctctttccaggcaggacag

SEQ ID NO: 434035 - DNA, 572 bp, Homo sapiens
attaagacagcctaactaccgttcataggcaattgtttatgtattatggcacttctactcaatggaaaactagacagctgttaaagagaatgaggtatctcaatgtgtgatgtggaatgatctccaagattacagttaaataaaaatggttcaaaatattgtagatcaccgggcacrgtggctcacgcctgtaatcccagcactttgggaggccaaggtgggtggatcacctgaggtcaggagttcaagaccagcctgaccaatatggtgaaaccctgtttctattaaatacaaaaattagctgggcgtggtggcaggcacctgtaatcccagctactcgggaggctgaggcaggagaatcgcttgaacctgggaggtggaggtcgcagtgagccaaaatcacaccattgtattccaccttgggcgacagagtgagactctgtctcaaaaaaaaaaaattgtagataatatgtgccatttgtatgaactacatataatatatatatacacacacacatacatatttataaatatctagaaaatctccagaatagtatagaataaaatggtgc

SEQ ID NO: 434036 - DNA, 572 bp, Homo sapiens
attaagacagcctaactaccgttcataggcaattgtttatgtattatggcacttctactcaatggaaaactagacagctgttaaagagaatgaggtatctcaatgtgtgatgtggaatgatctccaagattacagttaaataaaaatggttcaaaatattgtagatcaccgggcacggtggctcacgcctgtaatcccagcactttgggaggccraggtgggtggatcacctgaggtcaggagttcaagaccagcctgaccaatatggtgaaaccctgtttctattaaatacaaaaattagctgggcgtggtggcaggcacctgtaatcccagctactcgggaggctgaggcaggagaatcgcttgaacctgggaggtggaggtcgcagtgagccaaaatcacaccattgtattccaccttgggcgacagagtgagactctgtctcaaaaaaaaaaaattgtagataatatgtgccatttgtatgaactacatataatatatatatacacacacacatacatatttataaatatctagaaaatctccagaatagtatagaataaaatggtgc

SEQ ID NO: 434037 - DNA, 572 bp, Homo sapiens
attaagacagcctaactaccgttcataggcaattgtttatgtattatggcacttctactcaatggaaaactagacagctgttaaagagaatgaggtatctcaatgtgtgatgtggaatgatctccaagattacagttaaataaaaatggttcaaaatattgtagatcaccgggcacggtggctcacgcctgtaatcccagcactttgggaggccaaggtgggtgratcacctgaggtcaggagttcaagaccagcctgaccaatatggtgaaaccctgtttctattaaatacaaaaattagctgggcgtggtggcaggcacctgtaatcccagctactcgggaggctgaggcaggagaatcgcttgaacctgggaggtggaggtcgcagtgagccaaaatcacaccattgtattccaccttgggcgacagagtgagactctgtctcaaaaaaaaaaaattgtagataatatgtgccatttgtatgaactacatataatatatatatacacacacacatacatatttataaatatctagaaaatctccagaatagtatagaataaaatggtgc

SEQ ID NO: 434038 - DNA, 481 bp, Homo sapiens
gaggtctcattatgttgcccaggctggtttcaagctcctaggctcaagcgatcctcctgcctcagcctcccaaagtgctgagattacaggcatgagccatagcgyccagcctcaaaggttttcttgattatggtggtcattatacaaatctgcacaggactacatacacatgtgcacacacacaaatgagtacatataacacaaatgatatctgaataagactgtagcattgtcaatttcctggttttgatgtcatactatacctacataaaatattaacactggggaagtggggtgaagggcacacaggatccctctgtaccatttgttgccacttcctgtgagtctataatgttttttttttttttttttttttttttttttagacggagtctggctctgtcgcccaggctagagcacagtgccataatcttggctcactgcaacctccacctcctgggttcaagtgattctcctgcct

SEQ ID NO: 434039 - DNA, 536 bp, Homo sapiens
atctagaaaactctgacccctggctacctggacagcagggtaggacatacgtctccagccactagccacaggtggcaactgagcccttgaaatatggttagtgtgacttgagatgtgctgtaagagtcatgyacacattggattttgaagactcagaattttaaaaaagaatgtaaaatatctgagagtttttttatgcaattacatatggaaatgataatattttggatatactgggttagaaaaaaagtgttgttaaaattaattttgtctgtttctacttttttaacgtggctactagaaagtcttaaattacctttgtagctcatatcatatttctactgcacagccagactcaaggagacactcatcattctagagtggggattacagtcataactaaaaacgcaagaaggctggccatgctggtttccacctgccaactctatgatgttaaacgagttctcaatctctgatgttcagtttcctcccctgtacacaggcataacatccacaccctgggctgctgctgagcg

SEQ ID NO: 434040 - DNA, 536 bp, Homo sapiens
atctagaaaactctgacccctggctacctggacagcagggtaggacatacgtctccagccactagccacaggtggcaactgagcccttgaaatatggttagtgtgacttgagatgtgctgtaagagtcatgtacrcattggattttgaagactcagaattttaaaaaagaatgtaaaatatctgagagtttttttatgcaattacatatggaaatgataatattttggatatactgggttagaaaaaaagtgttgttaaaattaattttgtctgtttctacttttttaacgtggctactagaaagtcttaaattacctttgtagctcatatcatatttctactgcacagccagactcaaggagacactcatcattctagagtggggattacagtcataactaaaaacgcaagaaggctggccatgctggtttccacctgccaactctatgatgttaaacgagttctcaatctctgatgttcagtttcctcccctgtacacaggcataacatccacaccctgggctgctgctgagcg

SEQ ID NO: 434041 - DNA, 536 bp, Homo sapiens
atctagaaaactctgacccctggctacctggacagcagggtaggacatacgtctccagccactagccacaggtggcaactgagcccttgaaatatggttagtgtgacttgagatgtgctgtaagagtcatgtacacattggattttgaagactcagaattttaaaaaagaatgtaaaatatctgagagtttttttatgcaattacatatggaaatgataatattttggatatactgggttagaaaaaaagtgttgttaaaattaattttgtctgtttctacttttttaacgtggctactagaaagtcttaaattacctttgtagctcatatcatatttctactgcacagccagactcaaggagacactcatcattctagagtggggattacagtcataactaaaaacgcaagaaggctggccatgctggtttccacctgccaactctrtgatgttaaacgagttctcaatctctgatgttcagtttcctcccctgtacacaggcataacatccacaccctgggctgctgctgagcg

SEQ ID NO: 434042 - DNA, 524 bp, Homo sapiens
gccacgagcagggcttgtcaaagggcagactgctgagctctggccccagactttctatctacttcagtgggtatgagcgcatttgtaactagttcccaggtgatcctgctgctacaaggcacctgtcgagaaccactgaactacatccatctgtaggrgtacaggagatgggtggcaccttgccctaaagagtaaagacctagtgggtggccgaggcataaacacgtgaaaacacctaaatgacaaaaggtttaaggaactacacttcaacatacaatgccatatctaactaactgccaaaaattccagagtcaaagaattacaaaagttagacagaactgagctagaccttgaaggatagaaaggtctgtataagaaagagatgaatgctttccacgggaagagcattccaagtggaaacaatggttcctattatcccaatatttgtgtttgtaaaatcatagcttttggagctggaagagacctggcctgtatgtctttggaaaacactctaattcttacat

SEQ ID NO: 434043 - DNA, 490 bp, Homo sapiens
gataatgttttcacagccagtgttattcccaacccatttttaaatgcaatctgaacaacacccctttccacactggattccttgtacttaaatggttccagctacctcaggcctgagaaacctatttctctctatagaccacacatcagtttggctgagggaagaacagagggaaagcaggattgcaaggatggcaggtgcagggctgaaagaagaaaattaaattcaccagacatgggacacctgggctgaggacctttacaccaaggagcttaagatctccsttggccacatgggaccatctagaaaggactcttttaagtctaaccatctttgggtctgtggttgtactgtattgattccatgttctcattttaagtgagctaacgaaatgcagcaagccatgaaaatttaaaaggactagaatgaattgagaagttatttagactgagagcaaagaacaggcaaagcaagtggcaatcttgttgga

SEQ ID NO: 434044 - DNA, 490 bp, Homo sapiens
gataatgttttcacagccagtgttattcccaacccatttttaaatgcaatctgaacaacacccctttccacactggattccttgtacttaaatggttccagctacctcaggcctgagaaacctatttctctctatagaccacacatcagtttggctgagggaagaacagagggaaagcaggattgcaaggatggcaggtgcagggctgaaagaagaaaattaaattcaccagacatgggacacctgggctgaggacctttacaccaaggagcttaagatctccctkggccacatgggaccatctagaaaggactcttttaagtctaaccatctttgggtctgtggttgtactgtattgattccatgttctcattttaagtgagctaacgaaatgcagcaagccatgaaaatttaaaaggactagaatgaattgagaagttatttagactgagagcaaagaacaggcaaagcaagtggcaatcttgttgga

SEQ ID NO: 434045 - DNA, 490 bp, Homo sapiens
gataatgttttcacagccagtgttattcccaacccatttttaaatgcaatctgaacaacacccctttccacactggattccttgtacttaaatggttccagctacctcaggcctgagaaacctatttctctctatagaccacacatcagtttggctgagggaagaacagagggaaagcaggattgcaaggatggcaggtgcagggctgaaagaagaaaattaaattcaccagacatgggacacctgggctgaggacctttacaccaaggagcttaagatctcccttggccacatgggaccatctagaaaggactcttttaagtctaaccatctttgggtctgtggttgtactgtattgattccatgttctcattttaagtgagctaacgaaatgcagcaagccatgaaaatttwaaaggactagaatgaattgagaagttatttagactgagagcaaagaacaggcaaagcaagtggcaatcttgttgga

SEQ ID NO: 434046 - DNA, 579 bp, Homo sapiens
gaaattgtggatcttcagtctttagctatttgacatatctgcagcttttgtacattgcttccattcagttacacaaatgtccacttgtccatttagaaactaaagaccttcagtatcacataaaactgatcatcagttgttctttggrtataacacattagacttgctgtggtctactcaaatggagagttcccagtaataaaggctgccagaaacttacccatgcttcaagctaattcctcctccagtcccagtgacccagcctaaatggtaaaactgtttgcaaagttctgggatcaggtatcttggatgctccttgtccttaaaaagaaggtaatgatttttaaaacagacatcattttatcaagtaactattccagctggtgtttctaataagaagccaatttaagaaagtttaagaaaacatactatagaaagagtacagtgaaggaaaaaactattacaaacatattttgtttttaatgtttagaaagtggatctactacattatttggcaacctgggagtattcggtatagggccatatagtccaacactaaggaacaggctgcaaaaacaa

SEQ ID NO: 434047 - DNA, 579 bp, Homo sapiens
gaaattgtggatcttcagtctttagctatttgacatatctgcagcttttgtacattgcttccattcagttacacaaatgtccacttgtccatttagaaactaaagaccttcagtatcacataaaactgatcatcagttgttctttggatataacacattagacttgctgtggtctactcaaatggagagttcccagtaataaaggctgccagaaacttacccatgcttcaagctaattcctcctccagtcccagtgacccagcctaaatggtaaaactgtttgcaaagttctgggatcaggtatcttggatgctccttgtccttaaaaagaaggtaatgatttttaaaacagacatcattttatcaagtaactrttccagctggtgtttctaataagaagccaatttaagaaagtttaagaaaacatactatagaaagagtacagtgaaggaaaaaactattacaaacatattttgtttttaatgtttagaaagtggatctactacattatttggcaacctgggagtattcggtatagggccatatagtccaacactaaggaacaggctgcaaaaacaa

SEQ ID NO: 434048 - DNA, 579 bp, Homo sapiens
gaaattgtggatcttcagtctttagctatttgacatatctgcagcttttgtacattgcttccattcagttacacaaatgtccacttgtccatttagaaactaaagaccttcagtatcacataaaactgatcatcagttgttctttggatataacacattagacttgctgtggtctactcaaatggagagttcccagtaataaaggctgccagaaacttacccatgcttcaagctaattcctcctccagtcccagtgacccagcctaaatggtaaaactgtttgcaaagttctgggatcaggtatcttggatgctccttgtccttaaaaagaaggtaatgatttttaaaacagacatcattttatcaagtaactattccagctggtgtttctaataagaagccaatttaagaaagtttaagaaaacatactatagaaagagtacagtgarggaaaaaactattacaaacatattttgtttttaatgtttagaaagtggatctactacattatttggcaacctgggagtattcggtatagggccatatagtccaacactaaggaacaggctgcaaaaacaa

SEQ ID NO: 434049 - DNA, 579 bp, Homo sapiens
gaaattgtggatcttcagtctttagctatttgacatatctgcagcttttgtacattgcttccattcagttacacaaatgtccacttgtccatttagaaactaaagaccttcagtatcacataaaactgatcatcagttgttctttggatataacacattagacttgctgtggtctactcaaatggagagttcccagtaataaaggctgccagaaacttacccatgcttcaagctaattcctcctccagtcccagtgacccagcctaaatggtaaaactgtttgcaaagttctgggatcaggtatcttggatgctccttgtccttaaaaagaaggtaatgatttttaaaacagacatcattttatcaagtaactattccagctggtgtttctaataagaagccaatttaagaaagtttaagaaaacatactatagaaagagtacagtgaaggaaaaaactattacaaacatattttgtttttaatgtttagaaagtggatctactacattatttggcaacctgggagtattcrgtatagggccatatagtccaacactaaggaacaggctgcaaaaacaa

SEQ ID NO: 434050 - DNA, 484 bp, Homo sapiens
gtactcttaaatataccttcttgttgttgtcttgagcttaatttgccttttacgacaaaatgtgtaaattcccaaagtatcgttgtgtgtgtgtgtgtgtgtgtgtgtgtgtgtgtgtatgtattcttttgctaggctgtaaatggaatggtaatttcttttggctcttctcccaagatggcaaagtaaagtgaamttcatgtagaattttaattttatagtttaataccaagaaggacagtattccaagctgaaatctcttctaaaatgtttggtttatttcattcaaaggaaatgcattctacaccatatgctatctaaaaattctggctaacctcttttctaatgtgccattggatactaagtagaagtataataatatagaatcagcagattctatgaacaagatggggtatatgggtgattcatttttttggtaggcagtacatttactatagctagtgatctgcttgatatctttctg

SEQ ID NO: 434051 - DNA, 484 bp, Homo sapiens
gtactcttaaatataccttcttgttgttgtcttgagcttaatttgccttttacgacaaaatgtgtaaattcccaaagtatcgttgtgtgtgtgtgtgtgtgtgtgtgtgtgtgtgtgtatgtattcttttgctaggctgtaaatggaatggtaatttcttttggctcttctcccaagatggcaaagtaaagtgaacttcatgtagaattttaattttatagtttaataccaagaaggmcagtattccaagctgaaatctcttctaaaatgtttggtttatttcattcaaaggaaatgcattctacaccatatgctatctaaaaattctggctaacctcttttctaatgtgccattggatactaagtagaagtataataatatagaatcagcagattctatgaacaagatggggtatatgggtgattcatttttttggtaggcagtacatttactatagctagtgatctgcttgatatctttctg

SEQ ID NO: 434052 - DNA, 661 bp, Homo sapiens
atactcaccgtagtgtcccgggtatgtgttccttcttgacagggatggaaatctgtggttctggtgaggggcgaggctctgaaggttttgaaactggtggtggaggacctacgtctttgggaatttcaacatgtttccaatcttctccttcttctactatcaaaccaattagtgaacctagccgtatatttttacttccttcttcaacctatatttaaaaaagaagtaactgtagagaagtaaaacyccatgactgcattaagtagtttgttcttttgttgggtaattctccccttaagatatcttaatttgagctaaaagctgcttccaagacagtttgcctctgccttccacctgtcaccttctccactttctcccacttatgccttccttcaccattctcctcttcccacttgctaatgctaccttctgaaataaaggataaatctagaatgtatcctctttctgagagccttcaaataaacatgtaagatccatcattatcatcttctttttgatgtcaatacaaatccaaacaggagcctgtggctacatatcttaaccatttgtctttcccagagagtttctatgcaatggctttagaattctaaaagctcagaagggattaactccctcaacttagtccaatctactaaaattt

SEQ ID NO: 434053 - DNA, 557 bp, Homo sapiens
tactttcaaccacaaagacatttattacattttctttttaaaaatttattacttttcctcctctgtaacttgtcatcccagaccaaaactaaagaactctttggtcatcacccaataacatgccctttaaataagaacaytgaggtattattttcctgtttgactcttaattaattcacaccagctaccaccccttcatgaatcagaaggttgaaggaatacactatacattaatattaaaatctaaaggaaaccaaatgtcaaattactgtggttttagccacagacttatttctatggcatgtgcaacccctgtagaagatgctcccgagaagttcaacaggctgtgttcactatatcaaaagagaactattacccaacttataaaaatctttttaatgtgctgaactccaaaatttcctaagaaatagatgtttttagaaaggagacttgtgaggctctggggccaggctgcctgccttgaaatacggtcactgctacttattagctgtgtaatctcagatttaagttacttaatgaaccttctgtgaaatatt

SEQ ID NO: 434054 - DNA, 557 bp, Homo sapiens
tactttcaaccacaaagacatttattacattttctttttaaaaatttattacttttcctcctctgtaacttgtcatcccagaccaaaactaaagaactctttggtcatcacccaataacatgccctttaaataagaacactgaggtattattttcctgtttgactcttaattaattcacaccagctaccaccccttcatgaatcagaaggttgaaggaatacactatacattaatattaaaatctaaaggaaaccaaatgtcaaattactgtggttttagccacagacttatttctatggcatgtgcaacccctgtagaagatgctccygagaagttcaacaggctgtgttcactatatcaaaagagaactattacccaacttataaaaatctttttaatgtgctgaactccaaaatttcctaagaaatagatgtttttagaaaggagacttgtgaggctctggggccaggctgcctgccttgaaatacggtcactgctacttattagctgtgtaatctcagatttaagttacttaatgaaccttctgtgaaatatt

SEQ ID NO: 434055 - DNA, 551 bp, Homo sapiens
tccagcctcgactgtcaaaaattagcaaaacacaacagctgaggcgaatattagcattacatgtatttaatcaagttaatttttctctttttacagcaaaatcaaacaaaagagaaaacaagaaattgaggtgatttatagagagatatacaacaggttaaaaaataacatgaataatgtaagaaaatataaggaaagatgaacaaaattaacaatatacaaaatgtataactatgacactagttgggtttttaattagttgctaagattcctagtaatcaaagygagaaatgttacttagatcttattttctcaactctctcatctgtaaatttggaaccaaaaaaacacaccaaaattattaggcgatcatgggtgtaaacatttgttacctagtgtctgacactgactaaccattcaaaaattaaatttgaatttaaatatttcttgagcagctgctatatagcaaagccactttaagagttttaacttctatataatgtcaaaatgttatttcattaacttgtatattagagctataatatgttaat

SEQ ID NO: 434056 - DNA, 662 bp, Homo sapiens
cagcaactcttattctctgctgagaaactgtaaagtaattagagactgcagattaaaataccataataaaaatttcaaattgaattggagattgtgttaaactaaaatgtgactgaaactgccaytgatatatgtagctatcatcctaactgctctggtcacttttattggctaactagaaatttctaatcaaaaatttatctaatccttactagtgttcatttataagcaaccacagagccacgtgagaagcctggggtcacctctgttatccagcatgtgcaatccataataacccaacaatttaatagaaatattttctatcaaagaaagtttaccagaatgatttctgccttatattgtgcacatataccaggccatgctggtgatccttagcaattctggtaaggttttagaaaactgctttatcaggaggcttaccaaataaaccacagattatttcacagaacatttcacagaacagcatcagaaagaaactttccagggtttagcaaaaagatacaggcaaggaacacaggctgaaataaggaattggcagctccagaagaagagggagacagagaagcacatgccctcccagggttcattctacctcttgaactgctggtagtaaagttaatctgtaaatgctttgaggtgat

SEQ ID NO: 434057 - DNA, 566 bp, Homo sapiens
agctactcgggaggccaaggtgggagaatcacttgagcccaggggtttgaggccagcctgggaaacatagcaagagcccatctcttgaaacaaaaaacatacacacagacacaaccatgggaacaacaaacactggggattctaaaaagagggaggaaaagagaggggcaagggttgaaaaactacctattgggtactatgttcactgtgtgggcgatgggatcaatagaagcccaaacttcacatcatacaatattcccatgtaacaaacctgcacacataccctgtgaatctaaaatagaaaataaaataacttttttcaaataataacaataaatawtataaagaataaagaatacactgtacacctagcacaattcctgacacctcgtgaatatttatttgtgatttactacttttgcagttttacaaagagcttgcatttacactgtcctagttgagagacaaatgaggaaattattttacaagttaaaataaaaatgaaatcagatagatgagctgacctacatttgatcacacagcacgtggtagagtcagcacttaag

SEQ ID NO: 434058 - DNA, 609 bp, Homo sapiens
atggccatttagattggggtgatttggaaactggatcgtggagagcattaagagccagacagtgagtatgagaaggtttgcaattattacattcatgtcccaaaacatccgtgaaaagttatctccattctgtaaatgaagaaatcgtctcaaaargctaagggtttacacaaactcatgcagcaattttagggtacaaccaggacttgagcccaggcctaaatccagtgttcctcgagaccttgataaaggctgtgacatagaatgaaatcaatgttcatttgaatgaaatgatttattccacaactcctcattgatatgggaaagaaaaaccaaatccctaccctggaggggctcacggtcttggaaagaacagaggagtaaactgtcaccctgtggtgtggtcagctgagaccagggtcaaccccaggaccatgtgggttcagggaaagagacctctcaacctgggggaaactgagaaaaggaggcttccagagtgggagatgcttgactagtcccaggggaacaatggctagccaggctacaaagtgggaagacagatgaaaacaatttgtgcaaaggcggcaaacgtactaaaccagaagaaga

SEQ ID NO: 434059 - DNA, 574 bp, Homo sapiens
acacagggttaagataatcaaatatggcagatactatggattgacttgcccaacgtcttttccaaatgccttctagaacattaatgccacacacacaaactgcatttctcagacctsttggcagctctggttctagatatggtctaggtgttgccagacaactgcaccaccatgagaagtttgcaccatgaagaagcaatcatacacacagttgggctatttttgctgacacaacggcccaagtgtgggcttctgggagaatgctggttgaaattattgtgtacattcccagtatcgtaggtgctaagtgacattaggctgtggcagtagggtaaatgtaaagatgaaaaggtcatgtggatatgtgcactattgtgggacaaattttaatattgaacaaaattcaaggcaaaaatcatcatgaaaaaacatatatacatatctctagatatagaatgatatatactcctttagaggaaaaaaacagatcaaaatgttttaataatcacaaacatatatgtatctgataatatagcctttatttatgttcaatgagatttaacatgttcatctc

SEQ ID NO: 434060 - DNA, 540 bp, Homo sapiens
gcagtatacaccgtacccaatttgtagtctttcatcctgcaaccccctccaccctttccccagagcccccaaagttcactgtatcattcttatgcctttgcatcctcatagcctagctcccacttatgaatgagaacatgcaatgtttggtttttcattcctgagttacttcacttagaataacagtcccagtgccattcaggttgctgcaaatgctattatttcattcctttacatggctgagtagtattccatggtgtgtgtgtrtatatatatatatatatatatatataccacaatttctttatccactcattgattgatgggcatttgtgctggttccatatttttgcaattgtgaactgtgctgctgtaaacatgcatgtgcattatctttttcatataatgacttcttttcctttgggtagatacccactagtgggattgctggatcgaatggtagttctacttttagttctttaaggaatccccatactgttttccatagtggttgtactagcttatgttcccaccagcagt

SEQ ID NO: 434061 - DNA, 604 bp, Homo sapiens
atggggttacggtatgacttctgaggttcttatataccagactggaaatcaggggtctgatttattttcagaatgagttttcttaaggtccttcatagttttcctgctatagccttattaaagatcaagattgaaatttgacattaaagaattttcttttcrgtacctgtccaattatttttatgagatccattggacaaaagatagtagtctattttaactcttatttaagcctataagattttgcttcacaatttttaagtctaaacagaaacaactgtcacttcactttaggccaaaattgcctattttgcaatttctgcagaagtagagccaagccttcatttatcaaagtttaagttcctatggtgaaatcagggtttataagctttctatctttaatactattctcctacaacattatcgatgatttttctagaaatgactactaggttttaataagaaccaagcaattaacaccttcttataaaaatataaccattgctaaacaatgattttgaatatacttaaacataacacaatttcactattctgtgcaagcaaaataatagatggtgagtaaaatctagagagttcagatatt

SEQ ID NO: 434062 - DNA, 601 bp, Homo sapiens
gagggagggcagaggaaccggcagatgccaggctctgggaacccacaggggccggccccactctttcctcctgacgtagggagccccttcagatgctccagggactgacagatgctgaggaagccctgatccctcccacyacccactcacaaggccctgcctgctttagggaggcttcttggggcccccccatcgttatcagcatccctggaaaatcctgggattggagagagctggctggctcttgttctgctcggtgggagctgaggagaaggcagccgcctgcaacatggacatggggagaggaggctgctcctgcttaaccctcatcaggaagagcgcgggcactgggctgaggggagacgttgaggtgaccatccacacaggtgtgtttgggatacgatgatgggtggggagcaggggaagtccttctgcctgtttctgggcaggagagagtcttgtccaactagctaaagcagatgctccttgctgtggccacagggactggcctcggggccctcaaggtcctgcatggagccccccacagctatgattcccttcccatatgatgactgaactcatgtggaattgatgtagacac

SEQ ID NO: 434063 - DNA, 601 bp, Homo sapiens
gagggagggcagaggaaccggcagatgccaggctctgggaacccacaggggccggccccactctttcctcctgacgtagggagccccttcagatgctccagggactgacagatgctgaggaagccctgatccctcccaccaccsactcacaaggccctgcctgctttagggaggcttcttggggcccccccatcgttatcagcatccctggaaaatcctgggattggagagagctggctggctcttgttctgctcggtgggagctgaggagaaggcagccgcctgcaacatggacatggggagaggaggctgctcctgcttaaccctcatcaggaagagcgcgggcactgggctgaggggagacgttgaggtgaccatccacacaggtgtgtttgggatacgatgatgggtggggagcaggggaagtccttctgcctgtttctgggcaggagagagtcttgtccaactagctaaagcagatgctccttgctgtggccacagggactggcctcggggccctcaaggtcctgcatggagccccccacagctatgattcccttcccatatgatgactgaactcatgtggaattgatgtagacac

SEQ ID NO: 434064 - DNA, 601 bp, Homo sapiens
gagggagggcagaggaaccggcagatgccaggctctgggaacccacaggggccggccccactctttcctcctgacgtagggagccccttcagatgctccagggactgacagatgctgaggaagccctgatccctcccaccacccactcacaaggccctgcctgctttagggaggcttcttggggcccccccatcgtyatcagcatccctggaaaatcctgggattggagagagctggctggctcttgttctgctcggtgggagctgaggagaaggcagccgcctgcaacatggacatggggagaggaggctgctcctgcttaaccctcatcaggaagagcgcgggcactgggctgaggggagacgttgaggtgaccatccacacaggtgtgtttgggatacgatgatgggtggggagcaggggaagtccttctgcctgtttctgggcaggagagagtcttgtccaactagctaaagcagatgctccttgctgtggccacagggactggcctcggggccctcaaggtcctgcatggagccccccacagctatgattcccttcccatatgatgactgaactcatgtggaattgatgtagacac

SEQ ID NO: 434065 - DNA, 601 bp, Homo sapiens
gagggagggcagaggaaccggcagatgccaggctctgggaacccacaggggccggccccactctttcctcctgacgtagggagccccttcagatgctccagggactgacagatgctgaggaagccctgatccctcccaccacccactcacaaggccctgcctgctttagggaggcttcttggggcccccccatcgttatcagcatccctggaaaatcctgggattggagagagctggctggctcttgttctgctcggtgggagctgaggagaaggcagccrcctgcaacatggacatggggagaggaggctgctcctgcttaaccctcatcaggaagagcgcgggcactgggctgaggggagacgttgaggtgaccatccacacaggtgtgtttgggatacgatgatgggtggggagcaggggaagtccttctgcctgtttctgggcaggagagagtcttgtccaactagctaaagcagatgctccttgctgtggccacagggactggcctcggggccctcaaggtcctgcatggagccccccacagctatgattcccttcccatatgatgactgaactcatgtggaattgatgtagacac

SEQ ID NO: 434066 - DNA, 561 bp, Homo sapiens
cctacctttgggccctccttccttaacctccgctggccccccattccatgatccgtccacctgacacgctgggtttcatgcctctctttcccaggctgtgggttgtgcccttcactccttgccctcctccattccctgtcctgatctgaactcctctccttgccacgctccctcacccttatccctctgcacactccaaaatttttaaagaaaaaggagagagagaaaaaaaagtaaaagaaacccaaaagggaaaatatagctaaggtgaactggtgagtttctactcagaattcttattattgagwatgatgtattttgttttcttaacttatgtataatgaaaatggacgagaagaattataaatcatagttcatttttatgattagtacataaaaaaaatttgagtctttcttggcatccattactttatcttaaaaacacagagtatttactttttgtgtggcaaaggaggcctaatggggaaccttgaccttcatctcaacttgacagtaaaaaggtgctccttccttccccttttgcttgccatgtgtctgaaa

SEQ ID NO: 434067 - DNA, 561 bp, Homo sapiens
cctacctttgggccctccttccttaacctccgctggccccccattccatgatccgtccacctgacacgctgggtttcatgcctctctttcccaggctgtgggttgtgcccttcactccttgccctcctccattccctgtcctgatctgaactcctctccttgccacgctccctcacccttatccctctgcacactccaaaatttttaaagaaaaaggagagagagaaaaaaaagtaaaagaaacccaaaagggaaaatatagctaaggtgaactggtgagtttctactcagaattcttattattgagtatgatgtattttgttttcttaacttatgtataatgaaaatggamgagaagaattataaatcatagttcatttttatgattagtacataaaaaaaatttgagtctttcttggcatccattactttatcttaaaaacacagagtatttactttttgtgtggcaaaggaggcctaatggggaaccttgaccttcatctcaacttgacagtaaaaaggtgctccttccttccccttttgcttgccatgtgtctgaaa

SEQ ID NO: 434068 - DNA, 561 bp, Homo sapiens
cctacctttgggccctccttccttaacctccgctggccccccattccatgatccgtccacctgacacgctgggtttcatgcctctctttcccaggctgtgggttgtgcccttcactccttgccctcctccattccctgtcctgatctgaactcctctccttgccacgctccctcacccttatccctctgcacactccaaaatttttaaagaaaaaggagagagagaaaaaaaagtaaaagaaacccaaaagggaaaatatagctaaggtgaactggtgagtttctactcagaattcttattattgagtatgatgtattttgttttcttaacttatgtataatgaaaatggacgagaagaattataaatcatagttcatttttatgattagtacataaaaaaaatttgagtctttcttggcatccatyactttatcttaaaaacacagagtatttactttttgtgtggcaaaggaggcctaatggggaaccttgaccttcatctcaacttgacagtaaaaaggtgctccttccttccccttttgcttgccatgtgtctgaaa

SEQ ID NO: 434069 - DNA, 626 bp, Homo sapiens
caatttgatactttctttaaaaagcaaacaaacagtttaacaggcaatgactttatgactcagtgatttcactcctgatgacatagttggtcatcagaaaaaatgaaaataaaaacctcagtgagatgtcattacayatccaagagaactggtaaaattaaaatggctaaatacctggagaccgatatgggaggatagctcgagcccaggagtccaaggctgcagtgagctatgattgtgccactctactccagcctgtgtgatagagcaagactccatctcttaagaaagaaaattggggactgaatatagcaagtgttgaagaggttatgaagcaaagaaaatctcatacatttgtggtgggagagtaaatttacagctatattttaaagaagtttggcaatttcttataaagttaacctgcacacatacccagtgacatcgtgattcaatttataggtatgtaccaaaaataaatgagggtgtgtattcacacaatagagaccgatataaaattattcacagcaggttttttttgtaggcaaaaactggatgtaacatctataaagtggagaagagataaattatgatattgacttacagagtaataatacatagcaatacaa

SEQ ID NO: 434070 - DNA, 468 bp, Homo sapiens
tgcaacctctgcttcccgggttcaagcaattctcctgcctcagcctcccaagtagctgggattacaggcatctgccaccatgcctggctaattttttgtatttttagtagagacggggtttcaccatgttgaccaggctggtcttgaactcctgacctcaggtgatccacccgctttggcctcccaaaatgctgggattacaggtgtgagcctccacgcgcagccaatggtaggaatctatttatagaggatatgttgagaacaaaagcaacctgaagccacacagcttaaaaagattaggaactgtttggttgggcatrgtggctcatacctgtaatcctagcactttgggaggccaaggcaggaagattacttgagaccaggagttcaaaaccagtcttgccaacataacaagaatctgtctctatataagaagattaaaaattagctgggcatggtggcatgtgc

SEQ ID NO: 434071 - DNA, 545 bp, Homo sapiens
gaaaatattgtactttagtaaatttgtttttcatagggtatgggttagtatttctgaaactactttatgtatatactaggattgagtaattaagaaatacactgtggatatygagagccagttttctgtcagataaaagagttaaaatagagaaattgtgaagtagcacaaactccagattgaaatcagagcaggaatatcagtgtgaactcatggatatacatgcagtgagatcccagtagcaatgagcacaactagtttccagatcttggtttctaaataccattctcgatgaaaggaaccagagctccctggggaaatgactgagtccagactagagcaggaggaatgcaagatgagcttagaccatttaaagtgccagaaagtaaagacatgttcacaaaataatgggggccaagtctacaagacatcggagccaacttaaaggagctactaatgcccaaatctggacaatttgaacaacatgatcaactgtgtgaaaggcaagtacagaagtgtatctagaatatattactcttcatggg

SEQ ID NO: 434072 - DNA, 545 bp, Homo sapiens
gaaaatattgtactttagtaaatttgtttttcatagggtatgggttagtatttctgaaactactttatgtatatactaggattgagtaattaagaaatacactgtggatattgagagccagttttctgtcagataaaagagttaaaatagagaaattgtgaagtagcacaaactccagattgaaatcagagcaggaatatcagtgtgaactcatggatatacatgcagtgagatcccagtagcaatgagcacaactagtttccagatcttggtttctaaataccattctcgatgaaaggaaccagagctccytggggaaatgactgagtccagactagagcaggaggaatgcaagatgagcttagaccatttaaagtgccagaaagtaaagacatgttcacaaaataatgggggccaagtctacaagacatcggagccaacttaaaggagctactaatgcccaaatctggacaatttgaacaacatgatcaactgtgtgaaaggcaagtacagaagtgtatctagaatatattactcttcatggg

SEQ ID NO: 434073 - DNA, 545 bp, Homo sapiens
gaaaatattgtactttagtaaatttgtttttcatagggtatgggttagtatttctgaaactactttatgtatatactaggattgagtaattaagaaatacactgtggatattgagagccagttttctgtcagataaaagagttaaaatagagaaattgtgaagtagcacaaactccagattgaaatcagagcaggaatatcagtgtgaactcatggatatacatgcagtgagatcccagtagcaatgagcacaactagtttccagatcttggtttctaaataccattctcgatgaaaggaaccagagctccctggggaaatgactgagtccagactagagcaggaggaatgcaagatgagcttagaccatttaaagtgccagaaagtaaagacatgttcacaaaataatgggggccaagtctacaagacatmggagccaacttaaaggagctactaatgcccaaatctggacaatttgaacaacatgatcaactgtgtgaaaggcaagtacagaagtgtatctagaatatattactcttcatggg

SEQ ID NO: 434074 - DNA, 545 bp, Homo sapiens
gaaaatattgtactttagtaaatttgtttttcatagggtatgggttagtatttctgaaactactttatgtatatactaggattgagtaattaagaaatacactgtggatattgagagccagttttctgtcagataaaagagttaaaatagagaaattgtgaagtagcacaaactccagattgaaatcagagcaggaatatcagtgtgaactcatggatatacatgcagtgagatcccagtagcaatgagcacaactagtttccagatcttggtttctaaataccattctcgatgaaaggaaccagagctccctggggaaatgactgagtccagactagagcaggaggaatgcaagatgagcttagaccatttaaagtgccagaaagtaaagacatgttcacaaaataatgggggccaagtctacaagacatcggagccaacttaaaggagctactaatgcccaaatctrgacaatttgaacaacatgatcaactgtgtgaaaggcaagtacagaagtgtatctagaatatattactcttcatggg

SEQ ID NO: 434075 - DNA, 581 bp, Homo sapiens
ttctgcctcaaaagtatgcatttattatgtatcaaataaaattttaaatttagagaacattgaagaaatatgagatcagagaaatcaaagattattattaaattacatttcttttggtatctcctgagatttctcaattatgcattacttgtattcattcatttattcatyaaatacaatatttatctaaaacctgctatgaccaagactgggtgaggaactggagacatagctattaaaaaaatagtatttatatttataagtgatgaaacaaaaagaaaaaatagaaggtgaatcggtaggtaaaaagagacaatagactaccagccaatctcaatgtgtgaaccttgtttgtatcctgattcaagaaaagacattaaaaagattgtctgaaagagataattaaaaatctgaattctgcctggatagttgatgatattaaagaggtatattattcattcttaggtgtaataatgacattgtggttatgttacaaaaaggagtcatttcagaaacagactgaaatatttacaaataaaatcatgtgttgtctgggacttacttcaaaataatgtgtgagt

SEQ ID NO: 434076 - DNA, 581 bp, Homo sapiens
ttctgcctcaaaagtatgcatttattatgtatcaaataaaattttaaatttagagaacattgaagaaatatgagatcagagaaatcaaagattattattaaattacatttcttttggtatctcctgagatttctcaattatgcattacttgtattcattcatttattcatcaaatacaatatttatctaaaacctgctatgaccaagactgggtgaggaactggagacatagctattaaaaaaatagtatttatatttataagtgatgaaacaaaaagaaaaaatagaaggtgaatcggtaggtaaaaagagacaatagactaccagccaatctcaatgtgtgaaccttgtttgtatcctgattcaagaaaagacattaaaaagattrtctgaaagagataattaaaaatctgaattctgcctggatagttgatgatattaaagaggtatattattcattcttaggtgtaataatgacattgtggttatgttacaaaaaggagtcatttcagaaacagactgaaatatttacaaataaaatcatgtgttgtctgggacttacttcaaaataatgtgtgagt

SEQ ID NO: 434077 - DNA, 567 bp, Homo sapiens
cctgcatgttgtgcacatgtatcctagaacttaaagyatattaaaaaatatatatatttatttctactgaacacaatgtctatatattagatgacctagaactggtagggggttctaatccaggggattgttgataaactcagacaacttctataatttttacattgttactcttaaagtcttgtcattgattgtctcaatattggaaaataacatgtcaatattcagtgtaataaactggaagaaaaaatgggccaatatcccattcaattaaagacattaaaaagagtgtgtatgtattacttctgctcacatcttaatgttcaacatgtcgtcaccaagccagatagaaccatatactggggaatgtaatgtttatctgagaaaccaaatgcctaaatacaaattttagtagtacgaagtaagaggaaataaatatgggggattttctagtcttctctattatatataaattgcaagatttggctactttaaaaaatattaacatttactaatttttcatcaattcaaatatcatattgtagagtgcaatttaatcaaattaga

SEQ ID NO: 434078 - DNA, 567 bp, Homo sapiens
cctgcatgttgtgcacatgtatcctagaacttaaagtatawtaaaaaatatatatatttatttctactgaacacaatgtctatatattagatgacctagaactggtagggggttctaatccaggggattgttgataaactcagacaacttctataatttttacattgttactcttaaagtcttgtcattgattgtctcaatattggaaaataacatgtcaatattcagtgtaataaactggaagaaaaaatgggccaatatcccattcaattaaagacattaaaaagagtgtgtatgtattacttctgctcacatcttaatgttcaacatgtcgtcaccaagccagatagaaccatatactggggaatgtaatgtttatctgagaaaccaaatgcctaaatacaaattttagtagtacgaagtaagaggaaataaatatgggggattttctagtcttctctattatatataaattgcaagatttggctactttaaaaaatattaacatttactaatttttcatcaattcaaatatcatattgtagagtgcaatttaatcaaattaga

SEQ ID NO: 434079 - DNA, 567 bp, Homo sapiens
cctgcatgttgtgcacatgtatcctagaacttaaagtatattaaaaaatatatatatttatttctactgaacacaatgtctatatattagatgacctagaactggtagggggttctaatccaggggattgttgataaactcagacaacttctataatttttacattgttactcttaaagtcttgtcattgattgtctcaatattggaaaataacatgtcaatattcagtgtaataaactggaagaaaaaatgggccaatatcccattcaattaaagacatkaaaaagagtgtgtatgtattacttctgctcacatcttaatgttcaacatgtcgtcaccaagccagatagaaccatatactggggaatgtaatgtttatctgagaaaccaaatgcctaaatacaaattttagtagtacgaagtaagaggaaataaatatgggggattttctagtcttctctattatatataaattgcaagatttggctactttaaaaaatattaacatttactaatttttcatcaattcaaatatcatattgtagagtgcaatttaatcaaattaga

SEQ ID NO: 434080 - DNA, 567 bp, Homo sapiens
cctgcatgttgtgcacatgtatcctagaacttaaagtatattaaaaaatatatatatttatttctactgaacacaatgtctatatattagatgacctagaactggtagggggttctaatccaggggattgttgataaactcagacaacttctataatttttacattgttactcttaaagtcttgtcattgattgtctcaatattggaaaataacatgtcaatattcagtgtaataaactggaagaaaaaatgggccaatatcccattcaattaaagacattaaaaagagtgtgtatgtattacttctgctcacatcttaatgttcaacatgtcgtcaccaagccagatagaaccatatactggggaatgtaatgtttatctgagaaaccaaatgcctaaatacaaattttagtagtacgaagtaagaggaaataaatatgggggattttctagtcttctctattatatataaattgcaagatttggctactttaaaaaatattaacatttactaatttttcatcaattcaaataycatattgtagagtgcaatttaatcaaattaga

SEQ ID NO: 434081 - DNA, 570 bp, Homo sapiens
gcatgcaataaaattgacctttgtctacacagttctatgaatttcagcactcacatagggtcaggaccgagtttcctctcacaagactcctagccccaccttgaaatcaccggacgcgcttcgttgtccaggagccttctcgaagcggygggacgtctccggaggttgggtggcccggtcagtccgcggcacacaaggacctctagggggcagtgttgtctcacaccacatgttcctctaccgggctttaacacacacccttaaactctaacccagccaaagcactattgcgtctgtattttccaaatactttacaatgagtatgcactactattacaatcagaaaaaaaatattagattactaataagctattgaaactgggggagatagcaatataaaaatacccactcatggaagacactgcttaaaatagagaactagcctctgttcatagtctggtttcaaagcccaaagttacgtttccttttgttagattgctagatgatatggctctggactttaattctccatgtttaaaatagcatttctgtatttaaaatagcatttca

SEQ ID NO: 434082 - DNA, 578 bp, Homo sapiens
cccatcgcaggagaagaccttggagagtggctagcagaattcaggcaaattctttgtttctgcattctatttgagcagcctggccacaggccaaggaaaactctcttggagaatagacattacctgtggagaatgatttgagaaactctgatccaggaatatccaacactacagtggcctcctggggtccctactaaccggtcccctattaatctccctgccctgatttcctaccatcctctccctcactcactctgctccagccactctggccttcctcaaaaacagacagacttctaccttgaggcttttacatttgcctagaacactctctagcttgctcgtttacctgcgtcatgtcttggctttcatgccactgtttgaacaaggcccacccttattaaccccaatcaatattgcaaacttccccttcaccactcaccctcaccaccctcattattcagctcttttttwaaaaaggtacctattatgttctaatacatatcactggggtatgttttatatttattgtatattgtctatctcctcccactagaacacagctccacaaagggtga

SEQ ID NO: 434083 - DNA, 578 bp, Homo sapiens
cccatcgcaggagaagaccttggagagtggctagcagaattcaggcaaattctttgtttctgcattctatttgagcagcctggccacaggccaaggaaaactctcttggagaatagacattacctgtggagaatgatttgagaaactctgatccaggaatatccaacactacagtggcctcctggggtccctactaaccggtcccctattaatctccctgccctgatttcctaccatcctctccctcactcactctgctccagccactctggccttcctcaaaaacagacagacttctaccttgaggcttttacatttgcctagaacactctctagcttgctcgtttacctgcgtcatgtcttggctttcatgccactgtttgaacaaggcccacccttattaaccccaatcaatattgcaaacttccccttcaccactcaccctcaccaccctcattattcagctctttttttaaaaaggtacctatwatgttctaatacatatcactggggtatgttttatatttattgtatattgtctatctcctcccactagaacacagctccacaaagggtga

SEQ ID NO: 434084 - DNA, 608 bp, Homo sapiens
agtccacagtaccagagaaaagacacagattgatgtgcagctgcctgagtctacttttgaattacagattttaatccttcatgaaaccaaacaatacctccagttcttggtgtagaaacactcctatgtctttataatgttattttctcatgtaagctagtttaagtaggtttctgctgcttacaagctgacgtatcttgttgaatacagagatactttaaaactcctcccttaacacacacatacacagaaattcttgaaatttgcaggagtttggggtgaggagcatctagcaaggaacatggagttgggaatggttgaagcattgctgctgggatctattaaggctctgagctctccatgaaagtattggctttctctttgatggcctttgctgtattggataactcayctacaaaaatgacttatttttaatgtagaactgtgataaacttcaacattttgatgattatcatgctttaaaatgagaataaagatagctattatattttttaatttgacagagtagtgcaggcaataatgaaatggtattcatctgaatagcaatctttatttttaaaatccaaaggcactcaataatgtgatct

SEQ ID NO: 434085 - DNA, 608 bp, Homo sapiens
agtccacagtaccagagaaaagacacagattgatgtgcagctgcctgagtctacttttgaattacagattttaatccttcatgaaaccaaacaatacctccagttcttggtgtagaaacactcctatgtctttataatgttattttctcatgtaagctagtttaagtaggtttctgctgcttacaagctgacgtatcttgttgaatacagagatactttaaaactcctcccttaacacacacatacacagaaattcttgaaatttgcaggagtttggggtgaggagcatctagcaaggaacatggagttgggaatggttgaagcattgctgctgggatctattaaggctctgagctctccatgaaagtattggctttctctttgatggcctttgctgtattggataactcacctacaaaaatgacttatttttaatgtagaactgtgataaacttcaacattttgatgattatcatgctttaaaaygagaataaagatagctattatattttttaatttgacagagtagtgcaggcaataatgaaatggtattcatctgaatagcaatctttatttttaaaatccaaaggcactcaataatgtgatct

SEQ ID NO: 434086 - DNA, 625 bp, Homo sapiens
accatttttctcacttaaatattttcaatcaattatttaataaatggaagcagtgggattaccttggtatgaccataagaatttatctgggagatgtctatgtgtgtgtgcatgtgtgtgtgtatgtttatcgtggggaagaagtttgtgagtagaagcagyggattgagaatctggataagaaaatattctattgatcctggtgatttgaatgtacgataggagctggttgtcaactgatttaatcagtgggtatttcagtatgaggcatagttggtgactgagctttcatgtggtaatctgaggtgaatattgacatagaattagaattataactcacataaattcacacaaaaacatttttacattgcctactgatttttatacatataaccaagaaataaagtatatggtggccacctttctccagggatttatagggtaattagatgaactcttccaataattataaaaataagaactgaaataacaagtgcatattctgaattacaaaaatcattcaaagtaacaaaaagcttatatctttgatcccaataacctattttaattttctttttaaaataaaagtgttagaggcaaaaaaaaagccataactaaaccaagt

SEQ ID NO: 434087 - DNA, 625 bp, Homo sapiens
accatttttctcacttaaatattttcaatcaattatttaataaatggaagcagtgggattaccttggtatgaccataagaatttatctgggagatgtctatgtgtgtgtgcatgtgtgtgtgtatgtttatcgtggggaagaagtttgtgagtagaagcagtggattgagaatctggataagaaaatattctattgatcctggtgatttgaatgtacgataggagctggttgtcaactgatttaatcagtgggtatttcagtatgaggcatagttggtgactgagctttcatgtggtaatctgaggtgaatattgacatagaattagaattataactcacataaattcacacaaaaacatttttacattgcctactgatttttatacatataaccaagaaataaagtatatggkggccacctttctccagggatttatagggtaattagatgaactcttccaataattataaaaataagaactgaaataacaagtgcatattctgaattacaaaaatcattcaaagtaacaaaaagcttatatctttgatcccaataacctattttaattttctttttaaaataaaagtgttagaggcaaaaaaaaagccataactaaaccaagt

SEQ ID NO: 434088 - DNA, 625 bp, Homo sapiens
accatttttctcacttaaatattttcaatcaattatttaataaatggaagcagtgggattaccttggtatgaccataagaatttatctgggagatgtctatgtgtgtgtgcatgtgtgtgtgtatgtttatcgtggggaagaagtttgtgagtagaagcagtggattgagaatctggataagaaaatattctattgatcctggtgatttgaatgtacgataggagctggttgtcaactgatttaatcagtgggtatttcagtatgaggcatagttggtgactgagctttcatgtggtaatctgaggtgaatattgacatagaattagaattataactcacataaattcacacaaaaacatttttacattgcctactgatttttatacatataaccaagaaataaagtatatggtggccacctttctccagggatttatagggtaattagatgaactcttccaataattataaaaataagaactgaaataacaagtgcatattctgaattacaaaaatcattcaaagtaacaaaaagcytatatctttgatcccaataacctattttaattttctttttaaaataaaagtgttagaggcaaaaaaaaagccataactaaaccaagt

SEQ ID NO: 434089 - DNA, 562 bp, Homo sapiens
atctattgggttaaggagagaattgttagatgcagcctaaaagaaagaatttagtgttcactgtatctatcatgaaaggctctttctatttgttttctattataaagtaatatgctgtatttcatggcaaaggctttaaattgaaaactccaaggcttaaaatttaagccttgcatttggaaatagacractagctctacagaagtagttttgttttgtttttgtttgtgtttttttgcagtggggggctggtatttgggggcagggagaggggaaaaagtccatttgctggtactgagtgactttgggcaagttacttgccctctgtaagcctcaatttcctcatctataaaatgggatattagctttcttgtaggattgttgggagaattaaatgagataaggaatatctgtaaagcagttaacatgaaacaggccctcaataaatggaaactaattttattgtttgtaatagaaaacaacaatgtgtcagcttctagtaataactttaaaatattctatgcatactatatagcaaaggcagttttacttctaatcacag

SEQ ID NO: 434090 - DNA, 471 bp, Homo sapiens
agttaacatgaaacaggccctcaataaatggaaactaattttattgtttgtaatagaaaacaacaatgtgtcagcttctagtaataactttaaaatattctatgcatactatatagcaaaggcagttttacttctaatcacagaacatataacactaagtatagttctaatacttaagaagcaaaataacaccarggcagtaacaaatgctggagaggaggtagagaaaaggaaaccctcatatgttgttgatgagaatgtaaattagtacaaccactatggagaagagtttggaggtttctcataaaagtaaaaatagagttaccatatgacctaacaatctactgggtatatactcaaaagaaaggaaatcagtatatagaaaatatatttgcactcccatgtttgttgcagcactattcacaacagccaaaatttggaagcaacctaagtgtccattcacagatgaat

SEQ ID NO: 434091 - DNA, 561 bp, Homo sapiens
attttacagatatggaagttgtgattaaaatgtgattaatgtcacagaaatactaggaaagccaagcttctaacagtcattccagggtcattgccagggtgtcaaatcctatgtcactgcacagtatkactataacaacaaagtgtccctttcctgacttcctattccccattcttgatccagcatctttgggatccacttccaggcattttctctggggtcctgctggcttaagtcagccagatcctgcagtgcctttgccatatgatcctcccctcccttaacagacactgtacttacccagttggattatactgaaacttagtcctcatactgtctggtatcggggagagaagtgggggtagattctgagcaggaccaacattgttttgtaagacacttgacttactcgaagcttatagttttcaagcaaggagaaggtcttccatcttccagcaagggagtgggccacctctgtaggcccagatattccggagaagctgggaggccaaggtccttaagtgtgtctaataagtttccccattccaattctcatgttcc

SEQ ID NO: 434092 - DNA, 632 bp, Homo sapiens
attaatgtcacagaaatactaggaaagccaagcttctaacagtcattccagggtcattgccagggtgtcaaatcctatgtcactgcacagtattactataacaacaaagtgtccctttcctgacttcctattccccattcttgatccagcatctttgggatccacttccaggcattttctctggggtcctgctggcttaagtcagccagatcctgcagygcctttgccatatgatcctcccctcccttaacagacactgtacttacccagttggattatactgaaacttagtcctcatactgtctggtatcggggagagaagtgggggtagattctgagcaggaccaacattgttttgtaagacacttgacttactcgaagcttatagttttcaagcaaggagaaggtcttccatcttccagcaagggagtgggccacctctgtaggcccagatattccggagaagctgggaggccaaggtccttaagtgtgtctaataagtttccccattccaattctcatgttcccacttttttccaatcaggaccctgattctcttgaaggagacttacacaggctgagaattaaccttctctggcgttctgccactcataagtacaggctgcacctgg

SEQ ID NO: 434093 - DNA, 632 bp, Homo sapiens
attaatgtcacagaaatactaggaaagccaagcttctaacagtcattccagggtcattgccagggtgtcaaatcctatgtcactgcacagtattactataacaacaaagtgtccctttcctgacttcctattccccattcttgatccagcatctttgggatccacttccaggcattttctctggggtcctgctggcttaagtcagccagatcctgcagtgcctttgccatatgatcctcccctcccttaacagacactgtacttacccagttggattatactgaaacttagtcctcatactgtctggtatcggggagagaagtgggggtagattctgagcaggaccaacattgttttgtargacacttgacttactcgaagcttatagttttcaagcaaggagaaggtcttccatcttccagcaagggagtgggccacctctgtaggcccagatattccggagaagctgggaggccaaggtccttaagtgtgtctaataagtttccccattccaattctcatgttcccacttttttccaatcaggaccctgattctcttgaaggagacttacacaggctgagaattaaccttctctggcgttctgccactcataagtacaggctgcacctgg

SEQ ID NO: 434094 - DNA, 632 bp, Homo sapiens
attaatgtcacagaaatactaggaaagccaagcttctaacagtcattccagggtcattgccagggtgtcaaatcctatgtcactgcacagtattactataacaacaaagtgtccctttcctgacttcctattccccattcttgatccagcatctttgggatccacttccaggcattttctctggggtcctgctggcttaagtcagccagatcctgcagtgcctttgccatatgatcctcccctcccttaacagacactgtacttacccagttggattatactgaaacttagtcctcatactgtctggtatcggggagagaagtgggggtagattctgagcaggaccaacattgttttgtaagacacttgacttactcgaagcttatagttttcaagcaaggagaaggtcttccatcttccagcaagggagtgggccacstctgtaggcccagatattccggagaagctgggaggccaaggtccttaagtgtgtctaataagtttccccattccaattctcatgttcccacttttttccaatcaggaccctgattctcttgaaggagacttacacaggctgagaattaaccttctctggcgttctgccactcataagtacaggctgcacctgg

SEQ ID NO: 434095 - DNA, 632 bp, Homo sapiens
attaatgtcacagaaatactaggaaagccaagcttctaacagtcattccagggtcattgccagggtgtcaaatcctatgtcactgcacagtattactataacaacaaagtgtccctttcctgacttcctattccccattcttgatccagcatctttgggatccacttccaggcattttctctggggtcctgctggcttaagtcagccagatcctgcagtgcctttgccatatgatcctcccctcccttaacagacactgtacttacccagttggattatactgaaacttagtcctcatactgtctggtatcggggagagaagtgggggtagattctgagcaggaccaacattgttttgtaagacacttgacttactcgaagcttatagttttcaagcaaggagaaggtcttccatcttccagcaagggagtgggccacctctgtaggcccagatattccggagaagctgggaggccaaggtccttaagtgtgtctaataagtttccccattccaattctcatgttcccacttttttccaatcaggaccctgattctcttgaaggagacttacacaggctgagaattaaccttctctggcrttctgccactcataagtacaggctgcacctgg

SEQ ID NO: 434096 - DNA, 545 bp, Homo sapiens
ctgcagtgagctgagattgtgccactgcacttcagcctgggcaacagagcaagaccctgtctcaaagaaaggaaggatggaaggaaggaaggaagggaggaagggagggaggaaggaagaaaaaggaagggaagagggacggaaggacagaagagagaragagagagagagagtgagattcaactaaggtaaccaggcaagctttggaagagaagtgtaagaagaagaaagggattttaaagaatgtgtggataagtgtgacagtcttcagccaaacaaactgattcccagcagtcaaagacaagtactcaagcactgcagggccatgaggaccttgagaaaaaggaaaggtggtaaggaaatcactcagagtgggccctgggtgctggccaataggtggtgctgtctgtatggacagcagtgttgtcatccagggcagcaacacagtggaaaggaaatccaaagcttaatgagccattcacatataagaacctttgccagctaagtgttcataatttgagaattacatatatttcagtattcat

SEQ ID NO: 434097 - DNA, 545 bp, Homo sapiens
ctgcagtgagctgagattgtgccactgcacttcagcctgggcaacagagcaagaccctgtctcaaagaaaggaaggatggaaggaaggaaggaagggaggaagggagggaggaaggaagaaaaaggaagggaagagggacggaaggacagaagagagagagagagagagagagtgagattcaactaaggtaaccaggcaagctttggaagagaagtgtaagaagaagaaagggattttaaagaatgtgtggataagtgtgacagtcttcagccaaacaaactgattcccagcagtcaaagacaagtactcaagcactgcagggccatgaggaccttgagaaaaaggaaagrtggtaaggaaatcactcagagtgggccctgggtgctggccaataggtggtgctgtctgtatggacagcagtgttgtcatccagggcagcaacacagtggaaaggaaatccaaagcttaatgagccattcacatataagaacctttgccagctaagtgttcataatttgagaattacatatatttcagtattcat

SEQ ID NO: 434098 - DNA, 651 bp, Homo sapiens
aataagatgaaaggtcaataataagcatagaaaggtcaataatggaataataatagtagaggtcatccctagaaggttgaaaacattttcaagtaaatataagaaactccttattgtacgtagtagtgcaggctggaaaaatatacttatttagttcaaatcatgtgacaggcactaggaataaagttagtccctgccctcacagggttcaaggtctaaatggaataatagatatgaaataactcaacaagtaaatagctcagctgttggaaatcaaacaaggagaagaaaagaaaaaggacatagtgctataaaagaaaatctttataaaattcaaaaccatttaaaatatgttgccattgatttccttattaayaggttttaatacctccatctttctctaatagttttcagtttattagaaacagtatgtgaactttttagattaaaaatttccagcataggtttatcacttattatatccttttattccttgaaatggatgattgtcaggcagaaatttaggacaaaggagctggaaaatattcatgagactcaggaacaaagctattactccaactgtaaggtttcattataagcacgtaaatatagttcaaagttaccacatctgtaaactcaaaaatgctgctc

SEQ ID NO: 434099 - DNA, 651 bp, Homo sapiens
aataagatgaaaggtcaataataagcatagaaaggtcaataatggaataataatagtagaggtcatccctagaaggttgaaaacattttcaagtaaatataagaaactccttattgtacgtagtagtgcaggctggaaaaatatacttatttagttcaaatcatgtgacaggcactaggaataaagttagtccctgccctcacagggttcaaggtctaaatggaataatagatatgaaataactcaacaagtaaatagctcagctgttggaaatcaaacaaggagaagaaaagaaaaaggacatagtgctataaaagaaaatctttataaaattcaaaaccatttaaaatatgttgccattgatttccttattaacaggttttaatacctccatctttctctaatagttttcagtttattagaaayagtatgtgaactttttagattaaaaatttccagcataggtttatcacttattatatccttttattccttgaaatggatgattgtcaggcagaaatttaggacaaaggagctggaaaatattcatgagactcaggaacaaagctattactccaactgtaaggtttcattataagcacgtaaatatagttcaaagttaccacatctgtaaactcaaaaatgctgctc

SEQ ID NO: 434100 - DNA, 526 bp, Homo sapiens
tagctctgagtgcaccatgagtccagcagcccagggccatggactgtggtgactgtgaggcagcaacgtcagcatctgggagagtttgtggtttcattcccagtccctgcctctctccaccctgcggtgcctctgtgaccctgtgtttcccgctgatgagcaaacgggagcttgagcacatccaccgtgcaacacactggccgttcccctagggaagtcccctgcctggggtgtaggtggaaggtggccccattttcatcccccaaaatctcrctgttcccgcaccctggaactggttgcattcctccttggagcggagtcccggtgcactggggaccctgattcttggggtggagctgccccaggctcacaggcctttgccatggctcctgtgggaatgtgggatctggacctgctgcttgcagtggcgtggacaccgctctgctttggttctggacgtgtgctcctgctcctcatgctccagggccctgaggctacgtccccaggggctgccttgctccagagt

SEQ ID NO: 434101 - DNA, 511 bp, Homo sapiens
taatctctaagagtaaattcctttccagttgcaaaaagcaaaagaattcccataggctactttcctgtactctcttcaaatttgttctctggcccctgctgccctgaatgtgttcatgcccttcgcatgcttgaataatccgcaaaaacagaagactttttaaaaaattatttacttgtttaattttttaatttttatttattttttgctattttttctttctctcttcctctttttttttttttttttttgaggcagggtcttgctctgtcattcaggcttggaatagagtggcataaacacagctcactgcagcctcaacctcctgggctcaagcaatcctcccacctcagccttgaatagctggggccacaggggcacactactacacttgcctaatttttarattattgtaaagatgggatcttgccattgttgtccagtctggtcttaaactcttagcctcaagcaatcctcccaccttgacctcccaaaatgctaggattacagg

SEQ ID NO: 434102 - DNA, 610 bp, Homo sapiens
ctgcggcatttcagccttattttttgaactctggaagtttaaactattacccaatgtatgttgcacatgctgtggttgccgccttcaaattcatttaggcttccatcctcactccctaccctccacaaattgtatagcatttccacgatttggttgggattgtcacagyaggtcgctagtcagatattaacagggcaggagaaggcacccctccaccagaaatgccaggtgaccatcaggtgatggttaggcagttgttaagctgcctctctaaaataataattggccacagccggagcaagagaaaggcagtctcccattggatagaaacacctgaaactggagatcagcagcttcctaataagatctcaggagttgagcaaatgggctcacacgtgcacactaagaagcaaaacggcagagtttaactggtatatgaccttcctctagggatgttggactggtaagggaagaacgcctcgagtgagcatgcgcacaactgcagcaaacacgccacgcacggccactcccaagcatcagtgggcccccacacatgcagacagcccaccccaagggaagaatcaggggagaagggatgcaagaccctgga

SEQ ID NO: 434103 - DNA, 610 bp, Homo sapiens
ctgcggcatttcagccttattttttgaactctggaagtttaaactattacccaatgtatgttgcacatgctgtggttgccgccttcaaattcatttaggcttccatcctcactccctaccctccacaaattgtatagcatttccacgatttggttgggattgtcacagtaggtcgctagtcagatattaacagggcaggagaaggcacccctccaccagaaatgccaggtgaccatcaggtgatggttaggcagttgttaagctgcctctctaaaataataattggccacagccggagcaagagaaaggcagtctcccattggatagaaacacctgaaactggagatcagcagcttcctaataagatctcaggagttgagcaaatgggctcacacgtgcacactaagaagcaaaacggcagagtttaactggtatatgaccttcctctagggatgttggactggtaagggaagaacgcctcgagtgagcatgcgcacaactgcagcaaacacgccacgcacggccactcccaagcatcagtgggcccccacacatgcagacagcccaycccaagggaagaatcaggggagaagggatgcaagaccctgga

SEQ ID NO: 434104 - DNA, 519 bp, Homo sapiens
ttttcttgctgtaattgggctcagaaccayacctatcaccgcacggcattgctaatccatgagattggttcacagatagacatggatgtaagtttgtccagtaagaattctgtcacaaaagggtacatttcaatggataattgtggtaagagacctattctccccaactctgatgtaaaacaggaagcatccagctttcttaaggtcaggtactcatctgctaggctgctacaataagcagcctagggataaaatcaattgataggaagacagagccttcaaagtcattgagaaacagcaaaataactttgatggcattgcaaacttttccatcagttcatgttccaagcctgctctgcatgtagactttcagttgtataagtcaataaattcctgtatcatttgagccagtttgaattgggtcttcgattactagcacacacacacatctacacacaaactttaatgcttctacttctccatttttctccctacagctgttctcattaaatcaataat

SEQ ID NO: 434105 - DNA, 519 bp, Homo sapiens
ttttcttgctgtaattgggctcagaaccacacctatcaccgcacggcattgctaatccatgagattggttcacagayagacatggatgtaagtttgtccagtaagaattctgtcacaaaagggtacatttcaatggataattgtggtaagagacctattctccccaactctgatgtaaaacaggaagcatccagctttcttaaggtcaggtactcatctgctaggctgctacaataagcagcctagggataaaatcaattgataggaagacagagccttcaaagtcattgagaaacagcaaaataactttgatggcattgcaaacttttccatcagttcatgttccaagcctgctctgcatgtagactttcagttgtataagtcaataaattcctgtatcatttgagccagtttgaattgggtcttcgattactagcacacacacacatctacacacaaactttaatgcttctacttctccatttttctccctacagctgttctcattaaatcaataat

SEQ ID NO: 434106 - DNA, 519 bp, Homo sapiens
ttttcttgctgtaattgggctcagaaccacacctatcaccgcacggcattgctaatccatgagattggttcacagatagacatggatgtaagtttgtccagtaagaattctgtcacaaaagggtacatttcaatggataattgtggtaagagacctattctccccaactctgatgtaaaacaggaagcatccagctttcttaaggtcaggtactcatctgctaggctgctayaataagcagcctagggataaaatcaattgataggaagacagagccttcaaagtcattgagaaacagcaaaataactttgatggcattgcaaacttttccatcagttcatgttccaagcctgctctgcatgtagactttcagttgtataagtcaataaattcctgtatcatttgagccagtttgaattgggtcttcgattactagcacacacacacatctacacacaaactttaatgcttctacttctccatttttctccctacagctgttctcattaaatcaataat

SEQ ID NO: 434107 - DNA, 584 bp, Homo sapiens
ctcctgcctcagccttctgagcagctgagactacaggcatgtgccagcatgcctaatttttgtatttttagtagagacggggtttcgccatgttgaccaggctggtctcaaaatcctggcctcaagtggtycatctgccccagcctccccaagtgctggaattacaggcatgagccaccatgcccagccattagcaggtattttttgtagcaactcatgtctatcatgttgaaaggtgatggtgtcgctctccatttatattacatgctttagaaattatataaagcccacccaataagaaatatttattgagcacttgttatgtgctagacaagattctaaatgctttctcgattttttaataatatgataatgttacaaagtcagaattatttcctcatttcacagtggagaagatgaagtcacagagagatggcgctgtaaatcaccaaagggtgcaatctgatggagattttcaactttggctctgttgaccatacggttttgcttcactaaagttaaaatatgcagacataaaaaagaatgagttcatgtccttttcaggaacgtggatgaagccggaa

SEQ ID NO: 434108 - DNA, 483 bp, Homo sapiens
gcatgtgccagcatgcctaatttttgtatttttagtagagacggggtttcgccatgttgaccaggctggtctcaaaatcctggcctcaagtggttcatctgccccagcctccccaagtgctggaattacaggcatgagccaccatgcccagccattagcaggtattttttgtagcaactcatgtctatcatgttgaaaggtgatggtgtcgctctccatttatattacatgctttagaaattatataaagcccacccaataagaaatatttattgagcacttgttatgtgctagacaagattctaaatgctttctcgattttttaataatatgataatgttacaaagtcagaattatttcctcatttcacagtggagaagatgaagtcacagagagatggcgctgtaaatcaccaaagggtgcaatctgatggagattttcaactttggctctgttgacyatacggttttgcttcactaaagt

SEQ ID NO: 434109 - DNA, 550 bp, Homo sapiens
accaggtttgaggcaagcataaataacctgatggtgcagaaaaaacacaacacaagaatgtcacaatgcaatcgcaaatatcaatagccaaactgaccaagcagagtaaagaatttcagagcgtaaagactatcttgctgaaataagacaggcagacatgatgagagaaaaaagaataaaaaggaatgaacaaaacctcagagaactatgtgattatgcaaaaagaccgaacccatgactgattggggtacctgaaagagatgaggaaaatggaaccaggttggaaaacatacttcacgatatcatccaggagaacttcccgaacctagcaagacagaccaacattcaaattcaacattcaaattcaggaaatcaagagaasctcagtaagatactccagaagaagaccaaccccaagacacataatcagattctccaaggtcaaaatgaaggaaaaaaatgttaagggcagtcagagagaaaggccaggtcatctacaaagagaagcccatcagactaacagcagacctctcagcagaaaccctgcaag

SEQ ID NO: 434110 - DNA, 546 bp, Homo sapiens
aggtaaaagatacaaatcaataaatgtgaggaggctgatgccaggaactatgaggagtagcaaacagggtagccagatggcacatgcctcaaagaagcttgtggctttgaaagaggagggaggacgaaagttttgggggaagcaaggagggatgaagaggacasctatctccctcctgcgtttgaattccgaccatttgacttgtgaacatataaccagcttgcactgagagggccacagcgaaagcactgtcctccagggacagcctgttttctgttacggcaaggaattaaaaaaaaaaaaaaatcattagaaaagatctcaaggctacaggacagttagttaaccacagagccggagatccaagggacacaaagaaagagtttgggaaaatggagagaggacaggattaatttagatgagcaaatgtattctgcaaaatggaatcagaaatcctgagtggtaattgacggctttgagagcaaaagcatagagaagttaatgtttaagttaaagccctgaatgcccacgttttagtagaatttc

SEQ ID NO: 434111 - DNA, 342 bp, Homo sapiens
caaggtaattggcctttggtttaaacctaaatttttgatgataggtgaatgattaatattatttgacgataatatttctaatgaaatgcaaaaaaatggtcatgataaaaagtacaaaaataagcattccaatggttaacaaactgyatgatcccacttttaaaggtaaagatacacaaacatattaattttggttatttctgaggttttcggtttaaactggataagcttctgaatttttaaattatttataataaatatattaaaacacattttttcaatatagaaacaatacaaatttaaaaactgtatcagtaatacaggagttacatctttttcctt

SEQ ID NO: 434112 - DNA, 342 bp, Homo sapiens
caaggtaattggcctttggtttaaacctaaatttttgatgataggtgaatgattaatattatttgacgataatatttctaatgaaatgcaaaaaaatggtcatgataaaaagtacaaaaataagcattccaatggttaacaaactgtatgatcccacttttaaaggtaaagatacacaaacatattaattttggttatttctgaggttttcggtttaaactggataagcttctgaatttttaaattatttataataaatatattaaaacacattttttcaatatagaaacaatacaaatttaaaaaytgtatcagtaatacaggagttacatctttttcctt

SEQ ID NO: 434113 - DNA, 570 bp, Homo sapiens
acatctttttccttccttagacgtggggctccatttatttaaagaaagatgttattctgtgaagcctttaacttaataaacaagcttgcttttgacatatacaaaggccattaaattgaattaacacttgaagccagcaatttacaactacactcatcatcagaattactaggaaagcaattaaaaacagaaggaggaaaaaaaagagatctcctgagcctgcccgagaattactgaatcaaaaatccctggagtgcatgattattctgatgattagataatatataaaattttgaaaccactgtcacaagaaaggtacaaagcaaaagaaattaaattagatmtaattaatcattaaattaacaatctaaattagcaagtagatggaactagtcaccatgtttctttattttattttattttatactatgacattagagtcttagatggtgtaaaggcatttcattttattcttgcagctgatcacaagaaaaaaaaaaccctggaaaaaatatgaaagtcacctatggaagactctgaaggtagagaagagaaggcaaattgttcagg

SEQ ID NO: 434114 - DNA, 585 bp, Homo sapiens
aataccacatgatctcacttataagtgggagctaaataatttgtacacatgggcatagagactggaataataggcactggagactcaaaaatatgaaagggtggaagaggggtgaggratggaaaattaccaattgggtgcaatgtccattatatgggtgacggttaaactaaaagcctagactttgccattatgcagtatatccatgaaacaaaactgcacttgtactccctaaatctataaaaataaataaaataaaatatagaaatctagcaattacaaaaaatcccactacagggccactcaagccatccatggatatggtatactccttttctgagggtcaacattctatgattaatgaaaaatggactcttctcttgaagctttttaccttggctttttctagaacaaattcttggcctccacatcccacttacctgggtgatctctgagttttcagatttttgattcatttttcttgctcttactgcttttgttatggaattggcatgggtgataggccaagtcaccctgatgaatcataatcaggatcatgttttccaaagttatatacagaaatgc

SEQ ID NO: 434115 - DNA, 585 bp, Homo sapiens
aataccacatgatctcacttataagtgggagctaaataatttgtacacatgggcatagagactggaataataggcactggagactcaaaaatatgaaagggtggaagaggggtgagggatggaaaattaccaattgggtgcaatgtccattatatgggtgayggttaaactaaaagcctagactttgccattatgcagtatatccatgaaacaaaactgcacttgtactccctaaatctataaaaataaataaaataaaatatagaaatctagcaattacaaaaaatcccactacagggccactcaagccatccatggatatggtatactccttttctgagggtcaacattctatgattaatgaaaaatggactcttctcttgaagctttttaccttggctttttctagaacaaattcttggcctccacatcccacttacctgggtgatctctgagttttcagatttttgattcatttttcttgctcttactgcttttgttatggaattggcatgggtgataggccaagtcaccctgatgaatcataatcaggatcatgttttccaaagttatatacagaaatgc

SEQ ID NO: 434116 - DNA, 548 bp, Homo sapiens
gggaaaacataattaaacaaggaaatccaattgtaaaatagttatttgaggaacgatgagaactrtggctaactaggtttctcttttatgaaaatgtaaggaagtggaaaagcctgctagaattaacgccactggtattttgacacatgctattttattagattggatacttatgggagaaaatattccatgctttcaagtgatgacaatcgctctttactctcaaaagcaagtcaagtcaaaataaaacaaaactacttttcacatggagaaaggtgaaggtagtgcataaggtactctgggcattttaacatggtgcctgatgactgtaaacatgcctaggatgctgttcttctactcccattaaactcatcatgcatacagagtgactcattaaatgtgtatttctcctctcaccctctaaggtccaggaaggcagtagtaccatctaccttggtcactgctttgtctacaggtttgaataggtttggtttttggtcataaaatttacacattttcaattaaattgtgctgatgtggctgtataa

SEQ ID NO: 434117 - DNA, 588 bp, Homo sapiens
aacaaaactacttttcacatggagaaaggtgaaggtagtgcataaggtactctgggcattttaacatggtgcctgatgactgtaaacatgcctaggatgctgttcttctactcccattaaactcatcatgcatacagagtgactcattaaatgtgtatttctcctctcaccctctaaggtccaggaaggcagtagtaccatctaccttggtcactgctttgtctacaggtttgaataggtttggtttttggtcataaaatttacacattttcaattaaattgtgctgatgtggctgtawaacccagaatgtcacagagaaaaagaagaaaacttaaaatcaatattgtctgggagaaatttctccaaatcataaatctggcagattaagacaaacatacccgagctctgacatattgtctgtataaccagactttagtcacaagttcagagtcagtgcctagcagagaacaaaaaagtcattttgttactacaagggtgtacttttctctctatgtcctttcagtggaataaacccccagagagaaacacggcccaaaggtactgactggggcatatgacgactgtct

SEQ ID NO: 434118 - DNA, 581 bp, Homo sapiens
tgtaagcgtccagccccagcacacacagatgtgtctatcttttacattcctttcttgtgtctaattctcttggtagccacttcctgatttcccttctgtgcctggatattttcagcttcaattttcgttctgtctcatttgtattttactgtactcaacaacaaaggtagtttctttcaggaactttgtttcctaagctctttttactttaagaacattggattttagattcaactgaaagttatttgttagcaattgagagtaagcgaaagcaaagaaaagacagtcatttactaccagcaaaggtttcctttctcaaatatagtcagaacaagcaacttcactatttaatatgactctccttttggattcatctatgtagagatattgataatggtcatttgtcccagctgaagtcagcctttatatttgtttccattgatgcttgcactataaatcatcaaaacactgaaaaaattaaacagacattkacatacaggcttgaatgatgactgtgtttggttaaacgtgttctgctacacatcttgttaataagacatgctaaaaaaaaccccactttt

SEQ ID NO: 434119 - DNA, 608 bp, Homo sapiens
cattattttgctattattatgtctcttactctacatatttcctatttcctacctaacgawgttacagaaaacttattacagattttctataaggtgttagttgtcttttaaggaaaaataaggaaaaacagcatagtcttctacatttatttcttaattgctattcttgatgcctttgtttttctctatagatgcacgtttccattttgtattatttctcttcagcctgaatgttatttttatgcatttcttatagtagacagctgctgatgacaaattttcacagtttttgtctatctgaagttgtgttgtatttcatgttcgctttcagtgatatttttattggacaattcctttttgcttcatcactgtagactttttcagataggataatttctgtcttcaaagccactgaatctttattctgccatctgtaatctgctaatcctactcaggaaaattttcagtccaattattgacttttcagttctagagtttccattttgttctttttttataatttccatttctctgctaagattccatatctgcttaaaaattaagatcatactttcctttaattctttgagcatatgacaaaaacaagc

SEQ ID NO: 434120 - DNA, 608 bp, Homo sapiens
cattattttgctattattatgtctcttactctacatatttcctatttcctacctaacgaagttacagaaaacttattacagattttctataaggtgttagttgtcttttaaggaaaaataaggaaaaacagcatagtcttctacatttatttcttaattgctattcttgatgcctttgtttttctctatagatgcacgtttccattttgtattatttctcttcagcctgaatgttatttttatgcatttcttatagtagacagctgctgatgacaaattttcacagtttttrtctatctgaagttgtgttgtatttcatgttcgctttcagtgatatttttattggacaattcctttttgcttcatcactgtagactttttcagataggataatttctgtcttcaaagccactgaatctttattctgccatctgtaatctgctaatcctactcaggaaaattttcagtccaattattgacttttcagttctagagtttccattttgttctttttttataatttccatttctctgctaagattccatatctgcttaaaaattaagatcatactttcctttaattctttgagcatatgacaaaaacaagc

SEQ ID NO: 434121 - DNA, 608 bp, Homo sapiens
cattattttgctattattatgtctcttactctacatatttcctatttcctacctaacgaagttacagaaaacttattacagattttctataaggtgttagttgtcttttaaggaaaaataaggaaaaacagcatagtcttctacatttatttcttaattgctattcttgatgcctttgtttttctctatagatgcacgtttccattttgtattatttctcttcagcctgaatgttatttttatgcatttcttatagtagacagctgctgatgacaaattttcacagtttttgtctatctgaagttgtgttgtatttcatgttcgctttcagtgatatttttattggacaattcctttttgcttcatcactgtagacttttycagataggataatttctgtcttcaaagccactgaatctttattctgccatctgtaatctgctaatcctactcaggaaaattttcagtccaattattgacttttcagttctagagtttccattttgttctttttttataatttccatttctctgctaagattccatatctgcttaaaaattaagatcatactttcctttaattctttgagcatatgacaaaaacaagc

SEQ ID NO: 434122 - DNA, 611 bp, Homo sapiens
gactgctgtgtggtgcagccctcttgtccagtgttggaaaaaagttgtgtcatgtattttgcctagttttatggttgttgaaaacaagatggttaagtcttatgtgagttattccacaatagctggaaacaaaagttctaatatttcatattattgacgtaatgacttcatttagtctatctcttgccaatctttttgacacataagatgtcaatatcccaggttaaaccagttggacagttcttgctctatcagttgcacaacttacttaggttctccctatataaattagattaccatatgtcctggtttacttgggacagtgttgcttaatttgtcctggctaaattgtgaccctttcagatccaagtatgttccactttccaccttagaaaataaatcactggtcactttactcrtctattcctattcctcttcaagtgcagcccatttgtaacagtcactttcctatggaaggcctacttgctatgtactcccaaggagactgggcgtggtaagctcctctaccttggtttccctctaacaggctggtctaatagtggtgtgctaggaataagcaaaacacagtagaaatggcatacttaattgtg

SEQ ID NO: 434123 - DNA, 583 bp, Homo sapiens
gatgcaataatctttgactctttccctctaggctctcaaacttgagacatttaatcaaggacttcaaatttcagaagcctcagatcttctcctaggaatgttacccacactgaacttgaggatttctatgcagaatgtgatttttgttgttgctttcagatctttctaatttgttccyagctttagaagtaggtttgtccagatagatggtagatatagttactgtactgctaattttgatatttttccccctgtgattctattcaatacattctagcttgttttgtattattttgcttttcctttatcttccacttttactgagaatgggaggtagcaatgtaagagggtcaactatgcaggcagactgagtttcaagtaaagaaatttgtcattcttgtttgctttggttagctcttcgtaagtattttctgtacctctgaatgggtttcaaaagcatgagtacagtctcattaaaaaaagaaaaattttaaaattacccatttgctaattcttgagatcacagagttcaatataccttcacagaagagtgacagaattaactaccaagattcattagatt

SEQ ID NO: 434124 - DNA, 616 bp, Homo sapiens
ttttaattttgaggcagattatgcattaatcttttttttcactcaaagacaatcttttgactcctattattctgaactacttgttattgccaataataaaaggacagagtttagatctgtgggttgtaacaccacttgggtcatttaacatacatgggcattaaatttacaatttcactctggggaagccatgtctagtgactgggaaatattttgtaaaatacacttgtaattaaatttatgctgcttgtaccagccatgaaaaatcaactaatgagcttgcataagggagaggcaagctcacattatattataaattgagaaacatagccacaatgctaattctttcctaacaaaggttcttgactccaagaatataacaaacggtttctgaaggtcctgttttttccataatttatatgttgcctcccatgatatgcaaagaagaactagagtctaacaaagggttctaaatgatgwccaatatggtactggggagaagacatttgttcaataagtaaaacaaaattatacatctttcttagtgcaggtgtcttttgctcgtctcaaccgtatttttaaaataaagtattacccactaccttgtttccttttt

SEQ ID NO: 434125 - DNA, 508 bp, Homo sapiens
atatacaaaactccattattctaacaaattattttatttgccttttaaacaattttcattagaaaaacaagaacttactatatcatttccacatttcagctattttgctgtgtaataccacaaatacagttatttctggattgggtagaaaggggaaaggaggaaactagataagttcaaaaaatgaaattttaaaagaaacctttttaaccacagggtaacagtgacctagaaagatacaaattagaattagatgctgttggataccacattttccaaaatagtctagtgctaggagactccataaaatatcttatatagaacagggttrgagtagaaaggaacacgaataaatgttatctcaattagcaacttttttgaaattccccacagacatttatttatttgaaaaaaaaaattaaaacatactttcttctcctgtctcttcttttccaggaatgaaactgcctttggatgttgcaatgggaccctaaggaatgtcagccag

SEQ ID NO: 434126 - DNA, 508 bp, Homo sapiens
atatacaaaactccattattctaacaaattattttatttgccttttaaacaattttcattagaaaaacaagaacttactatatcatttccacatttcagctattttgctgtgtaataccacaaatacagttatttctggattgggtagaaaggggaaaggaggaaactagataagttcaaaaaatgaaattttaaaagaaacctttttaaccacagggtaacagtgacctagaaagatacaaattagaattagatgctgttggataccacattttccaaaatagtctagtgctaggagactccataaaatatcttatatagaacagggttagmgtagaaaggaacacgaataaatgttatctcaattagcaacttttttgaaattccccacagacatttatttatttgaaaaaaaaaattaaaacatactttcttctcctgtctcttcttttccaggaatgaaactgcctttggatgttgcaatgggaccctaaggaatgtcagccag

SEQ ID NO: 434127 - DNA, 533 bp, Homo sapiens
tttaatttatttagggtgacaagtttacttttatttcatcctaagtcatttctggtaatttaaaatttccagataattaccaattttgtatagttttaaaatttattgacaaaataatatagtaatgtcatatttttwaaaaaaatctactctgcgtttttttttttttttgagacagagtctcactctgtcacccaggctggagtgcaatggcacagtcttggctcactgcaacttctgcctcccaggctcaagtgattctcctgcctcagcctcctgagtagctgggattacaggcacatgccaccgcgcctggctaagttttgtatttttagtagagacggggtttcaccatgttgctttggctggtcttgaactcctgacctcaggtgatccactcgccacggccttccaaagtgctgggattacagacgtgagccactgtactgggccactgtactggttgaaatacatttcaaccctagaaatgtatttttcttgtaatttggtcaatttttactatacatatttat

SEQ ID NO: 434128 - DNA, 533 bp, Homo sapiens
tttaatttatttagggtgacaagtttacttttatttcatcctaagtcatttctggtaatttaaaatttccagataattaccaattttgtatagttttaaaatttattgacaaaataatatagtaatgtcatattttttaaaaaaatctactctgcgtttttttttttttttgagacagagtctcactctgtcacccaggctggagtgcaatggcacagtcttggctcactgcaacttctgcctcccaggctcaagtgattctcctgcctcagcctcctgagtagctgggattacaggcacatgccaccgcgcctggctaagttttgtatttttagtagagacggggtttcaccatgttgctttggctggtcttgaactcctgacctcaggtgatccactcgccacggccttccaaagtgctgggattacagacgtgagccactgyactgggccactgtactggttgaaatacatttcaaccctagaaatgtatttttcttgtaatttggtcaatttttactatacatatttat

SEQ ID NO: 434129 - DNA, 580 bp, Homo sapiens
taactcttcttgctaagtttttatagcgttctgacttcttacagcctatgattattttttagctgtgcaaccacgttgaggtccctggtctagttcactctgcttgctttccagatgagtattacggaaaagagtgctgtgagcttagcccatgtgtattttttcctttcttaccaacagaatccagaacaatgccgagctgaagatctaagtctccatattccgcaagcatgacttttcgaatacaatttaaaatagaaatccattttgtcttccatgatctttaaacctgctacacttgaataacatttctactagatctcatgacttccttgatcactcttgggtaaaccaataatgtgatgggcactctaagtcacaaaaatgggcctaattttggtgatttaaatgctcagtcttgcgtaacaacaaaagcctcaaatttagcagcrtttcttcccctccagaaggttgatcatcgactaagtaggtgagctgacattttcgttcttcttcagctactccagtcccagtgtcttctgctcatctggcattggagtctgggaaagcagcaggaaat

SEQ ID NO: 434130 - DNA, 580 bp, Homo sapiens
taactcttcttgctaagtttttatagcgttctgacttcttacagcctatgattattttttagctgtgcaaccacgttgaggtccctggtctagttcactctgcttgctttccagatgagtattacggaaaagagtgctgtgagcttagcccatgtgtattttttcctttcttaccaacagaatccagaacaatgccgagctgaagatctaagtctccatattccgcaagcatgacttttcgaatacaatttaaaatagaaatccattttgtcttccatgatctttaaacctgctacacttgaataacatttctactagatctcatgacttccttgatcactcttgggtaaaccaataatgtgatgggcactctaagtcacaaaaatgggcctaattttggtgatttaaatgctcagtcttgcgtaacaacaaaagcctcaaatttagcagcatttcttcccctccagaaggttgatcatcgactaagtaggtgagytgacattttcgttcttcttcagctactccagtcccagtgtcttctgctcatctggcattggagtctgggaaagcagcaggaaat

SEQ ID NO: 434131 - DNA, 580 bp, Homo sapiens
taactcttcttgctaagtttttatagcgttctgacttcttacagcctatgattattttttagctgtgcaaccacgttgaggtccctggtctagttcactctgcttgctttccagatgagtattacggaaaagagtgctgtgagcttagcccatgtgtattttttcctttcttaccaacagaatccagaacaatgccgagctgaagatctaagtctccatattccgcaagcatgacttttcgaatacaatttaaaatagaaatccattttgtcttccatgatctttaaacctgctacacttgaataacatttctactagatctcatgacttccttgatcactcttgggtaaaccaataatgtgatgggcactctaagtcacaaaaatgggcctaattttggtgatttaaatgctcagtcttgcgtaacaacaaaagcctcaaatttagcagcatttcttcccctccagaaggttgatcatcgactaagtaggtgagctgacattttcgttcttcttyagctactccagtcccagtgtcttctgctcatctggcattggagtctgggaaagcagcaggaaat

SEQ ID NO: 434132 - DNA, 581 bp, Homo sapiens
tggagctctgggcccagcatgtaaggttgggagaaacatagatttgtttctgacatccttgaataagtgaaacaatgttggtaatcatttaccactagaatttttgttatcaaaaaaatcattattccttaggtttttaagccagatttttatttctagaaactgaatgatctttataacttttacatatactaagatagagatgaaaagattcaccagcatcactatgctggctcagagcctcttctatgccctattcagagctctgggagaaaggaatctatggactgctttcctatccatgttgcctggttggctggcttcctgctgttcttrgcctacggaagatagcaactggagattggaaggtggaaggacagaggatgtggaatacattttgcctgcttgctccaacttcttcacgatggcagtaaccaggttgtcctccaactacagatttttctttgaagctctaccacagtgccagttctcattagaagctagttaaccaaggtctactccttgtctctttagatttaggctttctactgctgctagttttctggagcctcaatgtgttg

SEQ ID NO: 434133 - DNA, 546 bp, Homo sapiens
cgacttactttgcacttatttattcattagtgcatttatgcattagtgcaatgtgtgttgaccatttattttcctttttctgtaaataatgtttgtctagtttatctgttacataattttgttttgaatttttttcagatgtgtgttgaccatttattttcctttttctgtaaataatgtgtgtctagtttatctgttacataatttttattgtttgagtatatattatgactaatccctagctgttgtgtatcctgtatattttcctcctggcctggcctattattgttttttcttccttttttcctttttttttttttttttttagacagtcttgctctgtcgcccaggctggagtgcagtggtggaatatcggctcactgcgaaacctctgcccaccrtgttcaagtgattctcctactccagcttcccgtgtagctgggattacaggaacctgccaccacgcctggttaattttttgtatttttttgtaattgtatttttatatttttagaagagatggggtttcatcatgttggccaggct

SEQ ID NO: 434134 - DNA, 546 bp, Homo sapiens
cgacttactttgcacttatttattcattagtgcatttatgcattagtgcaatgtgtgttgaccatttattttcctttttctgtaaataatgtttgtctagtttatctgttacataattttgttttgaatttttttcagatgtgtgttgaccatttattttcctttttctgtaaataatgtgtgtctagtttatctgttacataatttttattgtttgagtatatattatgactaatccctagctgttgtgtatcctgtatattttcctcctggcctggcctattattgttttttcttccttttttcctttttttttttttttttttagacagtcttgctctgtcgcccaggctggagtgcagtggtggaatatcggctcactgcgaaacctctgcccaccgtgttcaagtgattctcctactcyagcttcccgtgtagctgggattacaggaacctgccaccacgcctggttaattttttgtatttttttgtaattgtatttttatatttttagaagagatggggtttcatcatgttggccaggct

SEQ ID NO: 434135 - DNA, 546 bp, Homo sapiens
cgacttactttgcacttatttattcattagtgcatttatgcattagtgcaatgtgtgttgaccatttattttcctttttctgtaaataatgtttgtctagtttatctgttacataattttgttttgaatttttttcagatgtgtgttgaccatttattttcctttttctgtaaataatgtgtgtctagtttatctgttacataatttttattgtttgagtatatattatgactaatccctagctgttgtgtatcctgtatattttcctcctggcctggcctattattgttttttcttccttttttcctttttttttttttttttttagacagtcttgctctgtcgcccaggctggagtgcagtggtggaatatcggctcactgcgaaacctctgcccaccgtgttcaagtgattctcctactccrgcttcccgtgtagctgggattacaggaacctgccaccacgcctggttaattttttgtatttttttgtaattgtatttttatatttttagaagagatggggtttcatcatgttggccaggct

SEQ ID NO: 434136 - DNA, 607 bp, Homo sapiens
tccaaacctacttagtaaattgtttttattgtttgaattaacttttatcaattctctagggtttttcatgtataccatcatgataacttcttttctgattcttaataatttttttttcttattggtgactacctccagtacaatatgaaatatcagtgaaactagtggttatacttgctttgtttctaattttaatggaagtgcttttwatggttttctcttaaggaaggtgctaaatttaggaatagggaatatagactttaccatacttaaaaaaatccatcaatttacattttccatagtgcctctttttaaaatataaagaatagatgttaaattttttcaaagactttttcacaactctggagacaatcacgagttttctttgtttctttgttttcagaagtctaatgccaaccaaattctttgtcctcttgtgttatttggttcttttcctagaggccatgaaaaatttttttccgtttcttaaagtttaatatttttaccacgatatacattagagtttttggttttgtgttaaaaatttcaggtacttgctgactttttcagtatgtaaattcaggtctcttttcattttttgaaaaaa

SEQ ID NO: 434137 - DNA, 607 bp, Homo sapiens
tccaaacctacttagtaaattgtttttattgtttgaattaacttttatcaattctctagggtttttcatgtataccatcatgataacttcttttctgattcttaataatttttttttcttattggtgactacctccagtacaatatgaaatatcagtgaaactagtggttatacttgctttgtttctaattttaatggaagtgctttttatggttttctcttaaggaaggtgctaaatttaggaatagggaatatagactttaccatacttaaaaaaatccatcaatttacattttccatagtgcctctttttaaaatataaagaatagatgttaaattttttcaaagactttttcacaactctggagacaatcacgagttttctttgtttctttgttttcagaagtctaatgccaaccaaattctttgtcctcttgtgttatttggttcttttcctagaggccatgaaaaatttttttccgtttcttaaagtttaatatttttaccasgatatacattagagtttttggttttgtgttaaaaatttcaggtacttgctgactttttcagtatgtaaattcaggtctcttttcattttttgaaaaaa

SEQ ID NO: 434138 - DNA, 555 bp, Homo sapiens
tggtgctttgggttgaactgtgttctcctcacatttatatgttggagtcctaacccgccatgcccttagaacaygggcaagtttggacacagacatggaccatgggaagatgtaaagacacagggagaagatggccatctaccagcccagaagagaggcctataagggatccttccagtatggcgcccggaaggaaccaaccctaccaaaaccttgcttttgcatttcttgcttccagaactgtgagactgtacatttctatagtttaagcaacctggtctctggaacaggcacaaaatagctgaaacacactgatgtatacgatgataacacaatttttaacatgtcaactttgggtgtctgcgtgatctccaaggagagaggtacagtgagctgttgaatggtccaggcttgggagacagagctgggcatggagttactgaggagtcctctgcacataactcacacccagggaaaacatgcggggcttaaaacctagatgatgagttgacaggtgcagcaaaccaccatggcacatgtgcacctacataataa

SEQ ID NO: 434139 - DNA, 555 bp, Homo sapiens
tggtgctttgggttgaactgtgttctcctcacatttatatgttggagtcctaacccgccatgcccttagaacacgggsaagtttggacacagacatggaccatgggaagatgtaaagacacagggagaagatggccatctaccagcccagaagagaggcctataagggatccttccagtatggcgcccggaaggaaccaaccctaccaaaaccttgcttttgcatttcttgcttccagaactgtgagactgtacatttctatagtttaagcaacctggtctctggaacaggcacaaaatagctgaaacacactgatgtatacgatgataacacaatttttaacatgtcaactttgggtgtctgcgtgatctccaaggagagaggtacagtgagctgttgaatggtccaggcttgggagacagagctgggcatggagttactgaggagtcctctgcacataactcacacccagggaaaacatgcggggcttaaaacctagatgatgagttgacaggtgcagcaaaccaccatggcacatgtgcacctacataataa

SEQ ID NO: 434140 - DNA, 525 bp, Homo sapiens
tctgtggggcaggatgcaaagttttgtctttcataattagggagtgattaattatttaatcagagcagagagcagcccaaacaatgacacctcctctcatttgttgggctacaggcctccattaatcacagatcctgacattctgcatgcaaaagggacaggtggatttgaagcttggtgttgcgataacctcactactgctccctgatctgcttccaaatgctgccaatgtgttacggcaaacatcaccatcascagcccaggcttcattcctagatgaacgtcttaggaaggggaacgttatatctgcacatcaaggcatttcactctgtcccttctcctcgttcaggtacctggggtttggccccaccattccgtctcctgctggtaacaggttctgttactgcaggtgtagttttaaggcttgtttgagcatatgaaccgctcactttgcacctcttcattctggcctaaggatgctcccgataggtgctgttctaacacctcttcattcacagaagctgc

SEQ ID NO: 434141 - DNA, 507 bp, Homo sapiens
ggagaggagaacaattatataagcaatatcctcatctctgggaagaagactctaagactagtcatagtatagctaactagggaaaagtaattattatttttcgtatatatttgtgattttgtgagagctatgaaataagtgataagaggccaaccacagatggcctgggacttttgcattagttgtgatcaaggaatagccagatttgcctatacctgcagygtgcaaggcagtagccatcagcacaggtgtctattgtcacttgcagagtgactctgaaatgaggtgtgctgttactataaaacacacattggattttgaaggtgacctgctctagactgcaagcttccaggggacaggctctcatttggtctccttagaacacagcacagtctctggaatatcctaggtggtctaagaggcttgcttggtgggtgggggagtgagtgtatgggtagcaggtaggcagtcatgtcttatgtcactgtgtgcccactctttctatcc

SEQ ID NO: 434142 - DNA, 529 bp, Homo sapiens
caaggctgcagtgacctatgactgcaccacygcactccagcctaggtgacagaaggagacgctatctctaaaacaaataataataataaaataaaatacacagaactaaaaaatttaaataaccattaaaaagaaaaaagtaactgcttgtgaaagaattctgaggtatgtttggcagattaaaacatttcaatggtggcagaagaaaaatgcctctgcagtggttttcagataacaaggaatttacaggtttttgttttgttttgttttgttttgttttgttttggtagcaagaaagctgctctaatatatttcaggtgactagatggaccattttttggagtatcttccagtcttgccgtctcaataaatgggtgaatgcctccattgtcccgaatgtttatttctgcattctcatcttgaataattataaaagagaatagccttacagatcacttacaatttataaaatctctcaagtttgctgttttcaaagacagggatgtccgtgtcagcacccccgtttcca

SEQ ID NO: 434143 - DNA, 610 bp, Homo sapiens
agcaacttttatgtcatagcgatttcattatacatcccaaaagacagaaagatctttttaaaaaaatctgaaatgattaccagtcactttggtgttggtagtggtgattttgcttttctgaggctgtcatgtgagtagtgtggataaagcaagtgagaaatggtgttggtgacattgagatccagatttttatcatgtgagaaaaaggaaattgatgagattgtgtaaaactctagtcctgattttgaaatggaaataccagcataaatgtatgacttaatttatacttaaaagaaaatactttaartgtcccaattttgtatcctgcaaagtcctagaaacaaccaatccagtagtaattagtattcctcactcaccagtgatggatctagatactatttcccactaaaaagaaccaacccccttaaataaatggtcacaccaggaagcaaagaaattaaatgactactaagagtgtttcaaacagattcaggagaaactgaatagttcttattcctggggtcagacaatttgatcccaaattaggataaaactgtaatggatgaattgaaacatatcaaatttgtttgactccataaatgaataatga

SEQ ID NO: 434144 - DNA, 610 bp, Homo sapiens
agcaacttttatgtcatagcgatttcattatacatcccaaaagacagaaagatctttttaaaaaaatctgaaatgattaccagtcactttggtgttggtagtggtgattttgcttttctgaggctgtcatgtgagtagtgtggataaagcaagtgagaaatggtgttggtgacattgagatccagatttttatcatgtgagaaaaaggaaattgatgagattgtgtaaaactctagtcctgattttgaaatggaaataccagcataaatgtatgacttaatttatacttaaaagaaaatactttaaatgtcccaattttgtatcctgcaaagtcctagaaacaaccaatccagtagtaattagtattcctcactcmccagtgatggatctagatactatttcccactaaaaagaaccaacccccttaaataaatggtcacaccaggaagcaaagaaattaaatgactactaagagtgtttcaaacagattcaggagaaactgaatagttcttattcctggggtcagacaatttgatcccaaattaggataaaactgtaatggatgaattgaaacatatcaaatttgtttgactccataaatgaataatga

SEQ ID NO: 434145 - DNA, 610 bp, Homo sapiens
agcaacttttatgtcatagcgatttcattatacatcccaaaagacagaaagatctttttaaaaaaatctgaaatgattaccagtcactttggtgttggtagtggtgattttgcttttctgaggctgtcatgtgagtagtgtggataaagcaagtgagaaatggtgttggtgacattgagatccagatttttatcatgtgagaaaaaggaaattgatgagattgtgtaaaactctagtcctgattttgaaatggaaataccagcataaatgtatgacttaatttatacttaaaagaaaatactttaaatgtcccaattttgtatcctgcaaagtcctagaaacaaccaatccagtagtaattagtattcctcactcaccagtgatggatctagatactatttcccactaaaaagaaccaacccccttaaataaatggtcacaccaggaagcaaagaaattaaatgactactaagagtgtttcaaacagattcagkagaaactgaatagttcttattcctggggtcagacaatttgatcccaaattaggataaaactgtaatggatgaattgaaacatatcaaatttgtttgactccataaatgaataatga

SEQ ID NO: 434146 - DNA, 585 bp, Homo sapiens
tttctctaagccagcatttgctccaatttacagcaaggaggacytggtaccttaccataccttgtctgtagttggttgacttcagcttagtaggaatcgctgacggtacgtaattcttttagcttaggatgggttcagccattttaaattcatcatttcaatgtgatctttatgaaatttagagtttaaaaaattctactcattgtcatagaaaaaagatagatgatagggagggagggaagaaaaacatctcagtgaccttccaactaattattccaataatgactctggccatagggcgggcaagtgaaataaggtgccccttagagtgtgctgccttatcttagcaattatgtactaatgagagcctgatatttgaaataaatacactaatgatatcagttcattttacattcagcttcacataataaaaaaactaatgcttactagatgtactgatagtggcttaaacaggatagatatttatttctcttttgcgacaaaaacagtctgcaggtagttaatccagggctgttttggaagttctgtagtcaacagagacccaggcctctggtataattttgc

SEQ ID NO: 434147 - DNA, 601 bp, Homo sapiens
gggagtccaacgacagggagatgtggggttgctagaatatcttcttttagccatatgttgcatttggctttattctctctttctctctctctctctctcttttttttttttttttttcattttgagacatggtcttgctctgtcacccaggctggattgcagtagtgcaatcatagctcactgcagcctcaacctcccagccagaartgatcctctcacctcagcctcccgagcagctgggactgcagttgtgtgcctccatgcctggctaattttttgatattttgtagagacagggtttccctatgttgtccaggctggtctcaaactcttggctcaagtgatcctcctgccttgacctccaaaagtgctgggattacaggtatgagtcaccatacccagcccctatttggctctttttgagccaagaactccaaagaaaatgcaggggagccaacggcagtgtagtctgttgccttctagagagcagctcttccaagagataagcctggatttgacctccactccagatatgggggaagaaaggaagaattttctccttgctcacacagtgagggaacaggcattcctggtcccaatg

SEQ ID NO: 434148 - DNA, 601 bp, Homo sapiens
gggagtccaacgacagggagatgtggggttgctagaatatcttcttttagccatatgttgcatttggctttattctctctttctctctctctctctctcttttttttttttttttttcattttgagacatggtcttgctctgtcacccaggctggattgcagtagtgcaatcatagctcactgcagcctcaacctcccagccagaaatgatcctctcacctcagcctcccgagcagctgggactgcagttgtgtgcckccatgcctggctaattttttgatattttgtagagacagggtttccctatgttgtccaggctggtctcaaactcttggctcaagtgatcctcctgccttgacctccaaaagtgctgggattacaggtatgagtcaccatacccagcccctatttggctctttttgagccaagaactccaaagaaaatgcaggggagccaacggcagtgtagtctgttgccttctagagagcagctcttccaagagataagcctggatttgacctccactccagatatgggggaagaaaggaagaattttctccttgctcacacagtgagggaacaggcattcctggtcccaatg

SEQ ID NO: 434149 - DNA, 600 bp, Homo sapiens
gagtccgctcagtggtgtctgtttatgttatggtgatcactcatcattctaaaacaataacaaaaaaaacccatacattatataagtaagctctcataagagattgagtcataaaaggttttcaagataggctttctttgggatgttaaaccgtaccctggttaaggagggcagtaaaaatggcaatatagtcattgttggaaagagccgttaccttttgcactggagatgaraagagtttatgataaaatactttttaattaaacttgattatccccaattctgttagtgggaaataatcctatgttccacttaccaagcataagatgcaaattataaaaaataagctatgaagatttttttacataatttttttctaacacttcttagaacgcatgaaaatccaatcaaatcttttatatcaacaaacttgatttcaacattagtgaacctgaggctcagagctgaattctcaaaattaattacatgttcagtctacggaaggcatacaagtgggcttgtacatttgaaagattttttttattaccagggtagaaacctcaataagctttctgtttagcctttagttaaacagataat

SEQ ID NO: 434150 - DNA, 600 bp, Homo sapiens
gagtccgctcagtggtgtctgtttatgttatggtgatcactcatcattctaaaacaataacaaaaaaaacccatacattatataagtaagctctcataagagattgagtcataaaaggttttcaagataggctttctttgggatgttaaaccgtaccctggttaaggagggcagtaaaaatggcaatatagtcattgttggaaagagccgttaccttttgcactggagatgagaagagtttatgataaaatactttttaattaaacttgattatccccaattctgttagtgggaaataatcctatgttccacttaccaagcataagatgcaaatkataaaaaataagctatgaagatttttttacataatttttttctaacacttcttagaacgcatgaaaatccaatcaaatcttttatatcaacaaacttgatttcaacattagtgaacctgaggctcagagctgaattctcaaaattaattacatgttcagtctacggaaggcatacaagtgggcttgtacatttgaaagattttttttattaccagggtagaaacctcaataagctttctgtttagcctttagttaaacagataat

SEQ ID NO: 434151 - DNA, 577 bp, Homo sapiens
ggctctgccagcactggaaaaattgctagctggattcagctgttcctgcagctggcattgctggaatgaaacgctcctgacaggtaggaccagccagaatggcttcatggggactgaacaggaggtaaacaggaataaatgagccctccagccttgcagtctccctcccacgccccctaccggcagaacctagaagagacactggagccacgcttccctgtaagctcagcccaagcaccggaaaaaagcgcctggaagggctgatttgaaaaggaagagccatagcttgccactgggacagtgaaccacgcagaytgtatggaaggttccagagagaaggctgaggaggctgaggaggctgctcaccctgcacagtgctcagcgttttatgattcctttccctgcaaaataaatccccattgaacttctctcccttagtgtctcttctccacatccctgtctgtagctctctttcctttacaaaatgatatcacctgaggtcaggagttcgagatcagcctggccaacatggtgaaaccccatctctactaaaaatacaaaaattagccttgcaagg

SEQ ID NO: 434152 - DNA, 641 bp, Homo sapiens
ggcaagcagttagtgctggtatgacacatggtcagtgatggtcagtgatgaataagtagaatattctgtctcgtggaaattactgtgggatttgtttttcaagggttgcatagatgatgtgctcactttctaggatttaataattatggacaaacgtctaggcattagtgcgaagttggcaatttgagtgccaaagtttacatgtatgcttgcatgtagaacatgcaagacaattgaatgaaataataatttaatagtacagtggatttgtcataactagagtgatcctggccaggcacggtggctcacgcctgtaatcccagcactttgggaggcagaggtgggcggatcacttggagtcaggagttcaagtccagcctggtcaatgtgatgaaaccccatctctrctaaaaatacaaaaattagctgggcctgatggcggacgcctgtaatcccagctactcgggaggctgaggcaggagaattgcttgaacacgggaggaggctgcagtgagctgagattgcaccacgagctagactccatctcaaaaagtaaaatataaaaaataaaaaaactagagtgatcgtatatcctgcttgtcctgaacaattttgttttatgtgttatacgccaatattat

SEQ ID NO: 434153 - DNA, 572 bp, Homo sapiens
tagacttttgctgcagctttcagacctgaacccccaggctctgtggggtggggagttgaaaacatgttcctctgctccaaggagcttttcctttatcaaacaagggaaccagcaatacaataaaagcgactgctttaaacaagggtgtatcagcttaaagaaactatctagatttctggcaagtctattttgctttactgactaatgttttcatgaagagtcttgatagactaacaaaggatgaagaagcctctttgatagagaaacccaatgaggtcattgagcaggacgtgtgctcaggtttataagctatgttccaggaacagccaggagtctgtggaagygtctaaggttcccattaaagtgttttccaagtagagttgagttttatgcaaaatggctgatttgctaaaatcatgacttagtccaggttttcagaaacatacgaagggtataaacccacgtagatctctttgtagcttaagaactgaaacatcactagtagagtggaggtctccatgtaccttccctcattatctccctccctctcccctcccaggggtaactgctac

SEQ ID NO: 434154 - DNA, 413 bp, Homo sapiens
gcccttagggtggcgttccatgacgggagcggcaatggaggcccagcacgcagcaggtgccatcacatttccgccagttaggacaaacacacgagggaccttccagttcctcccccttggctctgctctcccaactagaagacacagaggcctccagaaggcagaggagtgtggggaacaagtaaccgctcccacacttctcctaaatgcacatgtatttaaaaaaaattaaaacattcaaaggcaccctgccaatggtccctggtgggtcccagctcttaraactcatctaccggatgtcatgctggtctgggggccacttgctccctcagtatcagcgatagaactgctgacctcagccacatcagctacagcacccaatctctcctgtgttacatgagctacccccaagc

SEQ ID NO: 434155 - DNA, 557 bp, Homo sapiens
gatcaattttttttcttttcacagaattcgtgaaactgaaaaaaaaaatgtgtctgttacagcacatctgttctcctttacgccttatttaagaaaataattcttgccagatttttacccacccataatcattacaccatttttacagatgtggtttttaacagcttcattttggccccaaatcttttatacaatttgcaatgaatttgcttcttggcttgcacttcattatgatttggcaataaacagagggaggtaaacgaatctgttcccaggactacacctttcaygaatgttctgctaacccaaacgaggagagcaaaaacgatcactgtcatcattaccgttattattgttattattatcagcagcagcagaacaagacttataagttttgcacttgagtatttcatttggcagtcacccttggattgtttttctttattcttaattatctactccctttctgagcccagcccggagaagggctgttcttgcaagtccctggatgcagacaaggagacaggtctctcctcctagacagcattcagcaaccc

SEQ ID NO: 434156 - DNA, 505 bp, Homo sapiens
acttgtccacttggcaaatccacaattatttttccagtttccaattgccatctttatggtgaagccttccctcctgataacttcaactgaaaaaaatctatattctgcttccacaactagggtaaccaactatccttttttctccaagacaagaatctataactggacaactagtaataacactctatgtttccttttcttggagctgtgaccagttaacarctccttcatgaactgtctatgtgcagctctgagtcattcataaatattaaatcactggattctcctaacaacacttccagaaagtttctatgattacctccatgttacaggtaagaaaactgagacagagaggtttgagtaacttgtccaaagttacgcaaccaccttgggcaagttaatagacttgagattagaagcaggcagggtcctttccatggcctttctcatgtccatccttcccatggcctgctggggtctgcttgcagctgaatctaccaggttc

SEQ ID NO: 434157 - DNA, 520 bp, Homo sapiens
ctggcctgaatctgagctcattaggcgcttgggtcccagccaccctcatacccactctacatgagtagcaagaccctcaagctgtgagatttttgctgctttactgagtttctaccttgarggcaggtttgggagccttaactttaagaaggatctatattgcagtcggtaggtgtctgatatcactggacgggcctctgctctgttcttccaacatgaataaatggctcatcatggagcccattccattcccggtgtaaaccaagagcagacgtctggtgcccttgctcaagcgaagcactggcaaccaccactttaccttatttagattctgggaagtaaggagatcagagtcagaatgcaaagcccacagcacactgcctttcccacccacccccggcggttccagcatgcatgggaaacccctgagcacattcctaacagccggtcccttccacgttgccccacagccagtgcctcttgtcctctggttccagttactcatggtactcctccaacc

SEQ ID NO: 434158 - DNA, 511 bp, Homo sapiens
cattattctgattttatttctattcaattaaaagtactttctaattttccctttgaattatttcattaacctttgaattatttagaaatatgttatttaatttccaaatatttgaggatattttcaggtaactttctgttaatggtttttacttaaattctattgtgatcaatgaacatattttgcatatgtttaaaaatacatttaattttcaacatacattatgtttaaaattttaaaactacattaaattttatttccagccccatttatcgtatctcttagtgaatgctgcatggcacttaaagaaatatatattttgctctttgagggtgaagtgttcttaaaatgtcagctactaggtcaagwtactcattgtgttgtttgaatcttttaaattcttgcttgtttctttggcttgctaattctatcaattactgtgagatgactattgaaatttcccaccataattgtggctttgtccatttttcattttcttctgtcaggtttt

SEQ ID NO: 434159 - DNA, 615 bp, Homo sapiens
tatttagcgaaacgataatgggccaattgttgtttatatagaaaacagtggaaccttrcacctacctcatacctactcaacaatcaattacaggtggctgaaagacttaataatagtcccctagtcctcctgttttctaaaagtattttaatttgctttctcacatttatgaccaaaggatagagagggattttaaaaagtgcataaaatacatattccataaaataaatgactgataattctataatttcattagaaagtttttggtcttcaaaatacacaggaagaatgtaaaatttcaaggcatgtactaagaaaagacgttcataccacatataactaagaaaggatttatatgtagaatacaaaaggattcatacaaatcaataagaaaaatgtgcaaaaaatttaaagaggtattttcctaaaaaggaaacacaaatgacaattaaacatataaaataatgctcaacctcagtagagattaggaaaatgcaaatgcatagagtgtagtgatgtattttttttttttatccactagttgggcaaaaatttggaagtcttataatacctaatgttggtgaggctatgaatcaacagagactttattgttgg

SEQ ID NO: 434160 - DNA, 541 bp, Homo sapiens
cacttatttttctttcttttagctaaaactttcaccttttcacattaaggaagcacttttcagctcctctttggcacatctgaattgccagcatcattacttttgtgcttttggggctgttattaagtaaaataagggtgacttgaacataagcattgtcataccataacagtgatctcattcccaagcctgcttctctgtgactaacaggtgggtggcgtgtgcagtgtggatatgctggacaaaggtgtaattcacatcccagaaggragggttcaagatttcatcatgtcactcagaatagcatgcaatttaaaacttatgaactctttatttcttggattttctatttgatatgatttggctgtgtccccacccaaatctcatcttgacttgtagttcccataatccccaagtgttgtgggagcggcccggtgggaggtaattgaatcatgggggcagttaccctctggctgctgttcttgtgatagtgagtgagttttcatgagatctgatggttttataaggggcttttccccat

SEQ ID NO: 434161 - DNA, 560 bp, Homo sapiens
aacaggtaagataatattcccgaagagttgtcagtgttatcaccaacccagacaactcgcaccctaacccacagcctttaaggtgagcaacataaggagatgaatttcttgtatttctcaatttattcaagcgtcaacttcagtaaaagattgtgacataccaaaaggacttccctgaaacctttaaatactgtggttttaagggttctacagactgatggagtccatgaaatggctgaaaatcatcaaggctgactttgaatccccctggagaccagtagccttagaattttgcttcttcttctctgctctcgggggaccccaaagaccccaggcctgggccttctgagaacaggaaggtgatgtctgcacagcaccaagtcaataagtgtgttgatagtttattggtgaatgttggctgtggagaatgaatccgaatcacttaggtcaaaagatgrctaattccaaacacttttgctctatgcctgtttttatggtggccactctttgctctcaaacagggctcagaagaagagtgccaacaagtttctccacagagg

SEQ ID NO: 434162 - DNA, 520 bp, Homo sapiens
aggagctggcgtgattggaactgggcctgtcagaaaagcctctcctgagccttcagccagctccctgtggccrcacttccctagagcctgtcaggctcggaacagtggagccatgcacagccagctgcccgggagctccctgccgcctgctcccgccctgagtccccagctcctcctgctttcccctccccacactttggctgtgagagccactccacagttttgcctgtttgggacagaggcagtggctgcagagggagcaggagggaagtgaccttacatcaatttcaggccaaggggaggggaagaggaagtggtcatttaaaaacctatctagactgtttcacagtgttcttaaggacccaaccctgagccaccccagtgcatttctgaatatcacctttcaagctcccctggagcttcacagtgtaaatttcagcctgaaaatcagaagagatttctggatcaggaaccccctagagtttttattttgttcctttctaaatggatttctcctttt

SEQ ID NO: 434163 - DNA, 514 bp, Homo sapiens
gtacatctgctggcccaactctccctcttccaagccattagttggtcccacacctctttatggaatgcccactgcttgctaggttctgtgctatgtgctggcttcccatcggtgaacagaacagacgtggtccctgccattagggccgtcctgctggtaaaacagcttcatcatgtcacttcttggctccgggtcaccagtgtctccccaccacaggctccagtcttgcacgtggacctgtgtttcccacatgcagggccagacacccctgtctgtcaacacgtgtcagctcaattcagattaaagaataacattctgtcttatggggaaaccaggggcccctctacaaatgatctgaacttcccagctccaggagataaaggcagctccagtccatggaggraagaaaaggcattatggtcttttacagcaagacacagaaatggggaagttgtctgggaacaaagaaggtgacactgaacactttaaacatccactaaggaccgaccagctt

SEQ ID NO: 434164 - DNA, 439 bp, Homo sapiens
agcacctgcagaggccaacagaggttggcattaactccttccctgctggagataggaatctctgagtgggtgaaggaggcagctgaagctggtaggaatggctctgggacagagggtggcacttggggccctggaatggttctgttacaagcttgctgggtgtccttgggcaaacaattgaccttttwtgagcctttgaaatcctctttctcctttcttcccaaggaagccatggaaataaataaggagctgttgaagttgccagctccctggagtaactgtgtaaacctccggtcttctattctcatggccaatagtgcttccactggtcaaaactcaagcctcaagataaagcatgtaaatagcttaagaagagcagtgctggtgcctgggggagaggagccagtcaggaccttcagcttcccagggaaacttggat

SEQ ID NO: 434165 - DNA, 439 bp, Homo sapiens
agcacctgcagaggccaacagaggttggcattaactccttccctgctggagataggaatctctgagtgggtgaaggaggcagctgaagctggtaggaatggctctgggacagagggtggcacttggggccctggaatggttctgttacaagcttgctgggtgtccttgggcaaacaattgaccttttttgagcctttgaaatcctctttctcctttcttcccaaggaagccatggaaataaataaggagctgttgargttgccagctccctggagtaactgtgtaaacctccggtcttctattctcatggccaatagtgcttccactggtcaaaactcaagcctcaagataaagcatgtaaatagcttaagaagagcagtgctggtgcctgggggagaggagccagtcaggaccttcagcttcccagggaaacttggat

SEQ ID NO: 434166 - DNA, 459 bp, Homo sapiens
atcttccttcatgtatggagtgggtgcagagcaggcctcaatgattcaggccgmccacacccagctgaggggccgccactggaggtcttagccctgtggcccactcactgccccagccaagtgcgcctctgcagcctttctcctcccctccttgcctacagaaaaggtcaccccttctcagtgcacatctgccctggggccaggcttcctattctccctgcagagcaggcacagctgtcccagagctgaggttctgtctgactcagatgcttactggtcagggaggacccttcctagacacagagccagagagagtgctcctggccctggagatccccaggcagcaccctttgcgctaggctgaataatggtccccacaggtgcccgtgccctaatgcaaatgtgaatctgttaccttatatggcaaagggattttgcagatgtgattacattaagaca

SEQ ID NO: 434167 - DNA, 551 bp, Homo sapiens
agactttggcacggggtggtatgtatgattaaaaagaagaaaactggctgagaacggtggctcatgcctctaatcccaacactttgggaggctgaggcaggcggatcacctgaggtcaggagttcgagacaagcctggccaacatggtgaaactccatctctattaaaaatacaaaacttagccagctgtggtggtgggcgcctgtaatcccagctrctcgggaggctgaggcaggagaatcatttgaacctgggaggtggaggttgcagtgagccgagatcacgccactgcactccagcctgggtgacagagtgagactctgtttcaaaaaaaaagaaagaaagaaaactggagctaaaagtgaacaaaagaaaaaaggaaagaaagataagagaaaggaaggaattcaaacctctcgggttaaactggatgtctgaagttgtttcgactgtggcttccaggaagctctgcctcatttctttgaaatatgactcaggtccttacccaggagcatgtctgaccttgttccgacagaactttaaaatattta

SEQ ID NO: 434168 - DNA, 559 bp, Homo sapiens
attttattctgaactctcaaccacaagcaactatgaagtctgttattaatgaccttatcatattgacatgtactaaccaagatagagaaagctatggtgttagcaaagttagcaaagtcttagacttggcactaattaactctgtaacctcagacaaatctcctaacctttctgattctctctctttcttttcttttctgtttttttttttttttttttgacagagtctcactctgtcccccaagctggagtgcagtggcgccatcttggctcactgcaacctccgcctcccgtgtttgagtgattcatctgccttagcctcccaagtagctgggactacaggcacccgccaccaggcccggctaattttttgtaatcttagtagagacagggtttcaccatgttagccaggatggtctcgatctcytgcctcatgatccacctgccttggcctcccagagtgctgggattacaggcatgagccaccgtgctcagccattctttctgttttttaagagatggggtctcactgttttggccaggctagtctcgaacttct

SEQ ID NO: 434169 - DNA, 459 bp, Homo sapiens
atttccagcctgggacctccaatcagccatttttccagggactgttggttgtttttttttttttttttttttttttaagtaataatcatggaatcttacttccttttagacrccacatactggacactgctttggaagtatcattgctactgggttattcactgtttcaggctttctgtttcatggaacagaaatgcatgcatatatacactcttataaatataaatgtatatatatattttaggataaaattctttattctttaaagcttaaagtcttagtacactttggatttgacaaaatgtgtctactgtagctgaaaagataaactgcgatgattttaagcattaagtaatactcttaggcatggcaaccacaagcataactttttgggattagggtattgggggtgggggatctacctgtattgattaaaatttcattttcttattgaaggtt

SEQ ID NO: 434170 - DNA, 607 bp, Homo sapiens
ctactttacagatgaagaaacaggataagcaactggcttaactaggaagttgctrtgcagggattcagataaagtgctctctttacactagagtgtctgtctcagagaaatatgcatggggattttcattgtaccattattcataatcaataaaaaatgaataaaatgtaaatgttcatcaatttgagaaatggttacaaatggtaaattcagattatagactattatgcagtaattcaaaagaatgagcccaaaagaattgaaaacatacagccacacaaaaacatgtaggatgttcatagtagcattattcatgataatcaaaaagtaggaacaacccaatgtccatcaactgatgaatgaacaacaaaatgtggcatatacatacaatggatatctatgaggtatcaaaagaaatggagtactattcagtgctagcatatggatgaaccttgaaaacattatgcttagtaaaagaagtcagacataaaagtccacatattgcatgattccatttatatgaaatgtccagagtaggcaaatctagacagacatgaagtagattagaggttgccatgggattgaaaagatggggggaattgggact

SEQ ID NO: 434171 - DNA, 601 bp, Homo sapiens
aaacttgaatagttctgcagctgtggtgttggttggcaacaaaagtgcacataatatatccttatgtatattctcctgaaaacatgtaacacaaaaacaagtattgttaccttgttgttaacgtcggtagacttgtcaacctggattccataccacggttcccattaatgctaacaattgtgcctctgtatcctctgctrtttcatccatttgtctagttacagtgcaagccaaaagaggaacacatgccaccttttgaactgcagcctctccgtaaaggtcatgacaaacgtccttagcagcagacacgatcaactcttcaccaatagtaaagggcttcttagctttatcagtgtggttagccactaagaatgatgctctcagtgcagacacattgatgaagtggtggctttcaataactgcttctgttcttcatgttcatgtttttttttttctttcgaaaaagacttgtcttttaatgtagggtgcttggtctccaggtgatgaagtagttttgaaggtttcatggctttcttggatagctggtcgccacatatacaaagctggcttggagaatatgaatcacctgttgcaatgaacc

SEQ ID NO: 434172 - DNA, 595 bp, Homo sapiens
tccaactgaaaaaattgtatatctataagcaatttgagattcagcatgtctggcaatgcacatttttttaaggatgagaaaatgcagcatgaaatgtgtttatgtatgctgtgctggggaatttctgaacctttcactgtcatcttgaagcctttaagagggaagctcttgaggatgttggattataaaagtcattctctcatttctgggacttaargacacgtctctgagcataacaaatgtgcgatcacaaatgaaggtgccttgagcttaatggaagaaaggtttatcttcaacactgacatttctacttctctaataaaatcatattgtgcctctttttttattaaaaggtttcttcgcccttcccctttcctagggctgatgggattcatcccctaaagctggtgtggttggcagtaacagggctgagtagatttagctggtatgatcaggagattggttacaggggaattgagcaaataagtaaacatattgaaaatgatgggagccaggccgctcactgttggagagatctatatttgagttacaaatatagaatgaaagaaggctagaataaatgctgtggtgttgg

SEQ ID NO: 434173 - DNA, 561 bp, Homo sapiens
tctgggctttctctttttatctttttaaaaggaatctgttgttttacataatgagtcagatatatcagtttattctttttagggttggtactcttggtatcttgtttaagaaatattttccttttggctttctacttaggaaaattttctctacattgagtttataaggatcttatacttcccttgtaaatgataaacctctgccttttacagttatgtcttgaatctacctgaaatttatttttaattatgatatcatatgagagaggcagctgatttgatttttccccatatgaataaccagttccttgtttacgtttagtgcgtaatccatttctccccctaatgatttgtaatgatatcttacatgttagccatgtctattatttgctgctttggttttttcagtaatgttaatatctgttgagtctttcagcyttgctccttaaggaactgctttggctgctttttggcatgtctcttctatataaatttttaaatcaatggatccagttccagacacaaaaatcttgttggaatttttattagaattggactgaa

SEQ ID NO: 434174 - DNA, 645 bp, Homo sapiens
agctatggaacagaaaaagcgtaagtaattgcaagcgacctgagtgtttttcaagtgaataattttttaaagcctgttagctrtcagtgagggtccctgacagattaaaatagcatctgaaagctttattggtaagagaatgggcataccgtgcacaaattacaatcaagtcttttgcaattttctgggttcagaggatttgtactctggcaaggcagattctaaattatggactttctttttaacacaaaagattgacctgaaacaaattgaaaaagtaaataactttttggccttagaaagatattaagtaaaaattcttctgaacttaaagcttctgacaggtttaactactcagtgttaagctaatgcttcattagctctctttgtgcagctgaccctctatagctaactctcattctgaattgtgacagtagcacattccatcccatatgttttactttgataatattgtatcaggcagtttgaaaggattaaaataagtcactgtctttcgttcataaaagtatagatgtttacagaaagtgacagaaggtagacatagtcatgtttctaaggattttatttgctagaggcatgaatttgccttccaattctgtttatttttttcctttgataaaatta

SEQ ID NO: 434175 - DNA, 645 bp, Homo sapiens
agctatggaacagaaaaagcgtaagtaattgcaagcgacctgagtgtttttcaagtgaataattttttaaagcctgttagctgtcagtgagggtccctgacagattaaaatagcatctgaaagctttattggtaagagaatgggcataccgtgcacaaattacaatcaagtcttttgcaattttctgggttcagaggatttgtactctggcaaggcagattctaaattatggactttctttttaacacaaaagattgacctgaaacaaattgaaaaagtaaataactttttggccttagaaagatattaagtaaaaattcttctgaacttaaagcttctgacaggtttaactactcagtgttaagctaatgcttcattagctctctttgtgcagctgaccctctatagctaactctcattctgaattgtgacagtagcacattccatcccatatgttttactttgataatattgtatcaggcagtttgaaaggattaaaataagtcactgtctttcgttcataaaagtatagatrtttacagaaagtgacagaaggtagacatagtcatgtttctaaggattttatttgctagaggcatgaatttgccttccaattctgtttatttttttcctttgataaaatta

SEQ ID NO: 434176 - DNA, 556 bp, Homo sapiens
gagttgtttcatccccagaattaattattagcatggacatttagcctggtgggttgtcatatgtatgtaccacaatcctaatagcctatacktactagtagtggcttctgtgtggataattgagtaattgcatgtacttaccaagtttagacaaatgtttgtgtgcgcagctgtaactccacctttttcctttctcactgatgcatgcagcctttcaacctatgccaaaatattatgtttaaacttcgtagtatttacactgaaaagaaaaaacaaagagcaagagggtcaaagagtggctgcattggaattcaagggagaagagcagcaattggatggtagagacattgttctctccctgcctctttgcctgccttccattgagaaataggggaaataccatgttggatggttgtgatttattttgtaaatgcgtatcaaaggcagaaaaataaattgggcaaaagtaaaagtaaggaggagaaagaaatcacttattataattggtgggggcgggggagaaggggaaagcacagaagtatatggatggaaagag

SEQ ID NO: 434177 - DNA, 556 bp, Homo sapiens
gagttgtttcatccccagaattaattattagcatggacatttagcctggtgggttgtcatatgtatgtaccacaatcctaatagcctatacttactagtagtggcttctgtgtggataattgagtaaytgcatgtacttaccaagtttagacaaatgtttgtgtgcgcagctgtaactccacctttttcctttctcactgatgcatgcagcctttcaacctatgccaaaatattatgtttaaacttcgtagtatttacactgaaaagaaaaaacaaagagcaagagggtcaaagagtggctgcattggaattcaagggagaagagcagcaattggatggtagagacattgttctctccctgcctctttgcctgccttccattgagaaataggggaaataccatgttggatggttgtgatttattttgtaaatgcgtatcaaaggcagaaaaataaattgggcaaaagtaaaagtaaggaggagaaagaaatcacttattataattggtgggggcgggggagaaggggaaagcacagaagtatatggatggaaagag

SEQ ID NO: 434178 - DNA, 616 bp, Homo sapiens
ctctgctcctaaactcatcattaggaaggacttggaaatttttatttattgccctatatcacttttsctaattataaagtcagaagtagtgaaagatgaataaaatagtgttaccatttgatcatgtgatattgtgactcagtaaaaatgatcatgttactgtaacactgttatgctgattatctgcaacaaggaattaaattcatccttacctataataggtgaaatgggtctttttctgaatatactatttctggtattctcttaagtaacgtacagctcacaaaatgacttttttttccttttaaaaagtaatctaaaaataaaatggcaaaaaaaaattcaggaacaatgtagcttagttctatttttggagcataaaaatggaactgcctcctcttcttccaacattctgccaggtgtctgtagaaacaaatgcaaattaccaacctttgtctctcagtcaaaacacagctccttttcctctgagcaagctcatgttgacctcttggaatccactcactttccttcttgtcagattccatcttcctcattttgcttttgtttgcacctagattctttgcatagctgaatgtttagaaagactcaaaacagc

SEQ ID NO: 434179 - DNA, 592 bp, Homo sapiens
cgacacacaccttggagtgattacaaaagacacagtgaagaaccccaaaacttgaggcaaaaatttcctaaggtgtgacctgggtgtgctatgagtagcycagcaatatttttgatggctcgcaccaaagaccacttaatggttgcaaactgcaaatatgaattgcatttgaattttgtctaatcaattcaatatatcaatcagccatattgttaaaaaaagaaatttggttgaacaattttgtcaattccgtcaaaatgatcaaaccagttataaatataaccatgatcaggggcttgtttcttcaggctcttgtgcagtttctgttggggaaagccaattcaagaagcatttatcaagtgcctactatgtgtcaaggcacacagtagcactacttgtagtagaagtgtgtatataacacattatctttcctcaaggaactttcaattaatatttaacagagttattacaaaatagttgtgaagaatacatttcaagataagtcccagacaagtaggaatgttggaggaatttggaagcaggtgagaacaggttttgtgaagtggtcagaaacaccttatcaaaagagcaa

SEQ ID NO: 434180 - DNA, 593 bp, Homo sapiens
gtgtcatgggaaacatgaaataaacacagtgtaatggtttatagtcttgtcttgaacacactargaatatttcttttctaaaaagacacaaattatatgctacggtagtattttggttttactggattctagtttaattagttcatatcaaaagttagcacttgttttaaaacgtgtatacattctgaaagaagatacttcccccaaaacatttaaaaataccttgaatatattcttaaacaaatatgttagcctagcaaacaatgaaatgaaaaccaaatatgaaaataatgtatcttcttcctttaccccttcaatgaatgatctgtaactctgataaaaagattagtttagagattattgaattattttaatactaggaccagactgaaagtaacattgtgcatttagaaatgcaacatataaatgagtagaattggagccccacatgattgggaaataagctggagaaactgaagtatgcttaaaacacagagtaattagcgagcaagctcaggaaaaaaaaaatctcagaatacttagaagtagtgtttgaggaactagaatcatcacagtttaaattatttgttttg

SEQ ID NO: 434181 - DNA, 593 bp, Homo sapiens
gtgtcatgggaaacatgaaataaacacagtgtaatggtttatagtcttgtcttgaacacactaagaatatttcttttctaaaaagacacaaattatatgctacggtagtattttggttttactggattctagtttaattagttcatatcaaaagttagcacttgttttaaaacgtgtatacattctgaaagaagatacttcccccaaaacatttaaaaataccttgaatatattcttaaacaaatatgttagcctagcaaacaatgaaatgaaaaccaaatatgaaaataatgtatcttcttcctttaccccttcaatgaatgatctgtaactctgataaaaagattagtttagagattattgaattattttaatactaggaccagactgaaagtaacattgtrcatttagaaatgcaacatataaatgagtagaattggagccccacatgattgggaaataagctggagaaactgaagtatgcttaaaacacagagtaattagcgagcaagctcaggaaaaaaaaaatctcagaatacttagaagtagtgtttgaggaactagaatcatcacagtttaaattatttgttttg

SEQ ID NO: 434182 - DNA, 581 bp, Homo sapiens
ttcttctttcattgtcttctgacctcagatgctttttaaaaaatctcatacaatgttattttttagtattaacctttaatttttattggaatacaagtttatttatatttaaatttcttcttaattctactttttaatttccttcttttatttttgcctttatattctttaaaaaataaaaagatccctctgtgttttattttctatttttctttgaatgttctttttcaatagtcagtctgaggtatggccataaagatggtagcattgaaaaagagtctcccgcatttcagtcctgcatgtagtgcaagtgtcatgcaagccaggagcccacctgaagctttagaagctacgtagaagaaatccagagagaagagcrgggtggagaataggacacacacagagaggtgatttcaagtctagtctagtcctgtgtcattcacagtgacatttttattatttttctctaatccttttctgttatcttgcccacatctaactcagcagtaaatttttagcattttatccctattaggtcttttgaaaagacttgtcttaacaatgctttcctttccacagtt

SEQ ID NO: 434183 - DNA, 581 bp, Homo sapiens
aattttggaattttctactatagcagcttggtgccacaggtaccatttgtttcttttatagaaaatttattttyggaaaaacagttcatccatctacctttcagcatgtcaaggttaactcaacagccaagtgccagccgtgggagatactgggaagaaacttggactaagttgggggtcggggagaatttggaacaaacagcaagaaggtaattaagagttgggagaggtggggattaggaaaaatgtatgcaatatataggaatattttgcttgagcaaaatatctcttattgaatcaatgtgttggggcacacatcacgcaggggaaatgtatcttagctgtgataagggaactgtggtgtagggtgcagagatacacggcagtctttgaaaaaactggcccatctccatgttcacctaggtctacagtctggtagctctgaaccagtaagattatagaaatcttgatatcttctctttggttctcagggtgagaaattgtatatttttagattgttcccacaaaggggacagaatttctgttattctcctgggccgagtgcctttttgttcatctac

SEQ ID NO: 434184 - DNA, 619 bp, Homo sapiens
tttcttggtacctcagggttggcagccatcttcattagctctcttattactgaacctagttggtttagatgaactggtcactgttagtccaaaaagggtttccagttcttgtttttgttttttatttccccccatgcatgtatatagaagtataattttagtcttttacatacttttctgggaacccattcccaaatcactaaatattattatagtattatttctaatatttatttttactgtatttatattatttaacrttatattgttttttattctattacattgttttatgatgttttgcatcatattccattttgtcaatatagttttaaaatacttctttactttggaccttcagtttgtctcaacatttttattcataaattttatctaaatcttagtcaagttttttggttattgttagagtatgttgttcttgcaaatgggatttggtaaagctcttctcagaaagactgtaccgcctcataatttcagaaatatatgatgctgtctgttttaaaacagccatacaaacaaatccttggtaatttgataggagaaaatgtcaccatattttaaatttttgatgcctttttgtccttgccaattaaattga

SEQ ID NO: 434185 - DNA, 432 bp, Homo sapiens
ccagcacatagtaattgctttgcaagtaatacttatttctctcttcatatttgttttttaaagaatatatatatattcattatatatatatatacattatatatacacattatatatatacacattatatatacacattatatatatacacattatatatatatacacattttatatayacacacacacacacacacacacacacacacacatatttggttggaaatacagactttagataagagaaatgtataaatatgtaacccatctgtcttatgacaattccagtgatacatatataataataaattgacaatttaaatatttttttggtgggggagatggcatataattttcattgataagtagtttgccttgtttttaatgttcaccatttgttttcactaccaaaggaaatagacattacaaagg

SEQ ID NO: 434186 - DNA, 584 bp, Homo sapiens
ggagtttggctctttttgcccaagctagagtgcagtggtgccatcttggctcactgcaacccccgcctcccaggttcaaatgattctcctgccccagcctccctagtaactgggattacaggcatgcgccaccacacccggctagttttgtatttttagtagagatggggtttcaccatgttagccaggctggtcctgaatcccctgacgtcaggtgatccacccgcctcagcctcccaaagtgctgggattacaagcgtgaaccacagcgctagaccttactgtacttttctggatgactgtgaccaaagctttaagactgccatccctgaattatcaaaacggtaacacactcaactatgycaattcccaaataggtttcaaaagcagaggaaaattcacttagaatgataactctaatcctgcaaactaacaacaacaacagttaaagggcttgggttttaaaaaccacagtgcttcataatcagttctatgttttgacaaaatagtaagaattgcgagtgtggctccaagccagtcttttaataatgtgttccaatattcctagcattttctaataatag

SEQ ID NO: 434187 - DNA, 572 bp, Homo sapiens
cccctgcttaatcagcagaacaagactattgattaaaacacctctcacaatagattacacatggaatctcrtctccatactttgcacttggtaaagtgtaataatgagcataagataatcaaaagaagagtaaaagcaatttgttgggcattgtacaattcaagattagagttggaatggaaacaaatttgcatgaatagttgagcctgtttttaaagctgtacacagtaaagagtacgcacagtgcagggactactgtggaagagtaaaagatgttctgcttctttaagatttgcaaatctgttcatcttacataggggacattgttattattggtatttttggtggcggtggtggtaatttatatttcttgatgtttgttatccaggtattgtgcagagagttgcctgcactatcccatttaaccttaacaaacttctaaagaagatactacgttttacagatgataatgctaaggttgaaaggtttaatacattgcttatggactcacaattaagtaagcagctgacctggaacttacacaccaatttttttctgattctacagcttct

SEQ ID NO: 434188 - DNA, 616 bp, Homo sapiens
cagtgtaatgcttgtgaaattcattcatgcaggcatatgcagttggagttcactccttttccttgtggtataatattccattgatgactatgtcatacactatttatccagctttgaagaccttattattatctccctttcaaaaatgacaaaaccaaaacttggataggttaaaaaactagttttaaatcacagaactagagagtggctgaactaagactggtctaatatcatattattctaaaggctaaacagcaatrtaagatgtggtttgaatcacttaatctctagtcaacaataatttatttagtgcttgctcaataaatcacacaataattattgtgttccaagaacctttctagcttccaagagcataataagaaacaaagcatattctctgccctgttgagaaacattcagacatacaaaaagataacttaagttcccaataagtgctatgaggaagatactcataaacatgcatggaatactgactttttagagggtcccattctgttctgagtactttacctgtattacttcatgcagttctcaaaacgaacccatgtggtacatacagcagctgttcctgtgatccttattttacaaaagaagg

SEQ ID NO: 434189 - DNA, 588 bp, Homo sapiens
actatcttctcctcaaaagtgaggttataactgtcttgagtttagacaattgccagtaaaatctttattttcaaaattttaaatatataactttaaaatgtctgcacatctcttagacatcatgaaagattcagatctcaggctttagagttgctggcatttttaatttaaatattgaggccacacttctctggtaatttcttgcagatttgcawtctcctaattttctaaatagtttttagaagtcaaatctagtctggcaggtaaatccctgaactatatgaatgaggctcctgcagatgggactgagaattggggtgatcacaatagaaatatttggctgaagccataatacagaagctgcctagggctgaaatggctgcatactgcatctgattttgtgctcatcagacagactgtcaggcttgaggcttgagtcagcatcaaaaaatcactgtcttttgtcctcagtgctcagaatgcctgtccctcccaccccccaaccccggcctcatgcctcatgttctttgctttgtgtggaagaatggcgttagtaatatctatagttcatagtgtgattgtgaggac

SEQ ID NO: 434190 - DNA, 513 bp, Homo sapiens
ctttctaacaagctcttagytccctaaattgcagaacaaagccagcttcctgctaacccctttggaattcaattacagacatactcaaatgtgttccctgctccagcaccctcagcactaaatagcatataagcacttttgcagggcttaatgtatacttgttgaaaaatgtacattatttttcattgactttaaattggacaaatgctcattgaaaagaataaagtgaattggtgttggagagagcattaaaaagagagagagaaagagaagagccaataaaaacatgtggtttctaaatgtagatccactaatttctctttgtggcagtcatttggtctatattgtttgaatgcactaggagacattgtacatattaatgaaattaggtttgttaagcttgtttgctagagatgtaagccctagtaaaaaaacttcaactttgagatctgacagtctcaggtctgccacttactagctgtgtgatcttgaacaaggaattttgcctctttt

SEQ ID NO: 434191 - DNA, 630 bp, Homo sapiens
ttttttttttctgttataccaatgaatgaatgaatgcttgcttgctgcctactatgtgccaggaagaaagggggtgtcattgataaagccacaaaaaccctatagcaaggtggtctcatttagtggctttgcagaagcagcaatggctcctgaagacacagaccttgctatcacttagctgtgyggccctgagagaatcacctaagctctctgaattaaatgtatgtaatgcatcaagcccaatggttctctcacagtgaatgctgcctcaattctctcatctgcatttattccttcaacaaacatttgcatgcctagtagacctgcctctaggctaagtaataaggaccctgtaatgaattgagatgctaagaaaaactacttgcctcatctcctcacttcaggtagcttcttttgatgatcaaataataattttgcatgaaattgttttgtaaattggaaagtactttattaacatgagttgtttttaactctataaacttgccaatttattgatcctcatcttcaggcatttacttgcaaaattacaagtgaaatcactgtggggctggtcaaataaagctataaaagttttagtagcacttatttgcattcttattattaagttcc

SEQ ID NO: 434192 - DNA, 546 bp, Homo sapiens
gcctgtgcctctggaagaggcagtcctgctgcccttgctgaagtctctgtgtgggttttttaaggtaaatgctagttgatcttcctttttaaaataaattattaattagaaattttactttaataagagaagttattaaaagctgcaggaaccctattcttttaattcaatttccaagtggactccttaacaaggtaacaaagacactcaccagagccttcagtgtgtggagtggatgtggagtcacatgctgtgacgygagtcttttcccttcccccagcctcaggttcctgttggaaaaattttagtctctcctctatgcagttcccagaggttttttctttaaaaccatgttcacaagaccagtggcctgggggtgcccatggtgcatatctctgattgcaagctgctgaccttcacaggcaagaccttgaccttgggatctaggccccaacttatgctcttgtcctattccacactcaacacactcagtgccccacacttccttccattttcctaatgtgctatgctttttcacctcccgtg

SEQ ID NO: 434193 - DNA, 546 bp, Homo sapiens
gcctgtgcctctggaagaggcagtcctgctgcccttgctgaagtctctgtgtgggttttttaaggtaaatgctagttgatcttcctttttaaaataaattattaattagaaattttactttaataagagaagttattaaaagctgcaggaaccctattcttttaattcaatttccaagtggactccttaacaaggtaacaaagacactcaccagagccttcagtgtgtggagtggatgtggagtcacatgctgtgacgcgagtcttttcccttcccccagcctcaggttcctgttggaaaaattttagtctctcctctatgcagttcccagaggttttttctttaaaaccaygttcacaagaccagtggcctgggggtgcccatggtgcatatctctgattgcaagctgctgaccttcacaggcaagaccttgaccttgggatctaggccccaacttatgctcttgtcctattccacactcaacacactcagtgccccacacttccttccattttcctaatgtgctatgctttttcacctcccgtg

SEQ ID NO: 434194 - DNA, 522 bp, Homo sapiens
tcttcatttgtaagatgagaataattgtacctagctcatgttgtggctttaatgtcagtttttaaaaagaaaatatataaagtgctkcacaaagttctagtacatagcaggagctaaataaacaacagctgttgttaatagttaaaatgctgcatttcatcatgtggtttcggtcaagtttttgaactttctttctttctttttttttttttgagatggagtctctctctgtcacctagactggagtgcagtggcactattttgccttatagcaacctctacctcctgggttcaagcgattcttgtgcctcaacctcctgagtaactgggattacagacacgtgccaccatgcctggctaatttttgtgtttttgtttttttagtagagatggggtttcaccatgttggccaggctggtcttgaactcctgacctcaagtgatctgcccgcctcagcctcccaaagtgttgggattacaggcgttagccacggcgcctggccaagttatcgaactttctgtg

SEQ ID NO: 434195 - DNA, 522 bp, Homo sapiens
tcttcatttgtaagatgagaataattgtacctagctcatgttgtggctttaatgtcagtttttaaaaagaaaatatataaagtgctgcacaaagttctagtacatagcaggagctaaataaacaacagctgttgttmatagttaaaatgctgcatttcatcatgtggtttcggtcaagtttttgaactttctttctttctttttttttttttgagatggagtctctctctgtcacctagactggagtgcagtggcactattttgccttatagcaacctctacctcctgggttcaagcgattcttgtgcctcaacctcctgagtaactgggattacagacacgtgccaccatgcctggctaatttttgtgtttttgtttttttagtagagatggggtttcaccatgttggccaggctggtcttgaactcctgacctcaagtgatctgcccgcctcagcctcccaaagtgttgggattacaggcgttagccacggcgcctggccaagttatcgaactttctgtg

SEQ ID NO: 434196 - DNA, 522 bp, Homo sapiens
tcttcatttgtaagatgagaataattgtacctagctcatgttgtggctttaatgtcagtttttaaaaagaaaatatataaagtgctgcacaaagttctagtacatagcaggagctaaataaacaacagctgttgttaatagttaaaatgctgcatttcatcatgtggtttcggtcaagtttttgaactttctttctttctttttttttttttgagatgragtctctctctgtcacctagactggagtgcagtggcactattttgccttatagcaacctctacctcctgggttcaagcgattcttgtgcctcaacctcctgagtaactgggattacagacacgtgccaccatgcctggctaatttttgtgtttttgtttttttagtagagatggggtttcaccatgttggccaggctggtcttgaactcctgacctcaagtgatctgcccgcctcagcctcccaaagtgttgggattacaggcgttagccacggcgcctggccaagttatcgaactttctgtg

SEQ ID NO: 434197 - DNA, 592 bp, Homo sapiens
taaaaatatgttgatttgggctacgaattgattttttttattgtgataaattaaaatcccgtatcatccaacaagacactaaccacacagagacccaatttttccccttaaaggttctatctatttgacattaaaatagatctggggcagccatgggccagtggaagccctgaacattgaatataatacacaaagagtatgggggtggtctagagagaagagattgtagagaaaagaaatgcaaaattaaaaaataggaaaaagaagaggacactccctgcttcctgtttgtgagcatcagaaaatgactcaaatctgtccakagcaatgttcaagtctaggcttttgcaaatactttatagggagatctcatggctcgcttctctttgggtttcagatctcttcattcgcaaatgtgtgggttagttcatgcctaagggaccttccatccctgatatcctatgactagataattctgaatcgtggatattttactgtctatatggcaaaactagcatctttggtatatagcatcttgggctccaatatcagggccagacaattagcatttcattgtaagctgacgtagtca

SEQ ID NO: 434198 - DNA, 592 bp, Homo sapiens
taaaaatatgttgatttgggctacgaattgattttttttattgtgataaattaaaatcccgtatcatccaacaagacactaaccacacagagacccaatttttccccttaaaggttctatctatttgacattaaaatagatctggggcagccatgggccagtggaagccctgaacattgaatataatacacaaagagtatgggggtggtctagagagaagagattgtagagaaaagaaatgcaaaattaaaaaataggaaaaagaagaggacactccctgcttcctgtttgtgagcatcagaaaatgactcaaatctgtccatagcaatgttcaagtctaggmttttgcaaatactttatagggagatctcatggctcgcttctctttgggtttcagatctcttcattcgcaaatgtgtgggttagttcatgcctaagggaccttccatccctgatatcctatgactagataattctgaatcgtggatattttactgtctatatggcaaaactagcatctttggtatatagcatcttgggctccaatatcagggccagacaattagcatttcattgtaagctgacgtagtca

SEQ ID NO: 434199 - DNA, 574 bp, Homo sapiens
caggatagtgtgacacttttatcaccattacactataagaaacacagtgcagccatactgtggccaagtcagcaaagagacctgctttgatggatgatcagagttgatcaagtttgtcagttgctttatgtgtttttatgcttgttgtatattcctgcccagagagtagaggcttttaagggtacatctgtcaatggataaaatttcacaatgccatgtgattgctttacttacccctgtcttctcatcaaagattttgattcctccaaaggagatggttaaaaagattttctgtttgtgttctcctttggaacgagcgccagcaacaacgccctgttgaaaggaagaacatrgtttttacttaagtgttttcatttgaaaattctctctggtcccaaaggcatgtccgataccatcaaccaatgccaccaatcatgcacactgctttcccttcgcacttccatatttctctactcaatgcggctcacatctccttggtgttttagggtaatgcttgtcctagtgtttctaacacattgtatagagaaatatttgaatgttcactcacttaact

SEQ ID NO: 434200 - DNA, 558 bp, Homo sapiens
atagggctacacctttggtcagggagagaagtttcagtgtctccatttccaaaacagtcctaacagctcctagctaacagatttcctggaatatcaaatagcaattaattcctagcayatagtagtgctgattagatactaaggccccctttgcttgctggtgtcaagtagctaccaaagaattccctggtagaatatggctgtaggtaaagaaggatggaaaaagccaatatacatgttccaggagcatttccacttggggctgctgatggtgactttacatgacaaatgaaaaagagaaggacaatccataaggtgctatctttggggaaagaaaagtcccatcttatcaagcatgtttttcttgtgagacaggactctgggtcaagctctgaaaaactgcactcagtctagagtgggcctgccacaagacagtgccttcaggacactgacgggctcatctccccacaagattattcatggccactgtgcagaactaacagaggcccaggagacagctctggttagggagtcaaaagaagtggatataggtcctgt

SEQ ID NO: 434201 - DNA, 558 bp, Homo sapiens
atagggctacacctttggtcagggagagaagtttcagtgtctccatttccaaaacagtcctaacagctcctagctaacagatttcctggaatatcaaatagcaattaattcctagcacatagtagtgctgattagatactaaggccccctttgcttgctggtgtcaagtagctaccaaagaattccctggtagaatatggctgtaggtaaagaaggatggaaaaagccaayatacatgttccaggagcatttccacttggggctgctgatggtgactttacatgacaaatgaaaaagagaaggacaatccataaggtgctatctttggggaaagaaaagtcccatcttatcaagcatgtttttcttgtgagacaggactctgggtcaagctctgaaaaactgcactcagtctagagtgggcctgccacaagacagtgccttcaggacactgacgggctcatctccccacaagattattcatggccactgtgcagaactaacagaggcccaggagacagctctggttagggagtcaaaagaagtggatataggtcctgt

SEQ ID NO: 434202 - DNA, 508 bp, Homo sapiens
gggacaaaacaatttgataattttktgcttttatttttgcaggagttgcaaaatgaaaataaaatggaataaaatgtgatacactcaaaaattgtaaacctgggcctaccaaaatatttccacatagtaggtgctcaacaaacatttgctgaatgattgaaatatcttccgaatgaaaaaatatggtgattcaacagtaagccaagtaatttaccaataaatgaataaagttatttacaattatgatggtaatcacttcttttcctcattcacattaaacacaaagtattgaaaagaaaacgtttgcatagcaccttgagtttcatcatggaatcttgacataacttgtctccccgagctgcggaaacttcatcaatcccgatcaatttggctttgtaccggaccccttcacctttaaacctctttatcaaagtggcttcactgcgatcctgacctaaaaagagaaaaagcagattcaaatatgtagctgtgcagaccccagtggctt

SEQ ID NO: 434203 - DNA, 577 bp, Homo sapiens
cccacgtctagaacccttcagaattttctggagctgcctccttctgccctggcatttgcacccactgctgtctgtgccttacagtgtacttctctccccttctcccttggtgactccttatttcttgtgaattagcccgaacgttttctcytcccggcatcctgccccagtgaggctaacttgccctgattacgtgatcccccagcccaggctctgcatctccatctctctgagaacttgccatgccctattacagttgcccatgcacctggctgtctcctgcaggtcgtgtgtctctggagggtagggactgctactggtcacatgtgttttctatgccctgtgcctttctggcatgcaacccacagcaagctttcatgggttgtttactgaaaggacaatggatgaaacatccaggttacatagctctgtgcccagggttcttgctggccctctcagatccctctcagtcactaacctctgccaaacacccaagcttactttgcagccttcaaggtggtgctctgaaacagtatcccacaaatggggacatcgatggacaccacagatctttgac

SEQ ID NO: 434204 - DNA, 577 bp, Homo sapiens
cccacgtctagaacccttcagaattttctggagctgcctccttctgccctggcatttgcacccactgctgtctgtgccttacagtgtacttctctccccttctcccttggtgactccttatttcttgtgaattagcccgaacgttttctcctcccggcatcctgccccagtgaggctaacttgccctgattacgtgatcccccagcccaggctctgcatctccatctctctgagaacttgccatgccctattacagttgcccatgcacctggctgtctcctgcaggtcgtgtgtctctggagggtagggactgctactggtcacatgtgttttctatgccctgtgcctttctggcatgcaacccacagcaagctttcatgggttgtttactgaaaggacaatggatgaaacatccaggttacatagctctgtgcccagggttcttgctggccctctcagatccctctcagtcactwacctctgccaaacacccaagcttactttgcagccttcaaggtggtgctctgaaacagtatcccacaaatggggacatcgatggacaccacagatctttgac

SEQ ID NO: 434205 - DNA, 293 bp, Homo sapiens
ggggtaggtattatcatctacatactgtgattaggattttgggactcagggacccaggaagagtgagtcactaccccatgaggatcaaaagtctgtctccctactccataccagtcagtggtccagacaccatggtatatgataagyttttccaggtgtgctccaacgttttgttcaagatggaaaattaattttctaccctgaggcaccactgtttttggaggtgtctgtggcacagaactttgagtacagcccattgaaggatgagttgtagaacactgttaaactttcta

SEQ ID NO: 434206 - DNA, 308 bp, Homo sapiens
atttaatcaaggcctgtgccttattattagccatgtaacattccattgtttcaatggaaaatggaacctgtaaaacctgattcacatgaagatccattggcccactaataaataatgttttatagcacactctgctttttatatccctataatccttatctkccagagaagtgagaataaataagcacacctcacactgatcgattggggatggtgcttgtgtcaaagtggtggagagctggacacaacatgtgggtttttgtgagttggtttttcccatactaatcctggacttgagagctggggct

SEQ ID NO: 434207 - DNA, 608 bp, Homo sapiens
cccttgacaacttaatcctgtgagactctgggcaaattacctactatgctaaactttcatttcctcaactgaaaagtgctgccttacagggtaaatgagatgctacaggtaacttctgtaattatatttggcatatcttaattacactaaaaatgttaattctgttactgataatagtagctgtagttgttttaatattaataatggcattagaggacataacccacaaagctgctgatattcaggggcccaattgggcaactagtcatagtgttaatatatctcttttagcacaacagtgtataacatgctccatatccacatcatcactattcaatcagcacagataaaaagaataaagtcattgaaaaatatgccaccagaatgagcaaaagctacagtgtctatcagtgaaggaagatgagcgaagtgttctggccattttctcactgcatagtgtagacccttccaaaagtacctgtagactgaatttaacatttttcacttttctgattccattaatgttcaaagtagagttcttatctcttacagtttctgtgaagtatttatwaaaatatacatgaaaattgctgccagagggcctgtca

SEQ ID NO: 434208 - DNA, 613 bp, Homo sapiens
ctttgaggaactgccacgttgctttccgtgagggttgaactaatttgcactccaccagcagtacataagtgttaccttatctccacaaggttactagcatctgttactttgtgactttgtaacaatacccattttgagtggtgggaggtggtatcttaccatggttttgatttgcatttatctactgcttcatgattttgagctttttttatatgctccttggccacatgtatgtcttcttttgaaatgtgcctgttcatttcccttgcccaatttttaatgtttttttttgaaatttatttaacttccctatagaggctacatattagaccttcctcagatgcatagtttacatgtattttctcccattctataggttgtctgtttactcttctgatcatttcttttgttttgcagagaacctctttagttcaaataaattgcatttgtccatttttccttttgttgcaattgcttttggtgtctacatcatgaaatttttgccagttcctrtgtccagaatgatattgcctaggttatcttccagtgtttttatagttttgagatttacatttaagtctttatccactttgagttgagttttgtatatggt

SEQ ID NO: 434209 - DNA, 521 bp, Homo sapiens
ttttggtcttactgtcttatttcagggaaccagttttcaagttctgagatttttttcatcagcttggtttattctgctgttaatacttgtgattgcattgtgaaattgtggtattgtgttatccagctctttcagacctcatagattttttgttgttgttgttttttattggctactttgtctttcagcttctgcatccctttattatgattcttattttccttgatttgggatttgccatcctcctgaatcttgctgatattttgttctatccatattctgaattctatttctgtcattccagtcaattcagcctgattaaraactcttgttggagaactggtgcagttgtttgaaggacatatgacaatctggccatttgagttattggagttcttgagatggttttttatctcatctcttaatgtgggcactcttttattaataactgcattgtagattaagaacagtcaatagacttcttttctggatgttttcaaaaggctgagtctctatgaaga

SEQ ID NO: 434210 - DNA, 554 bp, Homo sapiens
ttcataattaaaactctcagaaaactagaaattgagggaaaaatccctcaacttgataaagaacacctgccaaaacaaacaaacaaatgaayagttaacttcaaacttgatagggagaaactagacgctctcttacctaagattaggaaaaattctgaaatgtcccttttttcacttcttttcaacattataatggacattctagctaatgcagtaagacaagaacaaataaaaggcattcagtttgagaagaaaaaatactttttgttctcagataataggtttatctatgtagaaaatctgaataaatcaacaaagaagttcctggaattagcaagcaattacaggaaggttgaagaatacaaggttaaaagcaaaagtcaattatttatttatatactagtgacgatttactagaatccaaaattaaaaatacagtgccattaacaaatgcaccgacaaattaagtacatagaaataaattatatgtacaagattattattaggcaaacaaaaaactctaaaaatttataaaactcagataaataaatatt

SEQ ID NO: 434211 - DNA, 541 bp, Homo sapiens
atttcttataatctactgttatggtactacatcttttcatgcctggttaaagatgaaacagtctgtgtgtcctgtctcttctcagaaggggcctgctgtactttcaagtttcatttaaccttgtttccataagaccccatctatctgaagggawcataaaagttattagtttcataattttgagtttttttccaatgttattagcattgtggcaacattctctttgatacaccctaaacagcagaaaataacactttgaatttacctgtaagatcctccaatgtttagccttctcctatttctccaacagcactttaggccacttctttcaacacactcccccaatgacatgctatgttttttgacacatagtttatcatagtttaattctttttcatcacagattgttgaattattctgatattactgacttcaatgctcttcacaaatcccttcacccagttaactctcatatacaattaagatttggattcaaatattgtattagtctggggtcttcagataaacagaacaaaaagga

SEQ ID NO: 434212 - DNA, 571 bp, Homo sapiens
cacatgcaaaagtataaaattagacccttatcttccaaaatacacaacatcaactaaagatctaaaactataaaatcctagaaaaaaaacaaagcttaagaaaaggctttatgacattggatttggcaatgatttcttaaaattttattttatttttttgagattgagtctcactctgtcaccaggctggagtgcagtggcatgatctcggctcactgcagcctccacctccccagttcaagcgattttctgcctcagcttcccgagtagctgggactacaggcgcgtgccaccacacccagctaatttttgtatttttagtagagatgggccttcaccatgttggccaggatggtcttgatctcctgacctcatgatccacccgccttggcctcgcaaagtgctgggatcacagcrtgagccaccgtgccctgccggcaatgatttttttattttgaccccaaaacaaatgcaacaaaagcaaatatagaaaaatgggtctcaaactaaacattttccgcacagcaaaataaataatgaacaacaaaaaggcaatctacaaaatagacta

SEQ ID NO: 434213 - DNA, 580 bp, Homo sapiens
agaagcaattggaacaaaagctaaaataaacaaatgggatctaattaaactaaagagcttctacagagcaaaagaaactatcaacaaagaaaacagacaacctgcagaaagggagaaaatatttgcaaactatgcatctgacaaagttctattacccaacatctataaggaacttaaatttacaagaaaaatcaatcaaccccattaaaaaatgggaacagtacctgaatagacactttttaaaagaagtcatacatgcygccaacaacatgtaaaaaagctcaacattactgattattagagaagtgaaaatcagaaccaaaattagataccatctcacacctgtcaaaatggctattattaagaagtcaaaaaattacagatgctggcaaggttgcggagaaaggggaacacttatgcactgttgatggaaatgtaaattagtttgagcattgtggaaagcaatgtagcaattccatgaactcctacaagcatcttccattcaacccagaaatccattactggataaatatccaaaggaatataaatccattctattataaagacacaagtgcatgta

SEQ ID NO: 434214 - DNA, 597 bp, Homo sapiens
tttattgaaacatttttcattatagccaagatttgcaagcaacctaagtgcctctcaacaaataaagagattgtttaaatgttttgtgwgtgtgtgtgtgtataatggaatactgttcaatctttagaaaaaataaaattctgcaatttgcaacaacatgaataaagctagaggacatttatactgaatgaaataagtcatgtacagataaacaaatattacatgctctcacttatatgtgcaagcaaaaatttgagcttacacaagtaaggggtaaaatggttactaccaaaaactagggcaggagtgcatggagaaaggaaaatgttggttaaaaggtacaaaatttcaattagataagagaaaaaagttatggtgatctaatgcataccaagtaaattacaaattaaataataatgaattttctatttataattgcaaaagggggattttaaatgttcttaacaaaaataaatgtgagaattgacagatatattaattaacctaatttgttcaatccacaatgtatacctgtatctatgcatcacattgtaccccataaatatatacaattattattctttatatatgaataaa

SEQ ID NO: 434215 - DNA, 573 bp, Homo sapiens
gtagcaaagatgtatgtttaagaatattaattattacagtgctaaaaaataaaatatagaacaaaaactgaatacaaaatgtgactagaatgtcaaatagatgtctacattcccatatttattgaaacatttttcattatagccaagatttgcaagcaacctaagtgcctctcaacaaataaagagattgtttaaatgttttgtgtgtgtgtgtgtgtataatggaatactgttcaatctttagaaaaaataaaattctgcaatttgcaacaacatgaataaagctagaggacatttatactgaatgaaataagtcatgtacagataaacaaatattacatgctctcacttatatgtgcaagcaaaaatttgagcttacacaagtaaggggtaaaatggttactaccaaaaactagggcaggagtgcatggagaaaggaaaatgttggttaaaaggtacaaaatttcaattagataagagaaaaaasttatggtgatctaatgcataccaagtaaattacaaattaaataataatgaattttctatttataattgcaaaagggggattttaaa

SEQ ID NO: 434216 - DNA, 588 bp, Homo sapiens
tattaattaacctaatttgttcaatccacaatgtatacctgtatctatgcatcacattgtaccccataaatatatacaattattattctttatatatgaataaaatgtaaaaacaactacaaagatttaaatgtagtcttataaaagataaaatagcaactatgtaaggtgattaatatgtcaattagcttaattggttgtggctttttttttataatatrtgcatacatcaaaacatcaaattttacaccttaaaaatataccattttaatttgtctattatacttcaataaagttgaaaaaagtggcattgtgaatcactacaaatatcataatgttcaaaattaagcagcattaattaagcagttagattattagtatcccatgtcagaagaaaagcagaataacattccatagctcctctactctttcaggaacatgttctaatttaagatggaaaaggctttaaatgggtagatagataatagagtgataataaattgatgatagacagatagatagaaagatagacaaaaagaaaaagaaaacgttaggcaaaagtagataaatttaaaacttctgccgaac

SEQ ID NO: 434217 - DNA, 588 bp, Homo sapiens
tattaattaacctaatttgttcaatccacaatgtatacctgtatctatgcatcacattgtaccccataaatatatacaattattattctttatatatgaataaaatgtaaaaacaactacaaagatttaaatgtagtcttataaaagataaaatagcaactatgtaaggtgattaatatgtcaattagcttaattggttgtggctttttttttataatatatgcatacatcaaaacatcaaattttacaccttaaaaatataccattttaatttgtctattatacttcaataaagttgaaaaaagtggcattgtgaatcactacaaatatcataatgttcaaaattaagcagcattaattaagcagttagattattagtatcccatgtcagaagaaaagcagaataacattccatagctcctctactctttcaggaacatgttctaatttaagatggaaaaggctttaaatgggtagatagakaatagagtgataataaattgatgatagacagatagatagaaagatagacaaaaagaaaaagaaaacgttaggcaaaagtagataaatttaaaacttctgccgaac

SEQ ID NO: 434218 - DNA, 532 bp, Homo sapiens
acaaaacaaccagaaaacaaatttaaaagtggaaataacaggtgcttacttatcaataataacattaaatgtaaatggactaaactctgaaatcagaagtcataggccaaataaatggataaaaaaaccaaaatgttgyctacaagaaaacacttcacctataaagacacacatagactaaagggatagaaaaaggtattacatgccaatgaaatctaaaaagtgtaggagtcactatacttatttcagataaaatacatttcaaaacaaaaactataagagaagacaaagacggtcactatgtaatgataatggggtcattcggtatgataatataacagttttaaatatatatgcacctaacactggagcacccagctgtataaagcgaatattatgcaaatcactcaatgtaatctatcatatcaacaaaatgaaaaataaaattcacatgatcatttcagttgatgctgaaaaagtatttgataaaattcaaaatcccttcatcataaaagccttcagagaaccggta

SEQ ID NO: 434219 - DNA, 541 bp, Homo sapiens
ccttttttgttttgtctccctcaagaatacctatgactcgtggacttagatgttttatgtaatatcataggtctcaaaggctttgttctttttttaataaaatttrttctttttaattaaacgtaaatggaaaaaatttaattaaaaaagatgtaaattcaaaaataagaagaggtagtttatacagatgagaaagaaaaagcaaaataactctggcagcattaataaaccagtgttatgacacacaaaaaaaggatcacactagctctctagaaatggaccctaagcaaaattaaatattttaataccacataaagaatttaagatattgatattcaagagaaatccaaaaacaaatacaaagtaatcagaaaatcaatgtgtaaatttaccaagtaaatgaatataaaacaaacaaataaacaaaaaaattagaacatctgaaaattaaaaaatatatactgaagccttaagaatatactagaaaaagcagaagaaagaaactcataacttgaagacaggtcttttaaattaatttatt

SEQ ID NO: 434220 - DNA, 583 bp, Homo sapiens
atactagcgtcaacacagtccaggaagacatggcctcatcattaaactaaataagccacaagagataatttgtggagaaatagagatatgtgacctttcagacagagaattctaaatagctgagttgaggaaaagcaaagaaattcaagataaaacagacaaaaaattcagaattatatcaaacaaatgtaacaaagagactggaatagttaaaaagaatcaagctgaaattctgcagctgaaaagtgcaattgacacactgaagaatgcaccagagtcttaatagtagacttgatcaagcagaagaaagaataagtgagcttgaggacatctatttaaaaatacacaatcaaaggagacaaaagaaaaaagaatataaaacaataaagcacacctacargagccagaaaatagcctcaaaggggaaaatctaagagttattggcctgaaataggagttagggaaagagatgagagtagaaagtgtattcaagatgataacaacagaacttccccaaacctagggaaagatgtttatatccaagtacaagaagattatagaacaccaagcatatttaacccag

SEQ ID NO: 434221 - DNA, 614 bp, Homo sapiens
tattggcctgaaataggagttagggaaagagatgagagtagaaagtgtattcaagatgataacaacagaacttccccaaacctagggaaagatgtttatatccaagtacaagaagattatagaacaccaagcatatttaacccagggaacattacctcaaaacatttaattattaaactcccaacagttaagaataaagacaaaattataaaagtagtaataaaaataatttaaaaacatataattgagcttcaatatgtctggcagaagacttttcagtgaaactcttacagatcaggatagagtggcatgacatatttaaaatgctaaagaaaataaaaaattaccwtagaatactatatctggcaaaaaatatttaaacatagaggggggatagattttttattcaaacaaaagcagaggaatttcatcaacaccaggcctctcctgtaagaataaattctaaagggagtattttaatgagcaagaacacaatgttaatgagcaataagtaatcacctgatggttaaacactcattggtaatagtaagcatacagaataacaaagaatattgtaacaatgttcctgtggtgtgtaaactactctttaccat

SEQ ID NO: 434222 - DNA, 614 bp, Homo sapiens
tattggcctgaaataggagttagggaaagagatgagagtagaaagtgtattcaagatgataacaacagaacttccccaaacctagggaaagatgtttatatccaagtacaagaagattatagaacaccaagcatatttaacccagggaacattacctcaaaacatttaattattaaactcccaacagttaagaataaagacaaaattataaaagtagtaataaaaataatttaaaaacatataattgagcttcaatatgtctggcagaagacttttcagtgaaactcttacagatcaggatagagtggcatgacatatttaaaatgctaaagaaaataaaaaattaccatagaatactatatctggcaaaaaatatttaaacatagaggggggatagattttttattcaaacaaaagcagaggaatttcatcaacaccaggcctctcctgtaagaataaattctaaagggagtattttaatgagcaagaacacaatgttaatgagcaataagtaatcacctgatggttaaamactcattggtaatagtaagcatacagaataacaaagaatattgtaacaatgttcctgtggtgtgtaaactactctttaccat

SEQ ID NO: 434223 - DNA, 591 bp, Homo sapiens
acaaaaattttaaaaatatatttgtaaaagaaaattataaaatatacattttttcatcagacataaaacattctccaaggtagaccatgtgttaggctacaaaataagctttcataaatttttaaaaactcaaaattatttcaattatttgcttaaatgataggggactaaacctaaaaatcaatatagtaaaaaactctcaaaattatacatatgtattggaattaaaacmactttttgaaaacaattttttgatcaatgaccaaatttatataaaaattaaaaaactttccgatatgaataaaaatagagttacaacatatcaaaacctctgagatccaacaaaataatttatagaaagtttacagagctaaatgcctacttgaaaaaaaacattgaaagatcacaaattaatgacatagcttgaattgtaaggaattagaaaaacaatgacaaaccaaacccaaatctaacagaaaataagaaataacaaatgtcagaacagaactcaataaaaatgagaccaaaaaaaaggatcaacaaaatgaaaagtttcttttttgaaatataagttaaataaattgattgcta

SEQ ID NO: 434224 - DNA, 422 bp, Homo sapiens
cagagccaataagcgccccttgggaaaactggcctgatactttgtctatgcagtccccgtacagcgttcctaacctattttgagtaaagaatgtcactttgtaacaggcccaggagcctcatattcttgggacctcaagaagagagtaatttacccaaatcaaaggtatttgagggcacaaatccattgctgggcttggctttagaaaatcttgtgtgggttttttttggtggaacagagtttcatcaaggccaattttaraagcctatgtgaaaataattattcttgctgcactttatgcaaataaccaggccaaggataaaactaaaatgtattttgcaaacaactcagtcctatcatgatttgtttttaagaaaagtgagaacttcagagagaaaaattatgtttcaaaaattattatg

SEQ ID NO: 434225 - DNA, 552 bp, Homo sapiens
ttccctgcacaagctctttatttttgcctgctgccatccatgtaagatgtgaattgctcctccttgccttccaccttgattgtgaggcctccccagccacatggaactgtaagtccaattaaacctatttttttgtgaattgcccagtctcaggtatgtctttatcaacagcacaaaaacagactaatacaccaaccatcaagaattttctgcttccacagaattaaaagaaaatatttactgacagaataaagataccttgtgaccaaagcctcctaagtataatactyccagttattaattttaaagataagtatattttttaaaaaatcaaaattttttcttagaacaatgcttatgttttgtataaataattgctataaatctataactaaaaccaagcttatagtaactcaatgcatagaagttaaaaataagtcggttttgtagctttgcctttggctttttttttgttggttttctacttaaatgatattaataataataataattgtaaggggtaatgaatgcttgtccatgttcagtcctatc

SEQ ID NO: 434226 - DNA, 616 bp, Homo sapiens
attcgtttcatcttcagggtctgtactcaatgaacagagtggaaatgcaattggaaaaactcttaatataaaatcctattaaggactacctgggtgtttccatctggggcttctttaccataccgacaggagagaaattccttcattgttgcatgttccccctttactcctgtgtatcatgtgtccaaaagcttgtggaaatggctttctacttattagaattaagcaactttggaatttaatttctttatgccactattaggaaaatcaaggtaataataatatctacaccacctactgcagcatgagcataagggtaagatgggwttatattcatgacagcaaacagttggaatgtttcctttatgccagtcactgttctgagtgttctacatgtattaacctatctgttctccaaaactcctattaagatggacactacatctcaatggggcaattgcaacatctgttttttctaatttgtcctatattttccaacaataattctccatgtttggccatttataacttaatgatagagctgtaatatggattgaggtagttttgatccgcaaaacactgacgtctcacagattttgacaaccgtttacagtga

SEQ ID NO: 434227 - DNA, 603 bp, Homo sapiens
cagctctactcttggatttgggcaagtgatayaagtaaactctttgtgactcagcttttaaatctgaaaattgggatactaatagtgcctacttatagactgttatgcatattaaatgagttagtgaatgtatagtattaaaactttttcctggcataaaataggaactataagagtataaactattatcttttttatctgcctagtggaaaaacatttccaagctcaaggttcaaggcaccccctccttggatgatgtaggagatgtactctgaccacttcttgttttttacttctctttttctgggtcctatataaaccttcttctttctgttgatgtatttaattcttatagccacaaatttagattttgataaattagataaatgttttctcctgcattattaagtgattaggattatgtgaagtttgtccccttttcttgttgtcgttgtagtggtcatgtgtgtgcctaagtgtctgtgggtgcctgcatgtgtgagttgaggtcctgaaatatggtattacagtctccctgataacttaggtgcagttgcaactttccagacatttattttctgactaatctttctttttggttaa

SEQ ID NO: 434228 - DNA, 563 bp, Homo sapiens
taaggtttacacatcagggaaagaacttataaacaacacttgtggtgatactggcaaggatactggagactgggtcagagttaagagttcagagctgagtaaagaacatgaggatgtgacagcacacacctgatggcctaactctctttatgtgtgcagatcatgcatggcaagtccactgctaaagcagaccaagcagcttaatactctgaggcaggacacattaattcctgaggcaagtcttgctatatgtaagcagaagactcatatcagtttggaaggcatgagaaattctcataaacaagaggcttcatcttctataataagatatttatgtactactgtctactcaaatatatagcagaataagagaccaaaattgaaattaaacaagagaagtatcatcgtatcccatcataattgtcttctccacctctgtccccaactatgatgaggaacatgttacaggatgtatcaatggtaggagcaatattttagatggcaagtttttgtagmttgatgttgacacaagttatacaaataattgatttctgcatttacaa

SEQ ID NO: 434229 - DNA, 608 bp, Homo sapiens
acattgcccaggctgctcttaaactcctcacctcagcaatcctcctgcctcagtcaccaaaagtggtgggattaacaaacatgagccaccatccctggccattttgtgattttcaatagtatttttccttcacctaagtagcttaacaggaggtggttttactttctaggtagaggggactgttttggtttttgattttgtcattaatttataactttgttgtattgtgatgaagattactacttctattaattatctttttgaaatttagtgattttctgagatctaatatayggtaaatttttagaaagaatgtgtgttttctatttctggaattcagagtttaacatatatccattcatgtagaattatcttgctgattaagtttttaggttttgtttatactcattattgttttgttctcttcatttgtcttggacaggaaggtgtgttaaagccttcattattagtggtttctgtctgttttcttcttgcctcccttgtagttctgccttataaaagttttaactttacatttgctttataaatgttaacaacttttgttgtcattgtaaattatagcttttggtattaaagttaccatcatt

SEQ ID NO: 434230 - DNA, 572 bp, Homo sapiens
aaaattattcctttgacattttaaaaattttattgtgaaaatctaacatgtaccaaaaatatgttagatttttcagaaaaaaatctgtacatttagattaggttatagagaaaaattataaatttagatttatagattatagttaaatttatagttatattatagagaaaaaatatgttaaattatcatggacattctcaatcagctgcaagaattatcagcattttgacaatcttatttcatttagtttcccactttttttttgaagtatttaggcagaytctaaacactgcataatttcacccataaatacttcactgtgcatttctaactgaaagaacatattttatgtatgaactgttatcaccataacttacaaaattaacaatattttaatctaatctaatatttaatccatatttaaatttactggatcgtctcacatatttttaaccatatatcccatttattagaattaagcaaagtcaatgtgaatgattggaaatcataaaagacatttgaagaaacatttatactaatggtaatatgatgaaaatgataatgaggataat

SEQ ID NO: 434231 - DNA, 572 bp, Homo sapiens
aaaattattcctttgacattttaaaaattttattgtgaaaatctaacatgtaccaaaaatatgttagatttttcagaaaaaaatctgtacatttagattaggttatagagaaaaattataaatttagatttatagattatagttaaatttatagttatattatagagaaaaaatatgttaaattatcatggacattctcaatcagctgcaagaattatcagcattttgacaatcttatttcatttagtttcccactttttttttgaagtatttaggcagactctaaacactgcataatttcacccataaatacttcactgtgcatttctaactgaaagaacatattttatgtatgaactgttatcaccataacttacaaaattaacaatattttaatctaatctaatatttaatccatatttaaatttactggatcgtctcacatatttttaaccatatatcccatttattagaattaagcaaagtcaatgtgaatgattggaaatcataaaagacayttgaagaaacatttatactaatggtaatatgatgaaaatgataatgaggataat

SEQ ID NO: 434232 - DNA, 545 bp, Homo sapiens
gggtggatccacttttctctgtatagtgtttgcataaggcagggtgcttgcagggggagggctggtttgctctgtgcccatcaatgctccatctgcaatagcaatcagcaggcggcagaggggctgactgcactcctgcawgctggtgaggcaacaaaagcaaaacctgccctgtgcagccacatgccagcaaaacaatgtgaggagttgccaggggcccagaggaagccgcagtattggaagggaatgtgtggactggtgtgtgtccataggcactgcccactggagctctccatctgtcaggcgtgatccaccattgcaaaagctatggtgtgggccctcagggcaccaaaggctgccctgcaactatgtgtggccaggctgtggccccaggagagtctagcagaccaaggggtgctcaggttgtactggtcccatctgatggacaagaccaccctacagaattcagaactgacagttcccctatggctaaagtctcctatgggtgcaaatcgagcctagggggatggccaggcttgcccggg

SEQ ID NO: 434233 - DNA, 532 bp, Homo sapiens
ttagttattctcaaaaaggtcagcataagcattaatgataaaccttggaattaacctatagcttagagatcttcctcaataacttctacctcatctagaaaaagccaactgaagcaaaagagatgtatttttttcataaagactactcgatttgcaagttaaaatcatttcctaaatagtttcttcaatgacatagatataatagagtagtctgtcgctaagcatattgacatttttggtattgtaaaacccaataagcccaaattaacagcttattcctgtttgaattataaaatagggctctttagagattttagcaagtcgtttgctaaagtactctagaaatttaatttgatttaaaagtttaaaagtttgagggtccttgtwtaccatgcaaaataatttggagaacacttagtaatctttaaagattaatagtaatattaatttttaaaaacgaatgacaaagttttagtttgagcagttgagtgaataccagcagcaagaaaacgagaccccttgttctctttag

SEQ ID NO: 434234 - DNA, 607 bp, Homo sapiens
tgaaatgacagcttccagttagtcaaaatcaatatttaaatttttcctatttctcagattccctgatttctagggattatggaccccatttaggaaactctgctctaaggaattattatattttatggtatcttaawatataaatatgaaacaaagatacaagtatacaaaaataaatatgtcctcctgtgttggtcgcccaccaccttagtgatttctaatttcaatgatttcatttttaggaattttattaaactgataatttttatatctaatttcttgtcatatacttttatacctatatattttgttaaaaatatttatcacatttattaatttgaatatttatttaaatgtattatttctactgacttttatccatagtgactgatttcattgcatgttttattaattttgtgttatacattttataaatgtattacatttgaccatgtgccttgcatggtcaaatgtaataaggtaattcccactttacctgtgggaattctttgaggcctgattttatgtgatttttctctagaaaggatttatatttacttctttcaggtgcctggagacactaccaacccaggaactgtttaaacca

SEQ ID NO: 434235 - DNA, 482 bp, Homo sapiens
ttcaattaaagcccaaacttcagcattacacaatttacccatgtaacaaacctgcacatgtccctcctgaatttaaaaatttaaaaatttaaaaaaaatttaaaagaagcataaggccatggaatatatttaaatcaccattatccagagagtccttctagctcttggatggatggatgatcaacatcttaaccctatacctgaagagcaacaggtgggaagggttagggaaggaagcactgtgtttggtctctgacatatattttctgtttctaaatgcatgctgtattagttcgttttcacactgttataaagaaatacccaagactgagtaattcataaagaaaaaaggtgtarttgactcacagatctgcatggctggggagcccactggaaacttacaatcatggcagaaggggaagcaggcacgagagagagcacgtgaaaagtccaagaaaaactgtcatttataaaaccatcag

SEQ ID NO: 434236 - DNA, 588 bp, Homo sapiens
aaatagtgaaggaaagctcaccaaacacttaaatctgctacacattcaactggatttctcattgaatatgaaaactgaagtttctcttttctcattttttacatctttgcttctaaatgctgactgattacttttagatgaaatatattttcattgctatatgttaaaacacacacatgcacacgagcgcgcgcacacacacacacacacacacacacmccccgcaatgctgacagcagaaaattcatgcttccatggttttaacagctcaaccagcaccttcctttcaattttatgtaggatagtgctgcacccttcttctatatcattaagcactaattgcccaattacagagctttgggacactgctaaaattgtgcctgaagcttttaagcaaattcagctttaaagcaaatgatcccagtagtcaaaattatttactaaacacagcacagtttcttctagatagattatttaaggcctattacgcttgctagatccttatagtacaaaatacttgggtatttagtgagactgttccctcttttcataaagcttttttatattcagcaccaaaatgtaaaagga

SEQ ID NO: 434237 - DNA, 579 bp, Homo sapiens
attactctgtgtatgactctgttstaacacttaccatgctaaactgtcaatttatttctccccaccagaccatgcttctcaaagtagcccacattttattagcactcagtatcattgccttaacacaatacatgtttaataaaattaatatgttttatttcctcaagtagacatgaaggtccttaagtttagagattatgttttattcagtcttatatttcattgtctactataatgtcttgtatagtacatgctttcaaaacttttgtgtaactctaagggaaaacccctacactctcctcttgtctctaagaaaatggggctataaatatatctctaactcaagttggtgggcatctgcagattgcatttctatttaagaaactctaggtatagaagtatcagtgagcccatttgccaggtatcttcagagaatgtttcttttgtaaattttaaatcaaaatagtgacttgggctgtctcaacagaagtgagaaatgagaaaatgcaggtggtgcactagatgaatctaattagatttagaatgagaaactagttttgaaagcccctgtagtcattg

SEQ ID NO: 434238 - DNA, 579 bp, Homo sapiens
attactctgtgtatgactctgttgtaacacttaccatgctaaactgtcaatttatttctccccaccagaccaygcttctcaaagtagcccacattttattagcactcagtatcattgccttaacacaatacatgtttaataaaattaatatgttttatttcctcaagtagacatgaaggtccttaagtttagagattatgttttattcagtcttatatttcattgtctactataatgtcttgtatagtacatgctttcaaaacttttgtgtaactctaagggaaaacccctacactctcctcttgtctctaagaaaatggggctataaatatatctctaactcaagttggtgggcatctgcagattgcatttctatttaagaaactctaggtatagaagtatcagtgagcccatttgccaggtatcttcagagaatgtttcttttgtaaattttaaatcaaaatagtgacttgggctgtctcaacagaagtgagaaatgagaaaatgcaggtggtgcactagatgaatctaattagatttagaatgagaaactagttttgaaagcccctgtagtcattg

SEQ ID NO: 434239 - DNA, 460 bp, Homo sapiens
ttactgacaacaaataataaccattgtggactgtgttaggcattttctccattttctcacatagttctcattagtcttctcgacagctctcagctattcccaacttcatttyacagaagaggaaattgaggcttttggtgggtaaataacccacctaggatcacattgctgataagtggcaggagaatattaagtataacttaaaaaactgaaaaccatggtacaaattataatatttccagaagatagaaaccaaaaaataaagcaccaaatactaaaacacagatcttaacaatacactgaaaaaaactgaatataatatattttaaaatttggaacatgtttttaataaaatacttttttaaagcccataatgaattcttttaaaagttagtctctaatttatccttcataataatctgggttttcagatatcaggtctgcttaaggtggggtccat

SEQ ID NO: 434240 - DNA, 615 bp, Homo sapiens
tttaatacagtttaaattaatgcatcaggagtagctgaaggcacaaattaaaaatcayttgcttttttatacttaaaatatagaaaaagaagaaaaactttaattttaaaaagtactctgataatccatagacttcatgttgtactttttaaaagaaaatctgattaaaaaaacatatttacccttgttgaacatccacaataataatgtttgaaaaaaaacttacctcttaaggctattagacacagggaaagcattgtgaatatacaaatattttagttccaaaactaaactctgccacgtgtatacctatgtaacaatactgcacattctgcacatgtaccccagaacttaaagtataataataataaaagatcccaaggagtaaagcaggtgaattggtttaaatgcctgaatcttgatgactcttttatccattttacatagcatccaaaacatgtcagtgttgtgaattcctttgctaatctttttttgaatttcccagtgaaaaacataccaaagaaacaaaattcaatttacaactagctgcagagagccatggatgtgaccagttatgttaaaattcctgcccacttccactgcgtgcacaggcca

SEQ ID NO: 434241 - DNA, 615 bp, Homo sapiens
tttaatacagtttaaattaatgcatcaggagtagctgaaggcacaaattaaaaatcacttgcttttttatacttaaaatatagaaaaagaagaaaaactttaattttaaaaagtactctgataatccatagacttcatgttgtactttttaaaagaaaatctgattaaaaaaacatatttacccttgttgaacatccacaataataatgtttgaaaaaaaacttacctcttaaggctattagacacagggaaagcattgtgaatatacaaatattttagttccaaaactaaactctgccacgtgtatacctatgtaacaatactgcacattctgcacatgtaccccagaacttaaagtataataataataaaagatcccraggagtaaagcaggtgaattggtttaaatgcctgaatcttgatgactcttttatccattttacatagcatccaaaacatgtcagtgttgtgaattcctttgctaatctttttttgaatttcccagtgaaaaacataccaaagaaacaaaattcaatttacaactagctgcagagagccatggatgtgaccagttatgttaaaattcctgcccacttccactgcgtgcacaggcca

SEQ ID NO: 434242 - DNA, 393 bp, Homo sapiens
tagtattcttggctgacatttttttttttcttacagcactttgaatatatcattccactctctcctggcatataaagtttctgctgagaaatatgctgacagtctaatcatgattcctatgtggtgacattattctcttataactttaaagtttgtctctttatctttgacttttgacggtttgattacaatgtgcttcagagagattttctgcggggaggtgtgtctcattgggaatatttgaacttcctggatctgaatgtccatttctctcccaaggcttggtaatttttcaactattattttgctacataggttttatgtgtcttttccatttcttcttyctcttgtacacctataatgcaaactgttttctacataatttgacgtccc

SEQ ID NO: 434243 - DNA, 632 bp, Homo sapiens
tttgatacaggcatggcaacatgaaataatcacatastgaagaatgggatatccatcccctcaagcatttattttttgagttacaaacaatgcaattatactccaagttattttaaaatatacagttaagttattatagattatagccaccctattgtgttatcaaacaggctgtcttattcattatttccacttttgttgtaccaattaactatctccatctcctaccccatccccattacctttccagcctctagtaactatccttctatgctctatgtccatgagttcaattgctttgatttttggatcccacaataagtgagaacatgcaatgtttgtctttctgtgcttggcttattttacttaacataattatcttcagttccttcaatgttgttgcagatgactggatctcattcttttttcgtggctaaatagggctccattgtgcatatgtaccacgtttgcttcatgcattcatctgttgatggactcttaggttgcttccaaatctcagttatttttacagtgccacaacaaacataggagtgcagatatctctttgatataatgatttcctttcttttgggtgtataccccatagtgggattcctggatcatatggtagc

SEQ ID NO: 434244 - DNA, 632 bp, Homo sapiens
tttgatacaggcatggcaacatgaaataatcacatactgaagaatgggatatccatcccctcaagcatttattttttgagttacaarcaatgcaattatactccaagttattttaaaatatacagttaagttattatagattatagccaccctattgtgttatcaaacaggctgtcttattcattatttccacttttgttgtaccaattaactatctccatctcctaccccatccccattacctttccagcctctagtaactatccttctatgctctatgtccatgagttcaattgctttgatttttggatcccacaataagtgagaacatgcaatgtttgtctttctgtgcttggcttattttacttaacataattatcttcagttccttcaatgttgttgcagatgactggatctcattcttttttcgtggctaaatagggctccattgtgcatatgtaccacgtttgcttcatgcattcatctgttgatggactcttaggttgcttccaaatctcagttatttttacagtgccacaacaaacataggagtgcagatatctctttgatataatgatttcctttcttttgggtgtataccccatagtgggattcctggatcatatggtagc

SEQ ID NO: 434245 - DNA, 632 bp, Homo sapiens
tttgatacaggcatggcaacatgaaataatcacatactgaagaatgggatatccatcccctcaagcatttattttttgagttacaaacaatgcaattatactccaagttattttaaaatatacagttaagttattatagattatagccaccctattgtgttatcaaacaggctgtcttattcattatttccacttttgttgtaccaattaactatctccatctcctaccccatccccattacctttccagcctctagtaactatccttctatgctctatgtccatgagttcaattgctttgatttttggatcccacaataagtgagaacatgcaatgtttgtctttctgtgcttggcttattttacttaacataattatcttcagttccttcaatgttgttgcagatgactggatctcattcttttttcgtggctaaatagggctccattgtgcatatgtaccacgtttgcttcatgcattcatctgttgatggactcttaggttgcttccaaatctyagttatttttacagtgccacaacaaacataggagtgcagatatctctttgatataatgatttcctttcttttgggtgtataccccatagtgggattcctggatcatatggtagc

SEQ ID NO: 434246 - DNA, 537 bp, Homo sapiens
caaatttatttgctcttgcttttctagttctctacaatgtgttgtcagatcatttraagtttttcctctttttcttgatgtaggcacttatagctataaagttccctcttggtactacttttgctgtatcccatcggttttgatatgttgtgtttccattattatttgtttcaataaattttgtaattgccttcctaatttctttattgacccactggttgttcaggagcatattgtttaatttccatctatttgtatagtttccaaaattcctcttgttattaatttctagttttattccattgcggtcagagaagatgcttgatattatttaaattttttgaatgttttaaggcttgttttgttacctaacatatggtctgtccttgagaatgatccatgtgctgaggaaaaagatgtgtattatggctgggcgtggtggctcactcctgtaatcccagcactttgggaggccgaggcgggcagatcacaaagtcaggagatcgagatcatacgggctaacacggcaaaaccccg

SEQ ID NO: 434247 - DNA, 537 bp, Homo sapiens
caaatttatttgctcttgcttttctagttctctacaatgtgttgtcagatcatttaaagtttttcctctttttcttgatgtaggcacttatagctataaagttccctcttggtactacttttgctgtatcccatcggttttgatatgttgtgtttccattattatttgtttcaataaattttgtaattgccttcctaatttctttattgacccactggttgttcaggagcatattgtttaatttccatctatttgtatagtttccaaaattcctcttgttattaatttctagttttattccattgcggtcagagaagatgcttgatattatttaaattttttgaatgttttaaggcttgttttgttacctaacatatggtctgtccttgagaatgatccatgtgctgaggaaaaagatgtgtattatggctgggcgtggtggctcactcctgtaatcccagcactttgggaggcygaggcgggcagatcacaaagtcaggagatcgagatcatacgggctaacacggcaaaaccccg

SEQ ID NO: 434248 - DNA, 537 bp, Homo sapiens
caaatttatttgctcttgcttttctagttctctacaatgtgttgtcagatcatttaaagtttttcctctttttcttgatgtaggcacttatagctataaagttccctcttggtactacttttgctgtatcccatcggttttgatatgttgtgtttccattattatttgtttcaataaattttgtaattgccttcctaatttctttattgacccactggttgttcaggagcatattgtttaatttccatctatttgtatagtttccaaaattcctcttgttattaatttctagttttattccattgcggtcagagaagatgcttgatattatttaaattttttgaatgttttaaggcttgttttgttacctaacatatggtctgtccttgagaatgatccatgtgctgaggaaaaagatgtgtattatggctgggcgtggtggctcactcctgtaatcccagcactttgggaggccgaggmgggcagatcacaaagtcaggagatcgagatcatacgggctaacacggcaaaaccccg

SEQ ID NO: 434249 - DNA, 527 bp, Homo sapiens
tgctcttgcttttctagttctctacaatgtgttgtcagatcatttaaagtttttcctctttttcttgatgtaggcacttatagctataaagttccctcttggtactacttttgctgtatcccatcggttttgatatgttgtgtttccattattatttgtttcaataaattttgtaattgccttcctaatttctttattgacccactggttgttcaggagcatattgtttaatttccatctatttgtatagtttccaaaattcctcttgttattaatttctagttttattccattgcggtcagagaagatgcttgatattatttaaattttttgaatgttttaaggcttgttttgttacctaacatatggtctgtccttgagaatgatccatgtgctgaggaaaaagatgtgtattatggctgggcgtggtggctcactcctgtaatcccagcactttgggaggccgaggcgggcagatcacaaagtcaggagatcgagatcatackggctaacacggcaaaaccccg

SEQ ID NO: 434250 - DNA, 556 bp, Homo sapiens
gcacactatgtttgtctctaaatgtatgtaggaaggcatttacctgacttttcatacagacacacaaatgagtcatttcaaaaataagcaccatttctggtcccacacttacttaatttatgaacctataatttgcttttggaaaaaccatctcataaaatgatgttgacttgaggtttcagaaaactggcacagagctaggaaaaaaatgtaaacgttgtggcaacacagcaaagaaaaaaatttaagcagcatttgttgttagtagctgttaaatgtaagcattcactgtagcagacagacttccyttagaaaacacaggcaatgacagaggataacaaatagatgttgttgccagtgaaagtatgagtgtttctccagaagaaacatgaaaattgggggaaaaattagcaaaaggccagcttggaagattggttaaggagtatataatgtaatcgctgttcaggtatatattcatcaaagctgttgacatagttctcttattagctaatatttaaaattttgttttaaggaaatggtacatctgtaaagtacc

SEQ ID NO: 434251 - DNA, 556 bp, Homo sapiens
gcacactatgtttgtctctaaatgtatgtaggaaggcatttacctgacttttcatacagacacacaaatgagtcatttcaaaaataagcaccatttctggtcccacacttacttaatttatgaacctataatttgcttttggaaaaaccatctcataaaatgatgttgacttgaggtttcagaaaactggcacagagctaggaaaaaaatgtaaacgttgtggcaacacagcaaagaaaaaaatttaagcagcatttgttgttagtagctgttaaatgtaagcattcactgtagcagacagacttcccttagaaaacacaggcaatgacagaggataacaaatagawgttgttgccagtgaaagtatgagtgtttctccagaagaaacatgaaaattgggggaaaaattagcaaaaggccagcttggaagattggttaaggagtatataatgtaatcgctgttcaggtatatattcatcaaagctgttgacatagttctcttattagctaatatttaaaattttgttttaaggaaatggtacatctgtaaagtacc

SEQ ID NO: 434252 - DNA, 577 bp, Homo sapiens
gattggttaaggagtatataatgtaatcgctgttcaggtatatattcatcaaagctgttgacatagttctcttattagctaatatttaaaattttgttttaaggaaatggtacatctgtaaagtaccagaggcaagagggtctggagtagttgccattaaacctctttgctaattggacacgctagccactgctacattagtctacagkcttacctgacaggctaaacaaaccgagttaactgaacatctgaaattaatgtgtttactttaaggaacacgaagtctgattcaattagcctccaaagtcatggagcctacagaatttaatgttggaggttttcttttcttttttgttttaatgtgtactccactgtttacagaacccagattaatgaggggatgtattttttttttttgtcttagaggctgaaaacttaaaaaattggatgaaaattatgaagatagtctgacatgatatattaagagctctgaatgatgcctagggatgtagaagaggagaaaaacacttgagtaagtaaacagagtttatgagacttgtttatgccaggaaagcaa

SEQ ID NO: 434253 - DNA, 607 bp, Homo sapiens
aaatcttgtgcttactggccacatgatctctgagcagtaagacattatagaaactatagctattttatgagaattcaagccactgttataatccaaacattgtaggcttttgttagttttacaaaggcagtttagttttgggaagggctgttatcatctttgctttaaggtaaaactatgaactaaattcctccccaagttagctttgtctacgctcaggaatgaccaagaacagcttggaagtcagaagcaagatggaatcaagtatgtcaaatttcccttactgtcgtaattctgcaaagacaatttcagtagtagttcttgtgtgtgtatgtgacttttctaaattgattatataaagtctgtattctttgtcatgtgtaaacctgaagtctctgctttgttagcttagttgtgagttgataattggaaagaaaattttttgagttcctgaaaccagcacrtctcccagtctttgccaagtggctgtctgtgcactttagggcatgaatttaacactcagtgaaactcttggtatcttgtttaatccacatttgctgcttacatacagcgtcttgagcagtctctgcatgtctttcctgactga

SEQ ID NO: 434254 - DNA, 584 bp, Homo sapiens
tcaaacaatgctggtagtctcacttttaatacatcagtaaattaagatggcaggagtgtgtgattccctactagccttatgcctaaaggttttaagattcattaatgaccattgccagaatcagttatttcattaaggattgtaaactgattattttcttaattctattatttcttcagcatacattacctgaaattcttctgcattgaatawgttttctctcatctactggtgacattttatcttataatacattttacaccaaaaggtaggataaatgctggaattatctaatatctgagtaaaagattataccctaacaacttaaaatcttgtccaataaattttatttctttttccttcttcactttccgccattcctactcgtctttctttctcttctctctcctctctacattctaatcctgttttttctccttgtacttttctattccttctccttctttatattattataaaccatgtcttttacataatcaacattttaaaatcatttttggatgttaatattggcccatatttggccagtgagggccctattactctcctgttcttttggcatg

SEQ ID NO: 434255 - DNA, 572 bp, Homo sapiens
atttttacttactttttaaaaattctcttggccttttctctccttttcttctatttgccttataatgttttcattcaaatctgttcttytttggacacaagataatgtagacatttttctaatgtaatttttttctttttattgattttctcagtaaaataaactcttattttatgattttctcttttttgtccatttctgctcttagtttttgaattgctgattcagtgttctctcataccccccaatacttatttgaatatatttaattcagtttgaagtgttgtattacacatctcttcttcagcattttggggggaagagtgaggagaaacttttatcaactaactttgtttaattctcattttctgttttacttattgtagtatttttatagataaggactttttggtgtgtgcttctaaatttatataacaaagttaagagtttgagtaggttacaagatttctatttcaagatatcactcttctaactgtaggaaagttggtttattttatttttaattggacgtttttgagacagtagaggaggaaaaaggacatttggtattt

SEQ ID NO: 434256 - DNA, 586 bp, Homo sapiens
gacagcctgcagagctgtgggccaactaaacctcttttttaaaatataaattgcccactctcaggtagtcatttataacaacttgaaaattggctaatacagaaaattggtactagagaggcaggccattgctataaagatacctgaaaatgtgaaagtcactttagaactcggtaaaagggcagatgttgaaacattttagagggctcagaagaagaaaggaaggtgaggaaaagtttgaaacttgctagagacttgttgaatggtttcaaccaaaatgccaatagtgatatggacagtgaagtccaggctgaggtcttagrtggagatgaggaacttaccaggaattggagtaaaggtcactcttgctatgctttagccaagagactgaccgcattgtgcccctgctctagggatctggtgaacttagaacttgagagaaatgatttacagtatctggcagaagaaatttataataagcaaagcatgcattcaagatgtggtctgtctgcttctaagagcataatctcaaatgcgagcacaaagagatgatctgaaactggagcttatatttaaaaaggaagcc

SEQ ID NO: 434257 - DNA, 584 bp, Homo sapiens
tcaaacaatgctggtagtctcacttttaatacatcagtaaattaagatggcaggagtgtgtgattccctactagccttatgcctaaaggttttaagattcattaatgaccattgccagaatcagttatttcattaaggattgtaaactgattattttcttaattctattatttcttcagcatacattacctgaaattcttctgcattgaatatgttttctctcatctactggtgacattttatcttataatacattttacaccaaaaggtaggataaatgctggaattatctaatatctgagtaaaagattataccctaacaacttaaaatcttgtccaataaattttatttctttttccttcttcactttccgccattcctactcgtctttctttctcttctctctcctctctacattctaatcctgytttttctccttgtacttttctattccttctccttctttatattattataaaccatgtcttttacataatcaacattttaaaatcatttttggatgttaatattggcccatatttggccagtgagggccctattactctcctgttcttttggcatg

SEQ ID NO: 434258 - DNA, 592 bp, Homo sapiens
agaaaagcaagggccagaaccactgactttccatagcacaagtacaaggctgctatattttagtgagcctgcaccagtctttacatcatataacatgatgtacaagatagcttgcagcttgcatctaccctgagaaaaccttcctactcagttttagatctcctccatgtgctcctyactccattaacaaggcctgctgctactttccttcagaactagttcaaagaaaccaataaaaaccaaattgtttctatgcctactaagatctgtctctgatttctgactgaaatgatacaactttcctctcctgttaattgactttaagatgttcatctcatattcaagcaaaactacatctgtgccaaaagccactttatcccacaggtaccaatgggataatggacattgaaataactcaataacacataatataataaacacttggcatctgaaggataaattttttgaaatcctgtatttcctgttagcaatataaccaattatcttggttttcctgctgagggtcttcccaagatgcagaatttttattgttaaaaatgaaaatgctgggaccctgcctggtaggcagtaa

SEQ ID NO: 434259 - DNA, 592 bp, Homo sapiens
agaaaagcaagggccagaaccactgactttccatagcacaagtacaaggctgctatattttagtgagcctgcaccagtctttacatcatataacatgatgtacaagatagcttgcagcttgcatctaccctgagaaaaccttcctactcagttttagatctcctccatgtgctccttactccattaacaaggcctgctgctactttccttcagaackagttcaaagaaaccaataaaaaccaaattgtttctatgcctactaagatctgtctctgatttctgactgaaatgatacaactttcctctcctgttaattgactttaagatgttcatctcatattcaagcaaaactacatctgtgccaaaagccactttatcccacaggtaccaatgggataatggacattgaaataactcaataacacataatataataaacacttggcatctgaaggataaattttttgaaatcctgtatttcctgttagcaatataaccaattatcttggttttcctgctgagggtcttcccaagatgcagaatttttattgttaaaaatgaaaatgctgggaccctgcctggtaggcagtaa

SEQ ID NO: 434260 - DNA, 592 bp, Homo sapiens
agaaaagcaagggccagaaccactgactttccatagcacaagtacaaggctgctatattttagtgagcctgcaccagtctttacatcatataacatgatgtacaagatagcttgcagcttgcatctaccctgagaaaaccttcctactcagttttagatctcctccatgtgctccttactccattaacaaggcctgctgctactttccttcagaactagttcaaagaaaccaataaaaaccaaattgtttctatgcctactaagatctgtctctgatttctgactgaaatgatacaactttcctctcctgttaattgactttaagatgttcatctcatattcaagcaaaactacatctgtgccaaaagccactttatcccacaggtaccaatgggataatggacattgaaataactcaataacacataatataataaacacttggcatctgaaggataaattttttgaaatcctgtatttcctgttagcaatataaccaattatcttggttttcctgctgagggtcttcccaagatgcagaatttttrttgttaaaaatgaaaatgctgggaccctgcctggtaggcagtaa

SEQ ID NO: 434261 - DNA, 449 bp, Homo sapiens
ttttcaacctaagttttaatgagggctttaacttattttatatttaattacatcaagtaaataaacaccygtattaaatacattatggaacaaggaaaatttttacatttccaataaatatttgaattcacttcaatgcatttgagtgctcactaaatatattgtgaattcttactaaaagagaaaagttagacaaaataggaatcacagaaatcctggatttaattgctgaatgataatctgtttacaagaggcctcagatcacattgacactatttacaattcactttgtttatacagaaggtattacccagcatcctcatatttattgatcagtataaacagtggtactggtatgtgaccaagaatgattaaaatgagcttttggttttgatcctttctgggtggtcttattgctttcttcttgaataacgatatatgcataattt

SEQ ID NO: 434262 - DNA, 619 bp, Homo sapiens
cctggatttaattgctgaatgataatctgtttacaagaggcctcagatcacattgacactatttacaattcactttgtttatacagaaggtattacccagcatcctcatatttattgatcagtataaacagtggtactggtatgtgaccaagaatgattaaaatgagcttttggttttgatcctttctgggtggtcttattgctttcttcttgaataacgatatatgcataatttgtaatgagtgtgtgctttgcataatgataagagtaaatgaggtacatttcagaattttgagtcgaaacaagaaayctgttttggattttgttttgaagttcccatttagatccaaagaattcatatttacaaactagttctaggaattagttcttaaattttatttgaactataacggtgccatgaatgttacacattttaccctagattgtaaatactttctttcccttcaagtaagtggatggacatatatcaacaccctaaatgcctaacctgctgatttatgaattataaatcataaatttaagaatcagattataggctaaactgtgtccatccccaaaattcatatatatttaagtcctaatacccagtacctcaaaa

SEQ ID NO: 434263 - DNA, 551 bp, Homo sapiens
ccaccatgcacagccaatttatttttatattttgtagagatggggatctctctatattgcccaggctagtctcaaaatcctgggctaaagtgattttcctgcctcgacctcccaaagtgttgggattacaggtgcgaaccaatgcatccagatggttttcttataagaggaaatttagacagacagattgacaccagatatgcatacacacagagaaaaggccatatgaggaggcagaaataaggtggccatccacaaaccaagaagggaacctcaggagacascaaacctgcagacagttttgatctgaaacttccagcctccagaagtgtgtaaaaattaattcctgtttttaaatcaacctagtctatgattttctgttacagcaatctgagatgactaacacaaatcatttacctaagttttggccagttgttttacaagtagctttgctttctgtgtgaccaattcagggagcatctgtcagttagaatcatggccagattgagacatgcgtacattttggaaagtctagtaactcagtgtccctt

SEQ ID NO: 434264 - DNA, 551 bp, Homo sapiens
ccaccatgcacagccaatttatttttatattttgtagagatggggatctctctatattgcccaggctagtctcaaaatcctgggctaaagtgattttcctgcctcgacctcccaaagtgttgggattacaggtgcgaaccaatgcatccagatggttttcttataagaggaaatttagacagacagattgacaccagatatgcatacacacagagaaaaggccatatgaggaggcagaaataaggtggccatccacaaaccaagaagggaacctcaggagacagcaaacctgcagacagttttgatctgaaacttccagcctccagaagtgtgtaaaaattaattcctgtttttaaatcaacctagtctatgattttctgttacrgcaatctgagatgactaacacaaatcatttacctaagttttggccagttgttttacaagtagctttgctttctgtgtgaccaattcagggagcatctgtcagttagaatcatggccagattgagacatgcgtacattttggaaagtctagtaactcagtgtccctt

SEQ ID NO: 434265 - DNA, 564 bp, Homo sapiens
tgtggttttggccattacatttaataacattttaggcattttggtgggtacataatggtatttccctaaacctttttctgataagtcaactgggaaaatcaggggtgcatactgacatttgaacatataaattacattgattattcttgggtttgtattattttatgcaaaatatgatctgaaatgaaattcagaagatttaggcactggaattaaaaaaaattactagaatttggcctggtattgagaacagtgacatttaaaattaaatgaaagagtgaaagctattaagttgctttcacctgaacaatttttagtccttcmgcgtggtataaactaaagcaaaatgttctagatttgaaactagttctaggtgtatagtatttaatatagaataagttataacaaattgaatgagcttgaataagtcacttaatagcattattttaaagtagaattaatgtctgacaaacctattccacacgacttttgtgaacagaaaatgtaattatgttagtgataatttaaaaatatttggaaagaattaaacttgattaagatgct

SEQ ID NO: 434266 - DNA, 558 bp, Homo sapiens
tgtcactttatttaccataaaatacacatataataaaagtttgaatgtaaatatgattcatcttgtttgggaaaaagaatttttcattcccatgatgataagactcaattttcagtatgactggggtccataagatkggaaaggttgagagcctctgaactcaatgcctccacaaagtcctgtatagctatttggatttcaatttgtaattcacaatgattcatttagcaaaatttgaaaggtaagtaggatttaattagggtagaaaagtgggctttagagaagtgcattgcaagctaaggagtaatctgtgcaaaggttcagaagaaggaagacacattgtgtgttcttaaaacttaaaaaaaaaggccagggtggctagacagtgtccagtgagaaacagagacctggaacatggctggacccataggcaggacacatattatacaggatcttgtagaccatgtaaaaatgtgagactttatcttaagttcagtgggaagctgttaaaatattttaagcagatggaattatattccaattagcattgtaaaagat

SEQ ID NO: 434267 - DNA, 596 bp, Homo sapiens
atgataacttaaaatttgctgtatgccttttaagagatatttccttatcaaataatagcttcctacacatcctttcactaaggtaaccaatgatgtttgtaatgttcaaaacaatagayattaagtcctcagcagacattaaaatccttgatccgtctcttcttgaacttttctgttctgttggatcctataccgttaagttctttctgatttttctatcatctggccacctgttctctgcgtcctttcaagttcatcttctgtctgtccattaacgttgatatacctcaaggttctcttctttcctcatttcctatgggaccttctttacatcttcagttatctttgtgcaggtgatatgtatttatcgatcaccaggcctgatttttcctttcaattccaggcctgaacttcatcagcctccttgtcatcacttcatggatacctcacagacatctgaaaataagcatgttcacaaccaaaatcataaaccctccccaagattttatcatctttcaatatcagtggatgtcaccactattcaacttcttctgtctcctgtagacccagtggtcagtcttacattgcccacttcc

SEQ ID NO: 434268 - DNA, 596 bp, Homo sapiens
atgataacttaaaatttgctgtatgccttttaagagatatttccttatcaaataatagcttcctacacatcctttcactaaggtaaccaatgatgtttgtaatgttcaaaacaatagacattaagtcctcagcagacattaaaatccttgatccgtctcttcttgaacttttctgttctkttggatcctataccgttaagttctttctgatttttctatcatctggccacctgttctctgcgtcctttcaagttcatcttctgtctgtccattaacgttgatatacctcaaggttctcttctttcctcatttcctatgggaccttctttacatcttcagttatctttgtgcaggtgatatgtatttatcgatcaccaggcctgatttttcctttcaattccaggcctgaacttcatcagcctccttgtcatcacttcatggatacctcacagacatctgaaaataagcatgttcacaaccaaaatcataaaccctccccaagattttatcatctttcaatatcagtggatgtcaccactattcaacttcttctgtctcctgtagacccagtggtcagtcttacattgcccacttcc

SEQ ID NO: 434269 - DNA, 596 bp, Homo sapiens
atgataacttaaaatttgctgtatgccttttaagagatatttccttatcaaataatagcttcctacacatcctttcactaaggtaaccaatgatgtttgtaatgttcaaaacaatagacattaagtcctcagcagacattaaaatccttgatccgtctcttcttgaacttttctgttctgttggatcctataccgttaagttctttctgatttttctatcatctggccacctgttctckgcgtcctttcaagttcatcttctgtctgtccattaacgttgatatacctcaaggttctcttctttcctcatttcctatgggaccttctttacatcttcagttatctttgtgcaggtgatatgtatttatcgatcaccaggcctgatttttcctttcaattccaggcctgaacttcatcagcctccttgtcatcacttcatggatacctcacagacatctgaaaataagcatgttcacaaccaaaatcataaaccctccccaagattttatcatctttcaatatcagtggatgtcaccactattcaacttcttctgtctcctgtagacccagtggtcagtcttacattgcccacttcc

SEQ ID NO: 434270 - DNA, 596 bp, Homo sapiens
atgataacttaaaatttgctgtatgccttttaagagatatttccttatcaaataatagcttcctacacatcctttcactaaggtaaccaatgatgtttgtaatgttcaaaacaatagacattaagtcctcagcagacattaaaatccttgatccgtctcttcttgaacttttctgttctgttggatcctataccgttaagttctttctgatttttctatcatctggccacctgttctctgcgtcctttcaagttcatcttctgtctgtccattaacgttgatatacctcaaggttctcttctttcctcatttcctatgggaccttctttacatcttcagttatctttgtgcaggtgatatgtatttatcgatcaccaggcctgatttttcctttcaattccaggcctgaacttcatcagcctccttgtcatcacttcatggatacctcacagacatctgaaaataagcatgttcacaaccaaaatcataaaccctccccaagattttatcatctttcaatatcagtggatgtcaccactattcaacttcttctgtctcctgtagrcccagtggtcagtcttacattgcccacttcc

SEQ ID NO: 434271 - DNA, 598 bp, Homo sapiens
tggtggttgattattttaattaaaatttaaaaagtgatcatctgtcctgtttgtaatcataatcaagttgttgcatgagcttttcaaaatgaaaattttacaactacatataattttaatttttcagtttttttaaaactcagacttggatgtacataaaaagtgaaggcttgtagcagatattaatatggccattaccratgagaaatagagaagttgagtgatggtccttgaataagagcatggtaagtcagggtaaagcatagatctatgatggattttttttggcttttagactagcatttttttccccctctgatctgtactgctgcttttcttttccctttttcatgtacatgaaggtcatttgctgtgatgctaaatattgcacattctgtcctggcagagttggcacccaaatcaaaacataaataaatacagtaaaaagaaaaatgaagggctgtacgtgtctggaagtgtcttcagtgaatctgaaatttcaaggatgacttggaggtcccagtgactcatgaaacaggaatgttagccaaccctgatgtaatattttatatgaagggcttttcatttacaaaggtct

SEQ ID NO: 434272 - DNA, 598 bp, Homo sapiens
tggtggttgattattttaattaaaatttaaaaagtgatcatctgtcctgtttgtaatcataatcaagttgttgcatgagcttttcaaaatgaaaattttacaactacatataattttaatttttcagtttttttaaaactcagacttggatgtacataaaaagtgaaggcttgtagcagatattaatatggccattaccaatgagaaatagagaagttgagtgatggtccttgaataagagcatggtaagtcagggtaaagcatagatctatgatggattttttttggcttttagactagcattttttyccccctctgatctgtactgctgcttttcttttccctttttcatgtacatgaaggtcatttgctgtgatgctaaatattgcacattctgtcctggcagagttggcacccaaatcaaaacataaataaatacagtaaaaagaaaaatgaagggctgtacgtgtctggaagtgtcttcagtgaatctgaaatttcaaggatgacttggaggtcccagtgactcatgaaacaggaatgttagccaaccctgatgtaatattttatatgaagggcttttcatttacaaaggtct

SEQ ID NO: 434273 - DNA, 598 bp, Homo sapiens
tggtggttgattattttaattaaaatttaaaaagtgatcatctgtcctgtttgtaatcataatcaagttgttgcatgagcttttcaaaatgaaaattttacaactacatataattttaatttttcagtttttttaaaactcagacttggatgtacataaaaagtgaaggcttgtagcagatattaatatggccattaccaatgagaaatagagaagttgagtgatggtccttgaataagagcatggtaagtcagggtaaagcatagatctatgatggattttttttggcttttagactagcatttttttccccctctgatctgtactgctgcttttcttttccctttttsatgtacatgaaggtcatttgctgtgatgctaaatattgcacattctgtcctggcagagttggcacccaaatcaaaacataaataaatacagtaaaaagaaaaatgaagggctgtacgtgtctggaagtgtcttcagtgaatctgaaatttcaaggatgacttggaggtcccagtgactcatgaaacaggaatgttagccaaccctgatgtaatattttatatgaagggcttttcatttacaaaggtct

SEQ ID NO: 434274 - DNA, 593 bp, Homo sapiens
ctgcaacctccgcctcctggatttaagcaattcttctgcctcagcctcccaagtagctgggaccacaggcatgcgccaccatgcccagctaattttttgtattttattagtagagatggtgtttcactgtgttagccaggatggtctcgatctcttgacctcatgatacacctgcctcggcctcccaaagtgctgggattgcaaatattttttcatagttaataatttttttcagtctttgctcgtattatattttaccatacaaaagtttttaaaatgatattttattgagtgtgctagtcttcccttttatttcttctagatttaaagctttccttgtttgtaaaggaaacctatattttctcacagaactcataaagttttattttttaatatttaaatctctaatccatttgtattttatacagtacctagtataaattatagattagattagattttctcacgaagttttatgcaattgtctggagatcattttttaaagtttacttttctcactatttttatttgycacctttattacatattaaatttctatatgtacttggatctatttttattttgtctattgt

SEQ ID NO: 434275 - DNA, 572 bp, Homo sapiens
tgcaaaacaactctggaaattagcatttatttctaaagaattacttgagcaactaatgtgagtaggcttttgtatgtctgtagctsctggaagtcctttaatcatcaggaaatgccctacgtatccatcaatattccttgaaaagtttgattttcaagatccattaatgaatgaaaggagcatctaggtcttccatgatttgggcctcatatgtgattctgtttgtagtagacaatttctctcatcgatgtagggaatgtctttgatagtgtaatgacaaaatcacattgcatcatattttttatttcaaatgacattctgatttcctttaaacattcttattagttttggaattagcataaactgatagccttatatgaggcatctgaaaaatctattgtagtatgagtattaccagtgagataaagcaggacaaggcatgtggcccactatcacaaagaagcgtgtcacaatctttaacttacaagaaagaatataaagataatgtttctcatttatccatacttaaatattaagtttgagctgtttttatgattacatatatatgacag

SEQ ID NO: 434276 - DNA, 572 bp, Homo sapiens
tgcaaaacaactctggaaattagcatttatttctaaagaattacttgagcaactaatgtgagtaggcttttgtatgtctgtagctcctggaagtcctttaatcatcaggaaatgccctacgtatccatcaatattccttgaaaagtttgattttcaagatccattaatgaatgaaaggagcatctaggtcttccatgatttgggcctcatatgtgattctgtttgtagtagacaatttctctcatcgatgtagggaatgtctttgatagtgtaatgacaaaatcacattgcatcatattttttatttcaaatgacattctgatttcctttaaacattcttattagttttggaattagcataaactgatagccttatatkaggcatctgaaaaatctattgtagtatgagtattaccagtgagataaagcaggacaaggcatgtggcccactatcacaaagaagcgtgtcacaatctttaacttacaagaaagaatataaagataatgtttctcatttatccatacttaaatattaagtttgagctgtttttatgattacatatatatgacag

SEQ ID NO: 434277 - DNA, 602 bp, Homo sapiens
aataaatataacatttataattggtacatggcatttcactgtaagactatacaatcatttctttaaccaacccccatgattaagcacaatgtcttttggatgcacatcacataatatagggtcttagaaaactgttggtaaacgactggatgcaaatcatctggttgaccttccttcatctccgaagtaaagtaatggctgcagaataaagcttgagggtaggggaaggcaaatatgtacatgcaygtttaaaaaaaagattagtgtgtgccttcctaagacagaccaggctggtaaagataatcactatgtgtcttcacaccatgttcattcttggaaatactcttgtgcaagcccatggtattcccttactgataaagcaggcagaggcacatacctggtgacttgggctgtcgctctccttctaatgaaagtcgctctggtgttttgatgagagacttaaccccaggattttgattaatcatataaaatggacaaagcacaccatctgttgaaagtaacatgagaactggagcaggaggaagagtcttttcatcacctgttaaaaaagaaaacaaaaataaaaaaaccaagtgaattta

SEQ ID NO: 434278 - DNA, 607 bp, Homo sapiens
ccagggcagcgggagggagtcagcaccctgaattccgaacacagatgaggactaaagacaaatgagctaggctgggcacagtgsctcctgcctataatcacagcactttgtgaggatgaggtgagaggatcacttgagcccagaaatttgagaccagcctggggtgacatggcaaaaactccatctctacaaaaaattaaaaaattagctgggtgtggtgtcatgtgcctgtagtcccagcagctacttgggaggcagatatgggagcatggcttgggcccagaaggttaaggctacagtgtgccatgatcgtactgcactctgcactccagtctgggcaagagtgagaccttgtctaagaaaaaacaaaaaacaaaaaacaacaacaacaacaacaacaaaaccaccaccaccaccaaaaaaacaagtgagctccaccagcaacaatccagccctcaaacatggcatggcagagaagctaaagtctccaaacagaggtgctgtcttttatacaaaagcaaaagaaatgggaagaacagaaatgcctggagaagggaagtgagggaggagagtgtcacccttgagattacagtttccagaatcaagt

SEQ ID NO: 434279 - DNA, 525 bp, Homo sapiens
  misc_feature (1)...(525): n = A,T,C or G
nnnnnnnnncattttatagatgaggaaattgaggcttacagagggcaagtaacttgcccaaatcactcagtaccagcaaatggactttttcccctctccctgcccccaaataccagccccccactgcaaaaaaacacaaacaaaaacaaaacaaaactacttctgtagagctagtygtctatttccaaatgcaaggcttaaattttaagccttggagttttcaatttaaagcctttgccatgaaatacagcatattactttataatagaaaacaaatagaaagagcctttcatgatagatacagtgaacactaaattctttcttttaggctgcatctaacaattctctccttaacccaatagatattatttccacaaattagcccagttttgatttggatggcaagactcaaagacaacaacaacaataaaatcacaacttgatttaaaagttaaattcaataaactgtagaagcagcatattagtctgttcttacactgctaatgaagacatacccgatactag

SEQ ID NO: 434280 - DNA, 525 bp, Homo sapiens
  misc_feature (1)...(525): n = A,T,C or G
nnnnnnnnncattttatagatgaggaaattgaggcttacagagggcaagtaacttgcccaaatcactcagtaccagcaaatggactttttcccctctccctgcccccaaataccagccccccactgcaaaaaaacacaaacaaaaacaaaacaaaactacttctgtagagctagttgtctatttccaaatgcaaggcttaaattttaagccttggagttttcaatttaaagcctttgccatgaaatacagcatattactttataatagaaaacaaatagaaagagcctttcatgatagatacagtgaacactaaattctttcttttaggctgcatctaacaattmtctccttaacccaatagatattatttccacaaattagcccagttttgatttggatggcaagactcaaagacaacaacaacaataaaatcacaacttgatttaaaagttaaattcaataaactgtagaagcagcatattagtctgttcttacactgctaatgaagacatacccgatactag

SEQ ID NO: 434281 - DNA, 525 bp, Homo sapiens
  misc_feature (1)...(525): n = A,T,C or G
nnnnnnnnncattttatagatgaggaaattgaggcttacagagggcaagtaacttgcccaaatcactcagtaccagcaaatggactttttcccctctccctgcccccaaataccagccccccactgcaaaaaaacacaaacaaaaacaaaacaaaactacttctgtagagctagttgtctatttccaaatgcaaggcttaaattttaagccttggagttttcaatttaaagcctttgccatgaaatacagcatattactttataatagaaaacaaatagaaagagcctttcatgatagatacagtgaacactaaattctttcttttaggctgcatctaacaattctctccttaacccaatagatattatttccacaaattagcccagttttgatttggatggcaagactcaaagacaacaacaacaataaaatcacaacttgatttaaaagttaaattcaataaactgtaraagcagcatattagtctgttcttacactgctaatgaagacatacccgatactag

SEQ ID NO: 434282 - DNA, 547 bp, Homo sapiens
tttaaaaattgaaagtatgcagagcttattcttagatcacaatagaaattaactagaaattaataacagagtagtacctgaaagattactaaataattgaaaattaaacagcacacatatgagtaaactattaatcaaaatagaaatcacaatggaaattagaaaatattttggattggatgaaataaagaaactacataaagaatttgcggaatgcaagaaaagcagtacttagaggaaaacttataaacttgaatgcttaaaaatcaatgatatgtttctatcttgagaaactagaaaaatagaatcaaattaaactaaatgtaagaagaagaaagaatagagataacaaattaataaaaaaaacaggaaaaaagaactgagaaataataatgaaatcaaagagtggttctttgatgagatcagtaaggttaataaacctctagtcagactgatcaggaaaagtaacagaagacacaawaaaccagtctgaagcatgaaagaggaaacatcaaatgctctagattttaagaagataagagaatat

SEQ ID NO: 434283 - DNA, 578 bp, Homo sapiens
atgtatacagtatatgagatggtaaaggctatgggagaaaataaagcataaaagggggccaagaaacatacagggttgggggatgacaggttgtcatttgaaaaagagtgttcaaggaaggccctgctgagaaggtgacatttgagcaaaggcctgaagacaatgtgggaaagaaccatatgtatcaaggccattttttggatgaaaatcaataatttgcatgaaaacactgatgatctgtcgtctacctatgcagtcaacattaaggtaggagaaattcctagtacattatttgataaaattaggatataaagtatctcagcaattgaattatgaaccagatttgactcaataaactttagaatgaataaacacccaccctttgcttgggcaagaaagttaatattacgtttagtatggaaacacagtttaacaggaacatatttggaaaatacttaacaattgcaatctattctatttgagctagttgatactgagatatcacttccaaaaacagaaagaaaaaaggctaattggttattyggcttcattcacaaagatgatatccagtagtatca

SEQ ID NO: 434284 - DNA, 522 bp, Homo sapiens
tattctaatgtcttttatttccagtttgggattttactcgtatggccatattctgaattttaaaaattcaaaatggtaccatttccgaaatcatccatatgactttaaattcttcctgtccagttctcccatatactctctcatataaaaattagtgtttaatccaacctaatcttcaatttttcaacttgtctatgttattaataatgayttttactaagaaaagatacagtttttcattcagtattcacaggtaagtattttccccattgggaaaatgggaaaactttggcttcaggaggtaatttaagttgatcagcaatgcactccctgtgtcttaggtctgcctaagtgtaaagctcatattctcaatcaccacaaaatatgccttccatctttagtttcttccctagttatcctagattacacaattaatcagttcaccaacatagtctgtaacatcttcaaatttctctcttgactttttgaagaccccattctccactactctcaaattctaga

SEQ ID NO: 434285 - DNA, 603 bp, Homo sapiens
tattgttttcttgcagctcctcagaaattatttttaaatttagatttagttacctatttacttttttcaatattgtttaagccttcctaaatctctgagcatttatctgggatcatattcttctgcctgaacattccttttagtatttctaaatttcagatctgctaacaacaaattatttgcttttgttgtctgaatatgcttttaatttacattcatttttgaggtatagttttatgtagaattttattttaacaattctaagttgacaattrtgttattttctgccctttaaatttatcattcaatttttcactggctttcattgtttctatatagaagtcaataattggtgtttggaagataatatgtcttccctttctctctctgtcagattttagctttgttttttgtcttagttttcaacaattttaccatgaaggtgtggttttccaaccttgataaaagacatcaatccatagatttgggaagtactatggcccccaagacatgtaaatgcaaagaatatcaccccatcactcccacagagtatctagcttattttcaggaggtttattctgaatccctagatcaccattgcca

SEQ ID NO: 434286 - DNA, 506 bp, Homo sapiens
tatatttatcatctttctctgactacctcctaattatgtatctctcctcaaattgtgattcctccatgaagcactccttccatttcccttacgtttttcaaaatattattaatgcagtatcactatgtattaagtcacttttgcatacatgtctgttaaatgtcacctccactcagtgctactttaagataacactatttttttcatttatatatccatcaggaagcatcggatatatgccagtgagaactcagaaaagactttttgtatactctgggccactgagcattactagaccacactgcaaatgcagaattttatcccayttagtgaatgcgttctgcaccttgtgtgttttcttgcactggggacctatctttataccacttattatgtgttcttgtggaaagttctgctgtatcatggttgataaaagctgtgcaaataataatgctgaacctgccaaaaggaaacaaagagagagtttcaagttggatgttaaaatg

SEQ ID NO: 434287 - DNA, 610 bp, Homo sapiens
tctttaaatatgtgaattactgatctattacactttcacacttttcatgtgctttcctatgcttccactccctcccacttttttctgtgtatggttactgttggggctcaggaaatgataccmcaaagtaaaggcctcagaagcagccttagaggccaagttttcctctgaccttgtcctgccctcctgtctctcttccttcattctcccctgaggctagccatagatactagaattcctcttcaccagtgtcagtcatagaaaccagaaccccttccccccaaagccagccgtaaatctaaaaatatttctgtaactttcgcctacctttctttgtaagaactggccataaagaaattctctgaactacatggtttgatagaggttataaaacccctatttcagaaggggtcctgccctaaacccaggaggaaaaaaatgctccacagaaaggccaagaaaaatccagccttgctaagtttctgcactgtctattagcattagctcataccctttcgtcacatttctacacactgtccatgcttcattgaacctaaagcataaaaatggatagtttactttaggtctctgggtcttcaagtctgaatgc

SEQ ID NO: 434288 - DNA, 576 bp, Homo sapiens
aaatgataccacaaagtaaaggcctcagaagcagccttagaggccaagttttcctctgaccttgtcctgccctcctgtctctcttccttcattctcccctgaggctagccatagatactagaattcctcttcaccagtgtcagtcatagaaaccagaaccccttccccccaaagccagccgtaaatctaaaaatatttctgtaactttcgcctacytttctttgtaagaactggccataaagaaattctctgaactacatggtttgatagaggttataaaacccctatttcagaaggggtcctgccctaaacccaggaggaaaaaaatgctccacagaaaggccaagaaaaatccagccttgctaagtttctgcactgtctattagcattagctcataccctttcgtcacatttctacacactgtccatgcttcattgaacctaaagcataaaaatggatagtttactttaggtctctgggtcttcaagtctgaatgctctcatgtcatgtaaaactttgattaaataaatctatggtgctctttcttgttaaagtgttttggtatagcaacgtgt

SEQ ID NO: 434289 - DNA, 610 bp, Homo sapiens
tctttaaatatgtgaattactgatctattacactttcacacttttcatgtgctttcctatgcttccactccctcccacttttttctgtgtatggttactgttggggctcaggaaatgataccacaaagtaaaggcctcagaagcagccttagaggccaagttttcctctgaccttgtcctgccctcctgtctctcttccttcattctcccctgaggctagccatagatactagaattcctcttcaccagtgtcagtcatagaaaccagaaccccttccccccaaagccagccgtaaatctaaaaatatttctgtaactttcgcctacctttctttgtaagaactgrccataaagaaattctctgaactacatggtttgatagaggttataaaacccctatttcagaaggggtcctgccctaaacccaggaggaaaaaaatgctccacagaaaggccaagaaaaatccagccttgctaagtttctgcactgtctattagcattagctcataccctttcgtcacatttctacacactgtccatgcttcattgaacctaaagcataaaaatggatagtttactttaggtctctgggtcttcaagtctgaatgc

SEQ ID NO: 434290 - DNA, 610 bp, Homo sapiens
tctttaaatatgtgaattactgatctattacactttcacacttttcatgtgctttcctatgcttccactccctcccacttttttctgtgtatggttactgttggggctcaggaaatgataccacaaagtaaaggcctcagaagcagccttagaggccaagttttcctctgaccttgtcctgccctcctgtctctcttccttcattctcccctgaggctagccatagatactagaattcctcttcaccagtgtcagtcatagaaaccagaaccccttccccccaaagccagccgtaaatctaaaaatatttctgtaactttcgcctacctttctttgtaagaactggccataaagaaattctctgaactacatggtttgatagaggttataaaacccctatttcagaaggggtcctgccctaaacccaggaggaaaaaaatgctycacagaaaggccaagaaaaatccagccttgctaagtttctgcactgtctattagcattagctcataccctttcgtcacatttctacacactgtccatgcttcattgaacctaaagcataaaaatggatagtttactttaggtctctgggtcttcaagtctgaatgc

SEQ ID NO: 434291 - DNA, 574 bp, Homo sapiens
ccagccttgctaagtttctgcactgtctattagcattagctcataccctttcgtcacatttctacacactgtccatgcttcattgaacctaaagcataaaaatggatagtttactttaggtctctgggtcttcaagtctgaatgctctcatgtcatgtaaaactttgattaartaaatctatggtgctctttcttgttaaagtgttttggtatagcaacgtgtgccatgattcaaatctcattttgaattttaatccccataatcctcaggtgttaagggaagaacgtggtgggaggtaggtggatcatgggaacaatttccgccatgttgtttttgtgatagtgagtgagtttcacaagatctgatggttttataagtgtttgacagttcctccttcatgcactctctcttgcctgtcaccatgtaagatacgcttgcttccccttctgccatgattgtttcctgaggcctccccagccatgcagaagtgtgagtcaattaaacttttccttataaattacccagtctcgggcagttctttatagaagtgtgagaacagactaatataaccac

SEQ ID NO: 434292 - DNA, 610 bp, Homo sapiens
agtgttcagccaaagcctcaactctatgcatagttctgtatttctttatttctttgtrtatctcttttctggcactctgccttttaaattccagccgtgttgacttccccaaactctgatttctgtgtcttctgctacatgagacatgttctgcctgggctttgcatttttgcactgtagtctagaaagtgcttacaaacaggaagccagggcagtattaggactcacgcttctctctcctcttttagacgtgtggtgcttgtttgatgcctataaactgttgtttcatgtttagtccagttttctaatcattttctatgaagaaaattcagtaacagttactgcataatggctacaggtaaaaattaaaattatcttttcaaaaatatgtacttctaataatattgaaatgtttaatatctaagggggaataaaacagcttaagaaacaatatattcctcaactagcataagtaggactaacaatttatttgtatattcacaaaaaggagaatattctatatattttgatatcttttctatgaatatacacacttgcctcttttctatgaatatataaataaatatacatttattaatgcacatttata

SEQ ID NO: 434293 - DNA, 529 bp, Homo sapiens
gaagacaaagagctgttaatgwagatgactattgcctgcagagaaaagagaatataaaatggggtacagtaaggcagtctatctgcttgttatggtttataggatctcatgatgtttataatatttgggaaaataaaataaaatcaatgttgaaatccaagaagccaaatatagtttggtctctggccaatttatgtatttttcttctcctgcttatcttcatcatccttctgccttctatttgtagagactacttttcaagggacctgatttgggaaaattaattttcagagtccgaaaatttcaaagtcatttagagtaaagccctaggagacgtgtatatttaggattccctttactcattgctttcaatattggttatatgctgaaaacaaagtgttctataaatagtttagggagctcccctgaaattttgttaatacttagtgtaacagatttggaactcaataatattgagtgcagtgtgacagtattatgaaatttggaacaaagttttattcctatgttt

SEQ ID NO: 434294 - DNA, 647 bp, Homo sapiens
tgtaaaaggaagaagtcagatatggggaaatttcggaagaaccaacagtgtttgtcgatgttgcagatatggttgtgactttcaattttctagctcaaagtataaaccgcggcactatgacataagaaggaaaatagaatatccatggtttagaagaaaatataatttcaactgagtgtactgttttggatttatttttgrttttgttttcactcagccctacaagaccaggattggagacacttggtatgaaaaaatttacctaacaaaaactacagggtttgggtgaccacaagctcaatttcagcagtaatgatgcttggcttagtgagaattaacagagagatgaggtttatactgtacttagcatgaactgaactatattctaaggtatagtgttaaattctgggccccacatgaagtttggtatttattctctggaatatagtcagagaaagatgacaaaggcactaaggaagtgatttacagctgcatatgttgaacaggtaaagttcctgggactatttcacttatgtgttcccatagcactttgttcacagcacttttatagtataacatacctgttaattacattcatatctgccacttccagtatattatactattttcacttattgagcacctgc

SEQ ID NO: 434295 - DNA, 596 bp, Homo sapiens
atggccatccatacttctggtctctgtgacaggaatttctcactgtaaatcaataagttagcattctgatgtctgagcctgtcttgtgtatgtttcggcactcatgaatcaggctgtcagggtctgatcaccccttgatatgacaggagttaagtccttgggtcttccaagcaatcggccagagcatgctgrtttcctttggaacacattgctggatgaatatacacacatatacacatacacacatatacatttagataagtttatatatgtataaatatatatttaatttatttagaaatctgtcactactcaagtctgcattagtagtatgaaagctgccatagataaaatgtaaacaaaagaacatggctatgttccaataaaactttaaataggcagtgggcatatctggtccatggactatagtttgccaacccttggtcttggctattacagcctggagtaaggatgatcagaaactgaacttcgatgcttatgctcacaaatactaaataataaacataatgtaacaaagaatccaaaaatttaaggacgttggagaatatttatcatgtacagcctctcatttactc

SEQ ID NO: 434296 - DNA, 527 bp, Homo sapiens
gtttgtaaccaattactgtaagtgctaacttccttaacaatttccttgtatttcttctggctgtagagtggctcagcagaatccattttgctaaccaacaattagttctttcacactcagtgtggaagccagaaggacatgctcatggctckgcccattcttggagattccagcttcaaattcatctactgtgatgtatatgtgagcagtaacaataaggacagcacagccagcttgagatgtggctgtaatcatgtttttgataaagtctctgtgttctggggcatcaatgatagtcgtatctgatggtctcagatttccagaggggaatatcaatggtgacatcatactcaggctcagctttcagtttattcaagacccaggaatacttgaaggagccctttcccatgtcagcagcctcattctcaaaattttcagtggttcttttgtcaatgctactacatttatagatcagatggctggtagtggtggacttgcctgaacctggggtccaaggcaaccatgtg

SEQ ID NO: 434297 - DNA, 604 bp, Homo sapiens
ctactatggcaggtttgtaaccaattactgtaagtgctaacttccttaacaatttccttgtatttcttctggctgtagagtggctcagcagaatccattttgctaaccaacaattagttctttcacactcagtgtggaagccagaaggacatgctcatggctctgcccattcttggagattccagcttcaaattcatctactgtgatgtatatgtgagcagtaacaataaggacagcacagccagcttgagatgtggctgtaatcatgtttttgataaagtctctgtgttytggggcatcaatgatagtcgtatctgatggtctcagatttccagaggggaatatcaatggtgacatcatactcaggctcagctttcagtttattcaagacccaggaatacttgaaggagccctttcccatgtcagcagcctcattctcaaaattttcagtggttcttttgtcaatgctactacatttatagatcagatggctggtagtggtggacttgcctgaacctggggtccaaggcaaccatgtggatacaaattttattcactttccactgtggcttttaggggtggtttttacaatacctgtgttctg

SEQ ID NO: 434298 - DNA, 604 bp, Homo sapiens
ctactatggcaggtttgtaaccaattactgtaagtgctaacttccttaacaatttccttgtatttcttctggctgtagagtggctcagcagaatccattttgctaaccaacaattagttctttcacactcagtgtggaagccagaaggacatgctcatggctctgcccattcttggagattccagcttcaaattcatctactgtgatgtatatgtgagcagtaacaataaggacagcacagccagcttgagatgtggctgtaatcatgtttttgataaagtctctgtgttctggggcatyaatgatagtcgtatctgatggtctcagatttccagaggggaatatcaatggtgacatcatactcaggctcagctttcagtttattcaagacccaggaatacttgaaggagccctttcccatgtcagcagcctcattctcaaaattttcagtggttcttttgtcaatgctactacatttatagatcagatggctggtagtggtggacttgcctgaacctggggtccaaggcaaccatgtggatacaaattttattcactttccactgtggcttttaggggtggtttttacaatacctgtgttctg

SEQ ID NO: 434299 - DNA, 568 bp, Homo sapiens
tgttagtgtaaccacactaaatctggatgtttcgtctctgaactgggaataataatmctgtctgcttcatatgccagttgtaagaaatgaaattttttttaaaaaccccaccttaataattttaaatattattaaatttgatttttcaaaagcattcaatcaagtataaataaaaaattcttattaactttataaattttttccaacccaaaccagtaatctcaaaaaaggtggaattcaacatatattaaaagaatgttatttagctgtaaaggtagaaagattatagcaattaactttattagagtgtgcatattatgtgtttattcaataattgacttataactagagctactcttaacattgggtatacatagtttgtaacataagacacatcacacaaccttcttgcatttaggaacgctagatagatagcacttcagcattatgcttgagggccaatttaaaaggcaaaaatcaccaataaaaagcattaaaatgtgaaaaaggtgtcactaagtagaccaagaaaagcacacttgtgtacagtatgatggctgaaacatag

SEQ ID NO: 434300 - DNA, 568 bp, Homo sapiens
tgttagtgtaaccacactaaatctggatgtttcgtctctgaactgggaataataatcctgtctgcttcatatgccagttgtaagaaatgaaattttttttaaaaaccccaccttaataattttaawtattattaaatttgatttttcaaaagcattcaatcaagtataaataaaaaattcttattaactttataaattttttccaacccaaaccagtaatctcaaaaaaggtggaattcaacatatattaaaagaatgttatttagctgtaaaggtagaaagattatagcaattaactttattagagtgtgcatattatgtgtttattcaataattgacttataactagagctactcttaacattgggtatacatagtttgtaacataagacacatcacacaaccttcttgcatttaggaacgctagatagatagcacttcagcattatgcttgagggccaatttaaaaggcaaaaatcaccaataaaaagcattaaaatgtgaaaaaggtgtcactaagtagaccaagaaaagcacacttgtgtacagtatgatggctgaaacatag

SEQ ID NO: 434301 - DNA, 568 bp, Homo sapiens
tgttagtgtaaccacactaaatctggatgtttcgtctctgaactgggaataataatcctgtctgcttcatatgccagttgtaagaaatgaaattttttttaaaaaccccaccttaataattttaaatattattaaatttgatttttcaaaagcattcaatcaagtataaataaaaaattcttattaactttataaattttttmcaacccaaaccagtaatctcaaaaaaggtggaattcaacatatattaaaagaatgttatttagctgtaaaggtagaaagattatagcaattaactttattagagtgtgcatattatgtgtttattcaataattgacttataactagagctactcttaacattgggtatacatagtttgtaacataagacacatcacacaaccttcttgcatttaggaacgctagatagatagcacttcagcattatgcttgagggccaatttaaaaggcaaaaatcaccaataaaaagcattaaaatgtgaaaaaggtgtcactaagtagaccaagaaaagcacacttgtgtacagtatgatggctgaaacatag

SEQ ID NO: 434302 - DNA, 596 bp, Homo sapiens
ttggctagtcttgttcctttgccttttcatataaatatttgaattaacacactgatatttacaaaacaaaaaccctgttggcaatttgattgaatttacattgaatctgtagataactttgggaagaattggtatgttaatgatactgtgtcttctgattcatgaacatagtacagacataccttagagatattgcaggttcagttccagaccactacaataaaccgaayattgcaatgaaataattcacacaaatcttttgatttcccagtgcatataaaagttatgttcgtactataccgtagcctgttaagtgtgtaatagtattatgcttaaaacaatatgcatgccttaatttaaaaatattttattgcaaaaaaatactaacaatcatctgagtctttagctactcataatctttttgttggtagagggccttgccttggtgttgatggctgctaactgatgaaaatggtagttgctgaaagtaggagtgcctgtggcaattttaaaaaataagacaaccatgaagggtgctgcatcagttaactattccttcccccagatttttctgtagcatgtgttgctgcttgaca

SEQ ID NO: 434303 - DNA, 580 bp, Homo sapiens
ctactcaatgctgaactaaactccaggggtttaatatgcacttgaactaggaaacataccagagaatgttggtttaggcccaagagacatcttgtaggttaataaatattccctcttgtttgaagatactctcctaaatttaaatgttgagctacgtaaaattatatttttatattccccttggcatcaacacatataaacatatacttctattttataacttattcttccacatgtattatgatttataagcactgacttcaggaaataaacaactatgctcacatttattttctaattgctggyttatattttaaacctctgcttctcctccctgccacagtgccttaacaaattcatgtggcattgcttattccccagggtgcctgtctctgcttctctagaagatggtaggctaccaacatggggtaaataagcctcaaaaatgttgtcggtgacttggccaaatccagggagttgtttaatggtgaagcaggaatgaaaacccagagattgaggaggctttgataactgagttattctgccatactcaagaagttcttcctctctagttttccta

SEQ ID NO: 434304 - DNA, 580 bp, Homo sapiens
ctactcaatgctgaactaaactccaggggtttaatatgcacttgaactaggaaacataccagagaatgttggtttaggcccaagagacatcttgtaggttaataaatattccctcttgtttgaagatactctcctaaatttaaatgttgagctacgtaaaattatatttttatattccccttggcatcaacacatataaacatatacttctattttataacttattcttccacatgtattatgatttataagcactgacttcaggaaataaacaactatgctcacatttattttctaattgctggcttatattttaaacctctgcttctcctccctgccacagtgccttaacaaattcatgtggcattgcttattccccagggtgcctgtctctgcttctctagaagatggtaggctaccaacatggggtaaataagcctcaaaaatgttgtcggtgacttggccaaakccagggagttgtttaatggtgaagcaggaatgaaaacccagagattgaggaggctttgataactgagttattctgccatactcaagaagttcttcctctctagttttccta

SEQ ID NO: 434305 - DNA, 490 bp, Homo sapiens
ttatttcttaaagttcaaagtcattacagtaattcctcagcaggggatccattcatcattctttgttctgcagggctaattaccatcaacactaatgggaattctgtatttaactcaagaagcaaacatggtactagtttctaaaacagaacacaagaattacttatctgcatgcaaatgttctcccaggttttgatgtgagagagaattcagtgggcattagaaaaacacttacataaattgtttcattgcttctgtagttatttatgtttttctaaaatttaagaatgcataaaatgtaagataaygtttactgagaaaagaacaacaatcatgtgggtgttttttatgtgtgaggcagcatgcttagcattttgcttatttactttatatgttatttatttattctcacaagaatctttaagttgttagcaccattttgaaggtatgaaaattaagaatagaaaggatcagtagttttccaacactt

SEQ ID NO: 434306 - DNA, 601 bp, Homo sapiens
tctggtttcattggctatgacaaggcatatatacgataaacccggaataagaacatggggagcaacaatcagagtagtttctraatattgtcctgaatctattttgacacatactaaatcctagataataacctaattgatacttgatcagaaaccttttcataatacatcatgttatattgtcgatctttagaagtgattgaataattcaaaaccccttctttgctgcttatccctaaccatcagtcctgcagaagggccagtcttagcaaccatgtttgtactattggtttcaactgttctgacccaggtgtatcaattagaattaaatttagctgtgagttgttgaaaagctgaataacagtggcatacaaatgttaatgtcactctcacataaattaagtctgttggtaagcggactaggagtcgtttggcagctgctatcaaggacaaagacttcaagtttgttatttccccatccttgaaatagacttttacttcatgatttaagatggctgcctaagctgtagccatcaagcttacatttcagttagcagaaaggagaagagagtaaaaaaggaacacctcctttttggtgtaa

SEQ ID NO: 434307 - DNA, 601 bp, Homo sapiens
tctggtttcattggctatgacaaggcatatatacgataaacccggaataagaacatggggagcaacaatcagagtagtttctaaatattgycctgaatctattttgacacatactaaatcctagataataacctaattgatacttgatcagaaaccttttcataatacatcatgttatattgtcgatctttagaagtgattgaataattcaaaaccccttctttgctgcttatccctaaccatcagtcctgcagaagggccagtcttagcaaccatgtttgtactattggtttcaactgttctgacccaggtgtatcaattagaattaaatttagctgtgagttgttgaaaagctgaataacagtggcatacaaatgttaatgtcactctcacataaattaagtctgttggtaagcggactaggagtcgtttggcagctgctatcaaggacaaagacttcaagtttgttatttccccatccttgaaatagacttttacttcatgatttaagatggctgcctaagctgtagccatcaagcttacatttcagttagcagaaaggagaagagagtaaaaaaggaacacctcctttttggtgtaa

SEQ ID NO: 434308 - DNA, 601 bp, Homo sapiens
tctggtttcattggctatgacaaggcatatatacgataaacccggaataagaacatggggagcaacaatcagagtagtttctaaatattgtcctgaatctattttgacacatactaaatcctagataataacctaattgatacttgatcagaaaccttttcataatacatcatgttatattgtcgatctttagaagtgattgaataattcaaaaccccttctttgctgcttatccctaaccatcagtcctgcagaagggccagtcttagcaaccatgtttgtactattggtttcaactgttctgacccaggtgtatcaattagaattaaatttagctgtgagttgttgaaaagctgaataacagtggcatacaaatgttaatgtcactstcacataaattaagtctgttggtaagcggactaggagtcgtttggcagctgctatcaaggacaaagacttcaagtttgttatttccccatccttgaaatagacttttacttcatgatttaagatggctgcctaagctgtagccatcaagcttacatttcagttagcagaaaggagaagagagtaaaaaaggaacacctcctttttggtgtaa

SEQ ID NO: 434309 - DNA, 601 bp, Homo sapiens
tctggtttcattggctatgacaaggcatatatacgataaacccggaataagaacatggggagcaacaatcagagtagtttctaaatattgtcctgaatctattttgacacatactaaatcctagataataacctaattgatacttgatcagaaaccttttcataatacatcatgttatattgtcgatctttagaagtgattgaataattcaaaaccccttctttgctgcttatccctaaccatcagtcctgcagaagggccagtcttagcaaccatgtttgtactattggtttcaactgttctgacccaggtgtatcaattagaattaaatttagctgtgagttgttgaaaagctgaataacagtggcatacaaatgttaatgtcactctcacataaattaagtctgttggtaagcggactargagtcgtttggcagctgctatcaaggacaaagacttcaagtttgttatttccccatccttgaaatagacttttacttcatgatttaagatggctgcctaagctgtagccatcaagcttacatttcagttagcagaaaggagaagagagtaaaaaaggaacacctcctttttggtgtaa

SEQ ID NO: 434310 - DNA, 603 bp, Homo sapiens
aatctagcatgctcaccacttgggtcttttaatcccatggcaaatctgcatttctatttcatttagtgtgggctatcagtttttccaagctttcaacagccattctagaacatactagtgttgtctcctagggtccctgccagggcattaaatcctgtgtcctgggaaaacactcttatattgataaactctcttttccccaattttatattctatccctttgattcarcaccatcagaatccagtcccacataaactctcctggcttgtggattggtgctatcacctagcagaggatagccttgggcaagccagctcccttcatgaaaggacaattttcacatccactgattattcttatctaaaataattattattattgtggctgctcaatagcaattctctaattcctttattactttagtttatgtatctctaagaccccaaaataacaaaacagagaaaatgtagtgacaggtaatatttgaaaaaaaatataaattatcctcaaatgaaaaacattacctctccaggaatcaaattgacacaaattaagacaatacatatttcattggaaaaaaattactgtttttgaaaataaca

SEQ ID NO: 434311 - DNA, 478 bp, Homo sapiens
ttccccaattttatattctatccctttgattcagcrccatcagaatccagtcccacataaactctcctggcttgtggattggtgctatcacctagcagaggatagccttgggcaagccagctcccttcatgaaaggacaattttcacatccactgattattcttatctaaaataattattattattgtggctgctcaatagcaattctctaattcctttattactttagtttatgtatctctaagaccccaaaataacaaaacagagaaaatgtagtgacaggtaatatttgaaaaaaaatataaattatcctcaaatgaaaaacattacctctccaggaatcaaattgacacaaattaagacaatacatatttcattggaaaaaaattactgtttttgaaaataacatactcagttttggcaaggatgtagtgaaaatgtgaatttttatttccttgtgaagagagcgtaagtttgc

SEQ ID NO: 434312 - DNA, 601 bp, Homo sapiens
actacaaatttcccaatgagtctaaaattggtctaggaaattttatcctatcaaaaagaactctgttctgccaatgatatgatttggtttatcagtaaagacattagtttgggatctcaggaaaaaagaagtatcataatgtgaagggttaataatttgagaaaataaattgcgtgctctttcttctcctctatagccattgcctatcctccctggagaagtgtggccaccatttgtttcgtgaggttaattgtcaaataaaaacaaatcacaacagaaaattatttttatgcttaaaaacaatgggtccagatgtcaggggaaaaaatgggaaatagaagcagaagcagtctgaccctaagtttctagygttggctctgcttctttcctagtacaggaaatcgttattttattcctgctctatgataaacataaagtacagtgctcagcaaactagatattcaatcaatgaataaacaaatctaagaccttggttaagtcatttaccctatctggaaccattttaaaattttgaaataatattctcattttaatttgatatgaagatttaaaatgtgctctatcaatgttaagtgaagag

SEQ ID NO: 434313 - DNA, 601 bp, Homo sapiens
actacaaatttcccaatgagtctaaaattggtctaggaaattttatcctatcaaaaagaactctgttctgccaatgatatgatttggtttatcagtaaagacattagtttgggatctcaggaaaaaagaagtatcataatgtgaagggttaataatttgagaaaataaattgcgtgctctttcttctcctctatagccattgcctatcctccctggagaagtgtggccaccatttgtttcgtgaggttaattgtcaaataaaaacaaatcacaacagaaaattatttttatgcttaaaaacaatgggtccagatgtcaggggaaaaaatgggaaatagaagcagaagcagtctgaccctaagtttctagtgttggctctgcttctttcctagtacaggaaatcgttattttattcctgctctatgataaacataaagtacagtgctcagcaaactagatrttcaatcaatgaataaacaaatctaagaccttggttaagtcatttaccctatctggaaccattttaaaattttgaaataatattctcattttaatttgatatgaagatttaaaatgtgctctatcaatgttaagtgaagag

SEQ ID NO: 434314 - DNA, 627 bp, Homo sapiens
tattcatatttatgtatgtgatttaacagcaggataacatttctttatccctttatgtgcataacctattctcttcctgaggggccagtccaagttctcagtaactgctagattgatcccaataaataggrtggtgggattttttgttttgttttttactgttacaaacaaggttgaaaatgacatttttgtatatatattcttgaatgcatgtaagagagtttttctaggagtcaaattgctagaagctatggaatgatcatcttcattctcatgcattgccaaattcctctctaaaatggtaacaatttatactaccatcagcaataaataagaattgctgtttcctcacatcaccaccaacacttgatgtaaacccactgattaatttttgtcagtttaatggttgtgaagttatatctcattgatattttaattttgtctgactactaatactattgagcatatatttttatattttattgactatttacactcctatgaattgcttgttcatatcctttgctaatttcccttctgactttatgactttatgtcttcttattcttgttggttttcaagacaaaggttgcaaaatatctttctatgtcagtcttttcatcttac

SEQ ID NO: 434315 - DNA, 550 bp, Homo sapiens
tgggcccaacctcatccaggagtccataaaaggatagaacttttccaagctgaggtcagaattagagggatatataattacagcagaatggtgaaaaccatgcaaggtggttggctttgaaaatggaggaaggaagcatgagccaggaatgctggctgcttctagaagctggaaaaggaaaggaaatagctccccaagagactctagaaatgaatatagcccttctgacaccttgattttagcccagtaagaattgtattgaaattataatctmcaaaatgctaacataatatatttgcattgttgtaagccattaattttgtagcaatttgttataccatccatagaaaatgaatataaataataagaattatctcctactgtttttcttttctaaccttcctggttatttctggacctttattcttttatttgaactttagaatgaatttatcaaatcatataaaaaatgggattttgattagaattgtattaaattccaatcagtttggtagaagtggctgtttttatagtagcaactcttcctttc

SEQ ID NO: 434316 - DNA, 714 bp, Homo sapiens
ctgacccctccctccaataagacagaattttttccttactgactgcctttgaactgggacattggcttttttcttgccttcagacactaacttaaatactggctcttcctgggtctcaaaccttctagcctttagtctggaactaaaccattggctctcctacatccccagtcagctgattcaccctgcagatcttatgacttgcccaccttaataatcacatgaactgattccttatgataaatgtctttatatattacattttcaggtcatcttttctaatttttctgcatataagtttttcatatattttaacagatttataggttttattggtattataaacagtacctattttataattttaatttatagtttgatgcttgagtatagattccacataaataaattttgaatatttattttcagaaatgtaactgaactctgatatwgtttctaatgctttatgttctcttggacagtctatctagatgaccatattagctgatattaaccattttgtttctactttctaatctttatgtactcccttctcaatctactaaagtgttataacatgtatattgtgttatagcgtgtgtatttgtgaaagtaagctaaatgctataaaaaatagatgaaagctttcagtggcttagtaaaactgaattatcaattatgtagttcaacatatattggcaggagaactctgct

SEQ ID NO: 434317 - DNA, 674 bp, Homo sapiens
atgagatgtggagaggacacattcaaaccatatcagtcccagacttaagcatcttcctttatgtgactcggccatcttctaggactttctcctcctcagcataaagtcacatggatagagaaagagagagcctggagagttgtatggaagatttcgttatggcccaggtgttgaagtgatgtaaatcacttttccctcattgtattaactagatctcagagtcacctgattctaccaaactgcaaaggagactgagagatataggctaggtacccatgaagaaagagargaaggattggtaaatacatagcagtcatttgtggtatcccagttttctttagatagctttttagaatccgaatttctgagccaaagcatatgcacttttaaagagtccatgttatttttatactttatttttgcatacaatgtcatatgggaatattggtacaatttccaattgtcttcaacaatagtaacaataagcaattaagacttatttaaaaattaatcaagctctgtccaaggctggtatcctctatgaagttatagtaacagtctaaatttcttctatctaaaaactgattcccaacagactacatcattccagggctgttaagtaggtcatctctggggggaaaaaacaactacagatgcaccccattccacaggaa

SEQ ID NO: 434318 - DNA, 574 bp, Homo sapiens
cctcattgtattaactagatctcagagtcacctgattctaccaaactgcaaaggagactgagagatataggctaggtacccatgaagaaagagaggaaggattggtaaatacatagcagtcatttgtggtatcccagttttctttagatagctttttagaatccgaatttctgagccaaagcatatgcacttttaaagagtccatgttatttttatactttatttttgcatacaatgtcatatgggaatattggtacaatttccaattgtcktcaacaatagtaacaataagcaattaagacttatttaaaaattaatcaagctctgtccaaggctggtatcctctatgaagttatagtaacagtctaaatttcttctatctaaaaactgattcccaacagactacatcattccagggctgttaagtaggtcatctctggggggaaaaaacaactacagatgcaccccattccacaggaaatatctttatcttcattaaatcagggtaacaaaaagaatgacaggaagaaaattcatgaaagaacacccaaacccatgagggagggaagagagg

SEQ ID NO: 434319 - DNA, 466 bp, Homo sapiens
gtcatttgtggtatcccagttttctttagatagctttttagaatccgaatttctgagccaaagcatatgcacttttaaagagtccatgttatttttatactttatttttgcatacaatgtcatatgggaatattggtacaatttccaattgtcttcaacaatagtaacaataagcaattaagacttatttaaaaattaatcaagctctgtccaaggctggtatcctctatgaagttatagtaacagtctaaatttcttctatctaaaaastgattcccaacagactacatcattccagggctgttaagtaggtcatctctggggggaaaaaacaactacagatgcaccccattccacaggaaatatctttatcttcattaaatcagggtaacaaaaagaatgacaggaagaaaattcatgaaagaacacccaaacccatgagggagggaagagaggaagtgggggt

SEQ ID NO: 434320 - DNA, 583 bp, Homo sapiens
atgagcaacagtaggtgcaggaagacagtaaagtactatctccaaactaattaggaaaaataaccatcagcctagaattctatacctaaactatcatataagagtgagggcaaaatattgactagatattaataagatataaagacaaagagtgtttaatacctacaaactctcactgaaaattaccaaaacatacacttcacaaaggaaaaatggaaacctaaaaaaaagaagtaggattgaaaaagcactggtgaccaaataagactagtccttgtcttgttgaggagatggtaagagaaactggtaaaattaatcacttaggaaaaatatgacattaaaactgttaaaatgttaaccaattatagaaaagaaatagaatatgtaacyatcaaactagaaaagaaaaaagtggtaatcaaaagaaatgctactaataaaacagaaagcaggaaaaaaaaaagaaaaagaaaaagggctataagtagagaacattaaaaaaatggtgatactaaaaagataagtagaaaacttcagtaatcacaatagatataaattaaatacactgactcaatatgaggca

SEQ ID NO: 434321 - DNA, 590 bp, Homo sapiens
atattcattcttccaatccataatcatggattttttatatttttttgtgtcatctattatttctttcaacagtgctttgtagagatctttcacctccttgtttaaatgtattcctagggtcttttttttttgtagctaatgtaattaagatgagttcttgatttagctctcagcttgcatagtattmgtgtatagaaatgctactaatttttttttacatttattttgtagcttaaaacttagtgaatttatttattgaatttaggagacagcatctttagggttttctaggtataagattatgtcatcagccaatagagataacttgagtttttccttcctaattttaatgccttttatttatttctcttgcctgatttctctgactgggacttctagtactatgttgcataggcatggagaagtgagcatccttgtcttattctagttcttaccttttcatatttactatgatgctggctgtgggtttgtcatatatagcttttattttatttaggtatatttcttctatgcctagtttattgagggtttttatcatgaagggatgctggattttatcaaattttttt

SEQ ID NO: 434322 - DNA, 421 bp, Homo sapiens
ggagattatcaacaataataaaatagcacaattataacaatatattaaaataaaagttacgtgtatgtgtgcactttccctctcaaatatgaaatattttattgtactacactcacctattttcagaccacggttgactatgtttgattatgagtgactgaaaccatgaaagtaaaactgtggataaggggggaactactgtacttttatttttattcctgcatttggartaaggggaatgaggatctcatatcagttccctcctttttattttctgaaagcatttgtgtgggactggtattatttactcctgaagtatttgatagtgtggtattgtttttactagataaacactagtataatgaaacatatcctatataaatatatgaatgaaaaatattgttccaaccataaaacactg

SEQ ID NO: 434323 - DNA, 584 bp, Homo sapiens
tgaaaaaaagaaagaaagaaaatctgctcgctggcaagaagataacagagaacttgtctataggtggacaaagtctcccttaagactttayaaccacagaactgaaagtcatgtgtactttggtctcaaatttttaccatctttgtattgtgggaaaccgtaagctgaaacaaatgactccaaatttgttctcaggccaatattatccctagatttcctggaagaaaccaacacaaaatgctgtcagttcaggtgtactgagtctcatagttaaagccccactaaagatcagttcacagttccaaatgctacaatcaaagagtacacaattcattatgagtgctacaaacagctgattagataatataatatgatagaacctataagactgattatttttaatgtttcaaaaatttttcagacttacagaaaagttgcaaaaataatgaaaagaagtcctagatacctttaatctggattttcccaatgtttaacataagcattctattatagatatacagatatttttctgaaccttttgagagtaagttacagatgtaatgcctattaactactaaatactt

SEQ ID NO: 434324 - DNA, 584 bp, Homo sapiens
tgaaaaaaagaaagaaagaaaatctgctcgctggcaagaagataacagagaacttgtctataggtggacaaagtctcccttaagactttataaccacagaactgaaagtcatgtgtactttggtctcaaatttttaccatctttgtattgtgggaaaccgtaagctgaaacaaatgactccaaatttgttctcaggccaatattatccctagatttcctggaagaaaccaacacaaaatgctgtcagttcaggtgtactgagtctcatagttaaagccccactaaagatcagttcacagttccaaatgctacaatcaaagagtacacarttcattatgagtgctacaaacagctgattagataatataatatgatagaacctataagactgattatttttaatgtttcaaaaatttttcagacttacagaaaagttgcaaaaataatgaaaagaagtcctagatacctttaatctggattttcccaatgtttaacataagcattctattatagatatacagatatttttctgaaccttttgagagtaagttacagatgtaatgcctattaactactaaatactt

SEQ ID NO: 434325 - DNA, 527 bp, Homo sapiens
ttcttcctccccctgctcccctgacaggccccaatgtatgtttaaaatgttaagtaacacacaattctaactgagttattttaagtgatacttacataaggatagaaaattcaagcagmatggaaaagcacaaaataaaaagtaaaagcctacccatcactctcaataattccaaatgacacctctcttaactctggaaatagatatctatttggttaatattgcctgatacatacatggagatacgggaaggatgtttgaatggatggatggaaaaatatatagatagaataaaaaatgttatcttataaaaataggatcacactcttaaattgttcaagctggatatggaatctctaatttaaaatttaacacctttttgttatagaaagacaaaagctgagtgagttgattagctattaaaaactttataggtacccttgtagttttaaagagttcattttaaattaaacactatggagttctagagttagtgatggttctcagaatttatacaagcttaagaa

SEQ ID NO: 434326 - DNA, 633 bp, Homo sapiens
ttcattttaaattaaacactatggagttctagagttagtgatggttctcagaatttatacaagcttaagaaaataaatagaatcaagaagggtttagataaacttatggatcatggatctatagcagtgaataaaggaaattggggatatttattgatttatttacttctgagataaaataacttgccattatggaaaatatacattggttccattgcaaatttaaataggaatttaatagggctcaaacaataggacatttattatgtcaaaactatacagagatattaaacttctcaatgcattttattctcaagtaaaaartcatgcaagttttgcagtgatcttgagaaactctgtacaataattaaatgagcactgaaataagagtcagctgacctggcttccagttttagctaaacagataactccctgaaaatccctgaattcgtccatgaagctttctcagcagaacttcatcttcaattagtaatgagactgaggcacttctaagaccctgctagcccttacagaagaaatcatacctctcacctttcttattcctaagaatggcttcatggttaacaggcccagattataaagcatggttcaaaatcccagtcgcattttcaa

SEQ ID NO: 434327 - DNA, 633 bp, Homo sapiens
ttcattttaaattaaacactatggagttctagagttagtgatggttctcagaatttatacaagcttaagaaaataaatagaatcaagaagggtttagataaacttatggatcatggatctatagcagtgaataaaggaaattggggatatttattgatttatttacttctgagataaaataacttgccattatggaaaatatacattggttccattgcaaatttaaataggaatttaatagggctcaaacaataggacatttattatgtcaaaactatacagagatattaaacttctcaatgcattttattctcaagtaaaaagtcatgcaagttttgcagtgatcttgagaaactctgtacaataattaaatgagcactgaaataagagtcagctgacctggcttccagttttwgctaaacagataactccctgaaaatccctgaattcgtccatgaagctttctcagcagaacttcatcttcaattagtaatgagactgaggcacttctaagaccctgctagcccttacagaagaaatcatacctctcacctttcttattcctaagaatggcttcatggttaacaggcccagattataaagcatggttcaaaatcccagtcgcattttcaa

SEQ ID NO: 434328 - DNA, 578 bp, Homo sapiens
atccactgggtatgaaatgttttctatttgctgttaataattcccagagagaataatctgcrtctgcataaaattaataacaatacctacactttcagcaagttttggtggtctaaagaatgtttttaaaggatgtgtgcaattcttggatactcctcctgtctagaggtggagtctatgccttctcctattcaacctgagtaggacttagtacttgatgacttccttaatgaatacaatgaaacagaggtgatgctgtgtgatttcagaggttcagttaggaaaggatatgtatcatccgcaagttttcttgggataataacagcttgtgtttaaaccaccatgtgtgcattctggctatcccaacattgccttgtagagatcctacatggagggatgatatgtggagagagacaaacagccccagctcctccagtccctggatgtttgagccttttcagctcaggcaccagacaggtaactaaggaagctttaaaggtgaccctagccctagccactgtccagcttaaactctatgagacaccctgaacaaaacctgcctagctcggtcttatcaa

SEQ ID NO: 434329 - DNA, 578 bp, Homo sapiens
atccactgggtatgaaatgttttctatttgctgttaataattcccagagagaataatctgcgtctgcataaaattaataacaatacctacactttcagcaagttttggtggtctaaagaatgtttttaaaggatgtgtgcaattcttggatactcctcctgtctagaggtggagtctatgccttctcctattcaacctgagtaggacttagtacttgatgacttccttaatgaatacaatgaaacagaggtgatgctgtgtgatttcagaggttcagttaggaaaggatatgtatcatccgcaagttttcttgggataataacagcttgtgtttaaaccaccatgtgtgcrttctggctatcccaacattgccttgtagagatcctacatggagggatgatatgtggagagagacaaacagccccagctcctccagtccctggatgtttgagccttttcagctcaggcaccagacaggtaactaaggaagctttaaaggtgaccctagccctagccactgtccagcttaaactctatgagacaccctgaacaaaacctgcctagctcggtcttatcaa

SEQ ID NO: 434330 - DNA, 578 bp, Homo sapiens
atccactgggtatgaaatgttttctatttgctgttaataattcccagagagaataatctgcgtctgcataaaattaataacaatacctacactttcagcaagttttggtggtctaaagaatgtttttaaaggatgtgtgcaattcttggatactcctcctgtctagaggtggagtctatgccttctcctattcaacctgagtaggacttagtacttgatgacttccttaatgaatacaatgaaacagaggtgatgctgtgtgatttcagaggttcagttaggaaaggatatgtatcatccgcaagttttcttgggataataacagcttgtgtttaaaccaccatgtgtgcattctggctatcccaacattgccttgtagagatcctacatggagggatgayatgtggagagagacaaacagccccagctcctccagtccctggatgtttgagccttttcagctcaggcaccagacaggtaactaaggaagctttaaaggtgaccctagccctagccactgtccagcttaaactctatgagacaccctgaacaaaacctgcctagctcggtcttatcaa

SEQ ID NO: 434331 - DNA, 573 bp, Homo sapiens
attttttatgctatggactcttcgtcccctctccccccagattcatatgttgaaacctaatcttcaatgtgatggtatttggaagtgagacattttggaggtaagtaaaacatgaagatgggaccctcatgaatggaattagtgtccttayaagggtatgaaattaccctctcctctatgtgatgatatgagaagacagccatctgtaaaccagaagaaagccttcaccaagaacccaacaatgctggcaacttgatcttggatttcaagcccctagaactgtgggaaacaaatgtttgcttaagcgcacaccttataatattttgttacagcagccgaagctaaaacactttacttaaaacataacaatataaaaataaataatcacaccttatgacttcctttgctgaataattggatgaagcaaataacgaaaaagcaaaacaaaaccagccacaataaagaggataaaaggcagtttggattctgctgaagacagaatgtgtgatatgaaaaatagatctgagaaattacccataatacagtgaaaagaaatcttatacattcaatttc

SEQ ID NO: 434332 - DNA, 606 bp, Homo sapiens
tgagtgtgaaaatgtaacacgaatgttaggaaaataccagcaaagagaggatttctccttatctaatcatgcgctctctctccattcatcccagagtaatactactatttatttatcacattcagatcttttccattggctttctgtttcggcagatgaaaataactcttaatacctcttcccaacctagtctttctatatcctccccatatgttcacattacaagttttaattagtgattacagtttacattattttgactacataaatgatacctacttcagagtcaagtggtatacagtggataatggatacacattgtcttttgtataattttgtctttgtagtcctccagtatggactagctactctctaggcctgatgccccatggtcgtcaggtactcccttttgtagctgtctcatagtagataaatattctttgggttctgtagctttgtttcacttagtcttcttcttrttttgctgcataatctcacagcttcctatgaagttgtgcatgagatgtaaatttccactttgcacttctgaacattttatttattctatgcccacactttactaatatgtggcttaggtacagaatt

SEQ ID NO: 434333 - DNA, 590 bp, Homo sapiens
tgtcttgtgaactgtgcttatgaccaagtgaaacttggtccacctgcgaagagttctggggcatggcagggtaaatagagtgagaccagtgggccaaggacaaccctggaaaacacttaccttaaaggtggtcaggggaagagaagcccacaaaggatatagaatagaagtaatcaagatagaagtctacaaggaagtgcaggatcacagaaggcaaggagatggagaaagtartcagaagagagccaacctttggggaggtttaggaaggagaagctggatttggacataaatatatttttaagagcagagaaagacaaaatttttccattgattttgatttgagacgttgcccccatggtgtcaggaaaaggacaagcatgcaagggagaggatgggttggaaccaggcagggcccatgttctatgccagggattggcacatttttttctgtaaacatccagacaataacaagttgaggcttcacaccacagcagcctctgttgcaactaatcaactctgctactggagtgcaaaggcagccacatagaaaatgagcatagctatatttcagtaagctatacttacaa

SEQ ID NO: 434334 - DNA, 590 bp, Homo sapiens
tgtcttgtgaactgtgcttatgaccaagtgaaacttggtccacctgcgaagagttctggggcatggcagggtaaatagagtgagaccagtgggccaaggacaaccctggaaaacacttaccttaaaggtggtcaggggaagagaagcccacaaaggatatagaatagaagtaatcaagatagaagtctacaaggaagtgcaggatcacagaaggcaaggagatggagaaagtagtcagaagagagccaacctttggggaggtttaggaaggagaagctggatttggacataaatatatttttaagagcagagaaagacaaaatttttccattgattttgatttgagacgttgcccccatggtgtcaggaaaaggacaagcatgcaagggagaggatgggttggarccaggcagggcccatgttctatgccagggattggcacatttttttctgtaaacatccagacaataacaagttgaggcttcacaccacagcagcctctgttgcaactaatcaactctgctactggagtgcaaaggcagccacatagaaaatgagcatagctatatttcagtaagctatacttacaa

SEQ ID NO: 434335 - DNA, 610 bp, Homo sapiens
tatgttgcttatgaaaaagatggtttttcgctttttttaccttaagattaaaaaaaaaactattatgacaaattgaagtgtttaagtgaatgaatacaaaaatatgttttagtcaaatgcttacccaatatgtcttacaagtcattatattatatattgcactatatgcaaggagaatataaagctaaaagagaataaatatgtttcctatgattataggtcactaagtgcaagaaacaggaattgtcccgagatgtgtctgcctctacaattcttccacawtatctcacattgcccatttcattgacaatggataacccaaaatgatcttttaactcttcaatcatgctacccacctccctgctttgctcatgctggtctctgtgtctggaatgttcgtctctgttctggcagcatgtggtgcatcttcttatcctagagaggcctttcctggccacacaatcaatcttggtccttttgccccagtattctctatcataatatcttgtttgttttcttcatataacattccgctgtttgtagttttatagtttgtatgtggtctgtctctcccattggactaaaaactccacagagaagagcccactaa

SEQ ID NO: 434336 - DNA, 610 bp, Homo sapiens
tatgttgcttatgaaaaagatggtttttcgctttttttaccttaagattaaaaaaaaaactattatgacaaattgaagtgtttaagtgaatgaatacaaaaatatgttttagtcaaatgcttacccaatatgtcttacaagtcattatattatatattgcactatatgcaaggagaatataaagctaaaagagaataaatatgtttcctatgattataggtcactaagtgcaagaaacaggaattgtcccgagatgtgtctgcctctacaattcttccacaatatctcacattgcccatttcattgacaatggataacccaaaatgatcttttaactcttcaatcatgctacccacctccctgctttgctcatgctggtctctgtgtctggaatgttcgtctctgttctggcagcatgtggtgcatcttcttatcctagagaggcctttcctggccacacawtcaatcttggtccttttgccccagtattctctatcataatatcttgtttgttttcttcatataacattccgctgtttgtagttttatagtttgtatgtggtctgtctctcccattggactaaaaactccacagagaagagcccactaa

SEQ ID NO: 434337 - DNA, 574 bp, Homo sapiens
aagtaaaaccacaattcctctcttttgttagttaccttaataaaatcgtttttccctcttctgtaagatttaaataatcctaccatcaatatattgcagttactgaaaatctttactccttccataattatttcttttttgttctgtaacatctattgttatcttctcagggagggggcactttcttggttaaacccaatagtgagtttaaaattcccctttcaacatttcctgctctcaggattatctctttgctcttcatttaagttccattgcttatatgttctcaacaatctattgacaattttatatcactgtatggatgscagtcagtgtctgattcacactggctctaactttctgaataattctgaaatttcttcttcagttttgatcagagctgtttggaaatgttgacataagtttttgcacaggcacatgtgcataggcacattcaacaatagcctgaaattcaacaaatatttgttgtccactgtggcaggctttatgacagatgctgagtgaatgctaaataatgtataagaagtcgtttttgcagtgagggagcccatac

SEQ ID NO: 434338 - DNA, 542 bp, Homo sapiens
tgtttggggcacagaaaaaagggctcgtaaaaatctagaggctcaagtgcattcactcagatgtcctcattggagttctcaggaagcttgcgggagctgtgagttcatgttttttgttgttgttgtktttgtttgtttttttttaaattttactactctcagaaacaaatcctggtagtgatttttcagaactatctctccactaactataggaatgtgggtctctttaaatgtagccatatgtttttggctttcatagtatactgtaggctgatagctggcttacccaaacctgttgtttacttccttcggaggtttgatggcaaaaacacccccttcacagctttaaaaatgctatttctgaaatgattaaaacaagacatttccttctatctgtatctcatctaccacaggtgagagtcttaataattctcagtaatcacatgccagacatcgtcaccaccccattcatgaatgcaataacatccttgttccatatggccagcaaaacattcaattccagaatcacattataagaatct

SEQ ID NO: 434339 - DNA, 542 bp, Homo sapiens
tgtttggggcacagaaaaaagggctcgtaaaaatctagaggctcaagtgcattcactcagatgtcctcattggagttctcaggaagcttgcgggagctgtgagttcatgttttttgttgttgttgtttttgtttgtttttttttaaattttactactctcagaaacaaatcctggtagtgatttttcagaactatctctccactaactataggaatgtgggtctctttaaatgtagccatatgtttttggctttcatagtatacygtaggctgatagctggcttacccaaacctgttgtttacttccttcggaggtttgatggcaaaaacacccccttcacagctttaaaaatgctatttctgaaatgattaaaacaagacatttccttctatctgtatctcatctaccacaggtgagagtcttaataattctcagtaatcacatgccagacatcgtcaccaccccattcatgaatgcaataacatccttgttccatatggccagcaaaacattcaattccagaatcacattataagaatct

SEQ ID NO: 434340 - DNA, 590 bp, Homo sapiens
gcccaaccagtactaccaggagtggagccccttatcggcccttaaaatgaaacctgtgtccattgcaggaggtagctggcagggagaagggaacacttagagtacattatgccattctgtgtgtctgatttggctttatgcagggagaaatttggccagttttcagataacccagggaagyttatagaagagtttgttaagttgaccatgttcttcaatttaacttggcatgactagcatgtatggtcatccacttgctgtgagtggagaagcagaggattctgcgtgctgactgtgagtatgcagatggagcagccacatgtaatgaaggccatgcatagttattgtatcagaagttcctgatctggacccttagtgagataaccaggatggttcccaagatcttgaatgcagaaatcacatggtaacatgtttaatatatttaaaaacatgcttcgttaagccagttaaacatgacaaaattaaagaagtaactcgggaaagacaaaagtcctgctgtgtttcagagcctttttgttgaggtactcaagaaatacactaatgcagacccagactccctggaagggcaa

SEQ ID NO: 434341 - DNA, 543 bp, Homo sapiens
aaagtatgttattgataatatatttcacatacaatcttacagtgtgtattagtccattttcatgctgctataaagaattacttgagactgggtaatttataggagaaaaaaggtttaattaactcacagttccacatggctggggaggcctcaggacacttaaatcatggtggaagatgaaggggaagcaaggcttgtcttacatggyagtggggttggggggaactgccaaacacttttaaaccattaaatctcgtgagaactttctcactatcaagagtacatcatgggggaaaccgcccccatggtccaattacctcctaccaggttcctccctccacacatggggattataattcgagatgagatttgtgtgaggacacagagccaaataatatcatagtggatataatgtattatgtataatgtgtttgttttattgagcacctattacataccaggcattcttctaggctctggagattcagatgtaatgtatgtgaaggtcttggctttatgaccactctgtgtcttgctgtgctt

SEQ ID NO: 434342 - DNA, 498 bp, Homo sapiens
gtagagcactctgtgtctagcacatagtaagctcttataagtatttgccatatcaaattaataaataaaagtgtgcttccttttatatgaagtcctagaacaggccaaacttatctataattatagaaatcagatcagcaatttcctgtggtgagtgatgggggaggatttgttgcagagacaggaaggaaatttttggagtgaagccagtgttctatatcttgattggaatggtggttacatgggtgtttktcaaaagtcatcacactgtacacttagaaatgtgtgcattttaatacatgtatatcatgcttcaataaagttgcaaaaaaggtcacaacaaatgcttgctctagcagcactgaggccaaaattgaagtgatcgggaaaagatgaatatagtcttgcacaggatctataaggtggccatgtattagatgagatcatccactgtgtgtttaggagcaatgactttgaaatctgatggactagagtatg

SEQ ID NO: 434343 - DNA, 560 bp, Homo sapiens
atggcagattaaggctttttttgtagctaagcctaattaaaatggcaacattccaatggtttctttaccagggagcaaggacatctgcaagggataaaaagatagcaagcattttgatgcatttgtttccagtgtttaaatgtggcaacagaaaacagggattgatactggctaagttacaagcaacatttgagttaaatgttttaaaagagtacaggaaatcaaagcagttatataaattgtgattttaggttgttgttttgcctgctatttctgcctgttttcagtagcatagacttccccaaatcgtgtcccagcatataataattccctcttggaattattttatacaaccgaagttctacaaraaagaagctggttcggctttaattaatccaacatttctcaaactcattgaccttggaatagcttttgttttctttcttttccagcatcaactacatgcacatttgagcaccgtttgggaaaggctgctctagcataccatcccttgccattttagaatattgccttagtctgtttgtgctgctgtaacacag

SEQ ID NO: 434344 - DNA, 516 bp, Homo sapiens
tctttcaaaggacaaatttattcagtaaaataacattctaaaatttattatctaatatttattagcacttgagttttttaaatatacctttaacagttacaatagtctggcattttctgcataaatgtgacttgacgtcattttggcaggacaaaaattctaagcttcatttaagtactkcaagtgaaaaatacatatctattaatctataataaagtgtttcaagcatctgctaggttattagtagcaacaattatagtcagttattcaaacactttaagtttaaaatattgcaaattttttatttcagataaaaaattttgtcatgatttttttcttgtatttaagcaaatatttttattattttgactttcatgtacacttttatttatttggcatataaaattacaatgcattggaattttttctattgacattatataccaaagtataatgattagcttttgtttaaggaaacaaaatttactctagatatgtcaagcagaaaagaattta

SEQ ID NO: 434345 - DNA, 591 bp, Homo sapiens
agcaaaggcttatcattctcattttgctgaaactgaaatgcagaaaggttaagtgatttgtttatttatttatttgtgattcatttattctgccctaacaagtcagtaatgagctgggaataggagccaaatgtctgatgccttattctctttcagaccactcaccttgcacatggtggaagctgatgacatttacttttataagtcaggaatcatcattattaaattgacatgcctatactatgcttagaaatagtcacaaaagtcaagggccatcgctttggagctcagagttcagagcaaagttactttgaacaattataacttaaagaaatagggagttaactgagacatttrttcagtgagaccctggtgtgaagtcacaaatcctgctaacatttattgtacaccatgtgacaggtgctgtcctcagtgcactgagttcataaaatcaattaagccatataataatcttagctgtagctactgctgttattcaattttccaaaaaagaaaatggaggaatagaaaagtattttgcccaaatcacaaattgagtaaaactggtagggccagagatgcacaatgcat

SEQ ID NO: 434346 - DNA, 474 bp, Homo sapiens
ttacagaggtacagaaagggaaagaaaactggcagggtgggataaagccaagcctatggaggcctaatttactgagcattattaaacaaaggtttcctaaagagacagcaaagagagaaatggatttctacatagagtaataagcattaagaaactaagctcatgtcttttaaaatgagaacatctgtggccaatttcattctttgaaataggttagaccacaacaagaaattggacaactacttaacagggaactacttccgaggttttgggttgatatccacccttacctgctcccagcacaccctgtgaaaccccctactttaatcatttgaacgcctaagttatttgtctataaatggtttttactatgtacaaatagaatatttagaattctttagtgrattgaatcagtgcagacacgttaactggaccaatcaggtctcaaagtgttttgttgttgttgttgttttt

SEQ ID NO: 434347 - DNA, 617 bp, Homo sapiens
actatattgagataaattttaatattggttttagtatagttaagatttggtaatagtttttctttaaaaattgaaaaaagttaaagtcacagagttcataatttcaaatgagaaacaagtactgagcaggtgtatgtgacaaggggaggattgagaaagtcttcamaatgttcacattcacaaaaggaagtggaaactatttaaattaattccaatgataaatgtaaccatgtctttataaaattttaaggtaaacatcagtagaaacaaaagtaaaagtcaagccattgtagaaacagtagattcagagcattcagcaaagtttgagacatgattatgggtgccttgcttcacctccccacctccccacaattgatcctaatctatctgcctgtcttagaatctgctttggttccaaaaaagagcatttatgtggggctttgtttttttcaagttggcaagtacctaaagacccacatcaaacagtgccaaggtaacaattacaaggtactggatctttggaataacctggcccatagaggggtatggctctctcaggataagttgaaaattggtctcacttcagtgtttattgtacctgctttcaggaggtcgtg

SEQ ID NO: 434348 - DNA, 538 bp, Homo sapiens
actgcttggatcattttttcactgacactttatctttatggcataagcactaactgtaccgtagctcctggataagcaggtacctggcaaatgcaaaggtagtcatcttaccaggtgtgtacagatacagaatgtccagagggaaaataaatgtraactcatttactggatactgtgcttatccatgatactcagctgactgcagccatccgcttttaagcagtatgggattccaaggcatgccacattcctctgagcctatcaccccatcatggagtttgtgaggctgcacagcagtctcagtatgacccacaagttatccacaggcaaacttaacaaagccaaccacttcacaaatggagaagatcaaattccctagttatttacagatcttccaggttatattaggtgccatataaaaaccagattggatttttgttccacagttgaccaagattctacatttcttctcctcttgtatctgtagaaatttgctgagttaatataagactggtatctggatgaagatgacttcaaa

SEQ ID NO: 434349 - DNA, 636 bp, Homo sapiens
tgaaaaccaattagagagaaattgcaaatatcattttaacatgtaattacttttttcagtgaaagttttgaattatcgactttgtgtattgcttatttaacatatcaaatgtatgttctgtactttaaaagctatttwctaacaatgttaaaaactctagcattcactatttagtttattaacattcacagttacaataattatcatttatcttatagtactaaatgtgttaaagaattattctaagtcgtaaatttttgtctcttttaaataagcagtctttaaaactataatctcccattttggtacatctgtaattattaaatagttgtgtcttctccttctgttctttctttgcctttatcttttttcttattcctccttctccactttgataaaatttttgctttcaagttacaatgttagaagggttgttacatattttactttatatacagtaaataatcctttgaaaagagtagctgactctgctttaaaaatacataattttatacttattagacatattccttaaaatttatgaaatcaattattaaatgctctctaaagttaagtttggaattaaactattatttacgtttctaactgtgttgggattatgttattcagtgcaca

SEQ ID NO: 434350 - DNA, 647 bp, Homo sapiens
tttagacagaggcagcgacgctttggtgttggggtgggtctgcttgggcctgtggttaggcacgaactgggctgacgggcatcagtgtcagatttcaggaagcgccttggtagctaacctcgggggccccagtgaacagagcacagatgagaccgggacctgcctctcagggaagacagtgccaggtcaacgggtttggctgctaagctcgggaagccaagggctgaagcgaccccgggctctcaaccactctcactctgaccccgaggggactgagggtgtgtcagtcacccagggtcctgccacagagcagtgacaggaacgtgggtgtcacggtgaggagctctgcctgtttcctcccgakgggacctttggctggattaagctgaggccactccctcccctgaaaatggctcattgacagttcctacccccagtgactctggggaggaggagaggggaaagagcaggtcaggtgcccgtgtggcctctcggttattagagtgagaacaatcattcaccactttggtgtgaccctgtgccagggacgtgcgtcccagcgcgtgaattcacacccacagggcacgaggctctcctccaggcaccccctctgtggagtgcagggcgagcgctggtgctcacagaca

SEQ ID NO: 434351 - DNA, 461 bp, Homo sapiens
cttcattatcttatgagtatgtgttttactttaaatgtgctggttcatatggcctatttttaataaaattaagtcaatgagctaaaatcagatatttaaacaaatagttatactttatgaaatgagaaagacgatatcaaactatatattacaggggcttatttagagagagtaagatttacccagtgattaatttttagggctcagaagtaaattgtgtctgagtacggtggctcatgcctgtaatcccagcactttggggggggcagggtaggcgaatcgctcgagccctcaagtttgagaccagcctgggcaacatgacaaaaccccgtccctacaaaaaaaawaaaaaaattagctggtgtggtggcataagcctgtagtcttagccactcgggaggttgaggtaggaggatcacttgagcctgggtgatcaaggctgcagtgagctgagatcgctc

SEQ ID NO: 434352 - DNA, 439 bp, Homo sapiens
ttcctcataatattaataataaagttctatacattcgtataatgctcaaatcagtggacacttcctgatttagatatgatttaacctgcatagagtagttgacaatacaagtgactttccatccattttcctcctctgacttctgaaacattctggttttcttactacctatatggcttctctttctcagtcttctcagtgaatktattcatttcctaggactgcctttaaaacatactacaaactgggtggcttaaaacaacatgaatttattatctcagaattctggaggctagaagttcaaaatcaaggtgttgggagggccatactccctctgaagcctttaggggagaatatcccttgcctcttttagcttttggtagcctcaggcattccttgttctgtggcagcataactctaatctctgcctccattttca

SEQ ID NO: 434353 - DNA, 590 bp, Homo sapiens
ctcctttttggctaagctattattttgggtgggattctatagggtgcaagtggcaaaaatgtagctacaattagcttaagtaaaaagagggaattgaggagagatccttaggtmactcacagaattaaaggaagactggatcaattgagctttagcaaggcagaagcaagcactttagaagggactcagaacctagggccaagacttaggtaatgcagcagcacacttccctcacgtggcctttgctccttctttctggacactgtgctctctgtggaggaatactttgattaccttatgtgtttccaccagtactttatttaccccataaccctcatctattcattggcatttttatgtgcattgccacagaaggagacgttacagcacactgtgtttttgaatctcaaaagcgcagactaggattgaattcaggctctgaagattaagagagctatcccacgttagcgggaaaaggaaagccaaaagggaaagaaagacagctgagttggtaccactgggaaaggggccctgcacctagtagatgatactgtcactaggcaacacacagggggcatttgtgtttattg

SEQ ID NO: 434354 - DNA, 455 bp, Homo sapiens
ttcagatttctacatacttattttaaatgtgtctctgtatcctatatcatttttctgtcattctgcattcaacctttctatattcttatgttttagatgtgtctgtagtaaacagcatttatttcttaaggtattttaaattcaatgtctttccactggagaattttgtcagtttacatttaatacaattactgatatattkaggcttgtatttactttctgctttctttatttgcccataattctggttattttcttttttattgccacattttaggttgattatttttatcacttcaaattttctttcattactttaagagttatacactctatttctattgttcagtaactactgtggaagttaccatatgaatccttaagttatcgaagttgaaaatgaatacactttgagcactaatgagtacaggaaaatacagaggccttagcttact

SEQ ID NO: 434355 - DNA, 591 bp, Homo sapiens
gctttctttatttgcccataattctggttattttcttttttattgccacattttaggttgattatttttatcacttcaaattttctttcattactttaagagttatacactctatttctattgttcagtaactactgtggaagttaccatatgaatccttaagttatcgaagttgaaaatgaatacactttgagcactaatgartacaggaaaatacagaggccttagcttactttaacttcatttaatactctcttgccatatattgtgagcatcttgaattccatttatttattcaaatatttattgagagcttactcggggctaagcattattctagatactgaacaaaatagatgagcatccctgtgcttgtaagacataacagagtgcaaacaataaacttaatagagtaaattataccatatactagaaggtagtaagtatatggaaaaaaaactagagcaaggcgaaagagattaggagtgccgagagagggagaaagagaatgaatgagagtgagtgcacataagtacaagtgaaagtgagtgagtgtgccctagctttggaccaatactgtctataaagttt

SEQ ID NO: 434356 - DNA, 588 bp, Homo sapiens
tcctctgccacagtcatgtgaaggcagacaggcacacactcgcacactagcacgcacttgggagctcagggaacataacactggttagtgagtcggtgtccctctcccatcgattscaacttttcccctccttccctctcctgcctctccccactttctacatctccgttctcaggaaggctcagggaggatcccccgctgcgtgcactgcgttctgagaggccggggagagactctgggcccgcggtcggggcggagccaaggtcccaacccacattgaacgggcttgaggattacttggagggctcaggatctaggaggagggcccagggcactgggttggggttactctgggaaagctctgtgggaccaggtgggaccttagggctggagatggactctgcgagctgggggcggagttctagactggcaggagcggagttctgggtggcgggggcggggtcgggaccagcagggacggcctctgagagttgggggcggaattctgggccggtgagggctggggcgggaccagcaggggaggcctccgcgagctaggggaggagctctgcattgtctggggcgggg

SEQ ID NO: 434357 - DNA, 588 bp, Homo sapiens
tcctctgccacagtcatgtgaaggcagacaggcacacactcgcacactagcacgcacttgggagctcagggaacataacactggttagtgagtcggtgtccctctcccatcgattgcaacttttcccctccttccctctcctgcctctccccactttctacatctccgttctcaggaaggctcagggaggatcccccgctgcgtgcactgcgttctgagaggccggggagagactctgggcccgcggtcggggcggagccaaggtcccaacccacattgaacgggcttgaggattacttggagggctcaggatctaggaggagggcccagggcactgggttggggttactctgggaaagctctgtgggaccaggtgggaccttagggctggagatggactctgcgagctgggggcggagttctagactggcaggagcggagttctgggtggcgggggcggggtcgggaccagcagggacggcctctgagagttgggggcggaattctgkgccggtgagggctggggcgggaccagcaggggaggcctccgcgagctaggggaggagctctgcattgtctggggcgggg

SEQ ID NO: 434358 - DNA, 564 bp, Homo sapiens
tattttcaacatactaatttcctttcctttggataaatatccagtagtgagattgctggatcatatgrtagttccagttttaatattttaggacacctccctactgttttctataatggctgcactaatttaaattcctgccaacagtgtgttaagggttcccatttcttcacatagttaccaaaccttgttgccttttgtctttttgacaacagtcattctaacaggagtgaggtaatatgttatcatggttttgatttgcatttccctgatgattagagatattagcatttttcttccatctgttggccatctgtacatcttcttttcagaaatgtctatttaggtcttttgggttattggctttttttgctattgagttgtttcagctccttgtatattttggatattgaccccttatcggatgtataggttgcaaacattttctcctattctgtagattgtctcttcactgtgttgattgtttcctttgctgtacagaaactttttcacttgatataaccctccaatttgtctgtttttgcttttactacttgttttttt

SEQ ID NO: 434359 - DNA, 580 bp, Homo sapiens
atacgccagtacagaaatttcctttcaattatgtgttcctggcttgctgccttcttaaaataaataaagcagcactgtcccacctcccagaacaaaaacaatagcaccatgtaacagttaagccaaaaagcaaaacctccaaagcagacggaatcaactccttgtgccaacttcttactctgttgactttcatctttcttgtttacattagtggaaatgttttcaagatgtgcactatttcattgatatcagaatccaggtctgttgacagaatagggttcctgtggagtgcacattagattagaacatcagggaagccagggtcaattcaaattcatgaaacaattattaattgattataccaggtagtttgactaaaagatacacaagtcagtaacacagccttgtcctcaagaaaattttggtccgatatrcaagagaaaacaagtaaataaatgactgcttaaaaatgtaaagaaagatctcaagatgaaaaaagttctgcagattggttgtacaacaatgtgaatatacttaacactattgaactatatggttaagatggtaaattttatgttat

SEQ ID NO: 434360 - DNA, 526 bp, Homo sapiens
ttgtttataattaacatgaaattgaatttacaaattatctagctatactttttggaatgggtagaaacagtattcttagctaaattctaaaaggattctaagcaacttggatgctgcagtgaatggatagcttgggtcccactcagcttttctcaacagaaacacaaaacgacaaaagctaattaagtagaaaagctgccctatagctcatctcacaattttagaaacaatccattttactttaagtactcctaacagataccttctaaaaggcaaggatactggtaaaaatgaaactcaatgttcccagctcacaatgtttccatctctgccctgatggttggtaaaataatcaagatgatctacatactccccactgtaatgtctggctatttgctaaaacagaygtttggcttttacgccatagataccttgaggttcccctaggcagaaaatcagaggagaaagcgctttcccttaaaagacaaaatcttagatattgaacacatggataaatctgaccata

SEQ ID NO: 434361 - DNA, 584 bp, Homo sapiens
tttgttctacagtatggcacggagatgggtaaaaaagtgaaaagaataagccacaagcccccgtgctttgaggagatgatcatagcctgctcctggggaactatgctagtggctggatagcaagcactgacctagaggttgctcctaggaataaaaaattaagattatccatagaagacaaagaaaaaaatacttcgctaatagtggataccaaaaatctgaggtagtgcaaaagataagaaaggaaaaaagaataaaaagcgcaactggaatacatacatacaaactttcaagacgttttctcttatactcttcagtaaaattctatstaattttcattctagtatttaaatagttctggattttacaactaaacctatcattaaaaggttatggaaaatagaaggaataaaaaagatgaaatagaacatcaggcaaatcaaaaactcaaaagctgtatccaaaacaatggtggacacctgccgtatttgctttaaaatgggtggcactgttgtgtacaatttaaatttgttaaggagatatttaacttctctgaaaagagaggaagaacacttggtaaacaa

SEQ ID NO: 434362 - DNA, 545 bp, Homo sapiens
gctttgcaattacagctcatcaatctatcataaaacacacttggtttctgaatttcctctcttgttctctcctggatttatgtttgattaccttctggtaaatgttttgttaaatggataaattatagatgtttatattgcagaaacagtccagatgatgttgtaattttcctagaaattctgttgcattcttattatccaaagctstaagcttaaaaatagctcagagaaggcctggccacagggttggtgggattatccaacagggaggacagcacagttcattttaaactccaaaaaaagaaatcagcttagagatatgggcatgtgatttctggttgatttaaattcaccacccaaaggataatcctttttaaaggaccagtacacataaattttgtatgttagagaaatattagtacattgatatcttgcactttgaatgcctacagctcttaggatgagggaaaatgaaataatgcagtgaccaaattagtgccttaagagcaagccttcatggtgttcaatgatgattgccaggtatt

SEQ ID NO: 434363 - DNA, 599 bp, Homo sapiens
aagtaccaggcagataaaaatatccttgacctcaaagaacttacattctaatgaggaagatagatagcaaacataaacaacaaataagtaatttcagatagtgggatgaactgtggaaaacagcaggaaaggtagtagagagtaattgaaatggaatgaggagttattctacttatttatttactttaagcttattcttgcctcaggaaagagctatttttgatrgagtaggtaaaaaaaccctctctgagtatgtcacatttgagcagaaatgtgaatgatgccaaagatcaaacaatgaacaataagaaaaatgaaacactatcccaagcaaaggggacagcaattataaatgccctaaagatggatttagggcatacgtcaagaaacaacatagatcagtttaatagaatagagactccaaaaataaatcctaacatttatagtcagatgattttgacaaagggttcaaggtaattcactgggagaaagaagagtctttcagtaaatggtgctgggataagatacccacatgcagaagaataaatctgtactcatatctcacaccatacacaaaagttatgtaaagtagaccagag

SEQ ID NO: 434364 - DNA, 586 bp, Homo sapiens
aagagatttggagttttctactccataggtataaagcaaatctattcctactctaagtttagaatttaaatttacacaatgactwttttttttttttagctctcacaatgaaacatggcaataaacaaaatctcatttactgttggaaagatctgggagcaatgttagaagaaaatttaacaaaaaggtaaaaggattttaggagccaatataactactaataatgaaaatacctgtgagaaaattattcccaactagatgactacctattacaaataaatatttttctctaacctatttctttgtgttcagaagtcaagcctaatatgtaaagtcatactttctacagtacaagctatattctttttctatatcaacattctctgtacttttctccagttattgtctgcattaagttgtgttgaataacccactcagctggttttatactatttactttcagaaaataaacaatgtgaaaaaaatactttccatgtcttatttgtaattttgcttagaatgggttaatattttcagtaattttgtcttatgacgtaacttgtaaattgcttacaaattataaatg

SEQ ID NO: 434365 - DNA, 538 bp, Homo sapiens
cctggccaaatgaacatactaattatcccacttcactagcaaacaaactaagtcagaaaagataaatactaaaaattcaaaaagaaaaccctggccagtaatgcttaacctgaataattatgttttaactcttaattttaatttttatttaccatattttaatatctagaaaaaattgtgtatgggcatatgtaaacatattaatctggaaaaggtaaacactagaaaagygatgctggaaaacagacagtcgttgaatagctacctgctaattttgaagtaacacatactttaaacatgttgtctagattgaatttttcaaataaacacacaccaattcattcctaactcaggagcttaaattcagtaccttttttctcttttttttttcatactttttgataggcttatgaaaaaagaattcacataaccaaagaacaagaagaaaactgagttaattttcattatatccattagatcctaggaagacttcatctagtgtcatattaaatcctattttagaatttttccaagcaat

SEQ ID NO: 434366 - DNA, 608 bp, Homo sapiens
tcttctttaatcttcaccactttctcttaagcactaattattatatctgcattttcatctgataagcagaaatcttaggtaccttgcataagattgcataactaaaaagtgacaaagcaaggaataaaactcaggttcatttgactccaaagactatgttatctgtactgcatgtataattattttttaattaactcctggcatttctataacccccttcatttatttaattttgccatttcaagaatgctatgtaaatagggtctgtatgtatgtaaccttttgggattggcttttccagcatacttctctggagattcattcaggtgttgtatgtrtcaatagttctttcctttttattgctgcatagtattccatagtatggatatatcacagttcgtttatcatttacctatggaaggatatctgggttattttccatctatggctactatgaagaaaattgctataaacatctgtgcgcacctttttgtgtgaacctaagtcttcataagtctctgggatgaatgtccaggaatacaactgctggatcatatggtacttgcatgttcaatttgtaaagaaactaccaaacatttttccagagt

SEQ ID NO: 434367 - DNA, 539 bp, Homo sapiens
taaaacattaattattcccaatggttttcacaaacttcatgatatgaggaaggttttgatggccttcagaatcaactccatgacaaaccaccgatccctcgagggaaggatctctctgtgactcccacgtccccctgctctgtgactctctgtgactccctgtgctctctgtgactcccatctccccctcctcttgtcctgtgcagtggctccctgtggctctgtagtgagactgttttgcagtacagcagactagaataatttttctacaaaattaccagaacattaatgttctctatggtgtctaccaagggccattgtccctcaggatgtttgtaaatcatctacagtgccagtttagagattatggaaatagaaaattctgtatcatgtatactatatagttgctgagtgatttttatagagaagtagttgcctctggttacatctcctcctaaaagrgttgtttaaaattaaatgaaatagagaaacttaaaaatacctaaaaatgttgtagaacacagttaaagatgtagatc

SEQ ID NO: 434368 - DNA, 582 bp, Homo sapiens
aaacccacattgaaaatgtgcaaattaaaaatgccatattaaaattaccccaaaatgttaatggttgtggtggagtagtggatsatgagtgatttttttctttttttcccccattttcaacattttttaaagttctatagtaaaatagactttaataaatcattgaattttagagcctttggcctagaagggctaatacaacactccacattcatgttaaaatatatcttacggcttatttaccttgcttaaatgtccctccctgctttcttctattcctctctccttctccctctctctgtcctttcttccttctttccttccttcttctcctccccatctaaaacatccagtacaacattaaacagacgtaatgagatctgacattcttatcttgtttctgatcacaggaggaacactcagtctttcaccattaaggatgatgttagctgggggctttttgtagatgctgtttattacgttgaggaagttcccttctattcctatatactgagaatttttatgaggaattcatgttggattcataaatgctttctctgcatttcttgagatgatcatatg

SEQ ID NO: 434369 - DNA, 542 bp, Homo sapiens
cttgcttaaatgtccctccctgctttcttctattcctctctccttctccctctctctgtcctttcttccttctttccttccttcttctcctccccatctaaaacatccagtacaacattaaacagacgtaatgagatctgacattcttatcttgtttctgatcacaggaggaacactcagtctttcaccattaaggatgatgttagctgggggctttttgtagatgctgtttatyacgttgaggaagttcccttctattcctatatactgagaatttttatgaggaattcatgttggattcataaatgctttctctgcatttcttgagatgatcatatgatttttcaagtttgttaataaatcacatggattgactttttcttattttcttattgtggtaaaatacatataacaaaaaatttactattttaagtggtattaaatacattcataatgttgtgcaactattactcatatccatctccatgactcttttatctttaaaactgaaacatatacccattaaacaataactccccatt

SEQ ID NO: 434370 - DNA, 658 bp, Homo sapiens
tgggctggttaaatcaaaaaaagaaagcctagaagagccaaaggactcataaaagcaagtgaatgaaatacgcaacttcgctttttcagtaagagagaactcagtgactgctagtacccagaggaaaacagatgatgtttaacaacacgttaagatggtgcctggttagtggtaatttcacagaggactcctggttttacttcttctagacagcaggcagagagcaggggtgggggaacttgcttacaagaaaggatataaaatcactcattttacctcagtgtgaatttaaaacgcttagtcctcaagggtgttttcaccttaatccttatctataattgtgaatagaagttagtccctgcttgaaaagatgtagacatcactggtgttaaccttaaataatgagattcaaagaatatgattggggccaggtgtggtggctcatacctctaataccagcactttgagaggccgaggtaagaggactgatcaaatccaagagttcaaaacaaacctgggcaacatagtgagamcccctctctacagaaaaatttaaaaattagctgagtgtggtggcaggcacctgtagtcccagctactcaagaggctgaggtgggaggattacttgagcctgagaagtcaaggctgaagtgagctg

SEQ ID NO: 434371 - DNA, 289 bp, Homo sapiens
cctacttgttgctggagaggcaacagtccaggtatgatgggtcccttccagagcaggggcaagagtcctggggcacctctttgcctccctcttcccttccctaagcataggcctgtttgagagagcrgctcctgcccctgcccttcacagccttgagggagccaaggtcccagcttgccatggctcacttggatggggttctctctgccaggcatgtcaacagcaggcttagaaccctggcatcccagctctccatcccagagcaggaagcagaagccacatgtgatga

SEQ ID NO: 434372 - DNA, 514 bp, Homo sapiens
gggtctgtacaggtcagtggtgacgggccctcccaagggctctgctgcagcgggcttcagtctgcactttgacaagatctccatctcaggtaatccctgtgcacattcaagtctgagaagcgctgagctaaaacattaccacttttcaaaagcactttttgaaaccccaggcagaaaagtcctcagattttcactcacatacacacagagatctccacgcgcttgataaccatcattcagtcatgcttggggttcttatgaaggagaatacatctaattatgctcaggctaaacttcagtgttccctaaaatcctaatctcaatctttctctctttacttcttcttttgaatttaatttaatgtttaatttttgtggttccatagcaggactattctctttacttctatctctacctcttttgagatgttgragactctctcactccaggagttctcaatcctgggtaagttaagagaatagagcagttagaggtataggctttggaatcagaa

SEQ ID NO: 434373 - DNA, 544 bp, Homo sapiens
catctcagtggcctatagagacctcccttgggttgagtagcctcatgactcagatgtaagaataactctatagaccatggttgcccagatatttctgttttgggtggattctgaatataaaattccagcagcgctatctttgcctctgttttcattctttaaggtactaactttgacaaatagctgaaaaaagtcttgagtgtgtagtgtgttcaacttctttcctttcctggtgaagatatcatatgtggacacctagcaacctggatcctgaaataatgtggaaaatgccccaggggctgttctgttctttcctctttcttatcctctgtcctatggcttcatatttggaaactctaacttttctgggtttaactacatwaagccacaatagaagcaacaataaaggcattcactggaactttcctccaccagaatctaccttgagatttgaattttcttgaaagggcatctccattagactgtggtttttcctgataacttaagccattctaaggggtaaatacggatgaccccacgatct

SEQ ID NO: 434374 - DNA, 311 bp, Homo sapiens
tagacatcagatgtcctccacctgactggccagtgatgtcctccaacactctcccctcaaagatcccaatcacaggagctaagcaggaagagaacattcaactgtgggttggtctgaaaacttagggatgtaggcacttgttagccagagccttatctatttrtaattcaaataaattccaccagggcagagaccatattatatacatttaattttactctcccactctgccatactatatatttaaaaataatgataattaccagagatggagttcttactttaagccaggtaccatgctatgtgtttta

SEQ ID NO: 434375 - DNA, 311 bp, Homo sapiens
tagacatcagatgtcctccacctgactggccagtgatgtcctccaacactctcccctcaaagatcccaatcacaggagctaagcaggaagagaacattcaactgtgggttggtctgaaaacttagggatgtaggcacttgttagccagagccttatctatttataattcaaataaattccaccagggcagagaccatwttatatacatttaattttactctcccactctgccatactatatatttaaaaataatgataattaccagagatggagttcttactttaagccaggtaccatgctatgtgtttta

SEQ ID NO: 434376 - DNA, 545 bp, Homo sapiens
gattttactgcctaaaaaatcccattgacatttttgtcttctaagagaaattttgtgtttttttttttatttgtttgctttgttgatagcttgagagaccttcaaattcccatgtacctgagtcatcaaaatttctaaatctggtcagttcttagccctagagtcccaagagtgccataagatagatcctggcagggcagtggccagaggggctggtctgaacagggtgacagargccctgatatctcagggaaaagcactcagcgtaagccagggtcgaccttgtccagaaggaagttttcctgggctcagttcccaccctcgtggtcacatcaccgtgacacagcaggaagtggcctccccagagcccaggtctctcacaggaaactgttgtcagaggcttccacatgggccagcagtccctgcacattgggttagcagcagcattccaatccacaggatttgttcacaggctggaatgctggcctccgggctgggctatggtgcttcctctacttggtcctgatgcttgtggtgataccttg

SEQ ID NO: 434377 - DNA, 540 bp, Homo sapiens
  misc_feature (1)...(540): n = A,T,C or G
ctacaataaagcttatagacagaaactgctctgctccagtcaaatagcagaggaaaaactgattctcaaccccaaaaacaccagcaaagatcaagtggcgagcctaggcttccaccctctctgggatgtaatgaggtgccccagcttcccccacctgctgttggggtggcgcctgagagggctaactagggagctggcattttcatctncacctactacatttaaaaagaggaaaagcctcagctaaatagtttaagttcccgtatcaataatctggaaaaagaaaagcaaaacaacccaaagaaggtgaagtgaaggaaggaaataataaagatatcagatattaatgaaactgaaaacagaaaaacaatagaggtagtcaacaaaacaaagacctagttctttgaagagaggaataaaattggyaaacctctagcaggactgacaaagaaaaatagaagacacagacttctaatattaggaaaaacagggggcatcactatagaccttgcacacaggatgataaaggagtatcacaaa

SEQ ID NO: 434378 - DNA, 616 bp, Homo sapiens
gcaacaaagtagtagtgtcttagaatatatgaggaactctcaaaacttagaatatataaagaattctcaaaatttaatagtaaaaaacaaaacaatgcaattagaaaataggcaagatatatgaacagatatttcactgaaaaggatatacagatgacaaataaacacatgaaaagttgttcaatawcataagttattagagaaatgaaaaaaccacagtgagataccaccacacacctatcaaaatggctaaagtaaaaaataatgacaacatcaaatgatggtgaggatatggagaaactgggtggcttaaacattactggtggatatgtaaaatggcacagttgctctggaaaacagtttggaagtttcttaaaaaactaaatatgagccaccatacagcccagcaattgcaatctgggcatttacttcagagagaagaaaacttactttcacacaaaagcctgtatacaaatcttcatagaagcttcattcataatagtaaaaaactggaaacagcccagatacctttcaacaggttaatggttaaacaaattgtggtatatccgtaccacagactaccattcagtaataaaaaaagaaatgaattattaag

SEQ ID NO: 434379 - DNA, 616 bp, Homo sapiens
gcaacaaagtagtagtgtcttagaatatatgaggaactctcaaaacttagaatatataaagaattctcaaaatttaatagtaaaaaacaaaacaatgcaattagaaaataggcaagatatatgaacagatatttcactgaaaaggatatacagatgacaaataaacacatgaaaagttgttcaatatcataagttattagagaaatgaaaaaaccacagtgagataccaccacacacctatcaaaatggctaaagtaaaaaatratgacaacatcaaatgatggtgaggatatggagaaactgggtggcttaaacattactggtggatatgtaaaatggcacagttgctctggaaaacagtttggaagtttcttaaaaaactaaatatgagccaccatacagcccagcaattgcaatctgggcatttacttcagagagaagaaaacttactttcacacaaaagcctgtatacaaatcttcatagaagcttcattcataatagtaaaaaactggaaacagcccagatacctttcaacaggttaatggttaaacaaattgtggtatatccgtaccacagactaccattcagtaataaaaaaagaaatgaattattaag

SEQ ID NO: 434380 - DNA, 547 bp, Homo sapiens
tgcctgtttctacccaaaacaaatcatcaactccttcctctcctaatcagtcaataggcctgttggtttgaaataaaaagagtttcaccttcagcactgcccccactcaaaaaaacgtctagatccagataaagataaattccagtcactgaagcataacaagtgactcagactcaaggggatgggcagacactccaatcacccaggaaattccragggtttagttacctcccaggaactggacagaggctggtaaagttaattctgctctatacagggcactcctagcctttggacatggttcttatatatgcctaagatttgcaggagccagtgtggtggagggataggatacctaactcgatttcccaatacgtttgaccattaatatcagccaacagaatcttcataacaatgccggtgttctaccatattgcagtatggtaggtgtcacctgaaaaataagagtctagatatgagcacattactagagtttcattcagtcattaataattagtccagtctatcatcatatcatatgacccaa

SEQ ID NO: 434381 - DNA, 606 bp, Homo sapiens
aataaccttacaattgcttctaagtgttcaagtgaaagagtcatatgtctctcattttaaataaaaagctaaaagtgattaagcttaatgaggaaatatgttgaaagccaaaatargaggctagacctcttccaccaaacaatcaagttgtgaatgcaaagggaaagttcttgaaggaaattaaaagtgccgcttcagtgaacacacgtataagaaagcaaaacagctgcatttctgatacggagaaagtgttagtggtgtggatggaagatttaaaccagcaacaacattcccttaagccaaagccaaatccagagcaagctgtaactttcttcaattctgtaaagactgagagaggtgaggaagctgtacaagagaagtcagcagtaggaggggttgattcatgaggtttaaggaaagaagctgttgctataacatgaaagtgtaaaatgaaggggcaagggcttatgtataggctacagcaagtgatccagaagatctagcgaagacaattagtgaagttgcctacactaaactacagtttttcagtgtagatgaaatagccttatactgcaagaagatgccatctagggctttagctagaga

SEQ ID NO: 434382 - DNA, 606 bp, Homo sapiens
aataaccttacaattgcttctaagtgttcaagtgaaagagtcatatgtctctcattttaaataaaaagctaaaagtgattaagcttaatgaggaaatatgttgaaagccaaaataggaggctagacctcttccaccaaacaatcaagttgtgaatgcaaagggaaagttcttgaaggaaattaaaagtgccgcttcagtgaacacaygtataagaaagcaaaacagctgcatttctgatacggagaaagtgttagtggtgtggatggaagatttaaaccagcaacaacattcccttaagccaaagccaaatccagagcaagctgtaactttcttcaattctgtaaagactgagagaggtgaggaagctgtacaagagaagtcagcagtaggaggggttgattcatgaggtttaaggaaagaagctgttgctataacatgaaagtgtaaaatgaaggggcaagggcttatgtataggctacagcaagtgatccagaagatctagcgaagacaattagtgaagttgcctacactaaactacagtttttcagtgtagatgaaatagccttatactgcaagaagatgccatctagggctttagctagaga

SEQ ID NO: 434383 - DNA, 609 bp, Homo sapiens
ctctttctcccctctcagctcctttcccccttcactcaagaagaaaaaggagtggccatcactgcctccccaagcgtcaccacaggcggtccaactacaaactgagtttgagactcatggaaaggaatttcccataaatggggaccaggcagagctactttcagatcattccagaggagctggctactctgaggccaaaggtcgcttggtggggcaggagtagcattcagtggatttgagccctgctcagtaaagaagagccaagtccatggcctgagaggatgggcagccccacctctttgattaagtggcaaaagcatccygtaacattctcccacttggctgagatgcagagggcttcagctatccaagcggatctatgctatacacagtgtacattgctgtctgtctgtctgcccatgtttgttttcagtgtcttagcatattggctctgagttcatgctgtgtgttgtgtttggcaggaggaggtgttttaatatccttgcttgactggaactatctcaatgctagtgaattctattattttgaataagataaagtatagccccaggtttctgcataatcacagcaaggaatagttcaacttta

SEQ ID NO: 434384 - DNA, 566 bp, Homo sapiens
atgccacaattttaaccttggtggtagagactcccactactagacaggctagaatccaaaaacaagtgagagaaaggagaagggaagcttttggttctaaacacaacctcaatgcctatgagcacaagcttcttccaccagtgacttgttcatccatgtagcaggctgacagaaagcccagatcaccaggactgcctgtatccatggttaacaataaacaaaccagagcctacttttatcagtcacaagttgggcacaaragttggtgtgaaaatgggaattcaacaggtcctaattttccccatccctttctggtgggccctgccagctttgggcttccaatctgaaccctgacttttccccaagctgatccacttgatccataaccacaagctcttaataccaagtacttaatacttctaagcacagcaacagaatcagacctattgtaagactcagtaagctcatcctgccaacttgcaggcagcaagaggtattcaagctgaaggcagggacgacgtttgcttttatattcccagcacttagcacagtgcctgacacagagt

SEQ ID NO: 434385 - DNA, 545 bp, Homo sapiens
actgtgagcaaagagagaaaagggatcacgtgttcatctttgtatcctcatcatgtacaatagtgtctagcacacagtgttccataaaagttttaaaaacragtgagtgaatgaatgaatgaatgtctttacccatcaggatggcccaagctgacacttgttcttgctctgacctggatgccaaatgttgcctctcaccctgactattcccttgccttggagcttgtaggtcaagtgcctgaactactccctctccctcccacttaccaccctcctgccacaagtgctttgccgtatgttgtgaattatgtggtactgtgcgagggtagaatgccttgtttagcatttgccacagtagggtcccatcagatgcacatttaacttttataaattcaactatatgccctcactgcctgtgatttcagaatttaataatacacatttctatgcaatttggctcctaaatatatgccttctatttcatttggaacatggaaacactcatttgttcaaagagtaagggtaaaaccattagatttatttaa

SEQ ID NO: 434386 - DNA, 566 bp, Homo sapiens
tttaaaaatattaagtaggtcttctaatatcctttagagggaatcaatgaaaaataatttaaactattattatatatgcatggatttgacacatttcatgtattttattctattgtggatattatctgtattgatgctttgattgttccccttcatccaaagggagactatttaattggctcctaagccatttctactagtagttgctgatgggtacttttgcattttggtatgacaagacttctcagactcattttgtatatttcctaccccacacctcaaatcagccatttatttatccaagaagccctggtttcttttggtgggaaatagtatttagagataatcattttggccctaggggagctcattgttattgagctgctcacagcctctaggtctttttggtgagctagaaaaatcatgaatttacccagacaccttgatgtgatttggctgtgcctccaccaaaatttcaacttgaattrtatattccagaattcccatgtgttgtgggagggactcagtaggaggtaattgagtcatgggggtcagtctttccagtg

SEQ ID NO: 434387 - DNA, 528 bp, Homo sapiens
cacatgactgtgctttaaagtcacctagaatatagtttcttaatgttgtttatgcgcccaaatagaggcacatcattagacattgcttttgaaaatttaattcatgtttataatatttaaaatatttacaaggtttcaaacttaagtttacacagaacataaattcaaaaaagtctaacttctctatccattccttattcccayccagtaaccaaaattttaaaaatgttatggcttatacttcaaagcattaaatataaacatatatgtatgtgtatgtatatgtgtcatccattcctttgtgaaaggtggaatattatacatacttttcttcaccatgcctttctttacttaacaatatattctggcgatcactccaaagtagtatggtagtatatggagagtcctcattcctttatacatgtgcctagggttccacctatggtcctccataggggttcaaccttttgtagatacactagaaatttatgagttcccacttccccatagaactgccaacagaatttg

SEQ ID NO: 434388 - DNA, 533 bp, Homo sapiens
ttcccacttccccatagaactgccaacagaatttgttattaaacttgaatttttgccaatctgatagcatagttaaatttcaattttcttattatgtttagggttgagcatttcctcataacttaagagctatttgtactgttttggtcaatggtctgtatttctagcccatckttctatatgattgttggcttttttcttctgcatttgtataaactctttatattattataaatgtaagttgcaaatatttttcctattttatcttatcttttattttacttatgatgtattttccatataaaatttaaattttttaaatatcacaatttccatctttttccttaatcagagttagattaaattttcactgctcttagattatagaggaattcaactatgttttcttttggtccttttgtttgtattaggtatttggaatttatcctggtgtacaatgtgagggattccattcaattttattttttccatgtggctatccaattattctaacaccactttttaaaaagttg

SEQ ID NO: 434389 - DNA, 530 bp, Homo sapiens
cccaacgaggcatcgaggtcaagagtggtgtttaaccttgatcccaggactttataggctggccgacctcctgcttctcacgtccccctttcccatgattcttcccttakggtgggctgcctgcatgtggagtgccctccttatgcttgggaagtgagcacacgcagtgtattcaggaggttgtacacaggcacatctcaggtcttcttctcttttctggtggactgcccccggaaggtcatgctctgccattttgtctcctaatctacgtgtctagactcattcacccaatacctgagattttattggaagttatttttgcttctccctggtgcctgctgccaaattatcatctgtagagaagcaatgtgctaatcgttgaatcatcacctgacattcctggtgggttgaggagagccctctcctgcccagctcatgcctgtctaactacctgtaacattcagagggtctgcaaacagaagcagctctgtaaaactgtgtgttgaggcggtgatttgcatctgtagaga

SEQ ID NO: 434390 - DNA, 631 bp, Homo sapiens
aaaataatggaaatatgctgtggcaggggaagggaatcacctttgaattctattttatttccctatttatttttaaatatatgtgtagagagaagagtcagggaggcacaaaggaaaataagcaagaataaaggccacagggtcatgaggaaagacacaggtgcccaggtggtgcagggaacctgtttttgtccctttttgttttccttctcctctgtcattcctctgcttctgtgtcctccttatctctccctcttttcttttcagtttctctcaatttaaaataaattagaacgtagaatcaaaacgtcatgttttatttttcaaagattattattaccagctaaataacattggtaatttttattttgagtttcgtacaawttagttattgattactaattatttgagaacaggatttttgtttggattcttagcctgttgcttccacatgctctgagaggtgtaaatttacatggaaaataaaatatcttcctggtcagaacagaagtcattcatgatgatttagcttatttcggttcttcctttttttcccttctcccctccctctctgtctctcgttactcacacccagctatgtcactgcgatgaccagtgagccaaacactca

SEQ ID NO: 434391 - DNA, 553 bp, Homo sapiens
gtgaggtttcatccacagaacaagatcacctttgctagccaggcctcctcttctccccctcctgtaattagttttgccatgatccagacacctattagttctgtaacctcgacatggcataagtgggtcaatcatttgcctttttaagagatcttattttgtaagacgcctatagcatgttaatagaatgtgtgctttttcttgtattagtctactttttgtcagttgattttcagtgaactttcagaggatgaaggggacttggcccttacacagtattataataatctgtttatttgtctgatgtcccatctttggtatagcccttaaatgcagagatcatgctttatttatctctatttatgtttagtatctatagaattggcatataataggcactcattaaatatttgttgagtggatgaatagagcagtgattaaaagaatggagaggggtaggggrataagccaaccagaccatgactaaagtgttaataatctaatcaccttgaacttaatcaaacgcttaatggagggttaccaagaagcaata

SEQ ID NO: 434392 - DNA, 578 bp, Homo sapiens
aagccatcctcatgcctcagcctgccgagtagctggaactatcgacttgcaccactacttttttataatctttgcaatgatcatcttacacgactaaagagtccatctagaagttgcactataactgaatcagatattcctttatggttgamcacttaggctctctaaaacatttttataattataattaactatacaaatttttgactttatgcaatgaaaaatttcaaatagagaaaatataatgatgaaccccccaaaactcattacctacatttaacaataattaacatttacaatttttgtacttatttttgccaaggtgtttaaaaatatattacagatatcataatatgtcaccaccaagtactccagtttgcatcgctaaacaataagggcatttaatgccaacatcaatatcagttctaacaaagttagtatttattccttaatatcacctaatacctggccaatattagaagttgccagtagtctctgcaaaggtcttcttaccatttttgctcaaatctaaactcaaacaaggtgcatgaattgcattttgctgtcatggctcttga

SEQ ID NO: 434393 - DNA, 589 bp, Homo sapiens
gagattcatgcatagcataaagatttagacttctagaacgtcttcgattcatgtttctgctataatgttacaacaaaggtttcccaatctggacccccaagagaggattcttggactttgctcaagaaagaattcgaggcaagtccacagagtaaagtgaaagcaactttactaagaatgtaaaggaataaaagaatggctactccataggcagaacagcagcttgggcttcttggctgataatacttatagttatttcttgattatatactaaacaaggggaggattatttatgagttttctgggaaaaagctgagcaattcccagaactgagagttcctccccttcttagaccatataggttaacttcctgacattgccatcgcagcactgtggaagtgttttttaacatgctaatgcattacagttaacatataatgagcagggaggacgaccagaggtcactttccttgtcctcttgatttggtgggttttsgctgtcttctttaccacaacctattttatcagcaaggtctttgtgacttgtatctggtgctgacctcctatcatcctataacttacaatgctt

SEQ ID NO: 434394 - DNA, 627 bp, Homo sapiens
ctcacctacttctctgacattcccttcaggttctagaagagtgtcctagctgagctaaccctaatgccgaccccatgataagggaggaggatcaaaaatgaggactcagaagatgtgggtctcagagtcatcttaatcaccttctagccgtttgatcttagtccatgcctaccctctttgagcctgagttttttctcctgaaaaatgggataacagctgctctgtcaatctcatagagctgcagaatgaatcacatgtgataaggtctatgaacctattttgggaactgcaattcattatatgaagtattatcattactataatgtttttattagcctttaacttaaggatcatttaacatcctctatggttttcctaatacttcagcttatgagcagtcttccaagagataaaggggactcgggttttttaaagggctgcctaagtacttgygtctaatataaagttctagattacttaggaacaatattcccagaatgattagcttggaaaatccatgatgatgatgaatcactgaatatccttggggtgggggtgagaaggaaggaagcagggagagtgagggagaataaatgtgcctcctgcaaagaggcagagatgatgaat

SEQ ID NO: 434395 - DNA, 580 bp, Homo sapiens
  misc_feature (1)...(580): n = A,T,C or G
gtaatagaatttttagctgagtctatgactgtccggcttaaagagtaaactttaggctcaatgacagcagagacatttgtctcttctgtttactcctccattcttaacgcttagaacagtgcytcacacatagtatgtgctcaataaatatttgttgaatggttcctttcacatcaaactcctagcctaataagaactataaaaacacctgtacagttccctcagttcaacagacactggctatgcatgtcctctgtgccggtgatcgtggcacttgctggaaagcaacaccttgtcattcacatcaagatgcacccagtttctcacagatggacaggaaatacagatgtgtaaataaataactgtaatttggtatgacattgctgacgatggatatatgacaaggtctccaagtgccagggaggagggagtggctagaaaggtgtgggaagggccacgagaggcttctcaaagatcagaggcttgaatngngatttgaaagatgagcagacattaaggggaggtagaaagaagaatgttccagaaaaaggaacaacatatgtgaagcagaaagggatga

SEQ ID NO: 434396 - DNA, 580 bp, Homo sapiens
  misc_feature (1)...(580): n = A,T,C or G
gtaatagaatttttagctgagtctatgactgtccggcttaaagagtaaactttaggctcaatgacagcagagacatttgtctcttctgtttactcctccattcttaacgcttagaacagtgcctcacacatagtatgtgctcaataaatatttgttgaatggttcctttcacatcaaactcctagcctaataagaactataaaaacacctgtacagttccctcagttcaacagacactggctatgcatstcctctgtgccggtgatcgtggcacttgctggaaagcaacaccttgtcattcacatcaagatgcacccagtttctcacagatggacaggaaatacagatgtgtaaataaataactgtaatttggtatgacattgctgacgatggatatatgacaaggtctccaagtgccagggaggagggagtggctagaaaggtgtgggaagggccacgagaggcttctcaaagatcagaggcttgaatngngatttgaaagatgagcagacattaaggggaggtagaaagaagaatgttccagaaaaaggaacaacatatgtgaagcagaaagggatga

SEQ ID NO: 434397 - DNA, 633 bp, Homo sapiens
aaaactgttttactacctagattaattattccttttattagtataaatgaccttttctctttgttttcatgcatttctcctcaagttctactttcactgaatgtaatttcttcttttttgtttattattattattattattttgagacagagtttcactctgttgcccaggctggagtgcagtggtgtgttctcagctcactgcaacctctgcctcccaggttcaagtgattctcatgtctcagccttctgagtagctgggattacaggcgtgcaccaccaggcccggctaatttttgtattttcagtagagatggtgtttcaccatgttggccaggctggtctcgaactcctgacctcaagcctcagcctcccaaagtgctggggttacaggkgtgagccactgcgcccagccttatttcttcctttaaacataagattttctgacttctcttcagcgatctgaagacttgggctttcatctgcacattgtaccccttactggggatgacagtggctagtccttcaaatgaagtatggcctcttaaccatggttcttaccatttcccattagtggttgaatttgcaacccctgatctcaagaaagatggcaaacaagtttttctatgtgcca

SEQ ID NO: 434398 - DNA, 605 bp, Homo sapiens
tctcactgtcatttttgtgatttttctgaacctgaaggtatataatgaggaaaaatgagacaaattcaagcaaagagaaatttgggcagaatctctggagggaaaaataatcatggtgaaatccattagactaygtaatagtcatccccaagggggatgacgtaagcctcatagttgcagtcatttaaatgtagactgaaccatgcatttgtgagcagaccccagggaacaatcctgcattgcacaggggatagggaaagcgataggccagatgacctaatagatcttctgtaacttaatttctagggttgtgggatcctaattaaaatgaactatattgcctgttatgaaccctccatgttaatattctgtaaggtctccaggcaagtcaagggggtcttggctttttcttatttcttttgagccagaacccacaggctgccttaagcacctagctgctgtccatcacttcttatagctgacaaagcttgacttaaaaaaaagtttttaaagaaaattacagcacatattatgaactaacattttatacaaattaattgagtgaaatgagagaagtatgcttcattctttgacctgtgataata

SEQ ID NO: 434399 - DNA, 384 bp, Homo sapiens
tgcactgtcagcttccctacctttgaggttttgggactcaaattggcttctttgctcctcagcttgcagatggcctattgtgggactttaccttgtgatcatgtaagtcaattctccttaataaactttcctttatatatacatctatcctattagttctgtccctctagagaaccctaatacactttatttttacaaaacaagaagtgcttatagaawgacttttcaaggaggtttatgcgatcaaaacacactacagtgtgatgctgggtttgcagggcgaccatggaactgttgggcagaaactcacatatagaatagcctgctaccaaccaaagccaggtttcatctttcccaccagcagaatccacctcttccaaatcc

SEQ ID NO: 434400 - DNA, 415 bp, Homo sapiens
ccagactaagtgctgcactcccatcattctctctttcaaattgtcctggaagatctgcagcagctttggtccaatgctcactttggccatttgggccagtgtcatggtcatatggtatagacctgttttcagaggagtttgtttgtggagggggaagggaaccacactgacaaaaccagaggaatctactataatcatttaatgactcctctcccctccagtcttccaactaaataaagaagccaggaaaaagtgaatattaaaamattcacattaagagtgaaaccaatagtaaaaatcatgtcagatcagtccattttttttcttctctccacctatgttagtagtatgaatcagtaagagaggcatatggcagaataatcagaattatttatcaagctaattaaccatagat

SEQ ID NO: 434401 - DNA, 600 bp, Homo sapiens
  misc_feature (1)...(600): n = A,T,C or G
gtgggattactgcccttataaagaaggcctgaggattccctgcctcctccaccatgccagattacagtcaaaacaaaactatctatgaggaagcctcgctagacaatctgccggcaccttgatcttggagttccaatctccagaactgcttgtgcrttacccagttttatagtattttgttttagcagcccaaatagactgagacagagacagtaagaaagtgaaaagacaacccacaggaccatgtgcagtggctcacatctgtaatcccagtgccgaggtggctggatcacctgaggtctggccaggtggattagcctggccagcatggtgaaaccccatctctactaaacatacgaaaattagccaggtgtggtggcacatgcttgtcatcccagctactcaggaggctcaggcatgagaattgtttgaacctaggaggtggaggttgcagtgagctgagctgagattgtgccactgcattccagcctcagcagcagaatgagactctgtcagaaaaaaaacaaggaataaacaagagtctgtccaccaagtgagacannnnnnnnnnnnnnnnnnnnnnnnnnnnnnnnnnnnnnn

SEQ ID NO: 434402 - DNA, 600 bp, Homo sapiens
  misc_feature (1)...(600): n = A,T,C or G
gtgggattactgcccttataaagaaggcctgaggattccctgcctcctccaccatgccagattacagtcaaaacaaaactatctatgaggaagcctcgctagacaatctgccggcaccttgatcttggagttccaatctccagaactgcttgtgcgttacccagttttatagtattttgttttagcagcccaaatagactgagacagagacagtaagaaagtgaaaagacaacccacaggrccatgtgcagtggctcacatctgtaatcccagtgccgaggtggctggatcacctgaggtctggccaggtggattagcctggccagcatggtgaaaccccatctctactaaacatacgaaaattagccaggtgtggtggcacatgcttgtcatcccagctactcaggaggctcaggcatgagaattgtttgaacctaggaggtggaggttgcagtgagctgagctgagattgtgccactgcattccagcctcagcagcagaatgagactctgtcagaaaaaaaacaaggaataaacaagagtctgtccaccaagtgagacannnnnnnnnnnnnnnnnnnnnnnnnnnnnnnnnnnnnnn

SEQ ID NO: 434403 - DNA, 600 bp, Homo sapiens
  misc_feature (1)...(600): n = A,T,C or G
gtgggattactgcccttataaagaaggcctgaggattccctgcctcctccaccatgccagattacagtcaaaacaaaactatctatgaggaagcctcgctagacaatctgccggcaccttgatcttggagttccaatctccagaactgcttgtgcgttacccagttttatagtattttgttttagcagcccaaatagactgagacagagacagtaagaaagtgaaaagacaacccacaggaccatgtgcagtggctcacatctgtaatcccagtgccgaggtggctggatcacctgaggtctggccaggtggattagcctggccagcatggtgaaaccccatctctactaaayatacgaaaattagccaggtgtggtggcacatgcttgtcatcccagctactcaggaggctcaggcatgagaattgtttgaacctaggaggtggaggttgcagtgagctgagctgagattgtgccactgcattccagcctcagcagcagaatgagactctgtcagaaaaaaaacaaggaataaacaagagtctgtccaccaagtgagacannnnnnnnnnnnnnnnnnnnnnnnnnnnnnnnnnnnnnn

SEQ ID NO: 434404 - DNA, 573 bp, Homo sapiens
ggcttttgaattccaaaatctaaaatcttggcaaaaacaatatgtttagaaggaaaattgatctggaaatggtcggcatcagtttttcctacccctaagacaaaataaacctaggggaaaaaacctgttggggataaaaagtagcaaaagtggaagagttagaaccttgaactggtcatggagcagacacctgtggtccgtgccctccgctctgaccccaaaagttgctggtgcagaggagagacaatagacgctccaaaggaaataaaggaaatgaaagggaatatggccagcacccactcctaccctataccccctactgctgcctccaggcccaggtaaagctccacatactccacatatctcagactcttaggatctttcktcaacatgctatgaagacagcagagaagcacatatggctgggaaagtgtatctagatggagaggacccaaaacagcctgaaagttccccaacatgtccctggagttcaggaccagaccaaatattttccaagtgctcaagagaaaaagtcatgagagacccagatggacctcaggcactgcaggatga

SEQ ID NO: 434405 - DNA, 587 bp, Homo sapiens
ccaaagtacctcttccttcatgttctttacaagagatctatggtgtttagtaacatattcttctaaagagtctcagccaggagaagcaaatacttagtctggagccataggacctagcttagtattccactgagctkccccagcacagagggcacactgattagagactccagaaaagaaaggcaaaggcggcaccagagagaaatcctcacatgccatttccctctttcatgccccagctaaagagggcacctcttttacagaaaagtttataccggcataccttggagatattgaaaggtcagttccagaccactgcaataaagtagatattgcaataaaacaagtcatacaatttttttggtttcctagtgcctataaaacttgcatttacacgaacatgtagtatatggcatcatgtctaaaaaacaatgcacacaccttaattttaaaatactttattgtgaaagaggctaatgatcatctgaggcttcagcaagtaataatctttttgctggtggagagtcttgccttgatgttaatgggtgctaactgatcagagtggtggttgctgaaggttgcggtgg

SEQ ID NO: 434406 - DNA, 651 bp, Homo sapiens
ccagataccaagacttcttaccaagcaagcgattaagagatatggtattggcaaaaggacagataaactggctaatggaatataatagagaacccagaaacaaattaatgcatgtttggaactttggaaagtagcagaagtgatatgtcagatagtgaggaaaggagggactattcagtaaatggaggtagaaaaastggttatccacatgacaatggtatccctaaccgcctctcacaccattaaaaacaagaacaatagaactcttagtgaaaatataagtattttttagaccgttagatagaaaatatttcttaaactagacacaaagacgttgattataaaagatggataaatatgattatattcaaattaagaactgttactcattgaaagacatcttaagacagtgaaagacagacttaaaaactggaaaacacaataaaaaaactattaggtcaagaatatataaagaattcatacaagtcaatgagaaaactaaaaacaacccaacaggcaaaagatatgaacagatatttcttataaataatacatatataaagaaatattcagtattatgagtaataagggaaatgtaaattaagaccaaaataagaataatccattccattggcaaaaatttaaaagtct

SEQ ID NO: 434407 - DNA, 557 bp, Homo sapiens
gtcattgaaaacctttgagaaaaactctcgatgggaccacccacccatgccagtgtattcagcagttaagtgtccatctccaaaataaatcaggtgtccttcaaagcactgagtggccccagagagcagacctgcaccttctggcacttagaagtccttctgagtagagcrggctttctactccatcaccctaatgccatggttctccgcagtgagtgattttgcccccccaggacatttgggagtgagtagagaagacatttttggttgtctgtgaggacaacaaacttggggaaggtgctactggcacgtggagggtagaggccagaggtgctgcgaaacatactacaccgtggaggagagactcagacaacaaagaattatttagcctcaaatgtcaataataagaaactctaacataaagttctccagtttacaaaccccacccccacaaactccaaacagtactccacagccatttcagcattgtcacgtttcagtcatcaaggatctacttaaccaagtgcctggccccgctggatgctgtaagacggggg

SEQ ID NO: 434408 - DNA, 557 bp, Homo sapiens
gtcattgaaaacctttgagaaaaactctcgatgggaccacccacccatgccagtgtattcagcagttaagtgtccatctccaaaataaatcaggtgtccttcaaagcactgagtggccccagagagcagacctgcaccttctggcacttagaagtccttctgagtagagcaggctttctactccatcaccctaatgccatggttctccgcagtgagtgattttgcccccccaggacatttgggagtgagtagagaagacatttttggttgtctgtgaggacaacaaacttggggaaggtgctactggcacgtggagggtagaggccagaggtgctgcgaaacatactacaccgtggargagagactcagacaacaaagaattatttagcctcaaatgtcaataataagaaactctaacataaagttctccagtttacaaaccccacccccacaaactccaaacagtactccacagccatttcagcattgtcacgtttcagtcatcaaggatctacttaaccaagtgcctggccccgctggatgctgtaagacggggg

SEQ ID NO: 434409 - DNA, 557 bp, Homo sapiens
gtcattgaaaacctttgagaaaaactctcgatgggaccacccacccatgccagtgtattcagcagttaagtgtccatctccaaaataaatcaggtgtccttcaaagcactgagtggccccagagagcagacctgcaccttctggcacttagaagtccttctgagtagagcaggctttctactccatcaccctaatgccatggttctccgcagtgagtgattttgcccccccaggacatttgggagtgagtagagaagacatttttggttgtctgtgaggacaacaaacttggggaaggtgctactggcacgtggagggtagaggccagaggtgctgcgaaacatactacaccgtggaggagagactcrgacaacaaagaattatttagcctcaaatgtcaataataagaaactctaacataaagttctccagtttacaaaccccacccccacaaactccaaacagtactccacagccatttcagcattgtcacgtttcagtcatcaaggatctacttaaccaagtgcctggccccgctggatgctgtaagacggggg

SEQ ID NO: 434410 - DNA, 605 bp, Homo sapiens
taaccatcaagtctggagaataagttggaaattgaaatatatgcaaaaaatatagtgtgtgyctatacctgggggaagaaaacagggatactggatgggaggatgtatagaattggtcagtacacagtgtttaagatcataagacctggtcttagctggggctgggtttgaattctgactccaccacttacaagcaatgtgcccttgggcaagttcctgaccctcactaagactcaattgccttatctgtgagtagaactagtaatagagcctcccccataaagaggttgtatgccagaaacaaatatgcatatcaaagcaagcactgaaaattggcacaaggaaagtcctcagtaaatgggagcccttgtttttcactgagatgggtcaagaaggctctcctgggggtatgttaaggctgcaagagtctggacaatgatctcggagttggagtggagaacactgaagtggataaggccatcactttgccttggggctgctggataggagtcctgggcttttatattcccttgcccttccccctgaacccccagagccacctccgcctcctctacagctgccatccttgggttacttttgagcag

SEQ ID NO: 434411 - DNA, 522 bp, Homo sapiens
aagcccacgacactgaccattgctccttcatctcctgggactggaatgctcccgtcttcactcttgcagtcaaaatctatccatttactcaaggctcactcaggtggaacctcctgctgcctgcccacatccctctgtcacaatgaatccttctttcctacatgctcctataccagatgacttggccttgagccgcctggagtttactctgtaggtttcagtttgcctgattccttgctakgctgaaagattcaaggtcatctttaagacctcagtgcttttcacagggaattaccatctgaaaaaagccccaagtgaggattttcctttaccgtttgaagacttttttaactcctcaccagcaacaaaaattctgggatgcactgcgttttacattttgtttttgttgtttgttttattttttctggctaagaacacagaaatcaaatctcttttttttttctctcaggccttgccctactctaatttcaatcctctctaatctttattttctactttata

SEQ ID NO: 434412 - DNA, 618 bp, Homo sapiens
ctcttttttttttctctcaggccttgccctactctaatttcaatcctctctaatctttattttctactttatacttgtagttttactattctctgctccccttaatttctgtagaacaagataggatataaataaacagatgtataaataaagagtgggtttttgaaaaatgattgacaacttgaattgaaagcaagactcctgttgtgaaagaagtagagaactcagcccaaattggtaacggtttctatcagtagccaaaatgggaggatataagactcaaaccagaaaacagttttctccctgagactccaagagtgctagaggaaaaacagagaggctactgtgaagacctgcagccttaagccctgagactcacctactaaataggtgcccagcaaacggcgcattacctgagaattttttccttgaactttgactcccaaattmattcccaccatagtgattactagttgttcatagaacagaggtgtgagaagaactgtgggtgatataccaggaggaacttcaggaaagccgtttggaggactcattcttgatgccaaaatccctccctactccttgcgtttgagtatcaactgctgatctccaggagaa

SEQ ID NO: 434413 - DNA, 619 bp, Homo sapiens
cccatttggctgagctcaccaattattccccggttgctatcagagccacagacttttcttctttggggtcattaagcttgtcaaaactaatttgtcaccacaactgctgaacctcattgctctgacagcagcacaaggatcaccctaaataggcccttgcattataagaaagtaaatggctcatgagaacccgctgtgctcttgctgttgccttagaatggtcttctgaccccagaagatgtggaaacagtatcccataagtaacacaggtcacaaaaccttgtactaatcattttggtgttattaaaaataaacaaacaagtagaatgaataaatgcttggaatacaggcttgaatctgatatgtgaccaaaatatactattctccagctttgacaaaattcaaatatattacatgttctctccatgcaaccatctcatggaagtcaggtggaattaaacatgtcataaatcatgggtctctartaagccagtcagaataacattcgttgaaagtttcttgattgtaaatgcaaaactattccaaaatcaaggttgccaacattcaataggaagaaggaaacttgctgtgaggaaatagcatcccgttttgaaacagt

SEQ ID NO: 434414 - DNA, 583 bp, Homo sapiens
ctccagatatgttaagacaataaatttgtgttatttgaagccactaaatgtgtgataatttgttacagcagcaatagaaaactaattcacctactgagtaggctttacccctgcttgcattatcttgctccagcattgttctaggccctacataatactcagttctctcatatttgaaactatcttcatgcctcattggtaatcctttatactctgatttgtattaacctgatacttgtttttcacctgtgacagaggctattgattggtcacctaaagtcattccccactcattctgtcttgctgcctcattctgcagtggctggaaaggcaaacactttccaatccctcctagcaactggggatggcaatataacccagttctggaaacatgaggcatacatggatgtctgctgggagaaagaaaatgtctgaggaaaacttttgtttccctggtgaaaagggaagttatcaccratgttaccatttctctgtcttcctgctttaaatatgagcgtgatggttagaactgcaatagctgtcacaaccatgaggcaaaggtcaagagatccacaacgacatg

SEQ ID NO: 434415 - DNA, 597 bp, Homo sapiens
tcttgtggtatataatatattaatataaatacatgtttctctcttgtttagcccagcctaaccatgacccaaatactcatcattgtttatgtggagcagatggtaagtttcttctttgggatttgcttcttttggattaaaccatagcaagttgatgggttggtgtgcagtaatggattattcatggttacctggaagttccaaaatgccttggttattttatgttcgacagggaactagtattgagttgctgtttaatctgtggtcaatgatctttaatttcttttcttctttcttasatttttcaaccttttaactccccatacctttaaaatggagaatttcccaagtgtttaatccttagtggcagtctatgttgtaggtccacgtatctagaggacttcctgttaactgggaaatgccaggaagtgtcaagctttggggctttgctgctcatttgggtgctcatttgggcttttctttgtgttggcatctcatagtagtttatggtaagacttctctcagaatactcactgttcgatgtttttctcattgttgattgatagctgatctcattatgcttggccttgccacaca

SEQ ID NO: 434416 - DNA, 463 bp, Homo sapiens
cagtgaacctgagccagaggataatgtcaggtgaagccattttttggtagcactttgttagcaaattgctgaaatagatgcagtctaattaatgctatttagcttagagcagcagtgccttcagatgcttgcctgtgatctttttatccatcagtaattaaagcggagggttagaatagtcagtaaattccagtgagatgtgtaagctgtagctgttaaacctaagtgtctagattagtatgcgtgcaggctttcgtcctccaatccacttttccctctgagaccaggcacaagatcggctagatatcatatctaggtgtttagctctgactatgtgatctgaatgttgctgtttggagactgattaaattttcaagctgcttaacctacaaagttcagttatacktagacacttaatatagtttgccttaatcttctctattaaagagttcttcctcaaaat

SEQ ID NO: 434417 - DNA, 607 bp, Homo sapiens
atggattcaggtagtaaatgattgccattctagaaaggcttttatttaaagaaaactactgtgaattcgaaaaatctttctggatgagttgcttacgtttatctttacgtataattttttgtttatctttacacctaatttgtcctggttctttgtctttgtgctcttttgttaagggtggagtacagaattgaaagccacgctcctaaacccatcacaaacaatctggctctgacagattcagtgtgaacactgtgtattaacccttggagtctctggctttcattaaagcattggcgcttcaggccaattaattccacggttctctctttggattgtcacatgtttgcttgtgcttctcaatttttctgcatatattcaagggccttcctgcctaaccctctagaaatagttaattctacttaactttctattaggatagagaggcttgcccagaggagagttacagarttaatggaaacattttggattttttgtttggatgatgatgatgttggttggttgtttttgagcctaaaggggcctttggtatttagtacatactatgttcacaagattattaaatttataaacaggccgggcgcgg

SEQ ID NO: 434418 - DNA, 607 bp, Homo sapiens
atggattcaggtagtaaatgattgccattctagaaaggcttttatttaaagaaaactactgtgaattcgaaaaatctttctggatgagttgcttacgtttatctttacgtataattttttgtttatctttacacctaatttgtcctggttctttgtctttgtgctcttttgttaagggtggagtacagaattgaaagccacgctcctaaacccatcacaaacaatctggctctgacagattcagtgtgaacactgtgtattaacccttggagtctctggctttcattaaagcattggcgcttcaggccaattaattccacggttctctctttggattgtcacatgtttgcttgtgcttctcaatttttctgcatatattcaagggccttcctgcctaaccctctagaaatagttaattctacttaactttctattaggatagagaggcttgcccagaggagagttacagagttaatggaaacattttggattttttgtttggatgatgatgatgttggttggttgtttytgagcctaaaggggcctttggtatttagtacatactatgttcacaagattattaaatttataaacaggccgggcgcgg

SEQ ID NO: 434419 - DNA, 508 bp, Homo sapiens
ccattctaaaatttcaaatttattgccagaaatttttcataagatttttaatgactgtaagacttcaaaattaagtgctgatactggtaatatatagtcactcttcttttcttgattagtgttgctagaatctatttaattttttttttttgagaacctatttaattttattgtttttttttcctcccattgaastaacctttagctttgttgatatatagatatttgttcttttccctccatgtacatttgttttctattgatttctgcttttgtcttcattattctcttctacttttttgggggattaaattggcattctttttccaagtttttgagatggagacttaggtaatttatttttggtcttttccaatatatgcacttcagtgttacagatttctctctaatcactttagccttatcccacaaagtttggtctcacatatttattatcatttagttcatggtattttctgatttttattttttattatgtacccatgga

SEQ ID NO: 434420 - DNA, 505 bp, Homo sapiens
tcttttgtggctgattttcatccagctgcacctacccataaaaggcrccagcaaagagggctacacatttatctgtcagttcagaatgactttggaaaatggcacataaacctaaagcaaatctttgttaacctctgaaatcagagcctccataaatcactgctaaggacagcttataacctcctcacagccaactcatcatctccattcagtgtttgataagatgctccaaatcttaggctggttatacagaagaaagctacacatcaagaaactaagccttatgtttggtgcccacctgtaaagaaacacacatacccattgatcaattacaagtttttgctccaaagctttatttcagacaacattcccacctgcaccaatggatctcttcctaaataataaaaacgctacaaaatccttggtagggctaattagctatggctaatcatttgatttgatgacttgttattatttgaaattaaacattaagattcttaaatga

SEQ ID NO: 434421 - DNA, 583 bp, Homo sapiens
aaatccactttgacaagctacctttttgttggattgtttgatccattcacattttaatgtaattattratagagttacattttactttttgttttttgtatgtctcatgtcatttttctctatttctcctttgtgctttcttttgcaatgagaggatattttctaatatagcattcaaatttttttcttttcttattcagtggccagttactagaaggattctaaattcattagtaattttttccactatatattttttcaaagtcattgttctagagcttaccctatgtatcttgctagaatcaaattcagatttatacttgcttagtttcagtaatacatgctaaaatttattgaactttactgctatatagttcagttcccatcccccctttgtatattattgttatatatattacatatattgacataatccaacaatacatttttttaagagttactttaccgtctgtagccatttccttagcccactgcaactttgtttccatccacccctttttgctattagggcaaatatattacacatatattacattctgccttataagctcaacattatact

SEQ ID NO: 434422 - DNA, 555 bp, Homo sapiens
aatcgcgaggtcagaagatcgagaccatcctggctaacatggtgaaacctcgtctccactaaaaatacaaaaaaaaattatccaggcatggtggtgggtgcctgtagtcccagctactcgggaggctaaggcaggagaatggcgttaacccagaaggcggagcttgcagtgagccgagattgcgccactgcactccagcctgggccacagagcaagtctgcatctcaaaaacaaaaacaaaacaaaacaaaaaaataagaaaagtgtcagaaaagccagaggaagaaaaaaacatcaccccaatccatgatccagctattaacattttggcctaaagtttctagttttgtgtgtgtgtgtccaaatrgccatttaatttttagacaaaattataaccgcctgaaatgtaccatttaatccctgcccttttcacctaacgatagataatgaacatttgtctcacatcattaaatgatgtcctacaaagtgattttaatggttaaattaaatcactttgtgttaatgaataattatttgattatttgtttaattagc

SEQ ID NO: 434423 - DNA, 546 bp, Homo sapiens
caacctcctggactcaagaaatcttcccacctcagcctcccaagtagctgggaccaaaggcatacgccatcatgcctagcttttttttttttttgtaaagtagggtctccctatgttgcccagactagtctygaactcctgggctcaagtgatcctctagccttggcctcccaatgtgctgagattacaggtgtgagctaccacacccacccagttcttttcttataagggcaccagtcaaattggatgttgggccaacccacaggcccacccccctaatccagtaggacctcattttaatgactaattacatctgccaaaagccctgtctccaaataaggtcacattgacagattcctggtggacatgaatttggggagaacactaacccagtaaacatgcccaagggggattgtactttttttgaatggcttctactgctccctttaatatgccaattcctatgtcactgatatgtttggttgtgtccccaatctcatcttgaattgtagctcccatcattcccgtgtgttgtgagaggaaccc

SEQ ID NO: 434424 - DNA, 433 bp, Homo sapiens
gtggcaggcttagccaagaaatttacatcctcacacttttggaggctagaagtcgtattaatccattctcacactgctacaaggacatacccgagactggataatttataaaggaaagaagtttaattgactcacagttctgcagagctggggagatttcaggaaagttgtaatcatggcggaagggaaagcaaacatgtccttcttcacatggcagcagcaaggagaagtgcagagtgaagcagggaaaagtcccttataaaactattatatcttgtgagaactcactatcaraagaacagcatggaggtaaccgcccccatgattcaattacctcccactgggcccctcccacaacatgtggggattatgggagctacagttgaagatgagatttgggtgggtacacagtccaagatcaaggtgttggtag

SEQ ID NO: 434425 - DNA, 228 bp, Homo sapiens
ttagcggctgagacttgtatgctgatacaggagtatttgtgacacataccgtttaaattttttgtttactctgagcaatggaatcttgtcataaggtggaatttcttacatatagtgtgratccacatcagcaagagcttgtgctcacaacaagagcttgcgttagatatctatttaaaataatttttatttttctcaaagtggaaatagagacataaacttaagtat

SEQ ID NO: 434426 - DNA, 228 bp, Homo sapiens
ttagcggctgagacttgtatgctgatacaggagtatttgtgacacataccgtttaaattttttgtttactctgagcaatggaatcttgtcataaggtggaatttcttacatatagtgtggatccacatcagcaagagcttgtgctcacaacaagagcttgcgttagwtatctatttaaaataatttttatttttctcaaagtggaaatagagacataaacttaagtat

SEQ ID NO: 434427 - DNA, 228 bp, Homo sapiens
ttagcggctgagacttgtatgctgatacaggagtatttgtgacacataccgtttaaattttttgtttactctgagcaatggaatcttgtcataaggtggaatttcttacatatagtgtggatccacatcagcaagagcttgtgctcacaacaagagcttgcgttagatatctatttaaaataatttttatttttctcaaagtggaaayagagacataaacttaagtat

SEQ ID NO: 434428 - DNA, 652 bp, Homo sapiens
tgtcaagtgtcctagtcttcatattgatataagattcacacaccacctttcagatgttattatctttctttctaatgtatagattcttcctcctttttataaagcactttctccataagtacttgcatgttttttaaaatatatatwttgaaacattatcattcatctatgtaagcaagagtggaaaacattggagtggttcatgtaaaatttctgaattaatgatgtcagaaaaatccatactttctaagttgactttttaaaatacaaatatgacattgacaatcaactgccatacattatatttgtttatatagcagaatatgcattttggagtctcacaaactgcaattcaaagcctatgtttgtcacctactaaatatgtatccctgggcaagttatttaaacttagtaaaggtaatgtctgtaaaacaatttgcacattgcctagcaaatagtgaatgctcaataagcagtagtttttaaaattatgtaaagatcatatgtgaaaaatgattaacaattattttatcaataacattatttgtaaatatgtgtgtgactttaatattttttgcatcaactttttgaaaattctgaagggagtaaaattctttatattattttcagaatagctagtcatgaattcaga

SEQ ID NO: 434429 - DNA, 581 bp, Homo sapiens
tgtttcctttctcaagtggactattccatttttttcctttgaaatgcattttctcactttgttctagatgagaaaatatagaacattaaaattcaagaaaatattaaagatctgagatagaacatgttataaagttgaacgtcacacagaaaactttcaaaataatcatagtatcaatttgtttaatagatttttttaactccaaaatattttcaatgtagcatgtaacttgaatactgcttagatgtgcctttggcagttatatgtatggtgaaaaatatttttcctaataagaatctggttcatatccaattcacctgtcttatctatatatacatcatcattcaattggtgtgactatattaatataaatcctcattcaaaacccatcacccaaagggaatattgttatgaacacttctctatgtttcatttttaaacattattcttaagtcaaacctatttgacaatacaatatgtagaaaacaatatacyaaatgttacatggggtaagactgattaagttattatggtgtggtaaaaaataattatgtacaaaatctgatattcttggttcaaat

SEQ ID NO: 434430 - DNA, 605 bp, Homo sapiens
ctttctggtctctggataggggatacttcctttaagaagagtgataaagcacaaattataaaggaaaatgtagccatttaactrcataaacattcaaaatgttatgaaagcaaaaatataacaaaaatatggttaaaatagttccacttctagctgcgatagaataatgaggactaaacttactagttcaccataaaaaaataggaaaatgaacaaaatactgtatttaaaattgttttccatttggacagaggcagcacaggactgtcatgcctcagtaaagggcaactaatgagtatactattatcactgcctacctttctgcttagagccagcacattccagaccacagctcaaggagtaagaacacaagcaaagccttgtggttatgttgagttgaggagatagaggttagaattaatggtgtttgcagtgggttcaatctgtgatgaccggaagaaaggtatacagagtagaagactcagaaatattttacaacatttcatttgttttacatttattgggggttgctttatgacccagtatattatatatcctggaaaacgttctatgtgcatttgagaaaataaatattctactactgt

SEQ ID NO: 434431 - DNA, 527 bp, Homo sapiens
aatgacaagagggctaggctgctactctgccataatggccttgtaccagttcaaaagcttattatttgaaaaccgtggtgtttgtgccaagatctttcaatgttcatcagcataaaacaagttagacttctgtcgcccaakctttacactggaaagagtatgtgccactgttgctttagcacaactttctccctggatcattttgtaactcttagcatactaagacctcccagaagggaaaggtgactttatgactattttctaagcaataatgagaatgctgctttctgtaataagaaactttttggctctttttggctaaattaactctcttttaaaaaatgtttaaatttactagtgtctttgtgaaggaaagtatgtatatgatataacatatttagataaacggggtttcatactttaaataacataatacaatctcctcacagactatatccacatgtattacctaggcttactgcctgatataattaacaataaaatgaaaaggaaactcatggatggaa

SEQ ID NO: 434432 - DNA, 561 bp, Homo sapiens
aactttttggctctttttggctaaattaactctcttttaaaaaatgtttaaatttactagtgtctttgtgaaggaaagtatgtatatgatataacatatttagataaacggggtttcatactttaaataacataatacaatctcctcacagactatatccacatgtattacctaggcttactgcctgatataattaacaataaaatgaaaaggaaactcatggatggaacattatgttcacaccaaattttgtcataaacagtgttacttagggtgtactaaygtgggtcttttccctattagtaaaataaatgcaattattttggaggagtttcaagggaggacttagttcttgggttaagatagcaaattccacctagatgtttatttccttttctgtggcaaatatggaaatttgcctctcatatcaattttccctttttacctggtaatacaatccctaatttttagctgggtacatttttcaatggctattgtaatgctgtgtggccaaatgactaagatctagttagtgaaatgtaatataatgagggtgccctt

SEQ ID NO: 434433 - DNA, 547 bp, Homo sapiens
ggaatggctcagtcctggcagtatttatcacctgctaattgaagagcccttgggccctgaataaccaatagcgatacccaggtaccatgttgagagtyaaaggtaagactctgaggcttcctggctttatgtaagacacagcacattactacctgtgatggctatgggacaaaattcctttgcttgagaaaagcaagtgaaaaagtaaagaaaactttgtcttacatcttaggtcctagcagaggcacagggaagtagaacaccaagtaggttcttggagttcccaactccaggacttgactcttaaacagaatttctagacctgcctcgggccagagcagagcccactgtcccgaagggtaagtcccaggaaaggccgcattcaccacaaactgacttaagatcccttcaaccttaatggaacatcagcagtagccttgcagtactctctgtggcctgtagtggcagtggctactgtgtgacgctcttttgcctttggaaaaaggagagaatagtgggaaggtctgtatcgttttgtatgaatgcc

SEQ ID NO: 434434 - DNA, 530 bp, Homo sapiens
gagaggagcctaacaagtgggtggtatattaattgaggcagacagcttaatatagagaccagaaaaagaggcaattgagcagaaccctgctacgactaccaccatctcagagtgactgtgcacatgcccaatgttgtgacctctcaggagagaaaagaaaggctgcagactacatggtaacatacttcaccaaaatagcccaggcaaaccacaaaactaataaaaaggcaaagarcaaggaccaaaagagcctgggggtggaggagacacagtgaggaagagagtaagtaaacacagttgctatattacatacctacaatttagaattttcaagaaaagtgaaagaaaattatgcttaaataagtaatagaagctataatgacaatgtctcaccaaatacagaatatcaataaataattagaattataacaaaagaatcaagtaaaaattctagagttaaaatgtatgattactgaaataaaaaattcactggagagtctcaacaatgagcttggcagaagaaataatta

SEQ ID NO: 434435 - DNA, 563 bp, Homo sapiens
gccagtgggtcaatgaagatattaagtagaaaattgaaaaatattttgtgacaaataataatggaaacacaacatatcaaaacctactrggtagagcaaaagcggtactcagagggaagtttatatttataagtacctaaaaatggggaaaaacttcaaataaacaatctaacaatgcatcttaaagaactagaaaggcaacagcaaacaaaacccaaaattactagaagataagaaataataagatcagagaataaataaatgaaattgaaataaaaaaaaatacaaaagatcaatgaaacaaaaagttgcctttttgaaaagttaaacaagattgacaaaaatttagtcagactaagaaaagagacaatccaaataaataaaaccaaaaatgaataaaaagagacattacaactggcactgcataaattcaaatgcaaattttatttatcatatttatttatcatcagtggctactacgagaatctatatggcaataaattggaaaatacctagacacatacagcctaccaagattgaaccagaaagaaatccaaaacctg

SEQ ID NO: 434436 - DNA, 563 bp, Homo sapiens
gccagtgggtcaatgaagatattaagtagaaaattgaaaaatattttgtgacaaataataatggaaacacaacatatcaaaacctactaggtagagcaaaagcrgtactcagagggaagtttatatttataagtacctaaaaatggggaaaaacttcaaataaacaatctaacaatgcatcttaaagaactagaaaggcaacagcaaacaaaacccaaaattactagaagataagaaataataagatcagagaataaataaatgaaattgaaataaaaaaaaatacaaaagatcaatgaaacaaaaagttgcctttttgaaaagttaaacaagattgacaaaaatttagtcagactaagaaaagagacaatccaaataaataaaaccaaaaatgaataaaaagagacattacaactggcactgcataaattcaaatgcaaattttatttatcatatttatttatcatcagtggctactacgagaatctatatggcaataaattggaaaatacctagacacatacagcctaccaagattgaaccagaaagaaatccaaaacctg

SEQ ID NO: 434437 - DNA, 563 bp, Homo sapiens
gccagtgggtcaatgaagatattaagtagaaaattgaaaaatattttgtgacaaataataatggaaacacaacatatcaaaacctactaggtagagcaaaagcggtactcagagggaagtttatatttataagtacctaaaaatggggaaaaacttcaaataaacaatctaacaatgcatcttaaagaactagaaaggcaacagcaaacaaaacccaaaattactagaagataagaaataataagatcagagaataaataaatgaaattgaaataaaaaawaatacaaaagatcaatgaaacaaaaagttgcctttttgaaaagttaaacaagattgacaaaaatttagtcagactaagaaaagagacaatccaaataaataaaaccaaaaatgaataaaaagagacattacaactggcactgcataaattcaaatgcaaattttatttatcatatttatttatcatcagtggctactacgagaatctatatggcaataaattggaaaatacctagacacatacagcctaccaagattgaaccagaaagaaatccaaaacctg

SEQ ID NO: 434438 - DNA, 563 bp, Homo sapiens
gccagtgggtcaatgaagatattaagtagaaaattgaaaaatattttgtgacaaataataatggaaacacaacatatcaaaacctactaggtagagcaaaagcggtactcagagggaagtttatatttataagtacctaaaaatggggaaaaacttcaaataaacaatctaacaatgcatcttaaagaactagaaaggcaacagcaaacaaaacccaaaattactagaagataagaaataataagatcagagaataaataaatgaaattgaaataaaaaaaaatacaaaagatcaatgaaacaaaaagttgcctttttgaaaagttaaacaagattgacaaaaatttagtcagactaagaaaagagacaatccaaataaataaaaccaaaaatgaataaaaagagacattacaactggcactgcataaattcaaatgcaaattttatttatcatatttatttatcatcagtggctactaygagaatctatatggcaataaattggaaaatacctagacacatacagcctaccaagattgaaccagaaagaaatccaaaacctg

SEQ ID NO: 434439 - DNA, 498 bp, Homo sapiens
cactctgcatggttttgtgtactcttagcttagctcccactgataggtcagaacatacagtattttgttttccattcttgagttacttcacttagaataatggcctccaatttcatccaaattgctgcaaaagacattattttgcacttttttatgccaagccccaattctttcagtaacttcaagatggtatataagcttctgaatcccattagggggctgggagataataactattgttctcccccatgtgcacattcataaatttgtgcgcctttttyccagttaatctgccacttgtaagttgattttttagtgaaacttcagagagtaaagaggaagttttcccgtgaccctgactgttttggcactgtgcacagtataccaaagctctgctcttcctgaaatcgcagtgaatggaacccagaatctaataagccagaagaagtgtaagaatttcttaccaagcacatggtagaaatcactgttattctcttt

SEQ ID NO: 434440 - DNA, 590 bp, Homo sapiens
tgtgttcttggcatctttgtaaaaaattagttgattgtaggtatgtggatttgtttctgggttctctatagttttccattcatcgatgtgtctgcttttatgctagtatcatgctcttttggttactatagctctgtagcataatttgaagtcaggtaaggtgatcttccagttttgttcattttgttcagggtagctttggctattccaggcatttgatgtttccatataaattgcatgatttttttttcgatttccatgaagamtgtcattgatattttaatagggattgcattaaatctgcagattgctttggatagtatggacattttaccaatagtgattttcccaatccatgaacatagaatattttttaaattttttgttgtctccttcagttttacaattttcattaagagatctttcactctggttaattcctaggtattacattttacttgtgactattgtttttcacttatattttacacttttcactgctggcatatagaaatgctactggtttttgtatattgattttgtatcctgaaacttcactgaaattgatcagttcttataattttctagtg

SEQ ID NO: 434441 - DNA, 610 bp, Homo sapiens
ggcatccatgttgtcttccagatgttatataaaaggctttcagtttttctccattcagtatgatactatttgtgggtctgttgtaaatggccttaattatgttgaggcaaatttcttctatatccagttttttgagggtttttattatgaagcaatgttcaattttatcaactttgttcagaatcaattgaaatgatcttcaatctctcggtttgatgtatcatattaatttgtgtatgttcaaacatctttgcatcccaagattaaatcctactttaaccctggtcatgacaaataatcttcgtaatgtattgttgaatttcatttgctagtattttggtgaggatttttggatcaatactcataagagatattggcctatagttttcttcttctttttttttgatgtgtctttttctggtttcagtatcagggtaattactgamctcataggatgtgtttggaattattccctcctctatttttagaatagctcgagtttgattgatattagatcttctttaaatgtttggataattaagcagtgaaaccgtcaggtcctgagcttttctttgctgggagactttttattatggctttgatctcatta

SEQ ID NO: 434442 - DNA, 567 bp, Homo sapiens
aacccatcattttaacctgataataacttttaattttttgcataaacaaacaaacaaaaatgaaaagggaattgaataaaagttckatgccttaattttgttcccttgctttttaacattttgttgtttctctttatatcttaacgtaccaactacatctttaaaagtttttgtaattactgtttttgattggttcctcatttagtctttctacttagggtaagagtagtttataaaccacagttacagtgttgtactattctgcatttcctgtgtacttgctattaccagtgagttttatacttttagatgattgcttattgctcatttcatcctttgttttctgattgaagtcctccctttagcatcccttgtaggacaggtctggtgttgaagaaattcctcatcatcttttgtcttggaaagtctgtttctctttcacatgtgaaagatattttttgccagatatactattctagggtaatagggttctttttcttcagcactttatacatgtcatgccactcttgtctggcctgtaaagtttctaccgataagtctgccacc

SEQ ID NO: 434443 - DNA, 543 bp, Homo sapiens
tcagacccaaagccccacacagcactgggtcttgcccaaggatttctataaccactccttggttaytgcctatgtttattcaaggttctggggctttacatttagctggtggcaaaagccacccaggcctgtgtttttttcttcagggcagtgagtttccctaggctctgggtgggttcaaatgtgcttctgtaagtcaggaactagagtcagaaacattagctgtttacctggtattttactgtactatgtgtgagctggtactcaaaccacaggatgcagttctttccactcttccctcccctatccaaaggcagaggcgctacaccccatagttgccaccaccccaggctacaaggagtactgctagacttacactgatgtcccttaaaagcccaagggctctaaagtcagcttggagtgaatgctgcctggcctgggactcacctttcagggcagtggtctcccctctggccttatatgcaagtccagaaatgccagccaagagtcaagtcctggagtcagggacttcaagagctcgct

SEQ ID NO: 434444 - DNA, 478 bp, Homo sapiens
gggtgggttcaaatgtgcttctgtaagtcaggaactagagtcagaaacattagctgtttacctggtattttactgtactatgtgtgagctggtactcaaaccacaggatgcagttctttccactcttccctcccctatccaaaggcagaggcgctacaccccatagttgccaccaccccaggctacaaggagtactgctagacttacactgatgtcccttaaaagcccaagggctctaaagtcagcttggartgaatgctgcctggcctgggactcacctttcagggcagtggtctcccctctggccttatatgcaagtccagaaatgccagccaagagtcaagtcctggagtcagggacttcaagagctcgcttggtgctctatcctcctgtggtggtgttggtatctaaggtgcaagacaaagtcccctttacttttccccttgcttttctcaagctgaaggagttttgccttata

SEQ ID NO: 434445 - DNA, 596 bp, Homo sapiens
aatctattgataaatgtgatgtaaaacttatatcattttttaaatggggaagcttaaagctatagtgtctagggttgcacacgtgggtaataaaaccaaaagacatgcaggaaagtgattactaaaatgtcagaatgatggttacttttggaaggaagaaaaaattgtgattgagatgggaccaatggaaagacttctagcataacgtgaaaagttccttttcttgacctgtgtggtgggtataatggtattcactttgtagtaattatctaagatcatgttatccctggggaaaatagtgattagtagaaagcataagtaggaattctgggatgctggcctgtattctgcttcttgatctaaatgccaattacatgagtgttttccatttcttataattcattgacctgtttacttacatgcacttttctatatgtaaactatatttcataaagaaattaaaaatgtcattggcattccattaaacacttcagagagtaatgcttcttccattaggytcttctaatgagaaatattctcacatttttaatttcaatatacaataatttaaaaattggaccctgatcatggaacaa

SEQ ID NO: 434446 - DNA, 524 bp, Homo sapiens
agctgtaaacactgttcaataaatttagttaatatcaactcctcatagggcaaagaatttgtatgccaactcccaaaatggaaagaatggctcccaggcaagacgtaatgataaccagctgaaagytattaacatatctaaagataaaatatatagatgtaggtgtgcttgctgcttgtgtggatggtggtatagtatggggggagaagagggaaaagcagaaaatgtagaataaaaatagaggggtagtgaagtaaaccttgacattgcccacacaagcacatatcaggaggcaagaactcttaaataataaattagcctttcatttctagaatgcttccaagttgaaagttctcaagcccctaggaattctctttagtactatctaagttaatgagtgttcattctagctgattgcaagttctgtcttctatggccttctctttccctagtatttctgattatccctggaaaattcttacatattccacaaattcatgctggcttcacttatcacctttcct

SEQ ID NO: 434447 - DNA, 472 bp, Homo sapiens
actccagtgtgaactaacatttctttcttaatgtcctaaatattttctaactctaatctgtagaagctatcagatctcttctgtgaagtaatatagcattctggttaaatgtgtggacactgatactatgtcttaggttctaatccatttggccacttactagcagtaagaccctagggaagttactaacttgatgcctgaattgtatttttttttgtaaaacaaagataatactagtactgataycatagaccttcattaaagattaaatggactacttccaagtgagcattaggagcagtgcttggcacatagtacatgctagctaagtattatccatatggaagcttgggaacaaactattgagaatttcaatgaagggaaaaataacaaaaacaaggtataatattttacctgatgttcattgactagtgcctatcaagggaacttcctaactggtatttcagtctgc

SEQ ID NO: 434448 - DNA, 472 bp, Homo sapiens
actccagtgtgaactaacatttctttcttaatgtcctaaatattttctaactctaatctgtagaagctatcagatctcttctgtgaagtaatatagcattctggttaaatgtgtggacactgatactatgtcttaggttctaatccatttggccacttactagcagtaagaccctagggaagttactaacttgatgcctgaattgtatttttttttgtaaaacaaagataatactagtactgataccatagaccttcattaaagattaaatggactacttccaagtgagcattaggagcagtgcttggcacatagtacatgctagctaagtattatccatatggaagcttgggaacaaactattgagaattkcaatgaagggaaaaataacaaaaacaaggtataatattttacctgatgttcattgactagtgcctatcaagggaacttcctaactggtatttcagtctgc

SEQ ID NO: 434449 - DNA, 472 bp, Homo sapiens
actccagtgtgaactaacatttctttcttaatgtcctaaatattttctaactctaatctgtagaagctatcagatctcttctgtgaagtaatatagcattctggttaaatgtgtggacactgatactatgtcttaggttctaatccatttggccacttactagcagtaagaccctagggaagttactaacttgatgcctgaattgtatttttttttgtaaaacaaagataatactagtactgataccatagaccttcattaaagattaaatggactacttccaagtgagcattaggagcagtgcttggcacatagtacatgctagctaagtattatccatatggaagcttgggaacaaactattgagaatttcaatgaagggaaaaataacaaaaacaaggtrtaatattttacctgatgttcattgactagtgcctatcaagggaacttcctaactggtatttcagtctgc

SEQ ID NO: 434450 - DNA, 472 bp, Homo sapiens
actccagtgtgaactaacatttctttcttaatgtcctaaatattttctaactctaatctgtagaagctatcagatctcttctgtgaagtaatatagcattctggttaaatgtgtggacactgatactatgtcttaggttctaatccatttggccacttactagcagtaagaccctagggaagttactaacttgatgcctgaattgtatttttttttgtaaaacaaagataatactagtactgataccatagaccttcattaaagattaaatggactacttccaagtgagcattaggagcagtgcttggcacatagtacatgctagctaagtattatccatatggaagcttgggaacaaactattgagaatttcaatgaagggaaaaataacaaaaacaaggtataatattttacctratgttcattgactagtgcctatcaagggaacttcctaactggtatttcagtctgc

SEQ ID NO: 434451 - DNA, 539 bp, Homo sapiens
tcacatgggtaacatttgggcaacaatttgggcaagatatttaagctttctatttcatcatctataaaatggggttattactgccatctacttcaaagggttgcttccagggttaaatacataaaaaaataaataaagctcttattgcattatctggaatatagcaaatactcaataaatcttaaatatttttaaattatggtaatagatcccaggaaagagagactttaaaaaaaaaaagttttctgtgctccttgttctaactttcctctggaaccttaatgagtttctgatgcagttcacrtctacaaatttgccaagaatagctgatgagattcaaggtgactgtaaaaagttgcaccttttttacatattgtgttttttaagagaagaaaagaacatgttaacaagggtttagctcttttttaaaaaagggcaagataaagtaagtcatataaatcacctgattttcttattttaaattattgagtacattttctatgccactttacttatcttctttaatgatgctattctga

SEQ ID NO: 434452 - DNA, 565 bp, Homo sapiens
aagaggagaaaaacagaatttttttttacttttaaaaggtcctacaggtatgttctgtgatttggtattttgtatttggtaaatatgtttcatggtattgttctttccatttttatattaacatttttggatttcatattaaatgaatcttggcatcaaaatgtttcaacatgtctctctggtgaagctcatcctgttggttgatttatttgtcttatggctgtagttttctctgtgattttatgtaagtcttgttgtcaaccttaaacaatcaaacggctcaggatgtagttaaaagagtttattcaagtgcaragtgtgagggaagctgtctgggaagcagaacttcatcaaggaagaatggtaagaagaatggtaatcagggctcctgacatgagaaaaatgaggattgtttatataggccaaacaaagctgctgaacagaattacatttttcatacaaaggctaaaatacagacataagacctaattagctactattgattacacaagaatggagtggtttgaaattcttttataaagaggtaacagtcacaagggtctct

SEQ ID NO: 434453 - DNA, 565 bp, Homo sapiens
aagaggagaaaaacagaatttttttttacttttaaaaggtcctacaggtatgttctgtgatttggtattttgtatttggtaaatatgtttcatggtattgttctttccatttttatattaacatttttggatttcatattaaatgaatcttggcatcaaaatgtttcaacatgtctctctggtgaagctcatcctgttggttgatttatttgtcttatggctgtagttttctctgtgattttatgtaagtcttgttgtcaaccttaaacaatcaaacggctcaggatgtagttaaaagagtttattcaagtgcagagtgtgagggaagctgtctgggaagcagaacttcatcaaggaagaatggtaagaagaatggtaatcagggctcctgacatgagaaaaatgaggattgtttatataggccaaacaaagctgctgaacagaattacrtttttcatacaaaggctaaaatacagacataagacctaattagctactattgattacacaagaatggagtggtttgaaattcttttataaagaggtaacagtcacaagggtctct

SEQ ID NO: 434454 - DNA, 566 bp, Homo sapiens
aaattgcttaaccactcagcttactgctaccactactagaacctgagcaagctacgtggaggcccaggagttggcctgcttggtcatgacaacactggttccagcatatgccaccctgaagcccaagaacaggcatgcttagttcaccactgcaactacgggggcaaaaaaaaaaaaaaaaaaaaaaaatagtccacataggtatatctgtccccagcaaaatttcaccatagcctgcactaataamcacacattaatgactggggaaaaatagataccactgatactgttcacagctgaagaaacaatacagagaatacactattgcacacactcaaaatcaaatacaaagggccctacacaataaacaccactgctatatcttcacgtaaaagtccttgtctatgaaagcaaattaaaaaaaaacggaagcattgactattacaccagatgcacagataacaatgtaacaacagagaaaacatagtaaagcaaggatatacaacacttccaaataagcacaataattattcagaaacagattccaataaaaaataaaatcacaa

SEQ ID NO: 434455 - DNA, 433 bp, Homo sapiens
tatttaaagtgctgaaagaaataaaatgtccctcaagaatactattttcagcaaacttattctacattaataaaggagaaatagtctttacaacataaccaaatactgaggaattttattaccactgaacttgtcctaaaagaaatgctcaagggaattctaaacctgcaagagaaaggagggcatttgccattaggaaaacaaatgaaaatataaaactcactggtaaagcaaacatacaaatgaggatgacaraagatccaaatggtactaatacaaaattcagaaaaccaaaaggagaataaacaaaagaaaaagagataataaacacacaaaacaatcggaaagcaattaacaatatgataagaaaaacctcacatattaataataaccttaagagtaaatggattaaatacttcagttaaaatatgtt

SEQ ID NO: 434456 - DNA, 589 bp, Homo sapiens
tttctttgacagttttctccctcaatgctctttggggtgttgaaatctcccactattattgtgtggttttctaagtcttctcataggccaagaagaacttgttttataaatgtgagtgcatatttatttaggtgcctacatatttagaatagttaagttttcttgttggtactctgtattattatgtatgcccttcttcaagaatatcaactcctactttttgttgttgttttccacttgcatgayagatctttcttcatctctttactttgagcttgtgtgtttcactgcatgtgagctgggtctcttgtagactgtagatagttaggtcttatctttttttccagtttgctactccatgtcttttatgtgggggcatttagcccatttacattcagggttagtattgatatgtaagattttgattctgtcatcatgttgtaagctggttattctgtagacttgtttgtgtgattgttttatagtgtctgtgatctttgtacttaggtatgtttttgtgctagcctttttttccccctttggttccatgtgtagcactctctcaagaacctcttttaaggctggtctg

SEQ ID NO: 434457 - DNA, 658 bp, Homo sapiens
attacttttagataatatgttgcctatcttttgctcctttcaaaattttctgcttgtccttcaacagcttgattataattatgtgtctaggtgtgtatctcttgggagacattctgacaattcctcaaaatgttaaacataggttactatatgacccaacaatttcacactttkctatatactcaagagaatttcaaacatatatttacatattaacttgtacacaaacattcacaacatcattattcataatagctacgatatggggaatgacccaaaagtccatcagatgctaaaaggttaaccaaaatgtggtatattcataaaattgaatattgtttggcagtaaaatctatgaattactgttatatgctgcaacattggtgaatcttagaaacatgctaagtgaaagcagttagacacaatagggcatgaatcgcatgaatctatttatataagttatccagaataagtcaatccatagagacagaaagggaattaattgttgccagggccttgcaggagggaagaacaaggagtgattgctaatagatacagaatgactaaaatattctaaaaatttattgtagtgttggtttcacaaccatcacagtttatttgtatatatattaggatggtacaaaagtaattgtggttt

SEQ ID NO: 434458 - DNA, 658 bp, Homo sapiens
attacttttagataatatgttgcctatcttttgctcctttcaaaattttctgcttgtccttcaacagcttgattataattatgtgtctaggtgtgtatctcttgggagacattctgacaattcctcaaaatgttaaacataggttactatatgacccaacaatttcacacttttctatatactcaagagaatttcaaacatatatttacatattaacttgtacacaaacattcacaacatcattattcataatagctacgatatggggaatgacccaaaagtccatcagatgctaaaaggttaaccaaaatgtggtatattcataaaattgaatattgtttggcagtaaaatctatgaattactgttatatgctgcaacattggtgaatcttagaaacatgctaagtgaaagcagttagacacaataggrcatgaatcgcatgaatctatttatataagttatccagaataagtcaatccatagagacagaaagggaattaattgttgccagggccttgcaggagggaagaacaaggagtgattgctaatagatacagaatgactaaaatattctaaaaatttattgtagtgttggtttcacaaccatcacagtttatttgtatatatattaggatggtacaaaagtaattgtggttt

SEQ ID NO: 434459 - DNA, 658 bp, Homo sapiens
attacttttagataatatgttgcctatcttttgctcctttcaaaattttctgcttgtccttcaacagcttgattataattatgtgtctaggtgtgtatctcttgggagacattctgacaattcctcaaaatgttaaacataggttactatatgacccaacaatttcacacttttctatatactcaagagaatttcaaacatatatttacatattaacttgtacacaaacattcacaacatcattattcataatagctacgatatggggaatgacccaaaagtccatcagatgctaaaaggttaaccaaaatgtggtatattcataaaattgaatattgtttggcagtaaaatctatgaattactgttatatgctgcaacattggtgaatcttagaaacatgctaagtgaaagcagttagacacaatagggcatgaatcgcatgaatctatttatataagttatccagaataagtcaatccatagagacagaaagggaattaattgttgccagggccttgcaggagggaagaacaaggagtgattgctaatagatacagaatgactaaaatattctaaaaatttattgtagtgttggtttcacaaccatcacagtttatttgtatatatattargatggtacaaaagtaattgtggttt

SEQ ID NO: 434460 - DNA, 506 bp, Homo sapiens
tagcctaaccatatcaattagtatgttcagggattcaatttcttcctggttcagtcttcggagggtgtatgtgtccaggaatgtattcacttcttctagatattttagtttctgtgcatagaggtgttcatactagtctctgatagttatttgtatttctgtcatgttactagtggcatcccctttgttgtttctaattgtttttatctggatcttctttcttttcttttttattagtttaactrgtgacctatccatcttattaattttcttcaaaaaagcaactcctgcatttggttatctttttcatgtcttaatcttgttaagttcagctctgcttttgcttatttcttgtcttctgcaaactttgggattggtttgctcttgcttatctagttcttttgtagcaggacgagacgcagacaaaatccctcagacaccgagttaaagaaggaagggctttattcggccaggagcgttggcaagactcacatctcaaaaaccga

SEQ ID NO: 434461 - DNA, 506 bp, Homo sapiens
tagcctaaccatatcaattagtatgttcagggattcaatttcttcctggttcagtcttcggagggtgtatgtgtccaggaatgtattcacttcttctagatattttagtttctgtgcatagaggtgttcatactagtctctgatagttatttgtatttctgtcatgttactagtggcatcccctttgttgtttctaattgtttttatctggatcttctttcttttcttttttattagtttaactagtgacctatccatcttattaattttcttcaaaaaagcaactcctgcatttggttatctttttcatgtcttaatcttgttaagttcagctctgcttttgcttatttcttgtcttctgcaaactttgggattggtttgctcttgcttatctagttcttttgtagcrggacgagacgcagacaaaatccctcagacaccgagttaaagaaggaagggctttattcggccaggagcgttggcaagactcacatctcaaaaaccga

SEQ ID NO: 434462 - DNA, 622 bp, Homo sapiens
catattcatctttgtatacattgctgggtttatttttatatgtatatatatatttttttttagaaattttcaacctgaattttaactaattccatcttttaaatgttcctgaactattcatattttctacctaatctcggttaagttctagtagtttgtgatttttaaggaagaggayctatttcttctaagatgttaatttacaaccatggagttttcatagtgctccatctattattcttttaatgattatataatctctagtaaaagctcctactaaattcatgatattggtgatttgtatctcatttatattttatcaggcttgtgagacattaatttttatttattttgtcaaagacacacattttattttattgattttctctattgttttccttctttcagatttactgataactgtgtttatctttaatatagccatccccttgcttgatttaatttgattttgctccttaataagaacttaagttattaatttaagacattttcttgttgttgatgaaagaattcaatgctataattttttatctctacactgctttagcactattcacatattttgatgttgtattttcagtaattatgttaaatgtaagtg

SEQ ID NO: 434463 - DNA, 622 bp, Homo sapiens
catattcatctttgtatacattgctgggtttatttttatatgtatatatatatttttttttagaaattttcaacctgaattttaactaattccatcttttaaatgttcctgaactattcatattttctacctaatctcggttaagttctagtagtttgtgatttttaaggaagaggatctatttcttctaagatgttaatttacaaccatggagttttcatagtgstccatctattattcttttaatgattatataatctctagtaaaagctcctactaaattcatgatattggtgatttgtatctcatttatattttatcaggcttgtgagacattaatttttatttattttgtcaaagacacacattttattttattgattttctctattgttttccttctttcagatttactgataactgtgtttatctttaatatagccatccccttgcttgatttaatttgattttgctccttaataagaacttaagttattaatttaagacattttcttgttgttgatgaaagaattcaatgctataattttttatctctacactgctttagcactattcacatattttgatgttgtattttcagtaattatgttaaatgtaagtg

SEQ ID NO: 434464 - DNA, 540 bp, Homo sapiens
taaacagactacctacagaatgggagaaaaraaaattgcaaactatgcatctgacaaaggtctaatattcagcatttatatggaaattatacaaattttcaagaaaaaacaacccctttaaaaagtcggaaaatggcatgaacagatatttttcaaaataagatatacatgtgaccaacaagcctattaaaaatgctcaggatcactaataattgcagaaatgcaaatcaaaagcacacggagatagcatctcacaccattcagaacagccattattaaattaacaaaatataccagatgatggtgaggttgtggaaaaaaaagagcacttccacactgctttggtgggaatgtaaattagatcagctgctgaggaaagcagtttgaagatttctcaaagaacttccaacattgccattcaacccagcattcccattactgggtatatacacaaaagaaagtaaatcattctaacaaaaatacacacgcacttgtgtgtcaattgcagcattattcacaatagcaaagacgtggaattac

SEQ ID NO: 434465 - DNA, 540 bp, Homo sapiens
taaacagactacctacagaatgggagaaaaaaaaattgcaaactatgcatctgacaaaggtctaatattcagcatttatatggaaattatacaaattttcaagaaaaaacaacccctttaaaaagtcggaaaatggcatgaacagatatttttcaaaataagatatacatgtgrccaacaagcctattaaaaatgctcaggatcactaataattgcagaaatgcaaatcaaaagcacacggagatagcatctcacaccattcagaacagccattattaaattaacaaaatataccagatgatggtgaggttgtggaaaaaaaagagcacttccacactgctttggtgggaatgtaaattagatcagctgctgaggaaagcagtttgaagatttctcaaagaacttccaacattgccattcaacccagcattcccattactgggtatatacacaaaagaaagtaaatcattctaacaaaaatacacacgcacttgtgtgtcaattgcagcattattcacaatagcaaagacgtggaattac

SEQ ID NO: 434466 - DNA, 503 bp, Homo sapiens
tgcttaatgttccacatttctgtgagaatatgttcatttttatttattctaattttctttatctattttattttattattattatactttaagttttagggtacatgtgcacaatgtgcaggttagttacatatgtatacatgtgccatgctggtgtgctgcacccattaactcgtcatttagcattaggtgtwtctcctaatgctatccctccattgcggcactattcacaatagcaaagacttggaaccaactgaaatgtccaacaatgatagactggattattctaattttcttttaatttttgatttatataatttctatcaatttatcttcaagtctgctaattcttataccatgaagtatctttagtaaattgttcatttttcattattgtatctatcaattccatagttttcattttaataacttatctctttattaatattctctgatgaaacattgtcaattacctgtttgatacagtttggatttgtgtgccc

SEQ ID NO: 434467 - DNA, 503 bp, Homo sapiens
tgcttaatgttccacatttctgtgagaatatgttcatttttatttattctaattttctttatctattttattttattattattatactttaagttttagggtacatgtgcacaatgtgcaggttagttacatatgtatacatgtgccatgctggtgtgctgcacccattaactcgtcatttagcattaggtgtatctcctaatgctatccctccattgcggcactattcacaatagcaaagacttggaaccaactgaaatgtccaacaatgatagactggattattctaattttcttttaatttttgatttatataatttctatcaatttatcttcaagtctgctaattcttataccatgaagyatctttagtaaattgttcatttttcattattgtatctatcaattccatagttttcattttaataacttatctctttattaatattctctgatgaaacattgtcaattacctgtttgatacagtttggatttgtgtgccc

SEQ ID NO: 434468 - DNA, 570 bp, Homo sapiens
tatataatttctatcaatttatcttcaagtctgctaattcttataccatgaagtatctttagtaaattgttcatttttcattattgtatctatcaattccatagttttcattttaataacttatctctttattaatattctctgatgaaacattgtcaattacctgtttgatacagtttggatytgtgtgcccactaaatctcatgtcgaattgtaatcctcaatgttgaaggtgggacctggtggaaggtgattggattatgggggcaaatatttcataaatggtatagcaccatctctcttggtgatgtcctcatgatagcaagttctcatgagatctggttgcttaaaagtgtttcgcagctctcccctctcacttttgctcctgctctggccatgtgacatatctgctccccttttactttctgccataattacaagttttatgaggcctctccagagcccaatcatatgccgctatatttcctgcacagcctgctgaaccatgagacaagtaaacctcttttctttataaagtacccaatcccaggtatttctttatagcaatat

SEQ ID NO: 434469 - DNA, 431 bp, Homo sapiens
ggcttgtctttccagttttagaatctttgctttataaataagctgggaaattataattaaaaatgtgccagtattatcagtgcactgtggccaatttagagcttctttcctatatgagtgggactgggtgaaagaaaaaagcctctctttttagtygcaataaccgaaaacacagcttcagtaacaggtaactggggagaaaaatgataaaaggtgatgttgtgcccctcctggaagataccatagctctccaactgggagctaaggggaagacaagttttggtatggctgtatttctgtagagtttttctcatgctgagttaggaggggagtggcggaaaatgtagtatggttcaaataaaatagatttttatgttctttaattaggttttatatagtaatggtttttcatttgctgtctgtatctagga

SEQ ID NO: 434470 - DNA, 431 bp, Homo sapiens
ggcttgtctttccagttttagaatctttgctttataaataagctgggaaattataattaaaaatgtgccagtattatcagtgcactgtggccaatttagagcttctttcctatatgagtgggactgggtgaaagaaaaaagcctctctttttagtcgcaataaccraaaacacagcttcagtaacaggtaactggggagaaaaatgataaaaggtgatgttgtgcccctcctggaagataccatagctctccaactgggagctaaggggaagacaagttttggtatggctgtatttctgtagagtttttctcatgctgagttaggaggggagtggcggaaaatgtagtatggttcaaataaaatagatttttatgttctttaattaggttttatatagtaatggtttttcatttgctgtctgtatctagga

SEQ ID NO: 434471 - DNA, 431 bp, Homo sapiens
ggcttgtctttccagttttagaatctttgctttataaataagctgggaaattataattaaaaatgtgccagtattatcagtgcactgtggccaatttagagcttctttcctatatgagtgggactgggtgaaagaaaaaagcctctctttttagtcgcaataaccgaaaacacagcttcagtaacaggtaactggggagaaaaatgataaaaggtgatgttgtgcccctcctggaagataccatagctctccaactgggagctaaggggaagacaagttttggtatggctgtatttctgtagagtttttctcatgctgagttaggaggggagtggcggaaaatgtagtatggttcaaataaaatagatttttatrttctttaattaggttttatatagtaatggtttttcatttgctgtctgtatctagga

SEQ ID NO: 434472 - DNA, 587 bp, Homo sapiens
ttgttttaatttgcagttccctacaaaaatatgatgctgagcatataatattttcatgtgcttacttgccatctgcatatatactttgataaagtatctgttcaagtcttttgctcatttttaaaaattgagttgctccatatattactattgagttttataagtgtttgaaatgctttttcctcggtgccataaagaaatagcacttgaaggtaaatttaatttcctcagcaaggccattttaactttctgcagaaagcgtacacttgccagyggttttgccatgagagtacaccgaacaaaggagacagggtcatttataacctgacacatccaccctactgctgtgtctggtttccgttggctggaatggaacctcacattctgcatttttcccgactggcaagcaacttagaactttttaaaagaagcaaaggcagaggagaaaaaagaaggaggaagtaaacttgtggaatgttgagaaaggtaaaaacaccttcaaataaggaagatgaaaaggctatgacttaatgcttgcttggaccagtataagcatgccagggcaaatatttaggctaaattgtggg

SEQ ID NO: 434473 - DNA, 476 bp, Homo sapiens
tcaattatttctggtctgctattgagcctttcaaaggcatgcttcatttctgttacagtgttttttatctctagcatttctctttgattatttcttataatttccatctcttgtatattagctatatttttgtgttatctacttttccattaatgcccataacatattaatcatagtgatttttaaaaatccctagtctgacaattccaacatcattgccatatrtaactctggttcttgtgcttgcttattttcttcaaactgtactttttgtcttcaaatatgccttgtattttttaaattaaaatatgggcatgatgcacttgataaagtaactgaggtaaataggcctttaataatgtagtgataaattatggaaagtgaagatagcattgtacagtaacataattagatctcagtcttttgatgagttgtggtcctggattgtaacctccactagtgcttcttgtgttttt

SEQ ID NO: 434474 - DNA, 476 bp, Homo sapiens
tcaattatttctggtctgctattgagcctttcaaaggcatgcttcatttctgttacagtgttttttatctctagcatttctctttgattatttcttataatttccatctcttgtatattagctatatttttgtgttatctacttttccattaatgcccataacatattaatcatagtgatttttaaaaatccctagtctgacaattccaacatcattgccatatgtaactytggttcttgtgcttgcttattttcttcaaactgtactttttgtcttcaaatatgccttgtattttttaaattaaaatatgggcatgatgcacttgataaagtaactgaggtaaataggcctttaataatgtagtgataaattatggaaagtgaagatagcattgtacagtaacataattagatctcagtcttttgatgagttgtggtcctggattgtaacctccactagtgcttcttgtgttttt

SEQ ID NO: 434475 - DNA, 512 bp, Homo sapiens
gggcatgatgcacttgataaagtaactgaggtaaataggcctttaataatgtagtgataaattatggaaagtgaaratagcattgtacagtaacataattagatctcagtcttttgatgagttgtggtcctggattgtaacctccactagtgcttcttgtgttttttctccctttttaggtggaatagaatggctaggggggctggagttgtatatttcccttctcttatgtgcaaagctagagttggctagagtcagatatttacctttccccagttagattaggctctggtaaaatgccagcaggttagattctgataacatagtttccttgaaggcagacattatttagaagtacagcatgctctagtgtattacaaaatgattcattttcccatcctccctgctggaagcacaaggagattattttttcctgatatttactgtgaggacctggtgtagcttctggaggtaaaatttacaaaagtataggggatccccacatccctgac

SEQ ID NO: 434476 - DNA, 512 bp, Homo sapiens
gggcatgatgcacttgataaagtaactgaggtaaataggcctttaataatgtagtgataaattatggaaagtgaagatagcattgtacagtaacataattagatctcagtcttttgatgagttgtggtcctggattgtaacctccactagtgcttcttgtgttttttctccctttttaggtggaatagaatggctaggggggctggagttgtatatttcccttytcttatgtgcaaagctagagttggctagagtcagatatttacctttccccagttagattaggctctggtaaaatgccagcaggttagattctgataacatagtttccttgaaggcagacattatttagaagtacagcatgctctagtgtattacaaaatgattcattttcccatcctccctgctggaagcacaaggagattattttttcctgatatttactgtgaggacctggtgtagcttctggaggtaaaatttacaaaagtataggggatccccacatccctgac

SEQ ID NO: 434477 - DNA, 512 bp, Homo sapiens
gggcatgatgcacttgataaagtaactgaggtaaataggcctttaataatgtagtgataaattatggaaagtgaagatagcattgtacagtaacataattagatctcagtcttttgatgagttgtggtcctggattgtaacctccactagtgcttcttgtgttttttctccctttttaggtggaatagaatggctaggggggctggagttgtatatttcccttctcytatgtgcaaagctagagttggctagagtcagatatttacctttccccagttagattaggctctggtaaaatgccagcaggttagattctgataacatagtttccttgaaggcagacattatttagaagtacagcatgctctagtgtattacaaaatgattcattttcccatcctccctgctggaagcacaaggagattattttttcctgatatttactgtgaggacctggtgtagcttctggaggtaaaatttacaaaagtataggggatccccacatccctgac

SEQ ID NO: 434478 - DNA, 474 bp, Homo sapiens
accctgtactcataatggtaccttgaagagaggaatcagcartaataataataataataatacattgatataatgcttattatgtgtcatgaattaagtagtttatgcacattaaatcttttaattttcataaaccatcctatgaggcagatctgattgtcattacccacatttagtaaatgggctatggtggcaaaggggaatcaagtagttttttgaatgctacatagctagtagtagtagagttgacaatcaaacccaagtactgaagtatcagagtccattttgttaaccactgtgttgtactcccttttatttttactcatttagaagtgagtaactaacatagatcatcatcatggaaatatgcataagaaacaaaaaacagaagacagctctgtttcacaagcttatcataaagtgtgcaggacaactgagccgatgcaatataattatcattggatcatagcacat

SEQ ID NO: 434479 - DNA, 590 bp, Homo sapiens
ttttcaccattgtttatttgtttagactttgtcttggagcagatggctgtaggtgtttagttttattttcaagttgtctattctgttccattggtctatgtgtctgtttttgtattggtaccatgctgttttggttattatagccttgtagtataatttgaagttgggtaatgtgaggcctctagctttgtcctttttgtttggatttctttggttatttgtgctcttttggttttatataagttttagaaatgtttttttttttggctaattctgtgtaaaatatctttggtaatwtggtaagaatagtactgaatctgtacattgctttggggtgtatggccattttaatgatattgattcttctaatccatcaacatgaaaagtttttcagtttgtttgtgtcacctctgacttctttcagcagtttttgcagtttttgttgagatatttcacctccttggctagtcatatttctaggtattttattcttttgtagctattgtaaatgggattgcattcttgattttactctcagcttgaccttagaacatttctaagtgtatagaaatgttcctgatttgagtaca

SEQ ID NO: 434480 - DNA, 589 bp, Homo sapiens
tgtaacggaataatattcagccacaaaaaggaatgaagtactgatacgtgctgccatatggatgaaccttgaaaactttttgtcaagtcaaagaagccagacacaaaataagacatgttgtatgattacgtgtatataaaatatgcagattagacaaattcataaagacagaatgtaattagtgttttccagaagcttgttacatgggatgtgagggtggcatgtgttgagtgactgctaatttgtatcagtttctttctggaggtgttgagaatgagatagtggtagtggctgcacaactctgtgaatatactaatatccactaattatatatgttaaaagcatgattttatcatttataaattaaatctcaataaagcttttgtatttaattgagtctgaagagagagtgcattcwaagaaagcataactcaacgggtaatacctccttcctttggtacaccaaaagctatattctcttgtacttggaccccacaggcatccatagcattgatttttacatagccttgctgagggtagaagaatcttgagctcctagaaatgaaatgtgcttccaagagaaatgaca

SEQ ID NO: 434481 - DNA, 583 bp, Homo sapiens
ctcccctctctttgtctctctctctctctcaggatgcttcctttggggatcattcttccatattgtgaggaagcttgggccatggggagaggccatacttgggtgttctaaccaacagccttagctaaggtttcagccaacagccagcatctaccaccagtcacrtgacggaatgacccttcagaagattccatccccctagccatcaagtcacttcagctgatgccaattggagcacagataagtcagcctcaccaatcgtagacgtaattgtagattcatgaataaaataaatgctcattgttttaagacagtaaattcaggggtaattatttttacagagccatagtaactaaaataactccaagcttatatatccaactacttgattgccaagtgcaattctaaaatgataaaagtcaaattccttattattccctcacaccttgttcctaagcagtctttttctttaatctcagtaaattacaactttatttttccagtttcttaaaccataaaccatagactcatgtttgatttgtctctctcttatacttgatacaaaatacgtcactgttagctt

SEQ ID NO: 434482 - DNA, 349 bp, Homo sapiens
attattatgtaatgcccttytttgtccattttgactgttgttcatttaatgtctgttttatctgttgtaagaatagcgacctttgctctgttttttttttttttttttcaatttgcatgatagctttttctccatccccttacttttagcttgtggttgtcattatatgtgacatggctttcttgaagacagtagaaggttggggcttgtatttttttttttaaatccaatttgccactctctctttttagtagagtatttagaccctttacattcaagcttaataaagatatttgaggttttggtcctggtcattgtgttgttagctggttattttatagacttcatt

SEQ ID NO: 434483 - DNA, 588 bp, Homo sapiens
tgttctctaagtttcttattctctcaggaatgccagtgtgttgcaggtttggtctccctatataattccatatttctcagacattttggccacttttaaaaattcttttaaaaaaatgtctacttgagttgattcaagactggtcttcaaactgaaattttttattagcttgctgtattcttttgttaatactttcaattatattgtacaattattgtagtaatttttttcagttctgtaagttgagtttggttcttttgtaaaattgctatgtcatgtttcttctcttggatcattttactggtttccttgaattgggttttgtattagttcatgtatgttgctataaaggaatacctgtgactgggtagtttatgaaaaaaagatatttattttagctcaggattctgagtgttgtacatgatgtatgrcaccaacatttctccttgtgaggaccgtaggaagctttcaatcatggcagaagacaaagggcatgctgacacatcagacggtgagagagggagtgggaggggtaccacactttttaaaagaattatatcttatgtgcattcagagcaagatatcact

SEQ ID NO: 434484 - DNA, 614 bp, Homo sapiens
taccaagaagctcttcttatgtcccttatttagtaaagtatcactcatagggcagtaatatacattatccttagtcatactagagttaaggttgccagactatttttgtgatgaacgaataaaatttttatgctgtattcagtcttgcccttggaggagtgatacccaccatggtaggccagaaccactggactggagcatgaggccacatatacagcaagaatttttgtgtaatctatcagcatagtttgggaatcattgcaaamagaggttttcttcatgggcaacagcttgtggtagtagtaccaggacataaggactaaggataaaaataattttagtgagcgcttataaaagaaaatcttctgcatctcttaacaatttttagtattaaacatttatttagctacaagcctggtccacagttttgagttttagctgtctgtatcacatgccatctttttctcagcctggtgtcaagttaattcaaagttggaggtcaccttctggagaaacagtcaaatcagaagtctcggccttctttagataatacatatgaatccatgaatttatgccttctaacgtagcagtgcaagggttggtaaggagtacct

SEQ ID NO: 434485 - DNA, 416 bp, Homo sapiens
tgcaaacagaggttttcttcatgggcaacagcttgtggtagtagtaccaggacataaggactaaggataaaaataattttagtgagcgcttataaaagaaaatcttctgcatctcttaacaatttttagtattaaacatttatttagctacaagcctggtccacagttttgagttttagctgtctgtatcacatgccatctttttctcagcctggtgtcaagttaattcaaagttggaggtcaccttctggagaaacagtsaaatcagaagtctcggccttctttagataatacatatgaatccatgaatttatgccttctaacgtagcagtgcaagggttggtaaggagtacctgataaggtccataccactttggtaaaagagaggtgtttttttttttttgttttttttttta

SEQ ID NO: 434486 - DNA, 416 bp, Homo sapiens
tgcaaacagaggttttcttcatgggcaacagcttgtggtagtagtaccaggacataaggactaaggataaaaataattttagtgagcgcttataaaagaaaatcttctgcatctcttaacaatttttagtattaaacatttatttagctacaagcctggtccacagttttgagttttagctgtctgtatcacatgccatctttttctcagcctggtgtcaagttaattcaaagttggaggtcaccttctggagaaacagtcaaatcagaagtctcggccttctttagataatacatatgaatccatgaatttatgccttctaacgtagcagtgcaagggttgktaaggagtacctgataaggtccataccactttggtaaaagagaggtgtttttttttttttgttttttttttta

SEQ ID NO: 434487 - DNA, 416 bp, Homo sapiens
tgcaaacagaggttttcttcatgggcaacagcttgtggtagtagtaccaggacataaggactaaggataaaaataattttagtgagcgcttataaaagaaaatcttctgcatctcttaacaatttttagtattaaacatttatttagctacaagcctggtccacagttttgagttttagctgtctgtatcacatgccatctttttctcagcctggtgtcaagttaattcaaagttggaggtcaccttctggagaaacagtcaaatcagaagtctcggccttctttagataatacatatgaatccatgaatttatgccttctaacgtagcagtgcaagggttggtaaggagtacctgataakgtccataccactttggtaaaagagaggtgtttttttttttttgttttttttttta

SEQ ID NO: 434488 - DNA, 574 bp, Homo sapiens
tttcataagtgagagtgtcttcctgatgtctgccctagatccctcctcctgttatttttttcataattataagcaaagagctagagtcacacccaaatgtcacagattctggacactgcagcacattgtagccacgtgcctgagggcacccaccgatcacactggtcagcggagggtgaggcatctcaagtaggacagagggaagccagggtggggaggggtccccagaggccctggcaccccgatagtcgggggacatatcccagtggatatgtctcccacagccggagctccactgacaggccttgtgaatgcactcccagatgaaaaggatgagccccaccctgggggatgcccccagccccagtcctgtcagtggttaacccagagcccctctccagagrcccggtgtcatgacttctctggctcctgcctacccacttccacccagagctttagcgtgcatgtggagtcatcttttaattttctgcttggctcggtagattgcagatgctctctccccagagctctgggcctatgcacagcttccatttgttatgtggctgtgatgctc

SEQ ID NO: 434489 - DNA, 558 bp, Homo sapiens
aatgacagccatgtgctacatttgcccaattctgcagctgggctgattaccgtggttcccaagcttagggtccagccccaaaccaaacaaattaggacaaaaaccacaggcttcttcattcccctcattcccagccagcarttgctgcaggacccctataattgataacaatgcaataaaaagcccaccacctgtcctttatctcgaggatttggcagcctggccgacagctaagcacatccttcagtggccacagccacatggaatttagcaccaccgcatctctaaatgccgcatcaccccagggacaacctgagacctgtcgtattcaaagacgtggcccagactggaagaagtaccacagctgaatgacgggataggcagcctaagagcggggaggacttggggctagaagtgcccaccgtgatgggccaacccatagagactggagctgacgctggtgctgaggactgtgcagccagcagatgcaggggtgtggtggagagaatggcaggagccagtggcccaggccctccagatgcatttgggaggaggcca

SEQ ID NO: 434490 - DNA, 596 bp, Homo sapiens
gtgggaagatcacttgagcccaggaggtccaggccacagtgagctatgatcataccactgcactgcagcccaggtgatagagtgagatcctgtctcaaaaaacaaaaaacaaaaaaaaaaggagaagaagaagaagcaaaaaaacaagtttgccctcagagrccttacattctagtggatggagcaagcaatacacatgatacataagcgcattgtatgatgtactagaaaatgacaagtgctgtgaagaaacatgaaagggcaaggaaggttggtaatgaagggcaggggatgcaattttaaatagggtggtcagggtaggcctcactaagaaggtggcatttgagcagaagtttgagggaggagaaggaagaagtcctgagatacctgggggaagggcattccaggcagagtgctctgccagtgccgaggttcagaggcagagcttgacttgcatattcaaagagccccgcagggaggtctgtggggctggaacacagtgagcaaagaacaagcaaaggggagaaaagcaccaaagtagtcagagaggtcaagttatgtaggggctctgtagacccttgtagggtccttcgatg

SEQ ID NO: 434491 - DNA, 510 bp, Homo sapiens
agaaggaagaagtcctgagatacctgggggaagggcattccaggcagagtgctctgccagtgccgaggttcagaggcagagcttgacttgcatattcaaagagccccrcagggaggtctgtggggctggaacacagtgagcaaagaacaagcaaaggggagaaaagcaccaaagtagtcagagaggtcaagttatgtaggggctctgtagacccttgtagggtccttcgatgttttttacctggaatgagatggaggcagggacatgattcaatttatgtcctaacagagtcactgtggctgctgtgttcagaatagatgacgtggggagagagggagagcacagaggctggaagagcagccaggaggctatagcaagggcacaaataggcaaggatggtcccataggccaagatggtcacagtgtagggagtgacgaaagctggattctggtagagctgacaggctttcctgatggggcttgggtaaaaggcgtgagaaaaataagaag

SEQ ID NO: 434492 - DNA, 548 bp, Homo sapiens
ccacagactggaaaggaaggcccagagaaaaacatttcttaaggggccatgagtaggcaggatccagcagaaaaggaagagactgaatattttctcaggaagataaactcagggagggtaaagggattttggagctcacataacagaggtcttcttcactccaagcgagtgtatcagtttcctagggctgccctagcaaagaaccacaaacaggtggcttaaacaacctgaatgtatttggaggtctgaacttcaagatcaaggtgtcagcagcgtgggttccttctgagcgctgtgagggggaatctgttccaggtctctttcctggcttctggtggttgctgggaatctttgccgttccttggcttgtagaagcatcaacctgacctctgccttcatgtccacatggcattctatctctgtgtgtgtgtstgtctccctatttttttttttaaataaagaccctgtcatattggattagtgcccactctaattatctcattttaatacgattacctctttaaagaccctatatccaaagaaggtgc

SEQ ID NO: 434493 - DNA, 547 bp, Homo sapiens
agtgctggtgtcacctgcccacctgctactgtgggcaggggagcctagagcccgagatgaagatgttgggagaaacaaccaaacaagctttytgacagaggcagccctggctgcagcgccttgtctgtctctctgtctcaaggcattatttcgtgacacaaacatttatttaaaatataccatgtgacaggtagaatatcccaatgaataaaacatggccactgccttcaaatagccattaatccacccacaagatcatatgcacactgtcccacactgccaagaccctctcctattttcttaaaaatttctctggaggaaaatgataatatgaatcattatcagcatcattaatattaatattataagggctaacactgtcatggcacctactatgcgccaggccattttctaagcactaactcctttaattcttacaccaaccctgtgaaataggtattatcatcctcctcctccttttttttttctttgagataaggtctcactgtgtcacccaggtgagagtgtagtggtgcaatcacagctc

SEQ ID NO: 434494 - DNA, 557 bp, Homo sapiens
aggctctcaaaattatagaatgccacatttagccctcaaaagtttatgtgagtcagggagacggacgaggagacctggtcagtgaaattggcctcaacacggatttcytacaactcataaagggtcagaagctggacaggccctagagccacccagccctgtgtgtcccaaatgatgccagtgtgggtcgcatttccacaggacccaggcaaaataaaccaaacaaggataacacaccaaggttttcgtgaagctccatttatcctgccctttattctgagatcatattcttcctgttggcaggagacagaggggttattaaatggttttcaaatattggcaactcctaggttgcctttccgtttttgaggcttgggggagaattttaccgatagacaaaagtcccaaacctggcggcctatgagctaattcacccccatccctggtgcagaggtgagctgcaccaggccaggagagggccaggaactcggccaagacccaggtgaacaccgagggcagagctagggtggcaggtgccctcaggatgctcgtagttc

SEQ ID NO: 434495 - DNA, 576 bp, Homo sapiens
ctgggcctataattgggagtctagatatacgatatggaaatgcagctgacaatgcaaggagcaagaggactcgcacagtggtgcatggcagcttgctgtcattttctgggcacagaaagtgcgatggaagggaatgagaaggggaaaaaggaaggatgacaggacggaaggagggaaagaaggaagaggraaaaagaaaggacaggagaaagggaggaagtcttctgccaaaaaattaaaatcaaatttttgacattctttttgtttgccttttttgaaacaaaatgacacttgccagacaccagcttcctggcccatgtcctggtccttggtatccagatgacagcagtgtgatcctgctgtgagttccttccgtgccttctgatctgagttcctgaaagcagagagccactcaggaactgctgtctctcaggccagctggctggtgatgggcttttgaagactctgctctctctcctgctggaagagctccccaggggccaccaggagccaggtgaccgctctcagcctctgtgagctactggagatcaccagaccttcccacatcccgggcag

SEQ ID NO: 434496 - DNA, 576 bp, Homo sapiens
ctgggcctataattgggagtctagatatacgatatggaaatgcagctgacaatgcaaggagcaagaggactcgcacagtggtgcatggcagcttgctgtcattttctgggcacagaaagtgcgatggaagggaatgagaaggggaaaaaggaaggatgacaggacggaaggagggaaagaaggaagaggaaaaaagaaaggacaggagaaagggaggaagkcttctgccaaaaaattaaaatcaaatttttgacattctttttgtttgccttttttgaaacaaaatgacacttgccagacaccagcttcctggcccatgtcctggtccttggtatccagatgacagcagtgtgatcctgctgtgagttccttccgtgccttctgatctgagttcctgaaagcagagagccactcaggaactgctgtctctcaggccagctggctggtgatgggcttttgaagactctgctctctctcctgctggaagagctccccaggggccaccaggagccaggtgaccgctctcagcctctgtgagctactggagatcaccagaccttcccacatcccgggcag

SEQ ID NO: 434497 - DNA, 561 bp, Homo sapiens
cagcctagttctactgtttacgcttctaaaataaacaggacttgatcacacaaaaaaaaaaaaaagagagagagagagctcaatttgggagagacagaggtccaaccttattgagagatgatgggaaacctggatgagaagtacacttctttaagtgaacataaggatttgcaagaagaataatttggcaaggtgctattttaagatattaatatgagagagagagagagaagctatgtgcttaatactgtaaatagggcctgcaaccaaagaaactcacttcttgattccttgttttgtaggaaaccctaaacacttagggaaagggaattcacagagcaccttgaggaaacctaaaggaagaaagaagcaygcaggcttaaaagaaatgctcctgccacttctgccactgccccccaccaagcccacgcatgcccctcagagaggtcaataaactccaggaaggaaatggccgcatgaggggtccagacagatggggccacaggctgatgcacaggaattccttgcctcaggtgtgatatgggagcgacagtcaccagg

SEQ ID NO: 434498 - DNA, 562 bp, Homo sapiens
ctcactttgtcacccaggcttgagtgcagtggcaggatcttgactcactgtagccttgaattcctgggctcaagtgagcttcccatctcatcctttttagtaaggaggaccacaggcacttttttttttttttttcagagaggaggtgtaactatgttgcccaggctggcctcaaacttttgggctcaagtgatcttcccaccttggcctcccaaagtgctgggattacaggcgtgagccactatgcccagcctggaaaattgtttactggtaagacaaaaaatgttctatgagtatattttattttatcttttcttttctgtgactctctgtggaaattgcatgtgtgtctgtttgtttttcargttgtagcatgcaattgttgaggggtggactgtatcatcttcatcttgtaattccagtgctagtccttgtccctgagcatatggttgttgaataaatgaatgaaaaatgagaaaaccagaagctctgatacttaaccacaataacaattaattcaatctgtgactatcatccaattatatatcacagtaattttgtg

SEQ ID NO: 434499 - DNA, 560 bp, Homo sapiens
aatccccctttaacagtctttgctcctgtaccccatcaggagaggcagatgctatagccaagtatcatgaagaggtggctgagcagtttgagaaaagcagcatatttctctatatcctgtcagttccagctgctattatgcacaattatatgatggatctagtgtggaaagatgttaaagagagcatttgggtatttatccaaaggaatggaaatcagtatgtccaagagagattggtacttccaagtttactgcggcactrttcacaataaccaatatttggaagcaagctatgtgaccatcaacaggcaaacagataaagaagatgtgagatatacacacacacatatatatacacacacacacccccacaatggagcactattcaaccatagaaaagaatgagatactgtcatttgcaacaacattgaaggaactagaggtcattatgtcaagggaaataagccaggcacagaaagacttctcattcatttgtgggagctaaaaattaaaacaatgaaactcatgaacatagagaattgaatgaaggttaccagagg

SEQ ID NO: 434500 - DNA, 568 bp, Homo sapiens
taattaggaaaagagggagatttccaggcctgggtaactatatactgtgaccattggaggtagagacaggtctcaacagttggaaccaggaactctgctgtcaggttgagagttttgtttctcttccagcttttcactgtgtgggggtcttttctcttatgtcagctctttctatcacatggcagctgacctctcacgctccactctgcagcttggacacccagtagaccctgaatttcactctctctaaaaggttctgagggctcatcctgggccaggggccctcctgtgcactgttagctatggccacggragcctccagagctgcctggtagcttcaggttgacctgcttatcaggcctacgatccttctgatttaagtacagctggaaagtattatctaattaagttcatgatagtgcttttggagaacttgtcaaattacagccaatgagaaaataaggacctagcatactgtggagaaccattaaaaatttgagaagaaacaacaagtattatgtcaacttacttcaaaggcgtagttttgggaatttgatgcagtaaagat

SEQ ID NO: 434501 - DNA, 568 bp, Homo sapiens
taattaggaaaagagggagatttccaggcctgggtaactatatactgtgaccattggaggtagagacaggtctcaacagttggaaccaggaactctgctgtcaggttgagagttttgtttctcttccagcttttcactgtgtgggggtcttttctcttatgtcagctctttctatcacatggcagctgacctctcacgctccactctgcagcttggacacccagtagaccctgaatttcactctctctaaaaggttctgagggctcatcctgggccaggggccctcctgtgcactgttagctatggccacgggagcctccagagctgcctggtagcttcaggttgacctgcttatcaggcctacgatccttctgatttaagtacagctggaaagtattatctaattaagttcatgatagtgcttttggagaacttgtcaaattacagccaatgagaaaataaggacctagcatacygtggagaaccattaaaaatttgagaagaaacaacaagtattatgtcaacttacttcaaaggcgtagttttgggaatttgatgcagtaaagat

SEQ ID NO: 434502 - DNA, 553 bp, Homo sapiens
tccatagtgactctactaatttacattcccaccaacagtgtaggagggttcccttttctccacatctcaccagcatttgttattgcctgtcttctggataaaagccattttaacaasggtaagatgacatctcattgtagttgtgatttgcatttctctgatgatcagtgacgttgagcaccttttcacgtgcccgtttgccatttgtatgtcttcttttgggagatgtctattcagatcttttgccaatttttaaattggatgactagatattttcctatagagttgtttgagctccttgtatattctggttattaatccctggtcagatggataatttgcaaacattttctcccattgtgtgggttgtctcttcactttgttcattgtttcctttgctgtggagaagctttttaacttgatgtgatcccatttggatgagttgttttttcataggaaaatgtgttcacctctagggatgagttgttggcggtgatcagggctggtgctcagcattctctgagactgtctctgaatggggtagccccctggg

SEQ ID NO: 434503 - DNA, 553 bp, Homo sapiens
tccatagtgactctactaatttacattcccaccaacagtgtaggagggttcccttttctccacatctcaccagcatttgttattgcctgtcttctggataaaagccattttaacaacggtaagatgacatctcattgtagttgtgatttgcatttctctgatgatcagtgacgttgagcaccttttcacrtgcccgtttgccatttgtatgtcttcttttgggagatgtctattcagatcttttgccaatttttaaattggatgactagatattttcctatagagttgtttgagctccttgtatattctggttattaatccctggtcagatggataatttgcaaacattttctcccattgtgtgggttgtctcttcactttgttcattgtttcctttgctgtggagaagctttttaacttgatgtgatcccatttggatgagttgttttttcataggaaaatgtgttcacctctagggatgagttgttggcggtgatcagggctggtgctcagcattctctgagactgtctctgaatggggtagccccctggg

SEQ ID NO: 434504 - DNA, 555 bp, Homo sapiens
ggaacatgttaaatgacaccacaaggaagtagtcagcaaatctaaactgtggggaacacaggacaaagaaaccctgttcttgaacaaatatactgcacagaaataaaaagaaagatgaattaagaagcatatcaatcaattgcaatatatatataattattggatcctgattcaaataaagtataagaatattttttagaaaaatcagaagaaatttaagaaccacctggatgtttgatgttatttaggaattgttaattttttgatacaataatgaaatcatggttctgttttttcagcaagttctcgtctttcagagatacacgttaaaatgtttttaaaatgtttttaaaatgttattaggaccttgcttcaaaatcatctaagtttggagatgggaagggagtggtagaagagataaagcccagctgtgaacttatccatatggaacctgggtwatgggtacattgagagctcggatgaagtttggacttgggagcaaggcaccatacccccgcccacatactctggcccctgacactgaaccccaggctg

SEQ ID NO: 434505 - DNA, 554 bp, Homo sapiens
agagactgaaactctaagaaagaattaaaagcaaatgctagaaattttttttaaatgacagcaacagcaacaacaaaaagtagcagagatgaagaaagtctttgatgacctcatcagtagatttgacccagctaaggagtgaagcagtgatgctggttcataggaattacccaaactgaaaacaaaaagaaaaatgaggacacacacacacacatatatatacatacacacccttcacatatatttaaactgctgaaaacaaaagacaatgagaaaacctcaaaggcagccagagaaataagacacattatatataggaaaacaaagtaagaattaaacagccttcacatcagaattcacacaagctaaaagataatggagtgacatctcttaagtgataagtataaaaacaaagacagatggaacgaatagaaaatggctaacaagatagattttaatayagatatatcagtgatcgcattaaatgtgaacagttcaaccacaccagttaaaagacaaaattgacaaattggataaaaaagcaagacctgtcc

SEQ ID NO: 434506 - DNA, 554 bp, Homo sapiens
agagactgaaactctaagaaagaattaaaagcaaatgctagaaattttttttaaatgacagcaacagcaacaacaaaaagtagcagagatgaagaaagtctttgatgacctcatcagtagatttgacccagctaaggagtgaagcagtgatgctggttcataggaattacccaaactgaaaacaaaaagaaaaatgaggacacacacacacacatatatatacatacacacccttcacatatatttaaactgctgaaaacaaaagacaatgagaaaacctcaaaggcagccagagaaataagacacattatatataggaaaacaaagtaagaattaaacagccttcacatcagaattcacacaagctaaaagataatggagtgacatctcttaagtgataagtataaaaacaaagacagatggaacgaatagaaaatggctaacaagatagattttaatacagatatatcagtgatcgcattaaatgtgaacagttcaaccacaccagttaaaagacaaaaytgacaaattggataaaaaagcaagacctgtcc

SEQ ID NO: 434507 - DNA, 541 bp, Homo sapiens
ttgtagcttggattagggtcgcagtctctggtgtggtcggctgtgtgtgtgaggtgaagaccttcgtaatgtgtcagtgttctatgaaagaagcctcccctgtcaggagcgatcccagagtgaacaatctatttctaatgcaggaataaattgctcttttccctgttgaggatttgaagggctagtgggaaacttacaggatgtacgttctggtagttaacaggcttttggaaaccatgcccaaacatgggtttagaagcatcataagccacacccactccctcttgtgtcactgaggccaaggggcggtcaccatttctcactgcactcatgacgatggactctacrtgcatggaaactgcttccctcctttgtgttgcttcccatactctgggcatttgggttggcaaaatgcccctcagtcacctcctccaggcaaactcactcacagagctcaatatgtgtagctcagcagctctttccacgtgccctcctccctccccactgggttaccaccacatcctttggtgaatagcccatc

SEQ ID NO: 434508 - DNA, 547 bp, Homo sapiens
ttgggtaaatttatttcaaaaatatcattttctggagatattttctcaggtccatattttgactccaaatctgaaagaaatgaagaaggcaaacctattttattttcctataacatacatgcatacaaaatccattaaacaaatggcctaagtataaaatataatactttcagggaagggatctgaaaaaggaaaagggtgccaataatgaatttatgtaagatggtggtgtgcataagggaacaggttaactttgtcaaatttaggtgtgaatmaaaaccatttggtaagattaaatatattgatattcaagcaactcagatgtacagaatcagaatttttagtgaagaaagctttttttttttttttaagacgaagtttcactcttgtcgcccaggctgcagtgcaatggcacaatctcagctcactgcaccctctacctcctgggttcaagtgattctctggcctcagcctcagcctccagagtagctgggattacaaacatctgccaccgtgcctggctaattttggtatttttagtagagac

SEQ ID NO: 434509 - DNA, 448 bp, Homo sapiens
gtgaggctaatgggacaagattattcagcagcagtttggaggatattgtggctgaaaggaaaatttcagagcacaaactgtcaatacgtttgtcaggagtacatgaaaagccacttcactgtgaccagcattcatatgtataagacattgcaatatattagcatacatggacatatgtgaaaaatcaaaagaattgcttccaatgttatgagctaaagggaaaaaagacattcagtaaaaatataacagctgttggccaggcacagtggctcatgcctgcaataccagcactttgggaggctgaagagggcagatcacctgaggtcaggagttcgaaaccagcctggccaacatggcgaaaccctgtctctactaaaaataccaaaattagccgggcgcagtggtgggcrcctgtaatcccagcgactcgggagcctgaggcaggaga

SEQ ID NO: 434510 - DNA, 583 bp, Homo sapiens
cctttgttcctttctgcaaatgttgttcaaacaatggtttccatttgcctaaagtgcctgctatggctggttaacctctaaaatatttagggagcagcccaacctgcagatacaaagatgtcaaaaaacgaaattacaacacatttactttaaagaccttaatttattttatttgtgattctagaatcaagcagcactttattctacaaaatagaatgagtagaggagctgagcagagcagggtggttttacagacagaaaagggctgaggaaaacagacacagagarcagaaagtgccttggccatttcaaagttacttcccctgtaaaggttaaagcagagggggtttcaatatcatgccagctaaaactggtcaggccgggtgcagtggctcgtgcctgtaatcccagcactttgggaggctgagatgggcagatcacctgaggacaagagtttgagaccagcctggccaatatggtgaaatcccgtctctaccaaaaatacaaaaattagtcgtgggtggtggcgcatgtctgtaatcccagctattcgggaggctgaagcatgagaatcgcttgaacc

SEQ ID NO: 434511 - DNA, 583 bp, Homo sapiens
cctttgttcctttctgcaaatgttgttcaaacaatggtttccatttgcctaaagtgcctgctatggctggttaacctctaaaatatttagggagcagcccaacctgcagatacaaagatgtcaaaaaacgaaattacaacacatttactttaaagaccttaatttattttatttgtgattctagaatcaagcagcactttattctacaaaatagaatgagtagaggagctgagcagagcagggtggttttacagacagaaaagggctgaggaaaacagacacagagaacagaaagtgccttggccatttcaaagttacttcccctgtaaaggttaaagcagagggggtttcaatatcatgccagctaaaactggtcaggccgggtgcagtggctcgtgcctgtaatcccagcactttgggaggctgagrtgggcagatcacctgaggacaagagtttgagaccagcctggccaatatggtgaaatcccgtctctaccaaaaatacaaaaattagtcgtgggtggtggcgcatgtctgtaatcccagctattcgggaggctgaagcatgagaatcgcttgaacc

SEQ ID NO: 434512 - DNA, 602 bp, Homo sapiens
tgtttggtctgttgagcctcatgcaggggctcagcccaaaccaatggctaaaccattggctaaayggtaaagtttatttaacaaaagggagctttccatggtcctgaaacaaactaccctgagctcctcattgcagcaacctatgcaactacaactatcattggttctgtaattgtttctttgatgtctggattcccccacagactttaaggaagtagatacctttctgtttactactgaataggagtgacacagggaaggtacttcttcacagtatgagatgagtggatgaatgactagagtataaaacgctgtcagcaactgggtaggctctacaacttcctcagcaggaggaccagaggctggaaacatgggtgtcactttttaagagcaaaagggggctgatggttggaaaaccagatactagaagaatgctggttttcataagccacacctgtggattgtcaaaaagaaaaagcacacatttcaaaagcagaagagaaagaaaaaaataaggcaaaagtgctcacaagtatcagaatagattttgtggctctggtctctggggatatttgcgagcactgtttagtgccatgaatgta

SEQ ID NO: 434513 - DNA, 602 bp, Homo sapiens
tgtttggtctgttgagcctcatgcaggggctcagcccaaaccaatggctaaaccattggctaaatkgtaaagtttatttaacaaaagggagctttccatggtcctgaaacaaactaccctgagctcctcattgcagcaacctatgcaactacaactatcattggttctgtaattgtttctttgatgtctggattcccccacagactttaaggaagtagatacctttctgtttactactgaataggagtgacacagggaaggtacttcttcacagtatgagatgagtggatgaatgactagagtataaaacgctgtcagcaactgggtaggctctacaacttcctcagcaggaggaccagaggctggaaacatgggtgtcactttttaagagcaaaagggggctgatggttggaaaaccagatactagaagaatgctggttttcataagccacacctgtggattgtcaaaaagaaaaagcacacatttcaaaagcagaagagaaagaaaaaaataaggcaaaagtgctcacaagtatcagaatagattttgtggctctggtctctggggatatttgcgagcactgtttagtgccatgaatgta

SEQ ID NO: 434514 - DNA, 602 bp, Homo sapiens
tgtttggtctgttgagcctcatgcaggggctcagcccaaaccaatggctaaaccattggctaaatggtaaagtttatttaacaaargggagctttccatggtcctgaaacaaactaccctgagctcctcattgcagcaacctatgcaactacaactatcattggttctgtaattgtttctttgatgtctggattcccccacagactttaaggaagtagatacctttctgtttactactgaataggagtgacacagggaaggtacttcttcacagtatgagatgagtggatgaatgactagagtataaaacgctgtcagcaactgggtaggctctacaacttcctcagcaggaggaccagaggctggaaacatgggtgtcactttttaagagcaaaagggggctgatggttggaaaaccagatactagaagaatgctggttttcataagccacacctgtggattgtcaaaaagaaaaagcacacatttcaaaagcagaagagaaagaaaaaaataaggcaaaagtgctcacaagtatcagaatagattttgtggctctggtctctggggatatttgcgagcactgtttagtgccatgaatgta

SEQ ID NO: 434515 - DNA, 558 bp, Homo sapiens
accatttgtatggtatctatttgtatctttttccatccttttgttttccgtctgttttcagcttttaaaaagaactaatgtatatcttagcttaaaaaaatctaattgagattattgctaaaataataacagtagtcgtcaggcatggtggctcacacctgtaatcccagcactctgggaggctgaggtggaaggattgcctgagcccaggagttcaygaccagcctgggcaatatagtgagaccctgtctctacaaaaaattagaaataaaattttaaaaatcaaaataaataaaataatatcaatagtatacagaaagtttactccaatatagctcccttcctttgtgctatcatagtaatatgaatgtgacacaaattacaactttatacattatgaacaaaataatacaattgtataattatggttttatgcagttatctttaatcagttaaaataaaaaagtaaaagtgtatattatcttttatttacctatgtaatgactttaatcagtgctcattatttctttgtgtggattccagtgaccatcaccttca

SEQ ID NO: 434516 - DNA, 549 bp, Homo sapiens
ttgtggctctggtctctggggatatttgcgagcactgtttagtgccatgaatgtatcagacttgccacttgtacckgtgagggaaaaaatatcttggagccactggccccatgccatgattcccaagcaaaaaacatcaatacaggagaaaataactgaacacattgattttgtaattgtatcaactaatagatgagaacaatatccaaggtttgatttcacagtgatatttctgctactccattggctagtcattctcatgggaacaatgagatttaccagcaagtgaaacatccagctcacaatacagggagaattaatatgtttggggggtttgaatttgagttctgcccacctggagtttgtggggttgatacttaaggcctggaagccacctaaaagacaggtggtgttgagagaatttccccaggccactctgtgacaataaaagacaagtttacatccaacatcatccaggaagtattgcaacccaaaagctgccatcttctgagggattcctccacaaagaaggattgatgtattggctaa

SEQ ID NO: 434517 - DNA, 549 bp, Homo sapiens
ttgtggctctggtctctggggatatttgcgagcactgtttagtgccatgaatgtatcagacttgccacttgtacctgtgagggaaaaaatatcttggagccactggccccatgccatgattcccaagcaaaaaacatcaatacaggagaaaataactgaacacattgattttgtaattgtatcaactaatagatgagaacaatatccaaggtttgatttcacagtgatatttctgctactccattggctagtcattctcatgggaacaatgagatttaccagcaagtgaaacayccagctcacaatacagggagaattaatatgtttggggggtttgaatttgagttctgcccacctggagtttgtggggttgatacttaaggcctggaagccacctaaaagacaggtggtgttgagagaatttccccaggccactctgtgacaataaaagacaagtttacatccaacatcatccaggaagtattgcaacccaaaagctgccatcttctgagggattcctccacaaagaaggattgatgtattggctaa

SEQ ID NO: 434518 - DNA, 549 bp, Homo sapiens
ttgtggctctggtctctggggatatttgcgagcactgtttagtgccatgaatgtatcagacttgccacttgtacctgtgagggaaaaaatatcttggagccactggccccatgccatgattcccaagcaaaaaacatcaatacaggagaaaataactgaacacattgattttgtaattgtatcaactaatagatgagaacaatatccaaggtttgatttcacagtgatatttctgctactccattggctagtcattctcatgggaacaatgagatttaccagcaagtgaaacatccagctcacaatacagggagaattaatatgtttggggggtttgaatttgagttctgcccacctggagtttgtggggttgatacttaaggcctggaagccacctaaaagacagrtggtgttgagagaatttccccaggccactctgtgacaataaaagacaagtttacatccaacatcatccaggaagtattgcaacccaaaagctgccatcttctgagggattcctccacaaagaaggattgatgtattggctaa

SEQ ID NO: 434519 - DNA, 593 bp, Homo sapiens
ccatgcttaaagaatctcaggttaagaacaaacattctgcagaaggatgggctaaaaatcaaagaacaaatcaaggaacagaggtggaaattcagacagaacttatacagggaaagagttaaggagacattgcaggaaaatgggtaagaaaagtaaataatctgcaaagaccagagaatatctcttcacagtgaaaatgggctctattatgactctggtatagtctcatgaaaaagcattaatggtccagacattgtatagattcccatgtctaaatattcaccccttttctttcccagacgatttttaagtctgaaataaaaactccactcacctaagtaacctccattccaggatgttgtacctaatgtttaccagatttgtcctgagagagaaagctaagcctttagttttcattgccttgacctcatctctctctagagctgtgattattatgttatttcyagcatcagtgatagtgtctccaagaaaaatctctacacattttttcttagcataattaacttatccaaattaattatgagtgtttacagagaacatcccaagatgctgccagaggtagctggagaaaa

SEQ ID NO: 434520 - DNA, 593 bp, Homo sapiens
ccatgcttaaagaatctcaggttaagaacaaacattctgcagaaggatgggctaaaaatcaaagaacaaatcaaggaacagaggtggaaattcagacagaacttatacagggaaagagttaaggagacattgcaggaaaatgggtaagaaaagtaaataatctgcaaagaccagagaatatctcttcacagtgaaaatgggctctattatgactctggtatagtctcatgaaaaagcattaatggtccagacattgtatagattcccatgtctaaatattcaccccttttctttcccagacgatttttaagtctgaaataaaaactccactcacctaagtaacctccattccaggatgttgtacctaatgtttaccagatttgtcctgagagagaaagctaagcctttagttttcattgccttgacctcatctctctctagagctgtgattattatgttatttccagcatcagtgatagtgtctccaagaaaaatctstacacattttttcttagcataattaacttatccaaattaattatgagtgtttacagagaacatcccaagatgctgccagaggtagctggagaaaa

SEQ ID NO: 434521 - DNA, 527 bp, Homo sapiens
cttttcaaatttatcctaagtcccttcaaatagcacaaaggggaagcctatgctcggatctgagacgaagaggtcaaagcagctacattttgacgtaattttactttaaattcttctttaaaagttctgctcatttgcattcttytgcatagagagaaaaggtaatttaccctgacgcaccgaaaacagcaacgctcctctcagatggggattctcgcccgtggccgcaacctctgcaccccacggtctggaactcccacaaatccattaggctcgggtcccttaggagcccccaatgtatgctgggatcaacctgaacagaccatagaccaagacttctgaggttctttctgctcaggactgtatttcccagaggccaccgcaccggaattagcggttccacttcctgtctcctggggttgacgacctagctgggtaaggtcttcacgtcctaggaagaaatcggtggctgcgggaggtcttcgtggactgggactcgaacctgaccgacccggcagtgcgggtgg

SEQ ID NO: 434522 - DNA, 612 bp, Homo sapiens
taggcgtgcgtgtgcgcgggcatcaaaggatggggattgcgcgatcttgagtgacggaggggactgtgtgagtgtgtgcgtgaggccctgtgcacaggaccgggacggcgtgtggacgcagtgcgttttgctggggctgtgtgagtgtcactgtgccggtggtactaggctcctgctgcttcctccgtctttccccttcaaagctgcagaggctgcagcagaggaatgaaaatgtccccagtagggaggttagataytgaaccgagaatgaagctttgcacaagaaggcgcagatctggactcggggtgggaatatgagagctggaagtgcctcttgagggtcccccaggagggcagctacatgttgagaacccagcgtccctcagagatctgtccccaggaaccagcttcgaactcagaccgattcctcctccttttatttccttctcatttcgtacgaagtgagggaagttgtggccatggagggtgctttcaaacttagtctgcgctccaagaaaagcctggagtctcacgcttgccgtatccttctccagtcgtattattatccaaaagaaggaccgagaggaggatgagagcgttattgttgcacac

SEQ ID NO: 434523 - DNA, 632 bp, Homo sapiens
tagcaacttgggattcatagcagcatgcggactaccaacaaatccagggacccatgcaaactggctgggagacatctgtccaggctgtagctgtgctcctccaagaagctgtgctctctgaarggggctgagaacaggaggaacactaggaggaaaagggtgacccaggagggaagagttcaggacactgtagagctgatttggaggcatcctctcatcatagggaccaggataacacggtggcattgggggccgaacatggacaggctttgaacgcagaatcttccaaattggctttcgttttcagttgctggtttcaggcggaggaaagtctatggaataggactgcacaggctctgttgggtaaagctgggtacggccatctgcttaggtggggtgcctatggggacagctctaacaggaggactgccaatgacaggtgaagttgaccaccttggtaatgcatgttcagaaaggtcccaatcattttctggaccctggggggcctctgaggcaaggcatattctaatacagacactgtagacatttcctaagtgagcagtggtcctcagatttgcctcataactttggatccatcccagatactggaattcagatttcctggttggggt

SEQ ID NO: 434524 - DNA, 394 bp, Homo sapiens
atctttcttcctgatccacgatttaaaacacccccatgataagttattattcccatcaaaaccatcccccaccacacacacacacaagaatttttgcactgtttggaaagatgtataattaacagtaacatctttgttttgtttaatcaaagatgactcggaatgaaggaaagaaaaaatgaccatgaggaagagaatttgaaactcatatattgttctctgcagatgggcattcaaatcatgaactcactggagatgagcaagagaaccaccatggaggtgagagagaatgtgctaataagcatgccattgcagctcatgccttagcaacccatatcatctcrcctcttcctgggttctgagacatgctgtcctgtcctacggagaaaccgcc

SEQ ID NO: 434525 - DNA, 630 bp, Homo sapiens
aagataagtaagataaggttccttttatcaatgtgctgaccaaytaatggtggaaatagactcatgcgaaacataatgcctgctgccaaagtttgaaaccaaaacatgatgatttgtttggaaaggagaagatggaaacggcttcacagaggagatgacatttgagctgggccccaaaggttaaaaaggacttcgagcaagtcagatggggttggagattccagacccaggagaaagcagagtgtgcatttgctcacattcaaccttatcattaagtctcttaaacttggtcaacagagtgtgagtttatgtgctctggctttccttcctgggtctggcatcaaacaaacgaccctttgtttttacagtacactcattaaccctattgctttttttatcgtaaaaagttccacgatgaatgttcttaaaaagtgtgtaagtaaatatttaatgaatcataactcttttctaataaaattactgaagactaaacctacagttctgttacttataaaaatagtcgaggagccatacttttaggaaagaacaggttcaacttaagttttgacaatatcgattaagcatgtaatagtcactggcttacaaaacggaacattaagcccccagatt

SEQ ID NO: 434526 - DNA, 503 bp, Homo sapiens
ttcttttgaaatctgttaagagggtttcctcttcgctaaccccatggtgcgtgttctttctttctttgtgttcccatagctattttcactgtgtctttcaagtagcacaatgcggtgatgaggagagggaaactggctgagaattttgaagattggaaaattgggtcgatgccaaaaagtaggagtctatgtatcccttttgctcatttacttgctcaggtcactgaggactggaaaggctgaaactgaaacagtaggagggttatcttttgtcaacagaagcaagcaaaggcgcagatttgcacatttaaagcggtattgtagctatgtaatgtgatgaaagagagctctctcmgacagtggatccgtgaaaattgatacgtggggaaacagcagatcattgccagaatttttaaaaagattcttcttcttatttaaagtcaaactctgattcctcctcatttactttctagttcatgatgttttctacctcaagtctatcc

SEQ ID NO: 434527 - DNA, 503 bp, Homo sapiens
ttcttttgaaatctgttaagagggtttcctcttcgctaaccccatggtgcgtgttctttctttctttgtgttcccatagctattttcactgtgtctttcaagtagcacaatgcggtgatgaggagagggaaactggctgagaattttgaagattggaaaattgggtcgatgccaaaaagtaggagtctatgtatcccttttgctcatttacttgctcaggtcactgaggactggaaaggctgaaactgaaacagtaggagggttatcttttgtcaacagaagcaagcaaaggcgcagatttgcacatttaaagcggtattgtagctatgtaatgtgatgaaagagagctctctccgacagtggatccgtgaaaattgatacgtggggaaacagcagatcattgccagaatttttaaaaagattcttcytcttatttaaagtcaaactctgattcctcctcatttactttctagttcatgatgttttctacctcaagtctatcc

SEQ ID NO: 434528 - DNA, 518 bp, Homo sapiens
acagtgtaattctggtactcgaaaatgtggctctgtgaagacttttgagagattcagtgaattttggaaggtcctagaaccttaaatggagtaaagattattgaaaaatatctactttcttgttgactacttaaaattacatttgaaggtactatttagacatgacggaggagaatatcaactttggtctccagatatgcctacccacgtaaatccacactacattgtgcataaatagaaatactttgcaatagtcctgtccatttggttagggcacagcctctgaagctccctggaagcctgaagatgagtttacattgggttaaagccaggtcaagccagagcatggttggctgcttcaggcatttgtgggccagaggccccatgagagtgttcctacccccacctagctccagctggctrcccatacaatggagcacagaccccagcagggaccctgccaacctggctacttgccaggcagagcgagggagcaaaatgacagagatgtccaggtg

SEQ ID NO: 434529 - DNA, 602 bp, Homo sapiens
taaacatttattgcctggacaccgtgcagaagtttccttctcaatggatcagcattgtttctggagcaagcttgtactgacttgaaagaacagattgggtgcctttcttcccggttctgtgttcagtgatgtcatgttggtagcctcaaatcagccatgatgagagaatrtactccatggaaattggcaaatactataaatcaattcccattccctgcttccctccaggcagttgttaaaatagtaccagcacaccaccgtttctaaagaatcaaatgggctacaggttggttatgcagttcaaagggccggtgtaggggttaaagatggccaaaaattctttgtcactctccctgaatgagagaagtctattttggaattctggctagccctggtactgttcaacacaatagaagtgacaattccaggcctgtcctttgagaagactggcaacttttatttctctcttcttggaactcacacttctgtgagaaaatccaagaagcttcagtgataagtccacatagagacaaatgaggtcactaggtggtaatagctgagtagccaacatcaacttgccagccgtgtgaatgacgccaccc

SEQ ID NO: 434530 - DNA, 573 bp, Homo sapiens
atttagccactgagagtctagtttcatacctgagagatctggaaacactgtgtgcaccgctggygatgctgcaggtggccaagcaacgctcaaaccactggcaacaacagggtagtatcttgatcttctggctcagtggtcacttcccacacagcagattttagagcacttcaggtttaagggggtactgaatttacatattccaaggtaaaccatggccatcatcatcaaggcagagctccatacaccgtgtacattttatttagaattaggtggcttttcaaaggagctccccatttttcttttatcacctgcctagttgccaggaagcagaataaatgccaattcttacgacatgtagtttaattgaacaaatatatatagacatttgttggctagggaaatgattggttggataatgctggaataccaaaattcaacagaacttccgtaccagccacttagacacatcagtgaatacgtcgttcactctcaattctcagtaaactggggagtctctccagtagtccagatcctactagaaaaacataagccacttataaaagtagcaag

SEQ ID NO: 434531 - DNA, 473 bp, Homo sapiens
aattgtatctgacaaggctcacttcataaacctcaactattttcctaatgaagagatgctgtgttaaggcaattctctttatataaccattatgcatttatattccctttaaagataaatgatatttttatgaagaatgaattgcatacaaaatactgtcttagtgagatgccaaaatacacacccattcaaaatatacaaaacagaaacaactagccaatatttctcctaaccaaaataaatggtgtgcagaattctcttttgaatagtatggtgatcttaatgacaaaagcaaaattaatatattactattaggaaataacctgagaaatagattaactgtaccttataaaaattatactaatatgyttactacagcgcttaggatatttacgtttgaatttaaattatgatataatttagtattctctgcataatataaattaggatgatctaactgaatgtgcaaaaat

SEQ ID NO: 434532 - DNA, 599 bp, Homo sapiens
tgattggtaaaatgaagatattgagtaaaaatgtcctatgcagagaaggtatatataaagatggatttgtagacattgtagacactgtagacatgggcatgggagagactaggcaagggggtggaagtgcaaaacagaaggggggctatttgtgtaatccacacatatctttgggtccttgaataggcacgcaggggtctcaatcaagacctcctgaaatatcattctgtatcagtgtgcgtatacatgtacaggtttctgtgggggaagatttctagctttcatctgatcctcaaaaggcccccaaatagtgattttgttggcattaaaatcctcaacacttgatggaaagtttctctcctatctgcttgataratgtgccatgttagagcactttaagaataatgcactaaatctgtattcattaacaaatttaagaaccaaagaataactgttactattctatcatcttgttaaaattaaggtacaaaatttggtataataatccaaagactccgactgacattggcaaacatacttaactcaaatattttacatgtaaaatgttaaaagcatattttaaaaccttgcaagtatag

SEQ ID NO: 434533 - DNA, 599 bp, Homo sapiens
tgattggtaaaatgaagatattgagtaaaaatgtcctatgcagagaaggtatatataaagatggatttgtagacattgtagacactgtagacatgggcatgggagagactaggcaagggggtggaagtgcaaaacagaaggggggctatttgtgtaatccacacatatctttgggtccttgaataggcacgcaggggtctcaatcaagacctcctgaaatatcattctgtatcagtgtgcgtatacatgtacaggtttctgtgggggaagatttctagctttcatctgatcctcaaaaggcccccaaatagtgattttgttggcattaaaatcctcaacacttgatggaaagtttctctcctatctgcttgatagatgtgccatgttagagcactttaagaataatgcactaaatctgtattcattaacaaatttaagaaccaaagaataactrttactattctatcatcttgttaaaattaaggtacaaaatttggtataataatccaaagactccgactgacattggcaaacatacttaactcaaatattttacatgtaaaatgttaaaagcatattttaaaaccttgcaagtatag

SEQ ID NO: 434534 - DNA, 599 bp, Homo sapiens
tgattggtaaaatgaagatattgagtaaaaatgtcctatgcagagaaggtatatataaagatggatttgtagacattgtagacactgtagacatgggcatgggagagactaggcaagggggtggaagtgcaaaacagaaggggggctatttgtgtaatccacacatatctttgggtccttgaataggcacgcaggggtctcaatcaagacctcctgaaatatcattctgtatcagtgtgcgtatacatgtacaggtttctgtgggggaagatttctagctttcatctgatcctcaaaaggcccccaaatagtgattttgttggcattaaaatcctcaacacttgatggaaagtttctctcctatctgcttgatagatgtgccatgttagagcactttaagaataatgcactaaatctgtattcattaacaaatttaagaaccaaagaataactgttactattctatcatcttgttaaaattaaggtacaaaatttggtataataatccaaagactccgaytgacattggcaaacatacttaactcaaatattttacatgtaaaatgttaaaagcatattttaaaaccttgcaagtatag

SEQ ID NO: 434535 - DNA, 587 bp, Homo sapiens
tcgagagaggttacgttacttgctcaacgtcatgcaagcagtaaatgggagtgtggggggaggcaatgagatttgactccaagcagtctgagaccagaggaatgttggattgcaggatgctaaactgctttcctcagacacaattcatacgtcagaaaatgaccatcaagtaagtgaatgatgacactaaattgcatggttcttttgtcaaatgaaattcactgagaggcagatggctgggtcatgcgtgcaggtggctctgcagtggagcatttcctggagctttgaaatgaagctccagattgatcagacgtgcgtggctttagccctgagtgtcctgtgtgttaaaggcttgtgcttctcagaacttgaaatacctttcagaaagaggctatgcttttgggagtgcaatcggtgatttaagtaaaccaatgtgccttgaaattctcttagatctcttaggrccttttgtcttttctccttcagaacagagttgttctaaaatcctgagtaacaacgtcagtttttacccttgctttactttctttttctcatctacagatctccaagtgtggcagctgatttgt

SEQ ID NO: 434536 - DNA, 576 bp, Homo sapiens
tagttctgctctgatctttttacaattcttttcttctaataacttaaagttcggtttgttcttgtttttctagttctttgaggtacaaaactaggttgttaatttgagaactttctatatttttgatgtaascatttaatgttataaacttccctattagcattgttttggcagtattccagaggtttgggtatattgtatgtctattttcactcttttaaataattttttcatttctgccttaattttattgattacccaaaagtcgttcagaaacagttgtttagtttccatgtacttgtatagctttgagagcttctcttggtattgatttccgattttatttcactgtggtccaagaagacactcgggaggatttcaaatttttttgaaattattgagacttgccttatggctgagcatacagttgattttagaaaatattccacacacagaagagaagactgtatattgtgtagttgttgagtagaatattttatagttgtctattagatccatttgctctatagtctggtttagtctgtttatagaaaatatagtctagtttgtttgttg

SEQ ID NO: 434537 - DNA, 576 bp, Homo sapiens
tagttctgctctgatctttttacaattcttttcttctaataacttaaagttcggtttgttcttgtttttctagttctttgaggtacaaaactaggttgttaatttgagaactttctatatttttgatgtaaccatttaatgttataaacttccctattagcattgttttggcagtattccagaggtttgggtatattgtatgtctattttcactcttttaaataattttttcatttctgccttaattttattgattacccaaaagtcgttcagaaacagttgtttagtttccatgtacttgtatagctttgagagcttctcttggtattgatttccgattttatttcactgtggtccaagaagacactcgggaggatttcaaatttttttgaaattattgagacttgccttatggctgagcatacagttgattttagaaaatattccacacacagaagagaagactgtatattgtgtagttgttgagtagaatattttatrgttgtctattagatccatttgctctatagtctggtttagtctgtttatagaaaatatagtctagtttgtttgttg

SEQ ID NO: 434538 - DNA, 281 bp, Homo sapiens
ctctagacatacacaaaaaccaaaacttaagcagctttaaaaactgcttatgataaaatatttaaatacacaaatatataatctaataaataatgatttatctatttccagtttgaacaataaactcatattcaattttgttgtrtttatcctttacccattatactccaagaggttatcttcgaagagataatgactgaaaaatttcaagaactgataaaagacgccaacctacatattcaagaaggataagtatccaaagaatggtaaatcaaataaat

SEQ ID NO: 434539 - DNA, 281 bp, Homo sapiens
ctctagacatacacaaaaaccaaaacttaagcagctttaaaaactgcttatgataaaatatttaaatacacaaatatataatctaataaataatgatttatctatttccagtttgaacaataaactcatattcaattttgttgtgtttatcctttacccattatactccaagaggttatcttcgaagagataatgactgaaaaatttcaagaactgataaaagacrccaacctacatattcaagaaggataagtatccaaagaatggtaaatcaaataaat

SEQ ID NO: 434540 - DNA, 611 bp, Homo sapiens
gatttctccttgctgtttacaataaaatgagagagagagagagaaaagaattgataaattgagggaagaatgactaagtaaaacaaaactggaacttgataattaggggaattttcaacctatccagaytgaagaaaatttaaaataagaatattcactgtttaaaaagcatgctttagagagataaccaagtatgttactggacaacctttttctagtgcttcagaaggaataaaaggtcatagcattgagtcacaaagaagggtctttgaagtgattaggcacatgattcactgatctcatcagtcacctcggcagaaaccaagaaagagaagaaattatcttgaaaagtcctttggaagagccctcctgtctaatggagtgagtctctgtgacttacacaggagacccatgagattctttggaatgttacaagcataaacagggcagtttggactgaaaaggacagagggagagcacgctggaagaaggctgttggaacctgaaaattcaatagtcatgtaactagctaataaaactattaagtcacaaactggtgctagctatgttcatgaaaaaggaagaatgtctcagagaagggagtcttgggc

SEQ ID NO: 434541 - DNA, 611 bp, Homo sapiens
gatttctccttgctgtttacaataaaatgagagagagagagagaaaagaattgataaattgagggaagaatgactaagtaaaacaaaactggaacttgataattaggggaattttcaacctatccagactgaagaaaatttaaaataagaatattcactgtttaaaaagcatgctttagagagataaccaagtatgttactggacaacctttttctagtgcttcagaakgaataaaaggtcatagcattgagtcacaaagaagggtctttgaagtgattaggcacatgattcactgatctcatcagtcacctcggcagaaaccaagaaagagaagaaattatcttgaaaagtcctttggaagagccctcctgtctaatggagtgagtctctgtgacttacacaggagacccatgagattctttggaatgttacaagcataaacagggcagtttggactgaaaaggacagagggagagcacgctggaagaaggctgttggaacctgaaaattcaatagtcatgtaactagctaataaaactattaagtcacaaactggtgctagctatgttcatgaaaaaggaagaatgtctcagagaagggagtcttgggc

SEQ ID NO: 434542 - DNA, 634 bp, Homo sapiens
ttaatgcaatgcatgctacaaagaagacatgcacagagtattaaggggctcgcaaaagaaaagcctaactgcataaaaagtagtcatggaagcttttcagagacgtaacaggctgcaagtgcactraagaatccttttgaatttgcctaatgtacagagagaataaactagctaaactattaagtgttagtgaatgacaagttcagcaaatagcatttagcccagcatgcctgaaagaagagcatatggcatgggtggaaaagtgataaatctttaaggtgaagggccttgttagatgtgctttagtgtgcattgtgctacaagcagggaaaactgttaagtgaaataaaagtttggaggacagggggaagagtcatgacataatcatattattgttttgaaaatattctggcagcaacatggaaaacaatataaaaaatggactgaagcaaggacaagtctggagttgggagatacattttcctgatattgagacaattctttataaaggctggaaggtagagttacatataagaagatgaaaggttgtaatacataagaatgtggaggctttgggcccggcgcggtggctcatgcctgcaatcccagcactatgggaggtgaagcaggcggg

SEQ ID NO: 434543 - DNA, 488 bp, Homo sapiens
tactttatataattcatgtatggaaatgtccttttcatatatacartaaaattcatccataatttcttctgttattaatacatttctatttaaccaaaaagtacttaatttatctggaatttatttctgtgcagagaatgaatcatcattgattcttttttttccaaaagtatcataataatctaaatgccatttatattaatcttttctctgcttctagttttccactttctgtggttattagtgatttcaacctttatcattgttctggagtcatttttaatgatttataaattcattagcatcaaaacagagcttctaaaactttcaaaaatacatgattgaagttttataattgaaaactaaattacttttgatgaaagaagaacacagggaattcaaaatctaacaaaaaagttttaaataaataagtttaaattacaagtgattgggatcaaaaccagtgaattcagtatatattaagctat

SEQ ID NO: 434544 - DNA, 432 bp, Homo sapiens
tataaaatccaatgttttattgacttattcaaaggttaagtttgaccccaaactgtgttttttccaagtatatacaagcattgagattcctagaattgactcttaataacaaggtcaactctcttggcaataaaatttttagccacacaatattagttaacgcagagttgatcagcataagctgaataatcttttattctagctctcccttcaatattagtgaaacttaytgagctttgcagagaactagccgtgtagcatcacacatgcatagagaaagaccaccaattgctttttaaaactaggtgtttgcagcaaatagagtatcacttgattataaaaatactcctaatttacctttaaattaaaaagcaagaaaaagtcacaaggatgaggtagctttgttagtaatagccattccacatataatac

SEQ ID NO: 434545 - DNA, 570 bp, Homo sapiens
ccattctgagaggtaaagtgccaagttaaaatgaaagtctattattaagacaggaaaaaggattttattataggtagataaagttttctgtcacaatgaagaaaaataaactggttattcccaagggactacttttgtgaaacaccggcttgaaaggataggactgattttgaagcagaatagaagtgatttctctgtaaccrcagaggatagtaaaatgtggcatatgtctttgtacaacacatgtttaagtggccatattttcaagttttattttatttatttttatttatttatccatgtccagaaaaaaatggcaaaatatagaacaaaagacatttccttgcatagttgcaaagctaaacacgaaagtagcttttgcaaattttttgaaatacatcagaatccaaagttgcctctatgtaagcagggacacctattagtgataggtttctttgattttagaaattcttgctataactttccagcaaagatactgattatggtaatttccccctatattctttccctaaaattaaatgtgcttagagatcataactataaatgatt

SEQ ID NO: 434546 - DNA, 557 bp, Homo sapiens
taaattgactgaaattgcttttgtttttatgcaaatataaaaaatgtacacattttaactgtagatatgtacgtttttcaatgaaatatatcagattgttaattaaaaataaattatgtaatatagtagttaattacaattactatagaattgtcacagtggatcatatctgagagctaaattgttttccaataaccaagcaacttgacaaaaatcaaaatctttgatggatattcagctactgaaagaagyacaccaattggtaagatggttgattatgtggttaacagaattacattcttacttatattaattaaaatctacatggttcgttactattacttcacctctgtgctggttataccttcgaagagcacactgtttgagctactccacgttccaagacacaacccttactgagagacacaggaagaaggtgaggaggggttcaagggactctttgcctttgccaatatgaaaactcatgctatagtatgaggcaaagttaaaaacaaggcagtaaagggatcagggcaatactaattcaaggaatgcca

SEQ ID NO: 434547 - DNA, 557 bp, Homo sapiens
taaattgactgaaattgcttttgtttttatgcaaatataaaaaatgtacacattttaactgtagatatgtacgtttttcaatgaaatatatcagattgttaattaaaaataaattatgtaatatagtagttaattacaattactatagaattgtcacagtggatcatatctgagagctaaattgttttccaataaccaagcaacttgacaaaaatcaaaatctttgatggatattcagctactgaaagaagcacaccaattggtaagatggttgattatgtggttaacagaattacattcttacttatattaattaaaatctacatggttcgttactattacttcacctctgtgctggttataccttcgawgagcacactgtttgagctactccacgttccaagacacaacccttactgagagacacaggaagaaggtgaggaggggttcaagggactctttgcctttgccaatatgaaaactcatgctatagtatgaggcaaagttaaaaacaaggcagtaaagggatcagggcaatactaattcaaggaatgcca

SEQ ID NO: 434548 - DNA, 557 bp, Homo sapiens
taaattgactgaaattgcttttgtttttatgcaaatataaaaaatgtacacattttaactgtagatatgtacgtttttcaatgaaatatatcagattgttaattaaaaataaattatgtaatatagtagttaattacaattactatagaattgtcacagtggatcatatctgagagctaaattgttttccaataaccaagcaacttgacaaaaatcaaaatctttgatggatattcagctactgaaagaagcacaccaattggtaagatggttgattatgtggttaacagaattacattcttacttatattaattaaaatctacatggttcgttactattacttcacctctgtgctggttataccttcgaagagcacactgtttgagctactccaygttccaagacacaacccttactgagagacacaggaagaaggtgaggaggggttcaagggactctttgcctttgccaatatgaaaactcatgctatagtatgaggcaaagttaaaaacaaggcagtaaagggatcagggcaatactaattcaaggaatgcca

SEQ ID NO: 434549 - DNA, 557 bp, Homo sapiens
taaattgactgaaattgcttttgtttttatgcaaatataaaaaatgtacacattttaactgtagatatgtacgtttttcaatgaaatatatcagattgttaattaaaaataaattatgtaatatagtagttaattacaattactatagaattgtcacagtggatcatatctgagagctaaattgttttccaataaccaagcaacttgacaaaaatcaaaatctttgatggatattcagctactgaaagaagcacaccaattggtaagatggttgattatgtggttaacagaattacattcttacttatattaattaaaatctacatggttcgttactattacttcacctctgtgctggttataccttcgaagagcacactgtttgagctactccacgttccaagacacaacccttactgagagacacaggaagaaggtgaggaggggttcaagggactctttgcctttgccartatgaaaactcatgctatagtatgaggcaaagttaaaaacaaggcagtaaagggatcagggcaatactaattcaaggaatgcca

SEQ ID NO: 434550 - DNA, 575 bp, Homo sapiens
aaaatagtattcagaagaatggaccagaagaaagaatgtcatataaaacaaggaggggccaccatgcacatataggtacgaaatagtctcacaacaaataaaacaacaacttatgaaatggcagggaaaaatagagtaatcaaacactgtagtgattgattttaactcacatcgctgaaagtgtgactagtcttataaaataaaggaaacaaataaggataacttaaaaaaagataaaattgttattatttgcaaacgtcaggttcacctacatgaaaaaatcaactcagccgacagaaaaagtatcaaaccatataaaaagactgagtgaagtttttgaatccmaaatcaactttaaaaatcaataaaatgcttctacacaatcaataactaaatagaaaatataatttttaaatgatataatgtgcaatcgcaaaaacagaaataaagtaaattaaaataaaacaaacaacagccaccgatatttctaggaattaaagtatatactagaacaaagagaaaaataattttaaaatttaagcataacagaagttttgaataagtagatatcccta

SEQ ID NO: 434551 - DNA, 524 bp, Homo sapiens
aattgttattatttgcaaacgtcaggttcacctacatgaaaaaatcaactcagccgacagaaaaagtatcaaaccatataaaaagactgagtgaagtttttgaatcccaaatcaactttaaaaatcaataaaatgcttctacacaatcaataactaaatagaaaatataatttttaaatgatataatgtgcaatcgcaaaaacagaaataaagtaaattaaaataaaacaaacaacagccaccgatatttctaggaattaaagtatatactagaacaaagagaaaaataattttaaaatttaagcataacagaagttttgaataagtagatatccctagctctcaaatagtctgacttataatataaagctgacaattctttctaatataatacataaaatttawtcaattccaatcaaaattgtccatagattttttaggaagtcaataactcattctataattaacagctaaatatattttgaaaaataattttatttaccaaatattaagacatattacaa

SEQ ID NO: 434552 - DNA, 588 bp, Homo sapiens
gaatgaacgaatgaatgaatkaattaattaattaaaagagaggccttggacaggataataatgatatatttttgtaaagtaaaaagaattattaactgaacattctacccactgtcactcttccttttttttgctgtgaaatgagttcctttatgacaatattgtgtggaacgcaatgacacaaaaaaacatattctttaaacccacggatggtggttttggcagaagcattgtgtgcaggaaaggcaaatccatattcaaagtgtcgattccagtaagaacaaaatactgccccgtccatgatggaagtggtttagtgtaaccaacgtgccaccaggtagctggttgatctatcaagtgaacagttccacacaagagactcagagttggtctctgctgctggcagattaggcacttggtgtggctgtaaccaggtcagccttagtgagtggaagtccatgttgctaagcccacttataactttcatcactggcaccatggctgatttgttcatgagctcattgggtaatgacaagggttgctagggaaaagggctgactggtgcccacaaaatggctcatccttaat

SEQ ID NO: 434553 - DNA, 588 bp, Homo sapiens
gaatgaacgaatgaatgaatgaattaattaattaaaagagaggccttggacaggataataatgatatatttttgtraagtaaaaagaattattaactgaacattctacccactgtcactcttccttttttttgctgtgaaatgagttcctttatgacaatattgtgtggaacgcaatgacacaaaaaaacatattctttaaacccacggatggtggttttggcagaagcattgtgtgcaggaaaggcaaatccatattcaaagtgtcgattccagtaagaacaaaatactgccccgtccatgatggaagtggtttagtgtaaccaacgtgccaccaggtagctggttgatctatcaagtgaacagttccacacaagagactcagagttggtctctgctgctggcagattaggcacttggtgtggctgtaaccaggtcagccttagtgagtggaagtccatgttgctaagcccacttataactttcatcactggcaccatggctgatttgttcatgagctcattgggtaatgacaagggttgctagggaaaagggctgactggtgcccacaaaatggctcatccttaat

SEQ ID NO: 434554 - DNA, 488 bp, Homo sapiens
tattttaaacatttaaaaaaatgaattgtttattctagttacaatgatatttaatagaagaacagtgaatttgaaatgactccattttccctccatttttacaattgccttgtactttgttttcttctccattaccattattaacttctgaagtgctttatacaatttacatagggctgctaatgtgaaaaaaagaaggaatcacagcattagaagcttatcaatttattctatcaggctcttgtaaaaaactctttttcatactggccaagggtagggaagyatcattgcctgtgcttttctcctgagcctatttattaactaacaattcctaaaaaaaattgttgtaaagaacttaaggaattagtttacctagtcctcacattttattttctctcgttgaatttaaaaagaaataattcctttgaatgtttcataaagcatattaaaaaaacaattgtgactctatagtaaaattgtacttaagt

SEQ ID NO: 434555 - DNA, 554 bp, Homo sapiens
ggtagggaagcatcattgcctgtgcttttctcctgagcctatttattaactaacaattcctaaaaaaaattgttgtaaagaacttaaggaattagtttacctagtcctcacattttattttctctcgttgaatttaaaaagaaataattcctttgaatgtttcataaagcatwttaaaaaaacaattgtgactctatagtaaaattgtacttaagtcctggtctacaaaataatctcataaatattgccccattgtataatgggacttataatatgccagctatgtacatattcatttcatgagaattgctattctgtttaagctaaaaatgtttaatgtttgtattgataggctgaatgtcaaagttttctcagatatttgtaaataatgctgaaaaaatattttgacagtctggactgaaatgtgttaattaaaagacaaatattattttatgatgtaaaatattattttcactgctttctacagctattattcatttgcccaacaattttccttattgagtggagaataaacaaactgcatccctgcagtt

SEQ ID NO: 434556 - DNA, 541 bp, Homo sapiens
atcacccatagaatgaataattatgttattgtttattcaaataatcaaaatttaaaaaaacaccaattgcaagcaacaacrtgaatattgaagaataatattgagcgaaaggagttgaattgttttttaaactattggttgtgtgtttgtcaatgatttctttttagggatactgtatgtagtttggatatgagccccttgtcagttgttgtgagtgacatttcagccaccttattgctaccattacattttttaatgctttttttcatgagcagaagttcttagatttgatgcattcataattatcaatcattttctttatgttttctcctttttgtcattttagaacttctctcactatacagatgtcatgaagttattctcttttattagtccattcatttccctttgtgctgtaaagataactttattgtggatctagcgttcatgccagtaaacctgtttctaatttctcctcattctgtatcattgatttacttctttatatagccagtattacaggattttaatgaaatagttg

SEQ ID NO: 434557 - DNA, 555 bp, Homo sapiens
actcaattatgcattggttttacatgtattccattaactattctatttttttctgtcaagttattaagtttctttttcagaataacttcaggctagaaatacacttttgtctattgcctttagtagataatttatattcttgtgatttgttacatttgcatattgtacatttatagctacacttacacactaaaaaaaaagattagattgcttgagaagttaacaagcttatgaaactagtgcattgattaagaaatttattcccttattcaataattatttattaatttttctaccatgtgctgagtactccatcagccctaggaatatactaagaaattagagccaaatggtctctgggggtmatgaagcttatggtcattttcctattttataaaaagcacaggaataatacagaacccctttacattttttgtcttcctaaaataaatttctaatgtttaaatcttagaggcctatgttaatactggcttgctagaagaatatctattctttcaaaaaggaaactgagtaactgaaattaacatttactat

SEQ ID NO: 434558 - DNA, 563 bp, Homo sapiens
aattggtataaaataggatttgattaatagaaatccaccctccattaaacaatcatgaaatgtttctaatctgttaatagagtttggggaaaagccacttagaaatataactgtgtttagtatttgttataaatttctatttcctgtctttccagaatattataaaataactatagtcaatttatttaaaaaatgtgaaaataattattttgtttcaacaagaattattattgctctgatgaactattataaatgtaaataactcaataaatgaacatgccctctagtaaccaccttattctcatctagtttctaagactattacattttcctgtaatgaggaagatggtcatcacaagtattatttgcaagagccagcaataaaatatcctcaaataaataaaaaatgttcactatgttacatactggtgactttcatattcattcgactggcaacttatcaattagctgataaataaatacagtaaatatatatcttaaattgcagrattaatttaaaagtaattgcatctcttcagggcacttttaaccatagttaattg

SEQ ID NO: 434559 - DNA, 532 bp, Homo sapiens
ttcactgcatttttaataagttcaaaaccacctttggaatttgcccccttgtgactcttcaccagatatttaaatcgttttctaatgatatgcattataaggggtttaacaactaaggcaaaaatcattaaaccttccattttcatttacagggcttctcatttctaatcagcactttaaaccatttcttttctttttttcttgactttcatgcactctggaataaaccttgagaaaacacttacagctaacattttagtcagtgttttatgaaaattacactgtcttttgattaaggcttcattttaataaagagattaaaacaggaaaaaactatgcttccttattcacctctcattttccatataacttgggctgttcctttacttattgaataaaataaagtaatggggcaatctgacaatggatctagtttgtgagttgcctcaagagtatacaatttgtggaatctctttagataaaaaaaagaagaagaagatcttrattttgtacttttatgaaaatttgtgtt

SEQ ID NO: 434560 - DNA, 634 bp, Homo sapiens
taccaatctgtgagccttacctaaatcagacaccgcctgctcaaacyggactataaaatctggcacatttgctgccagtcaatccttttccacttgtagacccctttctctatggagagagctgtttctcttcctcttctcttctgcctattaaacctctgctcctaaactccttgtgtgtgtccgtgtcctcaattttcctggcgcgcaaggaggaaccccagggtatattctccagacaagtagccgcttcactaataaagttcaccgctaacaagcccaccgctaacatcataatcatagcgaaagactgaaaatttttcttctgacatcagaaataagtcaagggtgccaactctcatcagttctgttcagtatggtactagaagacctagccagagcaagtaggcaagcataaaaaatgaaaaggagaatttaagttgcctctgtttgacgaagacatgactgtatgtgtagaaaccctaaagatgccactcaaaaaacggttagaagtaataaaaaaaattggtaaagtttcataatacaaaattaacatacaaaaatcagttgtgtttccatacactaacagcagactatctgaaaaagaaattaagaaaacaatcctatttacaat

SEQ ID NO: 434561 - DNA, 634 bp, Homo sapiens
taccaatctgtgagccttacctaaatcagacaccgcctgctcaaaccggactataaaatctggcacatttgctgccagtcaatccttttccacttgtagacccctttctctatggagagagctgtttctcttcctcttctcttctgcctattaaacctctgctcctaaactccttgtgtgtgtccgtgtcctmaattttcctggcgcgcaaggaggaaccccagggtatattctccagacaagtagccgcttcactaataaagttcaccgctaacaagcccaccgctaacatcataatcatagcgaaagactgaaaatttttcttctgacatcagaaataagtcaagggtgccaactctcatcagttctgttcagtatggtactagaagacctagccagagcaagtaggcaagcataaaaaatgaaaaggagaatttaagttgcctctgtttgacgaagacatgactgtatgtgtagaaaccctaaagatgccactcaaaaaacggttagaagtaataaaaaaaattggtaaagtttcataatacaaaattaacatacaaaaatcagttgtgtttccatacactaacagcagactatctgaaaaagaaattaagaaaacaatcctatttacaat

SEQ ID NO: 434562 - DNA, 634 bp, Homo sapiens
taccaatctgtgagccttacctaaatcagacaccgcctgctcaaaccggactataaaatctggcacatttgctgccagtcaatccttttccacttgtagacccctttctctatggagagagctgtttctcttcctcttctcttctgcctattaaacctctgctcctaaactccttgtgtgtgtccgtgtcctcaattttcctggcgcgcaaggaggaaccccagggtatattctccagacaagtagccgcttcactaataaagttcacygctaacaagcccaccgctaacatcataatcatagcgaaagactgaaaatttttcttctgacatcagaaataagtcaagggtgccaactctcatcagttctgttcagtatggtactagaagacctagccagagcaagtaggcaagcataaaaaatgaaaaggagaatttaagttgcctctgtttgacgaagacatgactgtatgtgtagaaaccctaaagatgccactcaaaaaacggttagaagtaataaaaaaaattggtaaagtttcataatacaaaattaacatacaaaaatcagttgtgtttccatacactaacagcagactatctgaaaaagaaattaagaaaacaatcctatttacaat

SEQ ID NO: 434563 - DNA, 573 bp, Homo sapiens
ttttcccttgaattgattgttccactaaattaaccagataaaactattatcctttgaatctctaaatcaatccaagaattcccaaattctcaatcaaatttccctgggagaccattaattttaattattggtgtgatgtttgagaaaaagaattaaaataatcagcagaaactactttttaaataaaaggtgaatcaaaaatcatatatttaaaataatttccaagtcatcccagtaagcagatgaaagaatttatggagttttctatctagcatataatttctccaaaatggatattctagattatttttctctatctcaggatttcagaatagacctctaactctcaaatgttggctaccccctctgtaaattatcttcttatgaggtagaggcacatacaattttctatggctgttttagaatttgaatataaaagcccatatctgtaagtggccttaccaatgaaattgagtaattcactaatgcatctataatcaaagctagaccctagggaagagctagaacttagtatggtttcatacaraatgctttccatttgattgggccatt

SEQ ID NO: 434564 - DNA, 573 bp, Homo sapiens
ttgtagtttgaaactgagaaagggaaatttaaggcacttcctgacataggaaaatattgggttacaagaatagtcttgcaggaaaagtgagtgatagaagcctaatcaccagggacatactaaagtcaacagtgctaaaatattagaaggtttattttaggaagcaattttcccctgccggggtgtgtttgtggactggattgcttacttgagctttcttcatctctattgtccatttccatgmctacatttgagtacataaagcaacatccttaacatttgagtttatattcttcatctcatgctgcccaactctctgacatttttgaccatccaagaaaaatgtgaaaacaaatttaatggggctttctgatggctgtccacctaaaagactatatcatttatgtgatgttcaccaccccttaagatttcaaaataatgcgtaataatctatgaccaaccacaggaaaccattatatggaacacaatgcactttagcgaatggctctacattggaaaaatttcagatactatatgagttcattaaggcaattatcccttaaattctgaaaa

SEQ ID NO: 434565 - DNA, 607 bp, Homo sapiens
tcattgctggttttcaagtgtctagtgtctacaaagagtctcctatacttttgtaagctatttggtcaccaaacatttgaatattttgatgagaaagctaagcgttggatacagaagatacagacatgcgcatgacatgaaacttttatatttacacccacattcctgcatattgtttagtattattgggattatcaaaaacagtcatggtgatgatataggaaggagtgtgaaaaactaggcttggagtggtaccagcagtcatagaaagggttgaatacacaagaaaggcaagtggatagggaatcaagaaaactgatatttaactatgtattggaaagtaaagcattggtcaaagatgaattcaagcttttagaccattctcaggataatgacattcaaaaaaacaatggatttcagagatgggatttatttgagggaggttaatgagtgccatttaaaataagtagagtttgcggtaacttgaaggtttttaagcatayttaaatggaaatattcagttgccctttttgaaaagaaagaagcttcatttggagactaatcaagaatccagtaacttaaaagtgtatggtttaatgtatctgaa

SEQ ID NO: 434566 - DNA, 591 bp, Homo sapiens
aattttgtaatagaattaaatgcatacaaagagatatgcttgttattaatctatatgtatataataaaagatgtctattgattgttttcactggagaattttttttcttttctggagattatctatcaaaacttcaatcactctgttctacatgtggttcattttgcttcatagtttgaagtaaaatgtgcttatacaattgaaaattatttaaagtcatttttttacttaacaacaagtctataaaagtataaaaaccaactggtgctgtatatattgaaatataagctaccgagttgttgactcaatgggaattcattcaytgatttatttaatgagtgtttattggtatctgttatgtgccagtccttgttctgaacactagtggtgttacagtaagccagtcagtctaggttcttattctcataaaacatagatggatgagacagacaatgaacaagtaatcgaagaaataaagaatgaaaatatcttttacgtaggtaattgaaaggagaatagagaagagaataatgagattgcacattcctggtggagagaacattagatagtgtggtctctgtggaaaggtga

SEQ ID NO: 434567 - DNA, 573 bp, Homo sapiens
gcagaaaaggagttaaaatttccaatagcagatggcttgaatcagtgagcaaaagctgtggatgaagcccatggtaataaaacatggttcaagtcagagaatatgctcaaatcaaatgagatgcctatagacctttaaccatagcagtgctagcaaaacctctgtaacccttaatgcataaaataaattattttgaagattaccacacaaataataatgctatagaaatactcatgaaaacaaaatatttgactacaataactatatgaaaacaactgatttttccttaaataaccatataacccatgcwtggaggctatcatgctatttagtgattaagctcaagaagcaatgtcttttagtcgtctgaagctggggaagaaaacaaaaggccaatttcttgttttaccctgtgtataggtgatagtgagggcaagaagtttgttgtgtgtgggtggggcaggggaaggaaaggaggaacaaacttctctttaatttttttctcaagataagaaagagaaatttctttgatgaaacacacacacacacacacacacacacacagaagcagta

SEQ ID NO: 434568 - DNA, 559 bp, Homo sapiens
aaattgcttattcctaggcatgcatgagtttcagattgagaaatctcttgcatttgtacacatataaaaaaactcatatcgcaagtgctacatacactagccaaataattgcaagcttcatgactcttgggcaatataacatccatggtgtctacacaaatactgagacactaaagttgtgcaacattagtcctatagaagccaatatgctagcgtgtgccctatgaatccctattaatgttgataaggagttgtaatttcacaattcttatgacaattgccacaagtggaaaaatgytactgaaataattctagtggtgcagtgaatacattaaattctggaaatagaattgatgagaacacttgatttcagttcaatatttttgtgggttctattttgtacacagataatgtaaaaactccaaaattttggcaaaactatttattttaaaagatctaagctttaaatgtttacttttaaattattattaaccttaaacttggtccttagctaatcagtgatgttgaaacacccagaatccatcaattctttggtcat

SEQ ID NO: 434569 - DNA, 562 bp, Homo sapiens
acccaaagaaacaattatacctgtccagaatgcaaaaatccctctgggatgcagttattataattgcagtttataatatatccttatacaaaatgaacccagctgtggattttctttacaggttaagaaatatttgtgtacatctttagattttaccttttgcctggcagactcatggtatctggcagactcattggcaatagataaaggktttctgtcaaggtttttacatcggcatttgcagcacaacgggcctgactgttcttttgcatctttctggatgctgtctcttggcagtagagaatgagacacaatcctcaggactttgcccgggttcttttttttgatctaaggatgtttctggattctatatactcctttcttccctcatttccattgctatagttgatgttcttattccttttcttggttcagtgttctaagtcactaactgtctggtccattctatgtgggcacccaagttgtattcttaaaacacaaaacctattgtttaactcttttgcttaaagacttaaggtctttgaaaataaaatctttaaga

SEQ ID NO: 434570 - DNA, 580 bp, Homo sapiens
cctgggattataataacaacagcttttgtgatttcattatttacaaaatataattaacctataaaattacttgattaaaaaaaccctgttcatattgatgggcaaataaatattcactcatcatcaaatataatcgactgaacaagtcttaacaatgcagtgcataaaattgtttagtgccttaagagaattgtagttkttccaattactattaggcacacacaaaaaaactcctcttggcaactatacttttcaaactacggagatgctaagggagaaaatggcaccaaaataaaaacttcccctcttctctatgttctctttataagcttagacttaaacatagcttataaacgtttaaattttaggtgatagcaaattgaaaactaattagagttttcatgtattagaaattccatggttttatgttttcaaatttacagtattagaaatttttccattgttgacgaacatgatttttatatttgtagcatcattttatacaaaaacatttcagaggatggtggttattcaacatagaatggaattcatatagaaagaaattcagaaaacaggtttg

SEQ ID NO: 434571 - DNA, 670 bp, Homo sapiens
atattattgttatttccatttagtaaaagtgtcactgaggcttagagaagttgatcagtttgaccaaggtcacgtggtcctctaacttatggtttgatgcagttgctctccctgtcctgaagaagtctccttggctctaccctgattgccaatgcatgacttcagttcagcctgctcctcagcttggcaagaccattccrtcgatcaccaggcctcaaagtgagcatttcatagactctacgatgccatggaaggtaagacacattattatatgatgttacacaaagaaaaaaagaaactgctgtccattaagctatgacataattctctgttctcacatagaaactataggtagtgcttattaaaaggactcttctagacctatttagacacaaaagtgacaacagtatgaagagtaaccaaaatgaagttcaggcacacaatgacaatccaatcgcatcttactgacatatgactggcaacattttgggaaatgtcaaattataagaccccctccaattccaatgatggtatcatgtaaaactatatacaccctagaatcaaggaaatatggtatcaacaaactaaaactgactccttaatataatctgaaggcctgaaagatcattgaaaggggaaactattgcacaatatgttatttattgagttg

SEQ ID NO: 434572 - DNA, 504 bp, Homo sapiens
ttctgccattttgagattaaaaatataaattagtcttaactatactttagcagagtaaatctatttcttacacttttagaagacagtttttaagttaaaacacaataataaatgattatttccaattacctttttatatacagctcagatctgcagaatgaaggggrgactcagattaagttactggattgaggcggggggttcctagagtgtgttgcacatctcacttcacagccaaaggtagaaaagtgagccattgcaggagagcatctcctttacttacaggcttgcagtattctaaagcatccatgatttaaatctgctgaggactgtatactggatcctgcagggaaatgatggcacacacaaactgagtttaaggaagggactatttatagtgtttgggaagggttcagaaaaccaacagaaaatggcaagagagggagcctcttttttaaccctgagccaggaaggggaagagttggggacagttactggaatgct

SEQ ID NO: 434573 - DNA, 554 bp, Homo sapiens
aaattgtggttaatgaagagtttgaagatttagactacagagataattgacttctcaggcggccagaaaaaaaacccttgaatctgggagtggaaatttatccagaccaaaagagrgaaaaaaggaaaagttaccttcagagaagaaaaagacacactacatcccaaagattaccaaagcaaatatttcattgtcaaggcctaaattacatgaattgtttgtcaatgtcaggaaagtttatcacaacacttacaaagactggccttgttgaatgtgtggattttgtggcaaagagagagccaagaggtgaaaaggaactaattttggaatttgttgatagacacaggatagtgttctcttcccactcactgactgtggatggcagcagccagggaattagataccagggtcctccaccagattcacttctcccaaccacatcttccagatttggaatcaaagtttgggtagcctcatgccaagatagggctattccttgacacttctttctgaaaggtctcctttagttctaaagcactacacaccaattccac

SEQ ID NO: 434574 - DNA, 590 bp, Homo sapiens
gagatgccaataccagagtcatttgccctgtgtcttttcacatcaacttcgacagcaagtttctcaggacaaagctggtttccacaactcatgccagtcaacaaacccagcacagtgccagacatttggaaatagctgagataaatatttcttgacaggaacaagtttagaataaatcgatcacttggcatgtatccccaatgcctcttttctcttttttcatctttcttattccgaatttcacttgccatgcttcttcttcttcttcttcttcttcttcttytttttttttttgtatgacaacgaaaaaggagagtttagtatggaaagagcattggaatgtaaaatgtacaagcctgggtttgagtcttagatcgaccttaaactgacattgggcagatgaaaaacctctctgagatctgatttccaaatctataagacattttcctcatgagactgatgtaaaaatgagcatatacctgtgtgaagcacttagaagccatggaagtgaatgcatacgtaagggacattcctccccctcatccccatggacagctgctttctaagtatctactcttccagtcaaaaag

SEQ ID NO: 434575 - DNA, 590 bp, Homo sapiens
gagatgccaataccagagtcatttgccctgtgtcttttcacatcaacttcgacagcaagtttctcaggacaaagctggtttccacaactcatgccagtcaacaaacccagcacagtgccagacatttggaaatagctgagataaatatttcttgacaggaacaagtttagaataaatcgatcacttggcatgtatccccaatgcctcttttctcttttttcatctttcttattccgaatttcacttgccatgcttcttcttcttcttcttcttcttcttcttttttttttttttgtatgacaacgaaaaagsagagtttagtatggaaagagcattggaatgtaaaatgtacaagcctgggtttgagtcttagatcgaccttaaactgacattgggcagatgaaaaacctctctgagatctgatttccaaatctataagacattttcctcatgagactgatgtaaaaatgagcatatacctgtgtgaagcacttagaagccatggaagtgaatgcatacgtaagggacattcctccccctcatccccatggacagctgctttctaagtatctactcttccagtcaaaaag

SEQ ID NO: 434576 - DNA, 480 bp, Homo sapiens
actataatggaaaccacaagtttcttctttaactcaagtcagtatacattccttcaagccgcaggcaaattggagcagggaagggggttgggarggcttcaccgtgagtcatcatttcacattttttaacagcttaatgaacatccagaaatgccgcattagccagcaaaaatacagtcctttttttctcccatcaaattcagcaatgaccgtatttggacgtgggattccttgagcatctacattaagtgacttcccttacagaaggtaagtgactaaatgtctagtctgccacacagttacaagcaaaagcatatgaagagcccataactaagttaataacctgccttgaagttaataacctgcccttgttttgccccaagtttgggagcagggaaacattacttctaggttccattaatcccctgaaaaactcagcccagagtgcttggaaaagaagacagaattctcagatctgca

SEQ ID NO: 434577 - DNA, 480 bp, Homo sapiens
actataatggaaaccacaagtttcttctttaactcaagtcagtatacattccttcaagccgcaggcaaattggagcagggaagggggttgggagggcttcacmgtgagtcatcatttcacattttttaacagcttaatgaacatccagaaatgccgcattagccagcaaaaatacagtcctttttttctcccatcaaattcagcaatgaccgtatttggacgtgggattccttgagcatctacattaagtgacttcccttacagaaggtaagtgactaaatgtctagtctgccacacagttacaagcaaaagcatatgaagagcccataactaagttaataacctgccttgaagttaataacctgcccttgttttgccccaagtttgggagcagggaaacattacttctaggttccattaatcccctgaaaaactcagcccagagtgcttggaaaagaagacagaattctcagatctgca

SEQ ID NO: 434578 - DNA, 568 bp, Homo sapiens
aactggactcttgggttactagtcatgctgatgttctttcctatccacccacctttccaaacagaatgaaatgaaatgaaacactccatgatatagaaaggcagaaagaactgaaaaccagctggctcattatttccctccacaaaccagggaagggcacaaataaacaaacacaatattgctgatgggaagccartgtagcctgggcctggttttctccaagaagtgacctcctctagcaaattaaatgcccggagcctcccaatctcatctggtcctgattttcaatcaacagtaaactgatatctttttttttcactttcattatagcttgttttcatctagtttatatttccaaacgtactggttttcaagcctgaactgtcatattaaacacacacacacacacactcaaaaaaagtgcaggctaggtgacccagtggcaccagggacggggcccagcccttggcttgtgggaactccttggaggttttcttttctctgagctaatctaattgggagccaccaagttgttggataggatggaaactgaaggagcccgaactcc

SEQ ID NO: 434579 - DNA, 623 bp, Homo sapiens
agaaactgatctaatctgaaaccagaaaaatttaaaacagagttggacacatagttgctggaacatctgcgacgccaaatagaagctgctaaagaaatacaaagatttgcaaaagcaggatgccattatctttcctgaggttagatgcataaagaaggaggtagtgtctctgaggctggaagctaagcccacctagcaaaagcaggagccttagctgcctctctgacaagaaccagagccatggagaaggcacagttgctacctgagacattgcctatgacagagaaggatgggggaaatgccctgtactctcctttctttctgctctttaacctcctgccagcatctctcattgggtgaatgtgggtggaagtcagctggtacagaagcctggaaaacagaggctgcaggacccacctccatggtrggcggcgcagtttaggagatgggactaagaatgacgtgagaacaatgaagcgatggtcacagtgctgagaaggtgaaggaaaactattatggtcaactaagtaggcgacattgaagaatttgaggtgtcaaaggtcctctttacgtttgccatattacgtttgccatacatgttgaggattttggcttagttttta

SEQ ID NO: 434580 - DNA, 576 bp, Homo sapiens
atatatataatatatattttcttatggttaagtattgcttcagcaggaatagaccaccaattggatgggaaaatcaaatggggtgataatgcagatcctgctagggacagataactgagctcacatgcccaggttcagcggccaccctgagatctggctacctggccttgccaggtctctatggaaaattatttagggcctttgtgtgcaggggaacctgagaaaactgagtgcagtctgaagcctgaagtgtaacaggccctgctctcctttgtgtgatggaagagcctaaaaataatacagaggtaacaggtgttaactcaggcattagytgtctttcctggaacagataacaccccttttaacaccaagagtaagtagctcagaagggtaaattgagcgttgcctttctcctgtctgagacttttctgtgtcaacccagggctaattttctctttcctccaattggcttggcccagtcattgctgtgatttcctcccctgacctccagagtgagaccaggagaggtgccaacatgcccatctgtgtgcttaacgaacttgctacttcatcact

SEQ ID NO: 434581 - DNA, 576 bp, Homo sapiens
atatatataatatatattttcttatggttaagtattgcttcagcaggaatagaccaccaattggatgggaaaatcaaatggggtgataatgcagatcctgctagggacagataactgagctcacatgcccaggttcagcggccaccctgagatctggctacctggccttgccaggtctctatggaaaattatttagggcctttgtgtgcaggggaacctgagaaaactgagtgcagtctgaagcctgaagtgtaacaggccctgctctcctttgtgtgatggaagagcctaaaaataatacagaggtaacaggtgttaactcaggcattagttgtctttcctggaacagataacaccccttttaacaccaagagtaagtagctcagaagggtaaattgagcgttgcctttctcctgtctgagacttttctgtgtcaacccagggctaattttctctttcctccaattggcttggcmcagtcattgctgtgatttcctcccctgacctccagagtgagaccaggagaggtgccaacatgcccatctgtgtgcttaacgaacttgctacttcatcact

SEQ ID NO: 434582 - DNA, 576 bp, Homo sapiens
atatatataatatatattttcttatggttaagtattgcttcagcaggaatagaccaccaattggatgggaaaatcaaatggggtgataatgcagatcctgctagggacagataactgagctcacatgcccaggttcagcggccaccctgagatctggctacctggccttgccaggtctctatggaaaattatttagggcctttgtgtgcaggggaacctgagaaaactgagtgcagtctgaagcctgaagtgtaacaggccctgctctcctttgtgtgatggaagagcctaaaaataatacagaggtaacaggtgttaactcaggcattagttgtctttcctggaacagataacaccccttttaacaccaagagtaagtagctcagaagggtaaattgagcgttgcctttctcctgtctgagacttttctgtgtcaacccagggctaattttctctttcctccaattggcttggccyagtcattgctgtgatttcctcccctgacctccagagtgagaccaggagaggtgccaacatgcccatctgtgtgcttaacgaacttgctacttcatcact

SEQ ID NO: 434583 - DNA, 488 bp, Homo sapiens
tgttactgaaacatctatgccacatatatttagatgagtggttcttaaggtgtgatatccaaatcagcaacatcagtatcagcattcacctggaaacttatttgaagtataatttctaaggttccaacccacaactttcatttattcatttattttttgagatggagtcactctgtcacccaggctggagtgcagtggatctatctcagcttactgcaacctccacctcctgggttcaagtgattctcatgcctcagcctcccgaatagctgggattacagaagtgcgccaccacacgtggctaatttttgtatttttagtagagatggggtttcaccgtgttggccagtctggtctcgaattcctgatctcaggtgattcgcccaccttagcctcccaaagcgctaggattacaggygtgagccaccacacctggctcaacccacaacttttgaatcagaaactctggaggtgggcaccaggaatct

SEQ ID NO: 434584 - DNA, 607 bp, Homo sapiens
ggttgggtcacaggataggcacgtgctcagttttaatcaatactgccagtttaccagggtggttgcacagatttacagtctcatcagcacaggatgaagcttctatttgctcttatttctaaccaacacttggcatagactccttgttctggtggcatacrtgggatttcactggagtttgaattcacattttcatgatgaacaataaagttgggcaccttctgactgccatttaatttatcttcttttgggaagtgcacattctgattttttgtccattttttaaaaactgtgttatctttttcttattgatttgtaaactttttttatgtatgctgaaaatccatcttttgccaaatatattaattttaaattccttctctgactccgtgacttaccttttttcatcttggtaaaattgtcttggcttttcttagagttgccagaaaagtacaggactgttcattacatttgaatttcagctaaacaaaaaatggttattggtatgattatacctcaaatattatatgagagatctttatggtaagaatcattcattgtttatatgaagttcaaatgtaactttgagttcagtgtttttatttgc

SEQ ID NO: 434585 - DNA, 342 bp, Homo sapiens
tccgtgacttaccttttttcatcttggtaaaattgtcttggcttttcttagagttgccagaaaagtacaggactgttcattacatttgaatttcagctaaacaaaaaatggttattrgtatgattatacctcaaatattatatgagagatctttatggtaagaatcattcattgtttatatgaagttcaaatgtaactttgagttcagtgtttttatttgccaaatctggtaaccctatccataagggtttttttttccttttttttcttttttttttttttgtcccctatttgaggacacaaaccttttcaagagtggcaacatcaagctctgagggagga

SEQ ID NO: 434586 - DNA, 547 bp, Homo sapiens
caacaaaaccatttcctctacctcctgggcatacagattagataaactatatttcccagcctcccttgcaggaagaatagccatgtgactgagtctagccaatggaacagaagcacaggcactatttgccattttcagtctggccataagaatctcccaagcaattctccaaattccttctttactcttctgtcatccaaatgtggagagtccagcaaggtccgaagagcgagggagtcccaatataataagcctgggtctttgaatgaccatgtcaaaaatcttccctggtagggaacattcacatcatactttccatgaacaaaaaataaacttttattgttttaarctactgagactagggtattggtagtgtttgttatagcaagctagtgttacttactccaacaatccttttcccaccaaaaaaaaaaaaaaaaaatttagaaaatagatcagaaaagaggtctgtctatacaaagatatttgtaagtggcagtaaaccaaacctagcctgtggacacaacaattaatatatttcaaagtg

SEQ ID NO: 434587 - DNA, 547 bp, Homo sapiens
caacaaaaccatttcctctacctcctgggcatacagattagataaactatatttcccagcctcccttgcaggaagaatagccatgtgactgagtctagccaatggaacagaagcacaggcactatttgccattttcagtctggccataagaatctcccaagcaattctccaaattccttctttactcttctgtcatccaaatgtggagagtccagcaaggtccgaagagcgagggagtcccaatataataagcctgggtctttgaatgaccatgtcaaaaatcttccctggtagggaacattcacatcatactttccatgaacaaaaaataaacttttattgttttaaactactgagactagggtattggtagtgtttgttatagcaagctagtgttacttactccaacaatccttytcccaccaaaaaaaaaaaaaaaaaatttagaaaatagatcagaaaagaggtctgtctatacaaagatatttgtaagtggcagtaaaccaaacctagcctgtggacacaacaattaatatatttcaaagtg

SEQ ID NO: 434588 - DNA, 547 bp, Homo sapiens
caacaaaaccatttcctctacctcctgggcatacagattagataaactatatttcccagcctcccttgcaggaagaatagccatgtgactgagtctagccaatggaacagaagcacaggcactatttgccattttcagtctggccataagaatctcccaagcaattctccaaattccttctttactcttctgtcatccaaatgtggagagtccagcaaggtccgaagagcgagggagtcccaatataataagcctgggtctttgaatgaccatgtcaaaaatcttccctggtagggaacattcacatcatactttccatgaacaaaaaataaacttttattgttttaaactactgagactagggtattggtagtgtttgttatagcaagctagtgttacttactccaacaatccttttcccaccaaaaaaaaaaaaaaaaaatttagaaaatagatcagaaaagaggtctgtctatacaaagatatttgtaagtgrcagtaaaccaaacctagcctgtggacacaacaattaatatatttcaaagtg

SEQ ID NO: 434589 - DNA, 606 bp, Homo sapiens
taggaattttccaactctagtttatgctcccaaaaaattcatgctcatcattaagagtcaagattggagatctagtcaatcaccatttgaaaattaccatagtaataattgttataatcaagaaccatcaatggatgctaaaaaaaatgagagaaaaatttttgagaaacagtattatcaagcaaaatcaccattaagcaatgaccacagtaataactgttgcaagtaaaatccatcaatagatgctataattgatggcgaaagtttcaggagaaataatatatttgcatagtctcaaagtatctcccctaggatattgatcagttccaaaaggggaaaatagtaactttatagtggagaaacccagcagacactactcagcaaaatgagcaaggttaacatcaccagcaataagctatatgaacatgatgttccccygatatcacacactgagaacacattgtcacttctgtggcattcctgccgcaaatgcataacctcaatctaatcaaaagaatacagaacacaaaccctaattgagagaaagtctacacaacaaataacccgcactcattaaaggtttcatcatcatgaaagacaagaaat

SEQ ID NO: 434590 - DNA, 587 bp, Homo sapiens
tcatcatgaaagacaagaaatgacagtgagaacaaccataggttggaggagactaagaagatacaaccttaaaaaaagcaatgtgggatcctggaatagaagaaagtattagggggaaaaccgatgaaattccagtaaggtctgtagttttgttaaaagtattataccaatgttaattttctcattttgatcattccattttgtttttgtgaattgctaacgtaggggaagctagatacaaggtatattgaaacttggtatgacttttgcaacttttctgttaagtctaaaattatttcaaaaacaagtgaggggagatatttatctactctcaacatatctcctatgagatatttaactacaaagaggaaaatagtacctttacaatggagaagcccagcagtcactaaccctcatcaagtgaccaaagttaatatcaccactaatgggacaaatggaaatcaaatgtctcctgatatgacaccctaagaaggacttaacatcacttctgtgatgtgcttgccaaaaaacagatgtatwacttgaatataatcatgaggtagcacagactaatccaaactgaatga

SEQ ID NO: 434591 - DNA, 600 bp, Homo sapiens
gttcatcttccaacccagcaaaagatgcctggaagactcacttttaatcacttccctggattgatttgtttaaaaaagaagaagaagaaaggaaggaagaaaaagaaaaagctctgttagagggttaacaaagtttggtggttgataagagcttgtgtcccagtttgtgtggatggccctggtgtcataattaataatgccccttttcactctgaaaaatgtcacagctcagacaatgaactatatggtcattctaggtataagtcactctagggatgactctcctcttttctagctatgcagattatgtgaaacatcctctctctgggctttagtttctcacctgtaaaatgaaaatgatggtagcagctgcctctccgggtttctgtgaagataaagtatgatcttaaatttaaaatgctggccttgctacagattaagcacaygataaattgaagctattattattttaaaataatgccatctgggtggaaatttgtcatgtggggttgaaccatggtcaccacaaatcattctgcccatctcaggatattttaggtaaaaagccagtgaccatccaaagtgactccatcacaatcc

SEQ ID NO: 434592 - DNA, 612 bp, Homo sapiens
ggaaggtggctgcacctctgagggtcctttgtgctaagggagcagaaaaggacctcgctcatgtgctggataaacatatttgtcactgttttcattatttccctatgtatagttttaaatttttcattacaaagtcatttatttaaaatagtatgtatgcactggcaaccaataattttcccttggacacagtcctgtggcaaggatccaatgtgataacatatcaagttaacagaatattttcaaaatactcaaatttggtctcataaattactgaaaatattcatattcagtatcattgttgttgaattagatgtagaaataggtgacagtggccttttcctatgccctgaaacctccttttgccttattgccaccttttgatgcgatgctgarcaggttgacctctgaatcttgaagagccctttgttttccctcctgatatcatgttggaatttggaagaacagtgggtcttttggttcactgcattccactgggacccttccaactccagctcattagaaacacccccgagcctgaggactaactatgatgtcatatgtcatagcaatgaagtaattatggccggccaaggcaaagaacaattttat

SEQ ID NO: 434593 - DNA, 598 bp, Homo sapiens
cgtacaatcatgcttttcatttgtagacctcaaaagctcttacaagttagtgaacattttaagattacctccctttgcccaaccctgatggtccggcacaagtctcacttcctggatgaagaccgtgtaggcataagggaaagaatgtgggtggagttggagataaaatggttcaaaggctattttcaccacctactagacaaggtggttattaacggcctttgttccttttgtctgctactgagtaggagctaagggctctagatgggaatgacctaggtaatatacttgatcatttaaaatagtccrtatagccagtatagcctagtgtggtggtgtgtcccttttggctagttgagaggcttaggtgggaggatactttgagtccagaagttcaagaccagcctgtgcaacataggacgacctcatctttaaaacaaaaacaaaaactaatcagtataaagtcattgccatcctatcttttaaatgtggacacaaccaaggcctaagccaattagagtgtggttttctacagccgcagcaattgattcggaagtggacatgtgacctaagtttgttcagtcttagtgaagctgaa

SEQ ID NO: 434594 - DNA, 598 bp, Homo sapiens
cgtacaatcatgcttttcatttgtagacctcaaaagctcttacaagttagtgaacattttaagattacctccctttgcccaaccctgatggtccggcacaagtctcacttcctggatgaagaccgtgtaggcataagggaaagaatgtgggtggagttggagataaaatggttcaaaggctattttcaccacctactagacaaggtggttattaacggcctttgttccttttgtctgctactgagtaggagctaagggctctagatgggaatgacctaggtaatatacttgatcatttaaaatagtccatatagccagtatagcctagtgtggtggtgtgtcccttttggctagttgagaggcytaggtgggaggatactttgagtccagaagttcaagaccagcctgtgcaacataggacgacctcatctttaaaacaaaaacaaaaactaatcagtataaagtcattgccatcctatcttttaaatgtggacacaaccaaggcctaagccaattagagtgtggttttctacagccgcagcaattgattcggaagtggacatgtgacctaagtttgttcagtcttagtgaagctgaa

SEQ ID NO: 434595 - DNA, 556 bp, Homo sapiens
aattagtttctgccaagaaagtgagacagattccaacctccgcaagtgttctaagaaagttgtgagctagagatttcagaccacagagaaggggtaaaatctaagagaagaagaacctccaattcacctagcccaaagaagcatgcaatcaagtacacatgcggtcagaatccaccagtgtccctggggcagtgagttgaccaaactgaaggctacaggtggtttgtgtagtgaagtagagggtcatcatctttcaatatcagatcacagtctgttctataatctaagaatttcaagaagagctggaaggatgcatgatgagacatttccaaattcaggtgaggcagcaaatgaccttcagacccccaggtgttaactccagagagttggaaataaaaggatcattggtggagaggtgaattmtcctgccataataaaaaggagaaagaaatggctcctcgtaagaatatgatattttcccctttccaagaaaatagataatgtcagggtcactatctcctttcctcatccaacaagccttattgagtgcttccca

SEQ ID NO: 434596 - DNA, 584 bp, Homo sapiens
ttctaagaaagttgtgagctagagatttcagaccacagagaaggggtaaaatctaagagaagaagaacctccaattcacctagcccaaagaagcatgcaatcaagtacacatgcggtcagaatccaccagtgtccctggggcagtgagttgaccaaactgaaggctacaggtggtttgtgtagtgaagtagagggtcatcatctttcaatatcagatcacagtctgttctataatctaagaatttcaagaagagctggaaggatgcatgatgagacatttccaaattcaggtgaggcagcaaatgaccttcagacccccaggtgttaactccagagagttggaaataaaaggatcattggtggagaggtgaattatcctgccataataaaaaggagaaagaaatggctcctygtaagaatatgatattttcccctttccaagaaaatagataatgtcagggtcactatctcctttcctcatccaacaagccttattgagtgcttcccatggactaagaatcatgttagtcattgggaatacatctgtgaaaaaaacataatccctgccccgaaggaactagtct

SEQ ID NO: 434597 - DNA, 584 bp, Homo sapiens
ttctaagaaagttgtgagctagagatttcagaccacagagaaggggtaaaatctaagagaagaagaacctccaattcacctagcccaaagaagcatgcaatcaagtacacatgcggtcagaatccaccagtgtccctggggcagtgagttgaccaaactgaaggctacaggtggtttgtgtagtgaagtagagggtcatcatctttcaatatcagatcacagtctgttctataatctaagaatttcaagaagagctggaaggatgcatgatgagacatttccaaattcaggtgaggcagcaaatgaccttcagacccccaggtgttaactccagagagttggaaataaaaggatcattggtggagaggtgaattatcctgccataataaaaaggagaaagaaatggctcctcgtaagaatatgatattttcccctttccaagaaaatagataatgycagggtcactatctcctttcctcatccaacaagccttattgagtgcttcccatggactaagaatcatgttagtcattgggaatacatctgtgaaaaaaacataatccctgccccgaaggaactagtct

SEQ ID NO: 434598 - DNA, 594 bp, Homo sapiens
agagttactgcttactgggtacagagcttctgcttgggtcatgaaaacrttctggaaacagtcatgaatctaattaatgccactgcactttacacttaaagtggttaaaattgtaaattttatgtttattttcactacaataaaaaacaatgaattatgtaagcatttgatttattgctgaatttgccaacaatcttggctttatttttgatcttattcctggcctgtttattttccaatttcctaaacgggctgtcccacacttgttccccttatgtctccaaaaccatgactctgccttctccacctcggcagatgagcttgttaattttaaggaaaaactggaagccgcaagacataaatggctcaacttccttcgctctggttcaacttatcccagtctccatctagttcttccctgaatgcctcatgcatacatgatcctaaccctgtacacactcttggaattgttcttttctttaaccccttgccattcttgtgatttctgcctgtctcccactcccgcttataaacaccctccggttttgcaacctctaacaacttctgccgtggcttctcccgctgctatggcct

SEQ ID NO: 434599 - DNA, 575 bp, Homo sapiens
atttagtgactgaataaaacccagctttccccttctccttgaaaatatccattttctctttgttactgcctaagccaccctaatgggtgaagggaatctcagcagtgcttgcatttttaagaggatctgtgtcccctaagatcctagctgrcagcatttcaggtgctggatagaataaggtgtagggagaactttctggagtattttgagactaggtgaggagcggcgtgctacaggcagtcatccttgatttgctgggaagcctactggaaggagaaagaaacccctctgtgctgtttttggttttcacagcttcttcttcccctccatgactgaatctaaaaaccttctgcaaacactggctgggaggcagcgcatcatggaaccatcaggacaaaatgaacccgtagaaagtgtggcgactttgtctccgcccctgagatagtgtttcacggatatgctgcacttcgtggctattctaatttttctccgtattcattttcaggcctaatgcttacatactcagtgaattgttcagcctctgaaaatgtgtctatttggtcaaatataaataa

SEQ ID NO: 434600 - DNA, 575 bp, Homo sapiens
atttagtgactgaataaaacccagctttccccttctccttgaaaatatccattttctctttgttactgcctaagccaccctaatgggtgaagggaatctcagcagtgcttgcatttttaagaggatctgtgtcccctaagatcctagctgacagcatttcaggtgctggatagaataaggtgtagggagaactttctggastattttgagactaggtgaggagcggcgtgctacaggcagtcatccttgatttgctgggaagcctactggaaggagaaagaaacccctctgtgctgtttttggttttcacagcttcttcttcccctccatgactgaatctaaaaaccttctgcaaacactggctgggaggcagcgcatcatggaaccatcaggacaaaatgaacccgtagaaagtgtggcgactttgtctccgcccctgagatagtgtttcacggatatgctgcacttcgtggctattctaatttttctccgtattcattttcaggcctaatgcttacatactcagtgaattgttcagcctctgaaaatgtgtctatttggtcaaatataaataa

SEQ ID NO: 434601 - DNA, 573 bp, Homo sapiens
gttggatgataagaatttgtcatcttgttttctgaattgttcaattgtacttaattgtacttctttccttaaggagttgaaaatcttcctaaactgctggaggatacacctctgatagcttgagacaaatatcctcttgatcattgtttcaccatatttgtctttgctcatggagaaccattttgatccgtggtttagcctcccaggtgattgaacaataccggtgatctgaggcagaccctctgtgacggataacaggtgagtctcttgcatgtttttgcatcatgtactgattacccagacaaaactgagttggyacagctgctaaatccaggatcaagtgctgggatagtagtcattcaaggaggaggtgtcctgaggggctcatccctcagtagccagctgtgcccagagcagagaggggcacagggtgacagagtgaggcaggcagaggaagccgcacatggccaggtgggaatggacatcaggctcctgactgctctcctcacccagctacaccttcagcttttcactggcagacacctgtggctgctgagataccatcccctccag

SEQ ID NO: 434602 - DNA, 601 bp, Homo sapiens
aagaatgatagatttttcttttctttaaggctttacttataccacattttctttgtcatttatcccttgatggacagaggttattccatatcttggctattgtgaatattgctatagggaacatgggagtgcatatagctctctgacatcccaatttttattttatttccccttcttttaagcatttcttaaagttctcaccttcaccttttattattcraaagaattgtgagtagcagttgtgtggttcaagagcacactgcagtcttccttgtgttcatctatattatctgggatattttgttagttctggtctgcaagcttcaaggcttattgatagtttgagtcaccaaatagccaataagaccttatgggttatagaataaacattcagactcctttttctggtctttatcatccttcgtagtatagtcccagtctatttctttaaatttatctccctctatttccataaatattctctatcctaaactcattgcctaattaattcttgaacatgccacatgcattcccatgctgcacttttgctaaaaccaatcctcagcctggaattccctttctactcctctgccaatccaat

SEQ ID NO: 434603 - DNA, 565 bp, Homo sapiens
tcccacccatgcttattatgtagcagaaatcgtgcatgtcatcaagggcaggggagggaatctcagggactgggaagggtgattggacatagtaccttctaaactcatattaataaaataaagttatcaaatgaagcccagggttgggaaggacttatatgtggaaattcttttagcataatatggctcagaacttagactatgagtaagactagctacaccatttgcagagtctagtccaaaataaacatgcaggatctcttaatcagaaatcgatgaatttcatgatggcaacagcagaacctcatrtcaagtgtgttgcccttctgggcacagggctctttgtgactacatgggttgcatgcccatgatgctggcccctactataagttaggaatcttccatgttatctggtgaaaggtattggctgagacttatccttgcagtgaaaaatgacttgtttgaggacacttgggaacagctagtgaaaaacatgaacacagaaaagaggaaattctaagtcaatttgaaagacactgtttccttattcctctcttccactttc

SEQ ID NO: 434604 - DNA, 462 bp, Homo sapiens
ttattgtgacattttcttttttttttttttttgcaatttctgttcaagtatttattatgccctctgtgttatcatttattagcatttatattgccaatcatgttggagagtccatgtggtgatttctgaaaaygagatgtgagaaagaagaggataatttaagtctagacctacagattgtgctgataaagtgatgaagaactacaatcttcttagtcatttcattgtataagtgcaataaagggtatgtaataaatttgtatgttcatatttacaacggaaactgcttatcaatgaatttcacggggcatttgtgtcttgccagattttgtgtctttcctggcaaacaacttgtgaccacagtgatggctccagcagaatggaaaagaccctttacctcacatctcagaagtaaagatgctgattatttgacatcgccattggaatctcaaaacagtgtaa

SEQ ID NO: 434605 - DNA, 575 bp, Homo sapiens
tcgggaggccgaggtgggcggattgcctgagctcaggcatttgaggccagcctgggcgacatggtgaagccccatctctactaaaatacaaagaattmgctgggtgcggttgtgtgcgcaagtagtcccaggtactcgggaagctgaggcaggagaatcccttgaacccacagggcagaggttacagtgagctgagattgtgccactgcattgtagcctgggccacagagcaagactctgtcttcaaaaaagaaaaaaaaaagatgctgcctatgttgatcattgctaagacatagtctccttgactgcctggcaacccctcctaaatgtaacccaaacctttcatttacatttttaagttgatttgaagtcagagaaaacataagagaaatttttaggaatttccccctgcctacaatagtctctatatttttaaatccctaggtttatctttcatactcttccaaggacactaagtattttagaatgtatgctgaaacgactcaggtctcagaaacatgggtcatatccactcatgaactgctttcaaacagtaggctggaaaaactgccata

SEQ ID NO: 434606 - DNA, 491 bp, Homo sapiens
gtccttggctttgctgggcatcagygtcctaaatggcaggatttggttccaccagatgatgtcaaatgtcctggaagaccttgcttcatacacagttcatagcaggattctcctcctcctcccccgctttgaaaatcccctcaagcttacctgattcgacatactctttgacgagcacagcacagtaagggttaacagcctcgccctgacaagactggcaggacccgcagtcaaagttggacaagccaatccgaagaaatggcgacatggttgcgccctggaaaaagacaaaagacaaacgctgtttgggggctataaaagatattatttttggtgccccatgtctacttaaccagtgctttatcatggacagccagaacctcacataggtccactatccatgtgaacaaatgttttcacttccccttctgcagaggacactgctggactcacccaaaaccacacactgacttgctgaggggagaggcttt

SEQ ID NO: 434607 - DNA, 614 bp, Homo sapiens
atttgcagttaggcaaacacagctgagaataaaataacattagaaattaataatgcattttatttgaggaaaaattaacattttaagtcctaatttaagctgtaaaaagaattataatatttaaaatatataataaaatagtctgggcatggtggctcaygcctgtaatcccagcactttgggaagccaaggcgaggagatcacttgaggtcaggagttccagaccatcctggccaacatggtgaaaccccctctctacaaaaatacagcaattagccaggcatggtggggggcacctgtaatcccagcgactctggaggctgaggcaggggaatcgctttgctccctgcagaggttgcagagagccaagatcatgtcattgcactccagcctaggcaacagagcaagactctgtcttaaaaaaagaaaagaaaagaaaagaaaaatatataataaaaacaataatatgtttttgcccatgcaattatcaaatatttttgaaatgctattacttaatgttggtaaggacaaaatgaatcatacactttcatacaatgctgctgggtatgtaaattaccacatttaacagatatacacacctgtgtatatgtaag

SEQ ID NO: 434608 - DNA, 614 bp, Homo sapiens
atttgcagttaggcaaacacagctgagaataaaataacattagaaattaataatgcattttatttgaggaaaaattaacattttaagtcctaatttaagctgtaaaaagaattataatatttaaaatatataataaaatagtctgggcatggtggctcacgcctgtaatcccagcactttgggaagccaaggcgaggagatcacttgaggtcaggagttccagaccatcctggccaacatggtgaaaccccctctctacaaaaatacagcaattagccaggcatggtggggggcacctgtaatcccagcgactctggaggctgaggcaggggaatcgcttkgctccctgcagaggttgcagagagccaagatcatgtcattgcactccagcctaggcaacagagcaagactctgtcttaaaaaaagaaaagaaaagaaaagaaaaatatataataaaaacaataatatgtttttgcccatgcaattatcaaatatttttgaaatgctattacttaatgttggtaaggacaaaatgaatcatacactttcatacaatgctgctgggtatgtaaattaccacatttaacagatatacacacctgtgtatatgtaag

SEQ ID NO: 434609 - DNA, 561 bp, Homo sapiens
ccagctgtgtgatgcagagacatctgctctaaattaaaatccactgagagccacggtgatatacagtgcagtcacctctacagacttgttatagacatggatagtatatggatagttttggcaaatcttttaggcctctaaayaacagggttcgtcttcaagaaaaaaaaagtcattatttatttttcaataaaatgaggcttttaatgtcctttgagtttttttaaacctatttcatcaactatttatccttcaactgaatgtacattttggaaatgatctgtatttgccaaataaggtaagtcagaattcccagtaaagtatggcatccaaagctattcacagtgatctcttaaatcaaagataaataacagtagaaataataatcatgagcttgttctcatactgttccagtttgtattcaagacagaaaggaacacctacccaggagctcaatcacattgcatgcacagacaccgacaaccacacagacgtgtgaacacatccccccaacgtgagcaaccgcagcataatgggactcatcccatccaaatacccatt

SEQ ID NO: 434610 - DNA, 561 bp, Homo sapiens
ccagctgtgtgatgcagagacatctgctctaaattaaaatccactgagagccacggtgatatacagtgcagtcacctctacagacttgttatagacatggatagtatatggatagttttggcaaatcttttaggcctctaaataacagggttsgtcttcaagaaaaaaaaagtcattatttatttttcaataaaatgaggcttttaatgtcctttgagtttttttaaacctatttcatcaactatttatccttcaactgaatgtacattttggaaatgatctgtatttgccaaataaggtaagtcagaattcccagtaaagtatggcatccaaagctattcacagtgatctcttaaatcaaagataaataacagtagaaataataatcatgagcttgttctcatactgttccagtttgtattcaagacagaaaggaacacctacccaggagctcaatcacattgcatgcacagacaccgacaaccacacagacgtgtgaacacatccccccaacgtgagcaaccgcagcataatgggactcatcccatccaaatacccatt

SEQ ID NO: 434611 - DNA, 561 bp, Homo sapiens
ccagctgtgtgatgcagagacatctgctctaaattaaaatccactgagagccacggtgatatacagtgcagtcacctctacagacttgttatagacatggatagtatatggatagttttggcaaatcttttaggcctctaaataacagggttcgtcttcaagaaaaaaaaagtcattatttatttttcaataaaatgaggcttttaatgtcctttgagtttttttaaacctatttcatcaactatttatccttcaactgaatgtacattttggaaatgatctgtatttkccaaataaggtaagtcagaattcccagtaaagtatggcatccaaagctattcacagtgatctcttaaatcaaagataaataacagtagaaataataatcatgagcttgttctcatactgttccagtttgtattcaagacagaaaggaacacctacccaggagctcaatcacattgcatgcacagacaccgacaaccacacagacgtgtgaacacatccccccaacgtgagcaaccgcagcataatgggactcatcccatccaaatacccatt

SEQ ID NO: 434612 - DNA, 547 bp, Homo sapiens
gaacaaattatttccaatcaactgtgtttcagaccaaagctcaagaatatgtatagggatatacagtcatctagcacctaagaatgtaaaattcacaatgtttggctttcaattaaaagttactgaacatgcaaagaagcaggaaaattgatccataaggaatagaaaaatcagtcaagaagcccaacttctttattgtagaatgaggagggaggcaagtcctctttccccaaaacatggcccttgaaatcaatcaaagtaaaaaacaaattgaaaagcatttgcttatgaaaaactactgaactccagataaaaacattgggaatctatcacgttattgactggaccttattcccttcttgccagcttgattagtagggtagttctactgtgtgtggcaagctatgaaaaccagaagckttgttgccagaacagattcacttgattttgtacaaaatatgaaaaactcactttcaaaagcattctcagtaaaagtactgatcttggaagcaagcatatcaggaaagctagcaacttctcatctgag

SEQ ID NO: 434613 - DNA, 575 bp, Homo sapiens
gtttaagggattctcctgcctcagcctcccgagtagctggaattacaggtgcctgctaccacgcccagctaatttttgtatttttagtagagatggggtttcactgtgttgtccaggctggtctcgaactccagacctcatgatccacccgccttggcctcccaaagtgctgggattacaagcatgagccaccgctcccagccatggatatacttttaaaaccaccataagtggtgttccccagagtagcagtacttgaatggattacttttattcagcagatatttaaagaatacatttatgtaccatatataaagagagcacatatatgtggaaatctagamgcttcagataaaaaggatgaataagacaaagttcctaccattaagatactggaagagtgaaccatttattatcacattattgcagtggaaaaccactttgtagcagaggttctcaaccctggctacacagtagaatagctagggtgctttctaaatatatggatatctgatcccaccgaacaacacttagtaaaaatctttgtggatggggtccggacatcaatacttttg

SEQ ID NO: 434614 - DNA, 534 bp, Homo sapiens
cacttagcttttatgcatcgttcccatactccatgccctaaggctagtctctgactctctctgctttctggctttccctgccccagatgttttatactgttttcttttgtttgttgaaagaaacaaattcccaatatctctaacatataatctttaacaaaaaaccttaaatcctcaaactaaacagaacttaagtgaccatatggtgggtttgtccaaggtagggaaggtggttttttttttttttcatatgtataaaaaggaaaaacataattacataattataatcattagttcatatatctttgttagaaaacttgaatgccatgattgagggggaaattactaaaccactccacgtattcacttacctcaatatytttttcaccccaacaatagaacaatgatctcagttctgttacctgtgaagtcattctgttttggtacttcccattattcattcctgtccttccaccacctccatttttgatatatcactcactttggttgcatctgcctttaggggctatttct

SEQ ID NO: 434615 - DNA, 453 bp, Homo sapiens
aattaaacaaaaagtcgcttctatgacatactcaaaacaaatagggcacatgtgtttaacattctgtatagaaaccctatgtttaatgtaaaaaattgcaaataaatactttaaaaggtatgtgattgtcaatatccataaattgacaagtttggttttcctgtggaatttttatattcgtaggctggagtgatcacagggaaaccacatccaactgacctttggaaaatagtatacytaagcattttacagaagacagatgaccttctgggggcaagcaaagggctcctggaatgttgggagaggtcagtctgtcaggataatcaggtgcatagagacataagtgtactaacatctgagggtctgattacctttgtacagtttcatactttttaaccagctggaatgaatttctgtttatggggcagagagtggggcccaagattagccaag

SEQ ID NO: 434616 - DNA, 558 bp, Homo sapiens
aaattaataataacctactaaataaatgaacaatcgaagagcacactacaacacttaataggtggcattcatttggcttacaggtccaagtaggactcatcggtgacagatgaaacatagaacactatgtcaaaaatatgagtccagaaaattgagtgccattaaatgttaaatggtagcaagaatcctcaaacttcaactcaactttatgatgtgaattctactgttaaggaagctctcattttatcaacacaaggaaccaattggaacataactgaaaaaccatttttaagcaatatcctcctaaaattacttattaactcatattaccctgtgatcatatttcccattcattgaaatggcaggatggaagctataaaagtaatgtatgtgattgtatcragaagtaaagagtgcgagtcatcaggaacctctcctctacacccaaaaataagatggacacataggagacacatataaacacagtcacatacacaccaaagaagatccaagtgggggaaaaaatagcaaggtgcaggtccacattcagaattttac

SEQ ID NO: 434617 - DNA, 535 bp, Homo sapiens
ttgtattgggtacagtgtacagcgcttgggtgatgggtgcacccaaatcccagaaattaccactaacgaatttatccatgtaaccaagaaccacttgtatccccaaaaactattgaaaaacatttcatttaaagaagagacagttctttaccaagaatttacatcaaaaccatgtaaactgtagatccacactacattgttctttgtaccatgaattccaaaaccctgaagaaaatgggtgaggcagctatcaggaacaaagtgtcgtcaaatagctgccctggacatgggtggggaagtgactcaagttcccactcacgtctctctgggcctaataaattttgcgaacctcrcagggctcacactgctcagctgtttttcttttcccacattccagatttagataaggaaggaatcattaacagattcagagtggacctgaccaccccacagtgcccttgctttgcttttggcacaggcagtgtatctcgtctggggaagggagaggagtgcatccagtcggttgacacaggac

SEQ ID NO: 434618 - DNA, 634 bp, Homo sapiens
tattttgttcctttttatggctgagtagtattccatagtgtgtatatacattttctctgtccacttggttgatggacatttgggctgaatccatatttttgcaattgcaaattgtgctgctataaacatgcgtgtacaagtatctttttcgtatagtgacttattttcctctgggaagaaacccaggagtgggattgctagatcaaatggtagatctacttttagttctttaaggtatctccacmctgttttccacagtggttgtactagtttacattcccaccaacagtgtagaagtgtcaaaaaataccagatgttgacgtggatatggtgaaaagaaaacaagattttggattcatcagttttccaattcccaagttctgtcaactagtgcaggctaagcacatcctttctggtagagtgtattcacctctcgatgtctgctgcctccagtctgcctcctttactaatccattcattattctttaccatgtagtctgtttctcaagctttgcgatatcatcataactaggtcacagactctcagatttcagttcatacatcttcagcctcttctcttagctgtgatgaagactaatataagttaggaactgaaaaatgagttcaagttcag

SEQ ID NO: 434619 - DNA, 585 bp, Homo sapiens
actgttttccacagtggttgtactagtttacattcccaccaacagtgtagaagtgtcaaaaaataccagatgttgacgtggatatggtgaaaagaaaacaagattttggattcatcagttttccaattcccaagttctgtcaactagtgcaggctaagcacatcctttctggtagagtgtattcacctctcgatgtctgctgcctccagtctgcctcctttactaatccattcattattctttaccatgtagtctgtttctcaagctttgcgatatcatcataactaggtcacagactctcagatttcagttcatacatcttcagcctcttctcttagctgtgatgaagactaatataagttaggaactgaaaaatgagttcaagttcaggccctgattctaaccaactgtgtaacccagtgaaagtggaacagcttttgaacctcagaatactcttcggtaaaataaggagaataattcaaaactcaagaagttgtactgagaattaaaaagaaaagagtatatttaaaagtcatttatgaatgtagacctcacacaaatrtaaagcttagtattatgccccat

SEQ ID NO: 434620 - DNA, 574 bp, Homo sapiens
tgtattttttgcttaacacttacaacaagcttatagggcaagtaatatttaatatcaaaagaattggttatagagattaaatgtggagggtgagggaaaaatcagacattgaattggggttccaagtttatatgacagagataatagactgttagggctgtcatttttgtaaaatgattactcaattataagaatcgatgttattatcccttttttgacatataccatagtaagacctcattaatttgacctaattagaagcactagggtatggtgaggccattctgaattacaagaaaatttcaatagagaagaacattttgaagaaaatataatctcattaattcaagttcacatagtaaaacaggtggtaagtgctaggctcttaatctgtattaaggattcttagaaaaatattaataactatacatgttaaaattagtaaatccactgtttaaatggaaatgtggccaccaaatagttttactactaaataggcttttttatttttgctttctttctttattctgtttycttgacaaaattttgctaacacatcctaaaatcctttcta

SEQ ID NO: 434621 - DNA, 591 bp, Homo sapiens
ccttgcctgaggcaataaataatcagcattagaaatcataatcaccatactggggtggcataggtcatcctttaaaaaaaataatcagagatcacaacagccaagccatgagaaaaaaaaaaaaagcaatccttttataaaagagaaacaaacctcactactcagataaatttccccatggaaaatacaaatccccaattactacccarcatgtgcaaaatataaagcatataaagcctcactcagcactgaggatctgcgtgatatttaacaaattaccagcatcacagcatgttggatgaagattcaggacaagaccaggcagggaaaaaaagaaaagaaaaagcctcaaagtggttgctttccaaatcctacatgaagtcaagtaacttttaaaaaaatctccattttctttctagattttctttgttgacagaccccaaggacccagctgatgatggaagtgaagtgaaatgaatctaattacctcagatatctggttttatgtcttaacttttcttgatttttttccctgtggccttttcaatgataaaggcatttaggagaccagaataagaaaaaaatgaaaaa

SEQ ID NO: 434622 - DNA, 567 bp, Homo sapiens
tttgttgacagaccccaaggacccagctgatgatggaagtgaagtgaaatgaatctaattacctcagatatctggttttatgtcttaacttttcttgatttttttccctgtggccttttcaatgataaaggcatttaggagaccagaataagaaaaaaatgaaaaatattratcttctaaactctcatattggtttcagtcaccactatttggggcaagagagaaccttgatggtacaatttgagtacactgtggtgttccaaagattctccattccaaacacacatttagtccttgccttaattaattattgcaacaaatgtttttgagtggctaaaattaccaggaacaatgctagactttgggaatataacacgtaaacatatttttactgttcatcacattcaagtcacagtaaatggtatgttaatagtgactataaaattatataaaatattcttgaaactgatctattttccgcaggtgtgtgagcccacccatgtggccaatgtctcaggaagaatttttagcagaaggaatcacagacccatggaatgttagagttga

SEQ ID NO: 434623 - DNA, 640 bp, Homo sapiens
tctctatctgaatagtcaaaatgatgatggttatgatgatgatgatgatgatggtagttatctcataaatgcttaaatgtagcaggaactatgctaaaggtttcaaatacaattttagtatattcctgctgctataagagaataggctgggtaatttataaataatagaaatttawttctcacaggtctggtggctggaaagtccaagatcaaggtgccagaagattcagtgtttggtaagggtgtgccgttccttcctcacattgtggaagaggtgaaaaggcattcaggtgctcccttcaacctcttttataagggcacaaatccattcatgaggccagagtcctcaagatctaatcgcttcccaaaagctccccagcctcttaatgttgtacactgggtattaggttccaacgtatgaatttcggaggaacacatacattcaaaccatgcacacatatagcaggtgattctcacaacaaaactaggagtgcaccatcattatcttcattgcacttcaaaggaaaccttagttttagaacataaagcaattttcccaaggttacacatctatgaaatagcagaaatatgagtcaaatacagctctgtttgactgcaaaccccatgtccttaaccccgt

SEQ ID NO: 434624 - DNA, 639 bp, Homo sapiens
aagtgaatgcattaacgtagtttttatacagcttcacataccttctttggtggctactgatgatctctttcttttcaacatttaagttttggttttaattccttctggaacttcttattgggcagggatgtgttcatcagaagcttctttaagtgctgagcctgagagcaggtcacttccacttggtatcagatcagttcatgtgagcaatcgctgcaagctgacacagaaagcagtgttaaggagactcgcaaatactttattttaaaattcttttttatcatttatcttgaaagatgaaagaagttaaaaagaaaaaaataagaaactaagaaaacaacccaaacaaacactgagcmacaaacacaatgtttttattttcccaagggttgttttctacagagagaagtgcttcatgaaactgtaagcaccttttgtggtgtggttcagataagccttgtatctgaattcacaattcccagtgctcttcccagagttgtgagtggtacatacctgactatttgtgtgagacttattgaaacattccaggcctgagaaatgatgcaccactgccctggtcctgaaaagttgcggacactgttcttttgatgctgcagctctcactgccctttcagacac

SEQ ID NO: 434625 - DNA, 639 bp, Homo sapiens
aagtgaatgcattaacgtagtttttatacagcttcacataccttctttggtggctactgatgatctctttcttttcaacatttaagttttggttttaattccttctggaacttcttattgggcagggatgtgttcatcagaagcttctttaagtgctgagcctgagagcaggtcacttccacttggtatcagatcagttcatgtgagcaatcgctgcaagctgacacagaaagcagtgttaaggagactcgcaaatactttattttaaaattcttttttatcatttatcttgaaagatgaaagaagttaaaaagaaaaaaataagaaactaagaaaacaacccaaacaaacactgagccasaaacacaatgtttttattttcccaagggttgttttctacagagagaagtgcttcatgaaactgtaagcaccttttgtggtgtggttcagataagccttgtatctgaattcacaattcccagtgctcttcccagagttgtgagtggtacatacctgactatttgtgtgagacttattgaaacattccaggcctgagaaatgatgcaccactgccctggtcctgaaaagttgcggacactgttcttttgatgctgcagctctcactgccctttcagacac

SEQ ID NO: 434626 - DNA, 395 bp, Homo sapiens
tgttttcagtggacagtaaagtgatgacttgtgtttcctgaaggatgagagtgtctgtgcatccacagacagtaatgcagagagaggggcactggagatagtgacggagcattcactaactcagttctgctcagtctgtgtgttcattggcatgccctgtcttgtcttttgattgctacattcattctctcctttgtagctgaggaaaacagcagtggctgttcaggtgccttctcccaggggctattcacctgtaggtatgggaagtttacttttacttctcttcctccccargtgtctagaacaaacttggtatggcaatgaatttggttgtatgagttacagattcccctgtgtgggttagatactccatagcagtctctaattcctgaaac

SEQ ID NO: 434627 - DNA, 395 bp, Homo sapiens
tgttttcagtggacagtaaagtgatgacttgtgtttcctgaaggatgagagtgtctgtgcatccacagacagtaatgcagagagaggggcactggagatagtgacggagcattcactaactcagttctgctcagtctgtgtgttcattggcatgccctgtcttgtcttttgattgctacattcattctctcctttgtagctgaggaaaacagcagtggctgttcaggtgccttctcccaggggctattcacctgtaggtatgggaagtttacttttacttctcttcctccccaagtgtcyagaacaaacttggtatggcaatgaatttggttgtatgagttacagattcccctgtgtgggttagatactccatagcagtctctaattcctgaaac

SEQ ID NO: 434628 - DNA, 617 bp, Homo sapiens
tattcataaagtttcccatagattacaacagatgttcaatttaaaggaaacaaaagaataggaacttttaaaatcagaagaaaaatgcacaaaacagacaaatgtaataaatatattcactcaatacaagttattaagattgcattgccttttatcaacaaatattaacacactttgaggaaatattaaataaaaataaaatggaaaatttctgtataatgggacacataagtacagtagatgcttaatatattttttaggttatgtaaggaaaatatagtttaacaaaacattgattagaatacatttgatagataaaatatcacaaaaaatttaaatgtctactaaataaaaaatgcacatgtattatttgaatcacaaccaactacctatctccatttttctcatgtggatataaggtctccctcttccccaacatgaataaatagccgattacctccctggaaatatacacaaaagaacagaaggccatggtttgatttgagtcaatatttmttggaggatgttagtagttgccctccaggaccatagagatatctgagtaatctccttctataatgctagctctgagcaacatagcttcctgctgaatctac

SEQ ID NO: 434629 - DNA, 584 bp, Homo sapiens
gaaagagacttttagaattgcagtcattcaataatcatggacaactgcttatttctctctcgctctcattaataacaaatttattagcgtttccacgattgatgatgctgtagaggaggagaggcaggaagattgggagacaccccctgtgtgtgtgctacggggtggttctttgttctatagaatcatagtgcctgatatcagaaatttgtgatcacatacctcagttatttgattatataatgtagacaaataatctatttagtatagcacctctacacactgaacttcagtatgaacaaataaacaaccttctataagagttttaaatgctgcttctgacaagaagattctaaaactactaggtgatcccttgggaaaartaaatacatctgggtatatggagtgtttggtatcttttctttttcctcctcctctccctcttcctcctcctgcccttctcctcttttttctttcctttgtgcttgttgttttgcctcatctttgatgccaacttaaaaggaagaactcaaatgaattataactgtaagattgttttttcctcaaaacaaaataaaagaata

SEQ ID NO: 434630 - DNA, 565 bp, Homo sapiens
gaagaactcaaatgaattataactgtaagattgttttttcctcaaaacaaaataaaagaatagtgctcttgtccataaggccatcaaaaaccagtaggaacatttggtgcaatcaatctattacaaaccaattttatagctatataatgagatctaattgctgctttattagtctggctaatattaaaagtgtcagtaattgctttgcatttaagttggttttccaatttaaattgcatgtccaatacattaccattaacttatgtactgcttttatttaayagatttttctctttctggtctgcatttatagaattttccctttctgactggctgaaatgggaaaaagagagaaataggataaataaaaatttatattataaatgcttgcatttctgggttgctataatgtatcttcaatactaaagaattcatgtgacctgagatctttatctggctattactccaactacatgtaaaagaaaagttgagcaagtgaaatgttttgtcagagtatacaaaatattattaataattgaaataactggattagccatttccaatt

SEQ ID NO: 434631 - DNA, 565 bp, Homo sapiens
gaagaactcaaatgaattataactgtaagattgttttttcctcaaaacaaaataaaagaatagtgctcttgtccataaggccatcaaaaaccagtaggaacatttggtgcaatcaatctattacaaaccaattttatagctatataatgagatctaattgctgctttattagtctggctaatattaaaagtgtcagtaattgctttgcatttaagttggttttccaatttaaattgcatgtccaatacattaccattaacttatgtactgcttttatttaatagatttttctctttctggtctgcatttatagaattttccctttctgactggctgaaatgggaaaaagagagaaataggataaataaaaatttatattataaatgcttgcatttctgggttgctataatgtatcttcaatactaaaraattcatgtgacctgagatctttatctggctattactccaactacatgtaaaagaaaagttgagcaagtgaaatgttttgtcagagtatacaaaatattattaataattgaaataactggattagccatttccaatt

SEQ ID NO: 434632 - DNA, 647 bp, Homo sapiens
acattctgtattttatgggtgatttactaaacctgaattttcacatsaagggctaaaaaaaccaatttgtatttcaagtcaatctctctatcttcgagacatatatgatgttttttacatttttataataactttaaagggataacgctcttgacaacatttttctcgtacttggtacttaaaatttcaaagcttcttcatgctttattgcagttcaccttgtcagtatagctacagtggctagaccatgagctctggagttggacagcctagatcaacatcctggatcctcttcctacctgtgtgtccttgggtaagttacttaatcattctgtgcttcaatttcctcatttgtaaaatggggataataataaaaactgcttcttaggattgttttgaagtttgaataaaataaaaactaagcaccctctctataaaagaagcttttattaatattactattatcttaaaaccaatggtagcaaattaaaaattcataagatatttaaataatatttctgccaacacatggcagaatagttctgatctagcatttggtgaccattatagttgtaccatgtattttgccaggtacatagaaagacttttatgaatacttcttgaatgaatgagtgttcaggccctag

SEQ ID NO: 434633 - DNA, 634 bp, Homo sapiens
tggtataatttaacacttttaacatgaccatggaaattatctcatctaattttttatgccttcttattagaacccacaaatttttcccaggatggcgtcatcatatttacaagagccatagatgtgcaacttccatctggcaagaaccactcaggtaggtaggtagagacaaaagagctttgcctgcccttatgtctcgttacttgttacaggttcagtgaactcataatgaccatcacttctgggccagatatttttctagtcasttgataaatggaagtgagcaagaaatggactcagttttcatggagctcctgattttgtagagagagaaaaatggaaacaacacatgatcaaaagacttaaaccaagtgtgtaatagcctgaatatttattttataactgcttgctgactagaggatttacagggtctttagcagaaatcatgaagaaatgaaagacttagagtacaaacaagaatatgtcaggtccaggaatgagaatatcactattctcgttttatagaggaagtaactgaaatgaacaaaataacttaccaaaaatcacatccataaagaagagcaaaattgaaattcagactcaagtattattatcattgttctgttatgataat

SEQ ID NO: 434634 - DNA, 496 bp, Homo sapiens
atcatatttacaagagccatagatgtgcaacttccatctggcaagaaccactcaggtaggtaggtagagacaaaagagctttgcctgcccttatgtctcgttacttgttacaggttcagtgaactcataatgaccatcacttctgggccagatatttttctagtcagttgataaatggaagtgagcaagaaatggactcagttttcatggagctcctgattttgyagagagagaaaaatggaaacaacacatgatcaaaagacttaaaccaagtgtgtaatagcctgaatatttattttataactgcttgctgactagaggatttacagggtctttagcagaaatcatgaagaaatgaaagacttagagtacaaacaagaatatgtcaggtccaggaatgagaatatcactattctcgttttatagaggaagtaactgaaatgaacaaaataacttaccaaaaatcacatccataaagaagagcaaaattgaaatt

SEQ ID NO: 434635 - DNA, 579 bp, Homo sapiens
ttctacatgtataatcattttgaaaaataaaaagacaaaatgctagccaagtataagatgttgttcagtatattattaatatgtttggacaactagtgacaatattacccagcttatccagtagagggcaacgacacacacaaggatattcatattctttttaagactttgaaaaccacaaatttaaaagtgagaaaagcttttggtattatgctaacaaaataaaacaatctctctggattcagctgatttcttttcttttactcttttatstatacaatgtatatgtatataaagaaccttagactccattgagggtttccagtgtgtagacctgtgttctaaattccctactagaatttccacttgcccatttgctaagggtgaggaattattccagcttagccaatgggaaaagaacactgtttttactggtttcattaccttggtgctgcgcagaaggatttccatagcactggtgagggtgtggccctgattggagagaggcctgtaaggtttccatgccagcggagggattggagaatgacttggaaaaacaatgccgaccattgtttcctt

SEQ ID NO: 434636 - DNA, 585 bp, Homo sapiens
cagaatcagaaatgttgaattataagagataccaaatcagcaaaacaattcaaaaggtcttataaatttctatttgtgatatagtacagaacayactcattctttcctcagattccaagacatggagaaatttaatcctaattttagtaaactctgatagttaaataatgagtaatatttcatgatatatgagggaaaaaaaccagctaataaatattggataacatatttgactactaaataaagttttaatgaacaccctcaaatatttatttcttaaaaaacatagccagggggtctatactgaccactgatgtcatgcagattaggctataacaaattatttcacaaagtaaaacacaaaggaaaatgtcaagaagaccagtaaacaatcttatatttttcttgatagatttttttgcaaaaggataatattattggcccataatagattagctaaatccgaagttttcctgtttggtttgaagtttataaaagaaaatcacagtctattatttagatggaaagttcaggaaagtgttgaacatagagggactgagtttgtttcattgcatatctgtacta

SEQ ID NO: 434637 - DNA, 594 bp, Homo sapiens
gctaaattggttaatactttcatgtgctcagaaaaactgcctagaacatttgagtcaataaacattattactagagtcatttttactactattactcttaatctatttcactagcttgtccatgtgactggtcctggttttcctgaccttgccctagcacaagtggattttcaataagtgtttattgaatcttggaaacaatgaatcctgtagcgaacagtttcttctctgggctgcttccattttgaaggagacactgacagctgagaacattttgacctttttatgtaggtatattcgaagaggcaatgaagaaccagacactggtatttgatgcactttggaatctctgggaaactgtttcaggtttaagaagttaaaacaagctaaacactattggggaaaaaatgcttccaatatytctagtacatgatattgtgttttagaaaaacacacagaattgaagaattagataagataatctagcatttataacacttaaaactgacaaataactaacatgcatgagagtttgcaaagacacctacctaaggttgctgcttctctagaagccaaattttcagaaaaatgacc

SEQ ID NO: 434638 - DNA, 586 bp, Homo sapiens
ctgccacaacagccctgcttgcccagcaatraagtctagtcttttctttgaaaagaaaatttaaaattaggaaaagaaagaagcaatagcaattaattaattatatactctttgcctattatttatgagaagattcaccaggaattttatatgcattatcacattagttatcatcacattaataataatgttatgaggttccttatttttaacctttttacacaaatgaagaaactgaggtccagggataaataatttgctccaggccccacaactactaataatctctactttatcttttcacaatttatattatttttatctgatcagaagttttcaacaacagtcagtacctcctctcctgccaccaataaatgtttggaaatgtgtggagcattttcgtttatcacacttttgcctgagtccttctggtttttagtgtgtggccagggctcactgcaactctgcacacacacaaaatgtatctttctctagtgcctacacacgccttttgagaaacacttgaataaactctggaggctgagtgatttctgtctaacaaactacaaattaagaagtagttaat

SEQ ID NO: 434639 - DNA, 439 bp, Homo sapiens
ttaaccgtgacagataagagaatcatacaagtaaytggtttaaatggtaagaaatttcagtatttcccagcatagtaaccatgtttgaaagaagatcacacttctacaaaatgacttccatttaggaacagccttttcattgtgaagtatctacagctgccagtactaaatccatgggatataaagagggaaacaggaataagatacaatctctgccctaagggggccatagactttttaaatatttccttattttttagtcagaagaaggggataggggaaagatatgtacataatatcagatgagcccactactagagatgctactgagactctggaagctgagtggtagaaaacctcaaaatattaaaattagggaaggtctcataaaggaggttactcctgagcagatgctgacagaaaataggatgctcttccc

SEQ ID NO: 434640 - DNA, 439 bp, Homo sapiens
ttaaccgtgacagataagagaatcatacaagtaattggtttaaatggtaagaaatttcagtatttcccagcatagtaaccatgtttgaaagaagatcacacttctacaaaatgacttccatttaggaacagccttttcattgtgaagtatctayagctgccagtactaaatccatgggatataaagagggaaacaggaataagatacaatctctgccctaagggggccatagactttttaaatatttccttattttttagtcagaagaaggggataggggaaagatatgtacataatatcagatgagcccactactagagatgctactgagactctggaagctgagtggtagaaaacctcaaaatattaaaattagggaaggtctcataaaggaggttactcctgagcagatgctgacagaaaataggatgctcttccc

SEQ ID NO: 434641 - DNA, 560 bp, Homo sapiens
aatgaagtctagtcttttctttgaaaagaaaatttaaaattaggaaaagaaagaagcaatagcaattaattaattatatactctttgcctattatttatgagaagattcaccaggaattttatatgcattatcacattagttatcatcacattaataataatgttatgaggttccttatttttaacctttttacacaaatgaagaaactgaggtccagggataaataatttgctccaggccccacaactactaataatctctactttatcttttcacaatttatattatttttatctgatcagaagttttcaacaacagtcagtacctccwctcctgccaccaataaatgtttggaaatgtgtggagcattttcgtttatcacacttttgcctgagtccttctggtttttagtgtgtggccagggctcactgcaactctgcacacacacaaaatgtatctttctctagtgcctacacacgccttttgagaaacacttgaataaactctggaggctgagtgatttctgtctaacaaactacaaattaagaagtagttaatt

SEQ ID NO: 434642 - DNA, 586 bp, Homo sapiens
ctgccacaacagccctgcttgcccagcaatgaagtctagtcttttctttgaaaagaaaatttaaaattaggaaaagaaagaagcaatagcaattaattaattatatactctttgcctattatttatgagaagattcaccaggaattttatatgcattatcacattagttatcatcacattaataataatgttatgaggttccttatttttaacctttttacacaaatgaagaaactgaggtccagggataaataatttgctccaggccccacaactactaataatctctactttatcttttcacaatttatattatttttatctgatcagaagttttcaacaacagtcagtacctcctctcctgccaccaataaatgtttggaaatgtgtggagcattttcgtttatcacacttttgcctgagtccttctggtttttagtgtgtggccagggctcactgcaactctgcacacacacaaaatgtatctttctctagtgcctacacaygccttttgagaaacacttgaataaactctggaggctgagtgatttctgtctaacaaactacaaattaagaagtagttaat

SEQ ID NO: 434643 - DNA, 400 bp, Homo sapiens
ttatctgagtgttattttaatcaaatacatccatcccagccattaaaaatatctgaatctagacaggatgattgaatataattacattccaaaatgtggatattcgaccaactagagtctataattcctgatctcagatcaaagaccaattttattgtatattttttaaacaagtaaaaacaagattatgtaatcaaacctttaatttaaagtcactgctataattgtcagagcctggtaagattgaaatgttaacatattttctaactctcttgacaaacctgtcatatttcaacataaacaatttgaaaattatcatgcaaatacaatttgaggtttcaacaaatacaccagaaycaaaaaatgttacctttcaaatctgtcactctgaagtgatgca

SEQ ID NO: 434644 - DNA, 602 bp, Homo sapiens
aatttacagggacaattttggttgtcccaatagttggatgtgctgttggaatttagtgggtgagatccrgggatgctaatgtcctgcagtgtttgagcagtctgacacaataaagaattgtcctacatcactcatgactgttttgtatatcacagtccattcatgtatgcaaatatatggggtgattagcattatatccctacttcagttaggattacttctctcttgctctcatattatgcaaataaatttggcctgttattatgtaacctaatgctagtttttagtctagtatttgcttatacctcagttctttaattttcctctttggcttgactgcaatgacttacgacctttttataactcttaatccaaagatagtcattgtaagtgggtaaagaaaaaaatctaattaatcaccatgacttctagtgtagtcatgcctaagattttccaaattggaatgcatattatgttattataattgctttctatttcttctttattaaagggcattttattaaatatttaaattgcatgtgaaatcattttatatttatgaatttcaatttggaagagaaaggagagcatatttataatat

SEQ ID NO: 434645 - DNA, 602 bp, Homo sapiens
aatttacagggacaattttggttgtcccaatagttggatgtgctgttggaatttagtgggtgagatccggggatgctaatgtcctgcagtgtttgagcagtctgacacaataaagaattgtcctacatcactcatgactgttttgtatatcacwgtccattcatgtatgcaaatatatggggtgattagcattatatccctacttcagttaggattacttctctcttgctctcatattatgcaaataaatttggcctgttattatgtaacctaatgctagtttttagtctagtatttgcttatacctcagttctttaattttcctctttggcttgactgcaatgacttacgacctttttataactcttaatccaaagatagtcattgtaagtgggtaaagaaaaaaatctaattaatcaccatgacttctagtgtagtcatgcctaagattttccaaattggaatgcatattatgttattataattgctttctatttcttctttattaaagggcattttattaaatatttaaattgcatgtgaaatcattttatatttatgaatttcaatttggaagagaaaggagagcatatttataatat

SEQ ID NO: 434646 - DNA, 602 bp, Homo sapiens
aatttacagggacaattttggttgtcccaatagttggatgtgctgttggaatttagtgggtgagatccggggatgctaatgtcctgcagtgtttgagcagtctgacacaataaagaattgtcctacatcactcatgactgttttgtatatcacagtccattcatgtatgcaaatatatggggtgattagcattatatccctacttcagttaggattacttctctcttgctctcatattatgcaaataaatttggcctgttattatgtaacctaatgctagtttttagtctagtatttgcttatacctcagttctttaattttcctctttggcttgactgcaatgacttaygacctttttataactcttaatccaaagatagtcattgtaagtgggtaaagaaaaaaatctaattaatcaccatgacttctagtgtagtcatgcctaagattttccaaattggaatgcatattatgttattataattgctttctatttcttctttattaaagggcattttattaaatatttaaattgcatgtgaaatcattttatatttatgaatttcaatttggaagagaaaggagagcatatttataatat

SEQ ID NO: 434647 - DNA, 628 bp, Homo sapiens
tggggttaataatattttcctacaatgactcttattcctataagtattagtaaacatcagtttgtgttagcaattaactataatggcttgatattattttacctctcttgattgtatgttccagtccagatacttataaactgtgccacctatgtttttttttgccaaattaaaaataaaatgaaaataactgcccacttagcagacagcttcaagaaaataaccaagtagacacatagcgatggagtggargagacatgggagcagatgaaggtgtatctgaggagctgggaagagaaggaagagaatttaaaagagagaaataaaaacaaaagcaacaaaaaaagacctgccaaagccagggagctggaaaaaaatggagaaagccacacagtgttgaactaaggccaggatctgctaactccatgccccaactgtgcaaaggtatctccagtctcccagtgactgacagccatagcagagtggttggggtatgccaaagcttgcagctggttcttcatatggagcgggtgaaggtaaaaggaaatgtcagaaaattaagcctaacactagagggtattttcttttacaggtttccagggaaagctttgtttccatttaacaggct

SEQ ID NO: 434648 - DNA, 619 bp, Homo sapiens
ggaactccatgtggcaaagagattgttgagggagaaaaaaatggatgagcctatttttctttcagttctttaaatcagacttaactggaaaaataatcgcagtggctaacagagtcaggagtcagggtaattaagtgggtaaatgaggccggtgtcatttgaatttatgcattttccttcatccctttgtttgctctgcctttctctttcactgggtctccactgcaatgttgtttattcatggagggcatgccacagtttttaatactggggggaaaatctgaaacccttcatccgactggccaatgtgtagactggagagaacacagggggatcaaagtgatatgaagacaacaggggtttcattaaaatgttcygttctctgcctgaggacagagcagtgagaaaagggtggaaaaaaaaatcatctagcccaaacaagtttaacttaaaaaaaaagcaacgaaccacctgtggtctccttggaaacaggcaagcacaccctccagccaccttttaatgaaaccccagagcccctttattaatttattaaagaatctattttctgaagattcataaacctcatataactcatattccaacacatctctgctatgct

SEQ ID NO: 434649 - DNA, 588 bp, Homo sapiens
tttacagtacctaaaacagaataggatacactttttagttttatatgcaaaaggcaaatttacctgtgggtatgcatctatagataccctttaacggaatcctagaatgaaaacatttaacacatactttttaaaatcargctttttttaaaaaaaaaaaagtctaaatgtagattatttgaaatacatacagcatcagcactgggttttgcttagagctgattggtggtagaaaatagaggaatctgacttctatcttaaaagagcataatttattttgttcatccttcttcttatccttctggttgtaacaaaatatccagagtgggctagagggagagagcttagactcaatgttgtgtctctttttctctgatcccagctggagcccaaaacaccccttgcctactttccctcctcctgtccttaatggtctagcccttcttcatggtttcttcatagcctgcaatgtgaataggtagagtgggactcattacgtaggaaaagtagaagatgtgattgaagcccttatacttcaattattcagcaaaataggatcctatgagagctttaaaataaaaacaaagc

SEQ ID NO: 434650 - DNA, 598 bp, Homo sapiens
gaagctgatacctgagaagacttaaaaaccataagagtgtatctgcaattcatacaaaaatacaaagaactaattgtaaggtacaggactttgccttgaagactctccagggtgattctggggaagtggagtaagtcctacctctctcttcctaaatctccctactgtggcaaagctcgattactagttgctagaagttcatgcttccattgtgggaggtagagttgttgctggattgcactgcccatcctgggattatcttttccagtcatcccttgcatctaggtggagttgtttggctgagttctgagcaatggaatgtgggcgattcactactactaggccaggatcaagaaaactgcccaaaggattctccactctctcttctcccttttgctactggatgctgattttcaggatgactttctttgggaagccattgttgcaagtagcagtttctgtcatccccaagccatgactgtgcagaacacacaacttctaccaccaactggactttcackttgaacaaaaaatatacttgtcttgtgttaagccaaagattactgaactcatctttcataacaattagcattgtctt

SEQ ID NO: 434651 - DNA, 590 bp, Homo sapiens
agactcttacacaatggttctcaaacttcagtgggcattagaaccccctggagggcttgttaagatatggcttgtagaacctcacccccaaagttcttctgtcaggcccagtaatttgtatgtctaacaagttcccagataccatactttgagraccaatggtctaagcaactctgatataaaccctttcctagcttctgtagcatctcatgtgtcctcaggccagtgtctcaattttcataggtgtattgggtaagaagaaaagaacacatatgaaccaatgccttaaagcagttgcagtcacctggagtattttttattcttgtttttttggttttgatttgttttttaaaatattgattcccaggtctcagtccagactaattgaatctgagtcttggggtggggaaaagcactgggcattactatttctttaaagcacataattctattaagcaactgggttttagaactattgccttaaagaaatgtcaagtatcagtagtttgaaagagaagactcttgctgttccttaaactatttatatgaagaccagccttatctaattctttctctaaccagtgagagag

SEQ ID NO: 434652 - DNA, 643 bp, Homo sapiens
ggaagcaacattatggaggatgttttcaccaaagaaaattcagggtgattaatgtgcgttaacatttcttcattatcaactgcagaaaccactcatttcctggaatatactagataccaatattatgcagtattatagaaaaataccatattataaataatttttttctcaccaagagattaatagataatgggtatgatttgccccatcatctacttcaaatcacaagctgtgtactcttctaggtaaagtaggatgcattagtccagtatccatctcaattcctcatccctgaaccctaatgctaagaagaactcatcctctcaggaatgttccatgtagccagtacatgcaggcaatatcacatccacatggggtggcccttcccaatacagctctatgaaataaactgtggtaaggcaaaacaacaccatgcccaagagcatgagcattgagtttattttgacygggctttgaaaaccaactctgtgacttatcatctgtgagatctttaggtaggttccttgagctctctgtgtcttcctcccatgcaattcttatatagacaaacaagatgttcagagcatctagtgtactgtcaaacatattgtaagcgtgaagagctagctacaaataaatgcag

SEQ ID NO: 434653 - DNA, 573 bp, Homo sapiens
ccaatattatgcagtattatagaaaaataccatattataaataatttttttctcaccaagagattaatagataatgggtatgatttgccccatcatctacttcaaatcacaagctgtgtactcttctaggtaaagtaggatgcattagtccagtatccatctcaattcctcatccctgaaccctaatgctaagaagaactcatcctctcaggaatgttccatgtagccagtacatgcaggcaatatcacatccacatggggtggcccttcccaatacagctctatgaaataaactgtggtaaggcaaaacaacaccatgcccaagagcatgagcattgagtttattttgaccgggctttgaaaaccaactctgtgacttatcatctgtgagatctttaggtaggttccttgagctctctgtgtcttcctcccatgcaattcttatayagacaaacaagatgttcagagcatctagtgtactgtcaaacatattgtaagcgtgaagagctagctacaaataaatgcagatggcaaccttgcaggaagctgcagaagagcaaatacctgttgcca

SEQ ID NO: 434654 - DNA, 560 bp, Homo sapiens
gcctgtctcttgccccaagctctaaacatttacaccacaactaaatagtcttttacttgtgtgccttctctactaggtgaagtattctttaaatacaggagccatgtcttatgtttcccaggattccaatttcctagaaaactgcctagtccacagtagatattcacttatgcgtgattcgataagtcctttaatgaaatcacatgactttcaccttggccagaattgcaagggcagtggaagccacacacacaaaaaggcctacttgagttatccaaccagagcccattaagaccacctagttacagcctatgagggcttcggagagactttyaatttctacactgaagcaagaaattagtaaaatgcaataaaacgcaacagtaacttacttgcagttggcttccagagcagagatgtcagctaggaatgacttgttcttttggactcataactatttctggatttctttgtggcaagggacattagtttcacctcatgtgatgtgaggcagtgatgggcctaatgatcaaagtgccagtgatgctttgtgctcagag

SEQ ID NO: 434655 - DNA, 567 bp, Homo sapiens
cataactatttctggatttctttgtggcaagggacattagtttcacctcatgtgatgtgaggcagtgatgggcctaatgatcaaagtgccagtgatgctttgtgctcagaggcctctgactatcattccttcccgtcaatgttcccagatagcacagcccagtgcaatttcagaacaattcggtcttctgagcttttagctttgaccttttagcacatgcctgaacttgaaggtggctgttagttgttccaagcaactgagcaacttcattcctaaccaagcacatactccatgcttttgggtcagatagacctgggtttaaattacagttttaccatttaccatgtttgagtttagacaatatgtaggggttctttaagccttagttttcttgtctctaaaatagaataaacaaaaatattyaccttatagggtcactatgaggattaaatgacacaatttgtatcaagcatttctgtgcaaggtcacatgtcttacaaggctgggtccaggaagcaagttcagttcttttgatcccagagcctgaactcacaggccttagtccca

SEQ ID NO: 434656 - DNA, 580 bp, Homo sapiens
taaacagactatccattatccttgacattaatacatgtcctatgaatatataatacatgaaaagaacctatcaaagtgtatatgattattttaaaatgatggcttatgggaaaatttttaattattcgcttttgtatttgaaaattaaaaaaatgaaaaataacaggcctgcaggcatgtgatcgattgacaaataagttatcaaagtggtgtttaacagaatccttttgaggcaggggtaagtttacttcaaattgctattatgggtttcttaaaatacrtttcagaatagtaaagacaatcatttctgggggaaaaaacatggtcattcaactcataaattggttcattcatataaacagaaaatacacttttccattctgctaagtatcaaaatacctttaggtgaagcaaaaattttgaaaggcataaaatctaaagtagctttcatctaacactctcttcaattattgcctatggatatttttcaggtggattttcaagagagatgttacacttgtaagcaatttatagttaccttttaggaatcaatatgttaataaattagaccaaaacaaaa

SEQ ID NO: 434657 - DNA, 589 bp, Homo sapiens
gtgttctgtactgaatgcaccaattgtcacctcccctcccccaggcatggaaattmtccagctagcaaacctgtatgtgtgtgtgtttaaatttcaaaccaagttactatctgtgttaaaaattacttcaaaactctaagagaaaaacacatggcttgatgttaattttgatatggtgcttttgattttgcttcctccatctctgaatgcctgaagctattgggttaaatatgcatgcaatttcagagagatttcaatgagacaggtttctttgtgacagttgaacttccaagttgagctacagaatataattcacaccatccttttttggtatctaccagcaatatatttttaatattcatgatttgatatcattaatatttatgacttaatatactcttaattacaacttttttgaagaagaaaatgcactgtattcgaagagagttagataaaaattctacctaactttaccccaatacttctaagtattggccatttttgaatgtgttaggtctcttttctttctcataatgtcatgcaaccatgccaattttttaaaaaagcagttatattatcaactgcaaca

SEQ ID NO: 434658 - DNA, 438 bp, Homo sapiens
gccaagtgcaatggctcacacctgtaatcctaacactttgggaggctatggtggacagattacttgaggcaaggagttcgagaccagcctgagcaacatagtgaaatcctgactgtgctaaaaatacaaaaattagctgggcatggtggtgcctgcctgtactccaactacttttgaggttaatgtagaaagatcgcttgaatccaggaggtcaagggtgcagtgagctgagatcatgccactgcataccagcccctgagtgacaaagtgagactctgccaaaaaaaaaaaaaaaaaaaaaagagagagagagagattcaaaaaaattatgtaaaataataccaaactaacacagrcagctatttatattttacacctttttctcctttctttacttttgaaattataattatggtgtggcttggctatacctgactg

SEQ ID NO: 434659 - DNA, 519 bp, Homo sapiens
taaatgaattttgtagtatggcatttcctaaatacagtgcaagttgatatttaaattccaataaaagatctgaaagggcaatattcttttatgaacgtatgggtagataaaattaaggyttttttgatgctgatttagacagcctaaaataatgactatcataatttaaagaataggaaattttgctttaacctcatacatttgaaaatttatataaatgttttagtccctcttttgtgctatggacagtactgcacactgggattgcatagattagaagataaacatagtccctttgctcaagtgtggtgtggagacaaatatacagcttgtccaccgacaaccccaattaagaaatctgaaacctacaacccaatcagaaattgtaggagtgtggatagtgatttagtgataaaggggtgtagatagtgatttagtgataaaggggaagaatgcatcattccatttctcaaaaagcttgagaaatatgcattgccatgtatttaaataaatatatac

SEQ ID NO: 434660 - DNA, 610 bp, Homo sapiens
agtcacatacacaacttctgcttatatttcttttttttcttttgagacggagtctctctctctcgcccaggctggagtgcagtggcgtgatctcagctcactgcaagctctgcctcccgggttcaggccattctcctgcctcagcctcccgcgtagctgggactacaggtgcctgccaccacgcctggttaatttttttttttttgtatttttggtagagacggggtttcaccgtgttagccaggattgtctcgatctcctgacctcgtgatccgccagcctcggcctcccaaagtgctgggattacaggcgtgagccaccatgcctggccgttctgcttatatttcattgactaggcagattaaaatggcagggargctgggtgctatggtttgaacgtcccctccaaaacgcatgttgaaatttatttgccattttaacagtgttgagagatgggacctttaagaaatgattaagtcattggctgggtgtgatggcttatgtctgcattcccaacactttgggaaagcaaggcaggagatcacttgagcctaggagttttagaccacccagtaggaccccatctctacaaaaaattaaaatgtatgtg

SEQ ID NO: 434661 - DNA, 575 bp, Homo sapiens
attgtttgaggacagaagctcaagaccagactggacaacatggcaaaaccccgtttctactaagaatacaaaatagtagttgggcacagtggtgcacacctgtaatcccagttactcaggaggctaaggtgggagaatcgcttgaacccaagaggcagaggttgcagtgagctgagatcaygccactgtactccagcctagacgacagagcgagagtctgtctcaaaaaaaaagaaaaagaaagaaaatccaactcaaactctataaaccaactctataaaaatgaaagatttctgtgcagcaaaaggaatcaaataaatttaaaagacacacaaatttactagaaataattatctataatttatattatagactaagagtaatatctatgacatgcaaagagttcctgcaaacaaataagaaaataataacaacctgatagtaaatgggctgacatattgtcaagtatttcaaaaagaaatattaccaaaagccagtaaatagatgaagaaagcttaaactgtcgagtaacaatgaaaattaaaatgtgtgataaaatcactttttgcccaaca

SEQ ID NO: 434662 - DNA, 584 bp, Homo sapiens
gatatgtgggaatttaggcttggaaaccaatgagaaaatgctgatactctggctgctgctattgctgtgagtcatgacctgtcctttgtgtcagaccctggagcctcatgtcttctaccagcatccatgaagctgtggcaggctaacttgttagcttgcaagtagggtaaaatctcacaccctagacagtgcttgacagtcctctgttgcactgagtcagggttcacccttgtggccagaatatggcagaagtgatgttatgtaacctcaagactatgtcatcaggataacgtagcttctgtctggttctcttaggatgctcactcttggatcccagataccatgctgtgaggaagctcaagttgctctatggagaggcccccatagagaggagatgatagcccatgctagcttgccggaaatatgaggagccaacttaaaatggatcctccagcccagtccaacctgcagatcatttgcagccctgctgacatcttactaaaatctcaggagcaactccgccagaactgcccagccaaytccccctcaccaaattcccaactcagaggaatcaggagagatat

SEQ ID NO: 434663 - DNA, 559 bp, Homo sapiens
tttctcacagttctggggtctaggaagtccaagatcaaggcaccagcagagttggtgtctagtgaggacatgcctactgttccatagatggcatcttctagctgtttcctcacatggtggaaggggcgagggggctctctagagtcttctttttatagaagcattaatcccattcatgaggctccatccttatgacttaatcatctaccaaggaccccacctcttttttttttttttctttgagacggagtctygctctgtcgcccaggctggagtgcagcggcaccatctctgctcactgcaagctccaccccctgggttcacgccattctcccgcctcagcctcccaagcagctgggactacgggcgcccgccaccacgcgcagctaattttttgcatttttagtagagacggggtttcaccgtgttagccaggatggtctcgatctcctgacctcatgatctgcccacttcggcctcccaaagtgctgggattacaggtgtgagccactgtgcccggccgggccccacctcttaatgccatcacattggggattac

SEQ ID NO: 434664 - DNA, 559 bp, Homo sapiens
tttctcacagttctggggtctaggaagtccaagatcaaggcaccagcagagttggtgtctagtgaggacatgcctactgttccatagatggcatcttctagctgtttcctcacatggtggaaggggcgagggggctctctagagtcttctttttatagaagcattaatcccattcatgaggctccatccttatgacttaatcatctaccaaggaccccacctcttttttttttttttctttgagacggagtcttgctctgtcgcccaggctggagtgcagcggcaccatctctgctcactgcaagctccaccccctgggttcacgccattctcccgcctcagcctcccaagcagctgggactacgggcgcccgccaccacgcscagctaattttttgcatttttagtagagacggggtttcaccgtgttagccaggatggtctcgatctcctgacctcatgatctgcccacttcggcctcccaaagtgctgggattacaggtgtgagccactgtgcccggccgggccccacctcttaatgccatcacattggggattac

SEQ ID NO: 434665 - DNA, 590 bp, Homo sapiens
ttatatcatatttatagattttcaacttcattttttcgccttcagtttaccttgagaattttttcaatatcacaatatatagttctctcctagtcttttaaactgacatctggcatttcatcagtttatattacgatttatttaactactcctccactgataaaaatttaagtgcagactccttgtgcaatgattctgcagaatagattcttgaaaaaagtttgctcaaagagtatgtacatttaaattttggatagatactgccaaattttcatccaaaaatkctttataaatttacagatctgccaaccatatacaaaaggacttgtttttttcacattatctccatcactggatattactattttatagtttattaatttggaggtaaaatgtcattgaatattatattaatttctaatttctataattatttaaagtttaggcgaattttacatttattcataattatttgtatttcttctttttgaatttactgttcagtttttttgcgcatttcttgttgagttgtttcctacagatttgtagtagttcttcatgtatactgagtattgatctttttttttttt

SEQ ID NO: 434666 - DNA, 570 bp, Homo sapiens
gtcccatgcaatatttaggacatgcttatactaaaaaattacttattatttttctgaaatttatatttaactgggcaacctgtattttcatttgctaaatctagagctctgttacgggtatgtgatgagggcacaagataccttctcagttctcactttargcggaccgaatgtacaccccttatgaggcttaccccaaggcaagaccttaagtgtggcatggctcgggaggtgccatgaggaggcgaccttgggaggggtcctgcaggtccccatcagcttccaggtggctgagcaattttctgaggcccaggttttcacccatattccccacccccaatgccagccaggcattggcagcgtggcccccatgaggctccttgtggttagggacaggctccctcctcccttcgtggtgtagtggaagaaaacaaggagtactccagtgctaaatctaggctcaacagatcaagatcaatctagctggttaccggtggtgtggcagtgtgcaagtggcttcatttcccttagcgttagtttccacatctctaaaatgggaatagtcatagc

SEQ ID NO: 434667 - DNA, 515 bp, Homo sapiens
ggctgcgcgtggtgcggggagggccacggcaggcacccgcggacccggaccgggaaccgccgctgccactgagccgggagcacgggagggccccgtcgggccgggagggctttgggcgagttgggcttgtcaaagggaggacctggtggcaagtggctggcagttgccgctctgtctggagcgtgggggartctcacgctcaggtacagagatcttctgtccagatctttttctcttttaaggaattctcttcctctgtcactatcctctccgaatccctaaaattttatagacattattttccagtgtctcttttgaggaatcacctctttgccacccttcttctcaagcaggagtcttttcccattcctcttccccaattaagcacatcccctccctcctccaatttagaaggattttcttcctctttctcactccccagtttaaaaggaaattctctctccccacaatttggaaccaccttctgtggctcactttcccatttccaaggctag

SEQ ID NO: 434668 - DNA, 649 bp, Homo sapiens
ttggaaaactaacacatcctacatcatcttctaggagaggaattgtcttacttcctaggaagttgcactttgtgctgggagcctagcatgctttgtgatggtaaaatagtgccagtggctgggaagctcaaatcaacattctttagcctggactaaagagaggctggggctgaatgggtgtgctagacatggggtgatctgtaaagcgtggctccagcaagtgggtagagaccctcgtcctctgattgagaacccaaggaggagccaagtccagcatctttagctaaaaactccttttttgttatgtagaaatgtttaccaaacccaactccagtcagtgctggctgggcactccagtcgattggtgttagygtatgggaagctcataaaagctttatggggaaacctgtgcttagaaatggagtttagaggtgtcctgctgtcagagaaggatggcagagatgcctttgaatgaagaaggctgtgataggaaaaatttttagtctcaagtgcatggaaatatgagttgtcagacagtcaagggttcatctgcttcctcctcttcccccgtccccactttttccatacaaaatcttttggattctcctctaagcaaaatgtggtttcctatgtgaggaaatttgttgct

SEQ ID NO: 434669 - DNA, 649 bp, Homo sapiens
ttggaaaactaacacatcctacatcatcttctaggagaggaattgtcttacttcctaggaagttgcactttgtgctgggagcctagcatgctttgtgatggtaaaatagtgccagtggctgggaagctcaaatcaacattctttagcctggactaaagagaggctggggctgaatgggtgtgctagacatggggtgatctgtaaagcgtggctccagcaagtgggtagagaccctcgtcctctgattgagaacccaaggaggagccaagtccagcatctttagctaaaaactccttttttgttatgtagaaatgtttaccaaacccaactccagtcagtgctggctgggcactccagtcgattggtgttagcgtatgggaagctcataaaagctttatggggaaacctgtgcttagaaatggagtttagaggtgtcctgctgtcagagaaggatggcagagatgcctttgaatgaagaaggctgtgataggaaaaatttttagtctcaagtgcatggaaatatgagttgtcagwcagtcaagggttcatctgcttcctcctcttcccccgtccccactttttccatacaaaatcttttggattctcctctaagcaaaatgtggtttcctatgtgaggaaatttgttgct

SEQ ID NO: 434670 - DNA, 579 bp, Homo sapiens
attctcctctaagcaaaatgtggtttcctatgtgaggaaatttgttgctagtttttcttgtgcttcaacctgaaaggctggcagagcaaccaggttagcaaaatggccctactagtactggatatcattctgggctagattaaaaagaaatgattgtcaataaatgactgtagttataccagttggggaaaaaatggcatctttttgcaacatttaccttttttggttttgcttccagggaaatttacatcattgcatggaaattagccgtgaggggatgcaattagctatagtgtattttgttayaattgttctttcagaaaaatctgatctgacagatttatattgttgacaatgtgatttaagcaggacctagatacatactttctgcaccctaatcaataatggtaaatccttttgctgaggtgaacaatctctgacctagtattcatatttcttttaccaattccctgtaataaaattgaacattttgtcaccactttgagaaacactgccaaacaccttaaaacacatgtcacatgccagcagcccctcatttccctcctccgggagtttcta

SEQ ID NO: 434671 - DNA, 609 bp, Homo sapiens
gctatagtgtattttgttataattgttctttcagaaaaatctgatctgacagatttatattgttgacaatgtgatttaagcaggamctagatacatactttctgcaccctaatcaataatggtaaatccttttgctgaggtgaacaatctctgacctagtattcatatttcttttaccaattccctgtaataaaattgaacattttgtcaccactttgagaaacactgccaaacaccttaaaacacatgtcacatgccagcagcccctcatttccctcctccgggagtttctacatctggaatcataatcacagataaaaaccttgacaaaattgcatctgagcacattcctctccgcagcctttactttctcataacatttaatacaatattaatacctgctactgaaaagcaggagggaggaaaagggctgccaacctccacgtttcctgatgcatcatgttcaaacctgaaattcacacttcgtgtttcattttaagttcagtgcatttaacagggccctagagagagagccctggttagttccccaacctgctcagctgacgcccagggaggcggtttcagaattgttcagatcgctgcagggag

SEQ ID NO: 434672 - DNA, 487 bp, Homo sapiens
taatttatgactgtaatttgtaattttggcacctccaaaatctgatgtctttctcttattaaaaaatataattgtctattctcaacagttccccagtcttacctcatttcaacattaactcaaaagtttctgaaatctagacagaggctcccaagcctcaactcttgccctctgtgcacctgcagaattartaccccctggaagctgccaaatcttggggcttgcaccctctgaagcaatagtccaaactgtatcttggcccctgtcagccacagctggagctggagcagctgtggttcagggcaccatgtcccaaggctgcagaaagcagtggggttctgggcctggcccacaaaaccattcttccctcctaggcctccatgcctgagtctctttgctaaagtctaagagtgacttttactctagttcccaataagttcctcatctcaatctgagacaaccaccttagcctggacttcattgtcca

SEQ ID NO: 434673 - DNA, 487 bp, Homo sapiens
taatttatgactgtaatttgtaattttggcacctccaaaatctgatgtctttctcttattaaaaaatataattgtctattctcaacagttccccagtcttacctcatttcaacattaactcaaaagtttctgaaatctagacagaggctcccaagcctcaactcttgccctctgtgcacctgcagaattaataccmcctggaagctgccaaatcttggggcttgcaccctctgaagcaatagtccaaactgtatcttggcccctgtcagccacagctggagctggagcagctgtggttcagggcaccatgtcccaaggctgcagaaagcagtggggttctgggcctggcccacaaaaccattcttccctcctaggcctccatgcctgagtctctttgctaaagtctaagagtgacttttactctagttcccaataagttcctcatctcaatctgagacaaccaccttagcctggacttcattgtcca

SEQ ID NO: 434674 - DNA, 514 bp, Homo sapiens
acacaccttttagttgaatggaaaaccttttactttttttaacttttattttaagttcagggaaatgtgaaggtttgttactagacactatatttattcagagtgctaaaaatggtggcggcagccttgttccatgccagttgagtgaagctgaagctttgatggctggaattcccttcccctaaacagttctcattcagcaggagccacatgaaattcaggtgttatttggaagatggaagtgaagccaktgtctctatcttttgtctcctcttgttgacatggggcagctgctctgtgacttccaggaaccctgaacatttttgccttcatggggcccttcttcaattaccaataaataatgataattatattttatgattgtgttggtataaagatgaatacattattatataagaaaatattgtctttaatctaaaagttcatttctttccttctgattttaaaataagtttaattatcttgtgtgtccttaaaagtctcatagcctact

SEQ ID NO: 434675 - DNA, 436 bp, Homo sapiens
ctgggctcaagctatccaaaggagctgggactacaggcacacacagctatgggtggctatttttttttttaattttgtagatacagggtctcactaagttgcccagcctggtctcaatctcccgacctcaagcaatcctcctgcytttgcctcccaaagtgctgaaattacaggcatgagcctctatgcctagtctgtaatatattctttagactattaaaaatttgggtaatatgtatgtatattcacatctattgaatctacttgtgtaatattatctgtttaaatgttaattgttaagtgaactgtatgttttcagctatatatctcagcaatatattccaatttagatacaatactgtttttcaagggaggtggaaatattttgtacattaaccatgcaaaataaaattgtactttgaaatacattgatttt

SEQ ID NO: 434676 - DNA, 601 bp, Homo sapiens
tgtgtaatattatctgtttaaatgttaattgttaagtgaactgtatgttttcagctatatatctcagcaatatattccaatttagatacaatactgtttttcaagggaggtggaaatattttgtacattaaccatgcaaaataaaattgtactttraaatacattgatttttagatgttaaaacaactttgcattcttgggacaaatctgagataattgtttatgatccatttaacatgctgctgtattcagttggctagcattttgttgagcatttttacatctgttataagagatatcagactgtgtgtttttttattttgttttctttggttttcatatccagatattattggactaaaataaagagttgggaagtatttctttctgttctgtttttagaagcatttatgagtaattggtatcagttatttaagtgcttgttagaatacagtagcaaagtctttttttctgggtctttgtgaatatatttttggttagtaatttaatctctgtgcatgtacttcttttcagggttttccttttttttttagtcactttcagcattttgtgtttctctaggaacttttctattttatgt

SEQ ID NO: 434677 - DNA, 601 bp, Homo sapiens
tgtgtaatattatctgtttaaatgttaattgttaagtgaactgtatgttttcagctatatatctcagcaatatattccaatttagatacaatactgtttttcaagggaggtggaaatattttgtacattaaccatgcaaaataaaattgtactttgaaatacattgatttttagatgttaaaacaactttgcattcttgggacaaatctgagataatygtttatgatccatttaacatgctgctgtattcagttggctagcattttgttgagcatttttacatctgttataagagatatcagactgtgtgtttttttattttgttttctttggttttcatatccagatattattggactaaaataaagagttgggaagtatttctttctgttctgtttttagaagcatttatgagtaattggtatcagttatttaagtgcttgttagaatacagtagcaaagtctttttttctgggtctttgtgaatatatttttggttagtaatttaatctctgtgcatgtacttcttttcagggttttccttttttttttagtcactttcagcattttgtgtttctctaggaacttttctattttatgt

SEQ ID NO: 434678 - DNA, 601 bp, Homo sapiens
tgtgtaatattatctgtttaaatgttaattgttaagtgaactgtatgttttcagctatatatctcagcaatatattccaatttagatacaatactgtttttcaagggaggtggaaatattttgtacattaaccatgcaaaataaaattgtactttgaaatacattgatttttagatgttaaaacaactttgcattcttgggacaaatctgagataattgtttatgatccatttaacatgctgctgtattcagttggctagcattttgttgagcatttttacatctgttataagagatatcagactgtgtgtttttttattttgttttctttggttttcatatccagatattattggactaaaataaagagttgggaagtatttctttctgttctgtttttrgaagcatttatgagtaattggtatcagttatttaagtgcttgttagaatacagtagcaaagtctttttttctgggtctttgtgaatatatttttggttagtaatttaatctctgtgcatgtacttcttttcagggttttccttttttttttagtcactttcagcattttgtgtttctctaggaacttttctattttatgt

SEQ ID NO: 434679 - DNA, 601 bp, Homo sapiens
tgtgtaatattatctgtttaaatgttaattgttaagtgaactgtatgttttcagctatatatctcagcaatatattccaatttagatacaatactgtttttcaagggaggtggaaatattttgtacattaaccatgcaaaataaaattgtactttgaaatacattgatttttagatgttaaaacaactttgcattcttgggacaaatctgagataattgtttatgatccatttaacatgctgctgtattcagttggctagcattttgttgagcatttttacatctgttataagagatatcagactgtgtgtttttttattttgttttctttggttttcatatccagatattattggactaaaataaagagttgggaagtatttctttctgttctgtttttagaagcatttatgagtaattggtatcagttatttaagtgcttgttagaatacagtagcaaartctttttttctgggtctttgtgaatatatttttggttagtaatttaatctctgtgcatgtacttcttttcagggttttccttttttttttagtcactttcagcattttgtgtttctctaggaacttttctattttatgt

SEQ ID NO: 434680 - DNA, 587 bp, Homo sapiens
taaaacaagttttcctcaacctacaaaaagtcttacacagtcacacaataatagcgagggacttcaacaccccactgacagtgttagttcttcaagggcagaaagttaacaaggacattctggacttaaacttgacacttgaccaattggacagctaaaagacatctagagaatactccatccaacaattccagaaaaaacattmttctcatatgcacacagaacatattctaagattgactacatgctcacccataaagcaagtatcacaaaattaaaatatatatatatatcaaaatcataccagccacactcttggactacagggcaataaaaatagaaatcaatatcaaaaagatctcttaataccaaaaaattatatgcaaatagacaacttcctcctgaatgacttttggtaaacaatgaaataaggcatgaatcaaaaaattctttgaaattgttaaaagtaaacacaacataccaaattgttagagatacagctaaagcagtgttaagaagtttatagcaataaaagactataacttgggttcagtgtatactgcttgggtgatgggtgcaccaaaatc

SEQ ID NO: 434681 - DNA, 482 bp, Homo sapiens
ataccaaaaaattatatgcaaatagacaacttcctcctgaatgacttttggtaaacaatgaaataaggcatgaatcaaaaaattctttgaaattgttaaaagtaaacacaacataccaaattgttagagatacagctaaagcagtgttaagaagtttatagcaataaaagactataacttgggttcagtgtatactgcttgggtgatgggtgcaccaaaatctcacaaatcaccgctaaagaacgtactcatgtaaccaaataccacctgttccccaaaagcctatggaaatatatattttttaaagcytacatcaagaagttagttaaattaacaatctaaaattgaacctacaggaactagaacaacaagaacaaactaaccccaaaacttgtagaagaaaataaataaccaaaatcagagcaaactgagcaaagttgaaagccaaaattccatagaaaagattaacaaaaccaaaaata

SEQ ID NO: 434682 - DNA, 615 bp, Homo sapiens
aatcagctagctgataaggtaacactaagagatgctctaaatgcatctaaacaagaaaagcaatttatattaactttaaaataagcaccccaaaaaagagaataactttttttaaaagcacctgaatttgacataaaatgaactaaatctagagctccaaaatccaaacaggaaagttggaaaacaaaaggaggaacatactctcccaaagattagatayggtaggggtcaaaaaacttgcctatacttcctgctgaattgtggtcatcatttttacctatgtacgtgatttcactcattggagccctgataaagtggttgcttgtggaaaataatatttttggaaactttctctgactataggtcatgaggcatacaatcgctgccatatctgcccaaaatagaatccaggaaaacttttacacagttcccaaggacattttcctttatttgtaggcccctttgaagtatggcaatgaaattttatttagctgccactatcacaaggatacaattctgttctactgatgatttgcatgttttcttgttgaatagaagcattttccattcagaaaagaaatggacttagtagcaagtaaaattctcttagaaaaa

SEQ ID NO: 434683 - DNA, 587 bp, Homo sapiens
ggttctctattctgttccattggtctatgtgtctgtctttatgctagtaccatgcttttttggttactgtatctctgtagtataatttgaagtaaggtaatgtgcttcctccagttttgttctttttgcttaggatagctttggctattctgggtcttttatggttccacataaattttaggaatgctctttctattcctgtgaagaatgtcatgggtagtttggtagggattgcattgagtctgtagattgctttagtggcatggacaatattaattcttccaataacaatattgatttttccaatctatgaacatgaaatatttttccattttctggtgatttcttcaatttctttcatcagtgttttatacttttctttaaagagatctttctyttctctgtttaattcctagctttttaattttatgtgtggctattgtggctatgggcatatggaaatgctactgattttgcatgttgatattgtatcctacaactttactgaatttgtttatcagttctaatagttttcttgtggagtatttaggtatttccaaatataagctcatataatctgtaaacaa

SEQ ID NO: 434684 - DNA, 600 bp, Homo sapiens
ctgactgatttgactggtaaaaatacaaggaaccacttttagattgagacagtttagtacttacataaacagtacaaagaatgaaccaaagaggccaactccccaggtccttgtctcatataccctaaaagacaacaaagaaacaaaaggggctagatgactataatgcaagttgagggatactccctggctgaggagccaaatctatactgcggctgagtggctatatattccgcagctctattctaaaaggcacaggaargaaagctccatacctcatcagaatctggtaagtgatgagaaattcattcaagacagcctctcaggagagagagggaagtgactgggagaaggccttatagcagctccttacagcctctgatcttcttgtgttctgggaggatcacaaaacaattaaccaaaactcagattagctgcagttcaagcctacatggatatatgcaagggtgccaggccatcatggaggagccattcccctacaactccactctcctttcatatatccacctaaggattctttttacaaacataagccacctgttgtggccactctaaagatacagaatggaccccatgcaa

SEQ ID NO: 434685 - DNA, 612 bp, Homo sapiens
tggggtaatttataaaggaaagaagtttaattgttcagttccacatggctgggagggcctcaggaaacttacaatcatggcagaaggggaagcaaacacgcccttcctcacatggtggcaggagacagaagtgccagcaggggatatgccagatgcttataaaaccatcagatcttgtgagaactatcacgagaacagcatgggggaaccacccccccccagtacaatcacttcccaccaggtccctcccatgatatgtgggrattatgggaactacaattcaagatgagatttgggtgggggcatagccaaaccatatcacctaggtagaggaagatctagcagcttccacttgtccttttcaaccataatagcccttactgcaaaagtcattctttgggattctgccagttgctgagtatatctacactaattattcattcttaaaatgggaaaataatcataggatggactcagggacccactgggcccactgtgaggtggacctgagctaaaactccattgttcacctgacctccatacaaccttactctgacaatgatgttttaggcctcctgaaattagtgtcagagccaatagtagtccctgaaa

SEQ ID NO: 434686 - DNA, 663 bp, Homo sapiens
gatctgaaggaaaaggagtaacagattgaccaaagttctttatgaagccaagaagtcaggaatagaaacttccaaaaatgggaacatggagtaaagaatataaaaatctcaagtgaagagaatttctaatacagatgtgtcctatgtcaattcattgttcacatatattttccaataagggcaaaactgacacaatgatagcaatactttattgagcaagtagcaaatgtaataattcattcaataaatactgggcactgtgttaggttctggggatacagagatgactcaagctgggcttcaggcctcaaagacttcgtgttctagtggacggacagacagacctgtagatagaaagattctgcctacatgtagaattgcgcctacatgaaattgtgaggagagctatgacagaaataagcatggaggaccttgggaaatagatgagggccccttaatctaggtagccatgaaagaattctcagaggagataatgcttatgaactaggtactattatgatcctcaacattagattagaaaactgcagatcagggaggtaaggtaacttggctgagatyacatggatagtaaatggttgagccagttttcattcatggtaatgtggactcccaaacctcattcgttttacttgactgccacca

SEQ ID NO: 434687 - DNA, 601 bp, Homo sapiens
atgtaaactggacttggagtgttacaaaaatcctgctcaaaagcatatactaaaccattaccattttcttgtaagtacaaatcartttttatgagacacagtcttgctttgtcaccaaggctggagcgcagtggtgtgaccacagctcactgcagcctcgacctacagagctcaagtgatccttccacctcagcctcccaggtagctgggactataggcatgcaccaacactccaggctaattttttatttttgtagggataagagtctcactatgttgcccaggctggtctcgaactcctgggttcaagcaatcctcctgccccagcttcccaaagtgctgggattacaagtgtaagccaccacacccagccaaggtttttgtggaagacagtgtggcgattcctcaaggatctagaactagaaataccatttgacccagctatcccattactgggtatatacccaaaggattataaatcatgctgctataaagacacatgcacacacgtttattgcggcactactcacaatagcaaagacttggaaccaacccaaatgtccatcagtgatagactgaattaagaaaatgtggcacctat

SEQ ID NO: 434688 - DNA, 526 bp, Homo sapiens
cgtcaatactgccctcactttctcttaacctcttatattactcacactttctcacctcatactcactagataactctattacctctccaagggaaatgaatatctcaggtgtaacataccttagtttcataatacaaatctaccaaccttccttatacctatccagttttttctccttccctcctggtacagtggaaggggtaattttctaccatctaagataaattgcttcactgtgcttcacatcccaagtccttccaccctctcaggctctttttccaytgattactacatcttcctataccttcaaggctttccctctgtaagggttcctccccattaacaaataaaggtgcccaagtctctgacacctagaaaaccttaaaactctccttcaatgtgacctttctctttagctaccatcctatttcttgcctctccttcaatagttaattaaattatttgaaagaattatttactcattaaatccagatccttatgtcccacttattcctcagcccactgc

SEQ ID NO: 434689 - DNA, 526 bp, Homo sapiens
cgtcaatactgccctcactttctcttaacctcttatattactcacactttctcacctcatactcactagataactctattacctctccaagggaaatgaatatctcaggtgtaacataccttagtttcataatacaaatctaccaaccttccttatacctatccagttttttctccttccctcctggtacagtggaaggggtaattttctaccatctaagataaattgcttcactgtgcttcacatcccaagtccttccaccctctcaggctctttttccactgattamtacatcttcctataccttcaaggctttccctctgtaagggttcctccccattaacaaataaaggtgcccaagtctctgacacctagaaaaccttaaaactctccttcaatgtgacctttctctttagctaccatcctatttcttgcctctccttcaatagttaattaaattatttgaaagaattatttactcattaaatccagatccttatgtcccacttattcctcagcccactgc

SEQ ID NO: 434690 - DNA, 544 bp, Homo sapiens
gttaatgttgggcacaattttccagatgttagactcacagcatctttagttacagaggaggaaagttgtggcagcctgacatgtttttcttgcctgtgttacaaggaacaatgtagtagcgatttcattgagttcggatcaggaaaatggaagaaaaaattcaaagtgtttgtttagggacttgtagcccagaaagaattcagaatttagtccaaattgcagaaaataataaaaactcaaaaacaatggacaagactagaatctaacacaggtgtactatagttttttctgaaacataatttttcyctctccagtccccatttttactaaagacaaatcatagtaggataaatttatttggaaaataaggtttagtcttattttgcttgtcctaattatttgcatcaagtacagcaagaataattatttgccatataagttcctttgcaacttggctttgctggaatttttatttatacggaatcttggattaaaccttttaaagcttcgagcccagccacagatttattggtgcctgcaaata

SEQ ID NO: 434691 - DNA, 558 bp, Homo sapiens
tacctcttttctccctgaaggcatgtgggtttataccagctcacataaatgattcgtgaagctttgcttgtgatgggttgggaaagaaagtgatggggagtggtccaagaaggggtgtaaacattttatctaatcctygcaacaacctaatgaagcaggtgttacgattatccccacgtttagataaggaaaccaaggcacagagataacttttccagggttgcacaactaactagtaagcaatggaaccaaggtttgaacctagctccaggagccacacctgtgtccactccactacactagctttgtaaaagtattttattttgattctgacaggatgaggttgagaggcacgactcctttcggacttgcatgaaggtttaagctacaaaaaaaaaatactcaaatcgatatttctttgtttcactttcctcatctggaaaataagggtaataattatgttacaacgataaaacatgtttcaaatagtgcctggcgctcaacacaaaatggaaagtttagaatggacattcaaagtcaacattttaaaagttgggg

SEQ ID NO: 434692 - DNA, 546 bp, Homo sapiens
gtggaattataaagtctcacatttggaagggacttgagattatctggattatatagataattcttgataacatgattcttaaacctgactctacatcagagttagttggaggagctttgaaaagccccacgttctgggcttaccccttatcaactaaatcagaatccctgggatgtatggttcagtaatttatttttgataaactttgtgggtctaaagcagttggcttggcattggcaaatggttgtccaacttctgctttaaagcttgccaagttgaaatatttgtgraataataagtcaggtaagctaataagcaatttcttcttaaattctcagtatctgttatgccaatatataaggataggttttgcccttttctcaggatcaattagtagtatttttaaacaagattttaattaattttacattttccccaaatacagataaaagttttagatgcgaaagttatttgttatacattacaaaaacattgtgcatttatattttagttctgatccaatactagatattcttttataaattg

SEQ ID NO: 434693 - DNA, 574 bp, Homo sapiens
caggcatgtaattttaactttcaaaagttcaaacgtccactagaaactcaatgttcctattagacatgtcaaaaagcacagtattccgattattttattcagtattttcaatgaaaagtttcaccacataattcatggctaaatgtgttatagagaatatttagagasaacaaaagaagattcggatttaccttaagtcttttaactcagtcaagatatggaaatataagatcactggatgccaaaaaaataaacgaacgaaaaacaagcttttgatctgtaaatgttcacaatgagacaatgagctaatgaaagaaatctcattacttcatctctgttagaagtaacagtagtaataatactggcttttccaagaaccactctgtcaagccttcacatttggcttaacaataacatcaaaaggaaaattctcaaatatgacccaactcagcataagaacatacttgagtgcacgatgaaactttacagatcctactttcctaacaatacaaaaaactttcaaaaaattaataaaatactctcatggatagctaacatttaaaacataactata

SEQ ID NO: 434694 - DNA, 560 bp, Homo sapiens
attgtgtcacagctgagtaactgaaataaactctttacttttatcctttcttcctatgatgtgtcatacacatcatgggcatctccatttcttaagccatttctaagtgtgatctcacctcatcctaacatcctgctgtgagctgtataattagcctgctctacaaaaaggcagtagaagccaggagagtgattcacccactgtcagagattaagtaggaggcaggatttaaaaccaagagctgactaaatttataaaaacttctgttaacaaataagcaacagttatattgagtgtttatgttaatattaagagccawatatgttttcctcagtttgaattcatttgatggctcccagttgtctgaatggtgaacaaggcttttcagggcttgggtggtagtcacttctctaccacatttcttatttccacctcccacttctcaccatatattcctattccagtgttgcttgtgcttttcttcaaacacctgtgttctttctggtttctgggattttcctcatgttctttgtctgccttgaaaatcttctcttcattct

SEQ ID NO: 434695 - DNA, 621 bp, Homo sapiens
tttggcattctacccactacctcttcattagttaagtggttgcttctttctatctagccagacttcctgatgccaattcatgtcctgaccaaatttttgcctctcacctcctgcttccctttcctccatcatcatgttcacactgactttctcctgagacatcatctgtaacttctttaaggaccttccttatgttgatgacctatctaaggggccctctatcacccacatcatgctatttttagcactaggaaaggtggaaactgctcagaatatttatcacgtgtctttaacaggatcctaattttcatgtactacttctgaagatacattataagagaattccaaactgcagaacaaagggtaagtctacaaaggtgctcagtgtcttcatttataacagaaaaataattagaatatgctagccacaaaagagtatttaataataataaaccacccgatataccttaatgcaactattaaaattatgtttctaaagagaaagcactgtaattatatggaaatatcactacagcattatggtaactttttwaaaaatataagatttactttatagagcataactaagtcctgtttgcttgtctgtttaacttagtcata

SEQ ID NO: 434696 - DNA, 578 bp, Homo sapiens
gaaatacatttggagttcctatctgaaaacattctactaagcactacaaaagacagagagagaagtaaatacgtaggcaagcataggctctattgaggttagaattaaaatgactattgtataagaaatgaaaatgtttacataagtcaccataagtccattaaaacaaaataatgttttaaaggaagggatttgaaaaaaaaatccaaaactaaaccaaatgctatagagagtaaaaggaagggtggattataaatgattgagggaatgtggcaaggctccatagaggaggtggtttgggttggccttaaaggatagttagttagaaggttttttcttttttttttttttttcaatgtccataggtttctattctcaccatctttctgttacaggcgacaggaatttcagagaacttttctaatcacaagctctccagagtccatctgcaatgccatgtattcactagacccgatccagatcctattaaaactcagcatactgcttagtaygctgagaagaaagcgctcatcagtttgatgcaaacttctcagattgggcagctacaattagagtaa

SEQ ID NO: 434697 - DNA, 632 bp, Homo sapiens
agttttaaaaattattgaggttctattttacagagtacccattgcatgtaatagtttagtacctataactttgatatccatgtatgaatggattttctaagattttctaaatattaaaatatttgcttttgttgtctatgttcagagtttaggctcttaaaatgttatctatttctatcttaccatacactcctgtatcttaaatattgctgaaagaatttgccaattagttaagacaatttctgccattaattttttccaaacacctgtttaatttcttctgaggtatctaagtttctgccacatcctacratatttctttcttattttcaacgtctagtcaagcaaatgtatttatctcatttaaggcatttatgtccttaatgactagcccagggtattatcttctgtcatattaaaactaatattggagcctctccctaatgaggccaagaatacatttgatctatctaccatttgtctttctctttttctcccatgtattacaaattatagagaacaatttatcttagttgtctaaaaatataatcccatagaggcaaggattgaatctttcttgcattctataactttcaaacaattgagtatagaaaatgttgaagtgcttaatt

SEQ ID NO: 434698 - DNA, 632 bp, Homo sapiens
agttttaaaaattattgaggttctattttacagagtacccattgcatgtaatagtttagtacctataactttgatatccatgtatgaatggattttctaagattttctaaatattaaaatatttgcttttgttgtctatgttcagagtttaggctcttaaaatgttatctatttctatcttaccatacactcctgtatcttaaatattgctgaaagaatttgccaattagttaagacaatttctgccattaattttttccaaacacctgtttaatttcttctgaggtatctaagtttctgccacatcctacaatatttctttcttattttcaacgtctagtcaagcaaatgtatttatctcatttaaggcatttatgtccttaatgactagcccagggtattatcttctgtcatattaaaactaatattggagcctctccctaatgaggccaagaatacatttgatctatctaccatttgyctttctctttttctcccatgtattacaaattatagagaacaatttatcttagttgtctaaaaatataatcccatagaggcaaggattgaatctttcttgcattctataactttcaaacaattgagtatagaaaatgttgaagtgcttaatt

SEQ ID NO: 434699 - DNA, 487 bp, Homo sapiens
tatttttacccagctaaaaatatttttctgtgttcttggcattttgcatgtgacatggcatatgctctgaaagtaacaatagaattacaacagacccctcaactgctattttgagtaaactattttgtcattgtaaawtcttttgttaaaatgcaagagaagataattattccttttttctttatgccattgtgaataaaaatgcagtgtacttacaatagaaaaattatcattgaactgtctaatgaggttgatatggagtcattttagtaatacattaatactcttggggccacttcatatttttttacccatgctatttctgcctcaataacttaaacattgctactctgatcaaaatccgttcatcaggcttttcttttaagggacacaagtacataatcacttccttttctgtttaaatagagatcgggcaatgctgatatatcaggataacagattccctaagctgccattaaaaagccta

SEQ ID NO: 434700 - DNA, 487 bp, Homo sapiens
tatttttacccagctaaaaatatttttctgtgttcttggcattttgcatgtgacatggcatatgctctgaaagtaacaatagaattacaacagacccctcaactgctattttgagtaaactattttgtcattgtaaattcttttgttaaaatgcaagagaagataattattcctttttwctttatgccattgtgaataaaaatgcagtgtacttacaatagaaaaattatcattgaactgtctaatgaggttgatatggagtcattttagtaatacattaatactcttggggccacttcatatttttttacccatgctatttctgcctcaataacttaaacattgctactctgatcaaaatccgttcatcaggcttttcttttaagggacacaagtacataatcacttccttttctgtttaaatagagatcgggcaatgctgatatatcaggataacagattccctaagctgccattaaaaagccta

SEQ ID NO: 434701 - DNA, 590 bp, Homo sapiens
cattaggagaaaggagtctgaaggggcacagaaaactttcctcagaggaggagacataggaagttgccttcaagcatgagtaagagtttgccacacartgactggaaaggtcagctaagtagaggagatggcaaatagaagaaaggggaattacacggggcattgctactcaagaacaataagaagaccctggcagggtacaagcagggcagtgacaggaaataaggccagaatagcgggtggggctggactctgaaagttacgatttttaaagcatgcacacagtccagagactgtgataagggaacacttttagtctccatgtctcatgtttccctgcggaggaacttaacattctcactccaccctgctcacactcctctccagaagagaaggctacaggaagatagatttggggaaggaactgagcatgcgcagctcaaacacacatctcatttacaggtaaagctcacaggatcatgttctgtctgcccctattgccagtgactgggtggtaaagcctaattcagaggtgagctattagaaagaccatttaccctgaatctaaagttaaattcttcagtcagcct

SEQ ID NO: 434702 - DNA, 575 bp, Homo sapiens
tgtggttgtcacaactgggagggggatgctaatggcagcaaatgagaggaagtcgagacaaatactaaacatcttacaatgtgcagggcagcctccctcaaaaagactagcatgtcagtagtgccaaggttgaggatccctgcttaattcccaccttacaaagagcagagcatgtgtgtgaactaagaacaatgtttattttgtgatttaatagaatgcctcaatttgtgctcttgtcataactcctttaaacatgaaataaatatacaatgtatccttctgtataygaaagattcttctgtgcttaaaatattttctccctgggtgataaataaaattaagaatctctgactcaggcataaggtgagtgaaaattgcttgccactgttggataataatagtaatctgcagctaataaagtcattctcagcctcagctgtacattatgatcacctggggagattttgaaaagcagtggctccagggctctaacccttggagatgctggtttaattggtcttagtttgggcttgagcttgagtgtctttggagctcaccaggcagttttaacgtaa

SEQ ID NO: 434703 - DNA, 636 bp, Homo sapiens
tatgctaaaatgttggctgaaaatagtaagaaagaaaattctacatatggttaaggtctcaacaatctcyttttaaaagatgttggaagaagcctggaagaaaatccactaaagtgttcttaatggttgccttcaaatggtggtgtcatggttgaattttttcagctttatgtttctatttccatatttcatataatctgcatgctttatttttacaatccttagggggagtaaaacaaactttccatgaaattataacatagaagtattcatatttctatttcattagagatgatattcacacaccaaaaatttgccagctttctctccttttctttttacttgctaatttactctaatcttaccaggattttttttttttttacttcttcttaatctcaatgagaattttactttgaaagaaggagctctaactttttttttcctactctaaaacagtgtttgtacttttttctggactccaagttggatgccttcaccaaagtggtttcaaagactggaacaaaaaagcctccatcgaggccctggctagcacagtccctgttactttaagagtagcattccacctccccctcacacccacatacttgtcctctctttgcacagcaagtgcca

SEQ ID NO: 434704 - DNA, 594 bp, Homo sapiens
aaaatatagagaggaggagagccaggcaaatcagctgctccatcatggtgagccgggaagaggttaagggttaattgcatgtatcccacctctggtctcttttagaccctgttctcagcaggtggctttcctgcctcactgccccaactgyttatcagtggaacaaagactggccctgagtaatggcctgaattgtcatctgcagtagatttagattcagaaatagtcaactaatcatttgaatagattttgctttttagttctctcattcttcatttttgtttttcattttttaaaattatagaaaaaaatacataaaatgggatctatacccttaacaaatttttaagtgtgcagtgcattattgttaactctaagcacaatgttgtacagtaaagctctagaacatttttatcctgcatgactgaaactttatacccattgaacagcaactccttatttactcttcccccattttctggcaaccgtcatgatacctttttctttaatgactttgactactttagatacttcatgtaagtggaatcatgcagtatttgtcctgtgactggctaatttcacatcaagtaatgt

SEQ ID NO: 434705 - DNA, 594 bp, Homo sapiens
aaaatatagagaggaggagagccaggcaaatcagctgctccatcatggtgagccgggaagaggttaagggttaattgcatgtatcccacctctggtctcttttagaccctgttctcagcaggtggctttcctgcctcactgccccaactgcttatcagtggaacaaagactggccctgagtaatggcctgaattgtcatctgcagtagatttagattcagaaatagtcaactaatcatttgaatagattttgctttttagttctctcattcttcatttttgtttttcattttttaaaattatagaaaaaaatacataaaatgggatctatacccttaacaaatttttaagtgtgcagtgcattattgttaactctaagcacaatgttgtacagtaaagctctagaacatttttatcctgcatgactgaaactttatacccattgaacagcaactccttatttactcttcccccattttctgscaaccgtcatgatacctttttctttaatgactttgactactttagatacttcatgtaagtggaatcatgcagtatttgtcctgtgactggctaatttcacatcaagtaatgt

SEQ ID NO: 434706 - DNA, 520 bp, Homo sapiens
cttgggccccaaccatggagccacatagattttcaacacccactcgactagaatcggcctaagtctgccacatttccagggggaggggcggtcataatcactgctgtggctgtgtaagattctcggaggatgagtggcagccaatacttcagctgcgtggcctccgtgcaggaacttgaactccagccgggggctcagggacagaactctcatctccctgggcatgagttcctagagggagaggtagccgtagtctcggtgagccaacagacttactctttcctcctgctagctctgaggagtccrggcagcccagacaagtgggtttccccagcgcagtgcaccccctccaccataggacagccaaagtgccttgttaaatggatcctgcttcctgtgccacccgactgggtgaaacccccataataggggttgtcagacaccctatacaggcgtgttcttaccggcatcaggttggtgccccttgaggtcagagatcccagagaaaggaggaggcact

SEQ ID NO: 434707 - DNA, 461 bp, Homo sapiens
catagttggaagtcaatgactgtttgatacataagtgaacagagaaatggtctcatggctcctcagtgatgtactgggtaacattttgctgagcaaaaatggccccagataatgtgatgtctgtcctggacccccaccgcctctcctcgcatatgctccgctggatgtgtggaacaggcagcatgctgactcttgcctctgtgcttttgcacatgctgttccctctgcctaggagcctttgcctctctctccctcctttatggagtggttcccttcatccctcaaaactcagcccaaggttcaccttgcagraggctcccttactccttggtctgggttgggtgctgccactgcacccaggcttaattctactgcagcgctgatcttccccaggacacaggccatgacttgactgactgcaccatgggggctaagacaaagcctcccacagtaaatatgta

SEQ ID NO: 434708 - DNA, 461 bp, Homo sapiens
catagttggaagtcaatgactgtttgatacataagtgaacagagaaatggtctcatggctcctcagtgatgtactgggtaacattttgctgagcaaaaatggccccagataatgtgatgtctgtcctggacccccaccgcctctcctcgcatatgctccgctggatgtgtggaacaggcagcatgctgactcttgcctctgtgcttttgcacatgctgttccctctgcctaggagcctttgcctctctctccctcctttatggagtggttcccttcatccctcaaaactcagcccaaggttcaccttgcaggaggctcccttactccttggtctgggttgggtgctgccactgcacccaggcttaattctactgcagcgctgatcttccccaggacacagrccatgacttgactgactgcaccatgggggctaagacaaagcctcccacagtaaatatgta

SEQ ID NO: 434709 - DNA, 448 bp, Homo sapiens
acccacacctgtcatgccttaggagccggctgaggtttgctgtctgtcctctggggtcacgctaccatcactgcctctggccacatcttctctcacttcctgcctcccttctcccacccttcacaaaaataaggaartggatgaaaggtaactacagaagatttgtcaggctcttggcacacactatgttaactaaatttcctttgcacttaagaaaacagttcttaaatctcacagaccccatcaaattttcatatgtcacgaaggaaagcaaaaatccagtgatcattagccaacttcttttttaaaggcagcaatataaatacgttttggagaaacacagctagaaaacagggccattattgtgcttttccttgaaaatatatatcaggccttcacataattgcatgtttttaaggcaaatttggaacacaaagcagagaaaaca

SEQ ID NO: 434710 - DNA, 515 bp, Homo sapiens
attgtccaatcgtgctcaggaaacagtgcttctcctattgatctttgcaacccatggatcaggggatccccttgtaagcccatgccaccagggccttgtgtctgatacacagagctgtggagtctcagcagatcagctgctcaggcacacacagaaacccagacgttttacgtactctggccccgagawcctcagcaaggtgggaaatctgtccatacatattttggaaaggggctgaatccagggagccaagcagtgtcattctgtgggctccatttccacggtacctcacaagttaagacccattggcttggaatcctagccaaccaagagcaacaggttggattccacctcagatgggtctgagttccccgggaggtggagaggggcagccagcatcactgtagtttgtagactcagccactcctgcctgccagctatggaaaatacaggtggtcaggaggaggaagtgttccctgcaacgcagcacacctggtctaccaaaaagcagcgag

SEQ ID NO: 434711 - DNA, 515 bp, Homo sapiens
attgtccaatcgtgctcaggaaacagtgcttctcctattgatctttgcaacccatggatcaggggatccccttgtaagcccatgccaccagggccttgtgtctgatacacagagctgtggagtctcagcagatcagctgctcaggcacacacagaaacccagacgttttacgtactctggccccgagaacctcagcaaggtgggaaatctgtccatacatattttggaaaggggctgaatccagggagccaagcagtgtcaytctgtgggctccatttccacggtacctcacaagttaagacccattggcttggaatcctagccaaccaagagcaacaggttggattccacctcagatgggtctgagttccccgggaggtggagaggggcagccagcatcactgtagtttgtagactcagccactcctgcctgccagctatggaaaatacaggtggtcaggaggaggaagtgttccctgcaacgcagcacacctggtctaccaaaaagcagcgag

SEQ ID NO: 434712 - DNA, 515 bp, Homo sapiens
attgtccaatcgtgctcaggaaacagtgcttctcctattgatctttgcaacccatggatcaggggatccccttgtaagcccatgccaccagggccttgtgtctgatacacagagctgtggagtctcagcagatcagctgctcaggcacacacagaaacccagacgttttacgtactctggccccgagaacctcagcaaggtgggaaatctgtccatacatattttggaaaggggctgaatccagggagccaagcagtgtcattctgtgggctccatttccacggtacctcacaagttaagacccattggcttggaatcctagccaaccaagagcaacaggttggattccacctcagatgggtctgagttccccgggaggtggagaggggcagccagcatcactgyagtttgtagactcagccactcctgcctgccagctatggaaaatacaggtggtcaggaggaggaagtgttccctgcaacgcagcacacctggtctaccaaaaagcagcgag

SEQ ID NO: 434713 - DNA, 509 bp, Homo sapiens
catgttgtgcaataaatttcctgaacttattcctgtctaactgaaattttgcatcctttaactgacatctccacaatccctcctttttgttccccccagcccctggtaaccaccattctactctctgcttctatgaatttgacatttttagagtccacaaagaagtgagacatccaatatttgtctttctatgcctggctcctttcacttagcataacgttctccaggctcatccttgttatctcaagggacaggatatcctctaaggccgaacagtgtgttcttatttatatataccaggtattctttatctgttcttccattgatgacatttagattgactccatagcttggctattatgaataatgctgcagtgaacatgggagtgcagatttcattttctttggacatatacccagaagtggaatctccaaatcatatggtagttctatttttytatttttagttttttgaggtgtccctatgctgttttccataataactacta

SEQ ID NO: 434714 - DNA, 408 bp, Homo sapiens
tcaatgcatggtttcaaagcttcaaggcacaggccrattctcttttaggggcgaatgaaactggtgactttaagttgaggccaatgatcattgactgttctgaaaatcctagggcccttacgagttatgctaaatcaagcaagatgggtgactagagatgccttgtgctcatctcccctgcaagaaaacccaggaacaaatacacatctaaggtctgattagagtatcaaagggatagtcctggagcgcagcaaaggagtggaggagacacacctgtggtgactggaaggccccacagcatggaagcactcagcctctgcagtcccttctcccccacctgggttgaactggcccagagacaggaaggacttctcattgcagagtgaaggtaagcagaagatccccacc

SEQ ID NO: 434715 - DNA, 408 bp, Homo sapiens
tcaatgcatggtttcaaagcttcaaggcacaggccgattctcttttaggggckaatgaaactggtgactttaagttgaggccaatgatcattgactgttctgaaaatcctagggcccttacgagttatgctaaatcaagcaagatgggtgactagagatgccttgtgctcatctcccctgcaagaaaacccaggaacaaatacacatctaaggtctgattagagtatcaaagggatagtcctggagcgcagcaaaggagtggaggagacacacctgtggtgactggaaggccccacagcatggaagcactcagcctctgcagtcccttctcccccacctgggttgaactggcccagagacaggaaggacttctcattgcagagtgaaggtaagcagaagatccccacc

SEQ ID NO: 434716 - DNA, 408 bp, Homo sapiens
tcaatgcatggtttcaaagcttcaaggcacaggccgattctcttttaggggcgaatgaarctggtgactttaagttgaggccaatgatcattgactgttctgaaaatcctagggcccttacgagttatgctaaatcaagcaagatgggtgactagagatgccttgtgctcatctcccctgcaagaaaacccaggaacaaatacacatctaaggtctgattagagtatcaaagggatagtcctggagcgcagcaaaggagtggaggagacacacctgtggtgactggaaggccccacagcatggaagcactcagcctctgcagtcccttctcccccacctgggttgaactggcccagagacaggaaggacttctcattgcagagtgaaggtaagcagaagatccccacc

SEQ ID NO: 434717 - DNA, 408 bp, Homo sapiens
tcaatgcatggtttcaaagcttcaaggcacaggccgattctcttttaggggcgaatgaaactggtgactttaagttgaggccaatgatcattgactgttctgaaaatcctagggcccttacgagttatgctaaatcaagcaagatgggtgactagagatgccttgtgctcatctcccctgcaagaaaacccaggaacaaatacacatctaaggtctgattagagtatcaaagggatagtcctggagcgcagcaaaggagtggaggagacacacctgtggtgactggaaggccccacagcatggaagcactcagcctctgcagycccttctcccccacctgggttgaactggcccagagacaggaaggacttctcattgcagagtgaaggtaagcagaagatccccacc

SEQ ID NO: 434718 - DNA, 536 bp, Homo sapiens
cttcaaaaagaaaaaaaacctgacattttatctgtatatatttaatagatttataaagaacatgtgtatacatatatcaatatagatgtaccagcaaggaagatttagaacatataactatgtggcagggttagaaagaacataattctttcccagaaggggtgcagggaactatacttaatcagctaccagttacaacataacttaagtcatttctcatyaaaatatatctctactgcatattctggttgataaattttccatgttttttgtttatgaagattatccaattcatttctttgtagataaagcctaagaatagaaaaaaaaattgttacattttattttggggctaactgaaaagccatgtagtaggcacccttgttagagcttgaagaaacaaacaaaaaaaagacttgctcaccatgaatagaacctcagcccctttttgtgtctcagttggctccttctaccttttcggtgagacttaaaaatatcttaatcttcagcaacacatcagtaacacatgctactga

SEQ ID NO: 434719 - DNA, 536 bp, Homo sapiens
cttcaaaaagaaaaaaaacctgacattttatctgtatatatttaatagatttataaagaacatgtgtatacatatatcaatatagatgtaccagcaaggaagatttagaacatataactatgtggcagggttagaaagaacataattctttcccagaaggggtgcagggaactatacttaatcagctaccagttacaacataacttaagtcatttctcattaaaatatrtctctactgcatattctggttgataaattttccatgttttttgtttatgaagattatccaattcatttctttgtagataaagcctaagaatagaaaaaaaaattgttacattttattttggggctaactgaaaagccatgtagtaggcacccttgttagagcttgaagaaacaaacaaaaaaaagacttgctcaccatgaatagaacctcagcccctttttgtgtctcagttggctccttctaccttttcggtgagacttaaaaatatcttaatcttcagcaacacatcagtaacacatgctactga

SEQ ID NO: 434720 - DNA, 536 bp, Homo sapiens
cttcaaaaagaaaaaaaacctgacattttatctgtatatatttaatagatttataaagaacatgtgtatacatatatcaatatagatgtaccagcaaggaagatttagaacatataactatgtggcagggttagaaagaacataattctttcccagaaggggtgcagggaactatacttaatcagctaccagttacaacataacttaagtcatttctcattaaaatatatctctactgcatattctggttgataaattttccatgttttttgtttatgaagattatccaattcatttctttgtagataaagcctaagaatagaaaaaaaaattgttacattttattttggrgctaactgaaaagccatgtagtaggcacccttgttagagcttgaagaaacaaacaaaaaaaagacttgctcaccatgaatagaacctcagcccctttttgtgtctcagttggctccttctaccttttcggtgagacttaaaaatatcttaatcttcagcaacacatcagtaacacatgctactga

SEQ ID NO: 434721 - DNA, 536 bp, Homo sapiens
cttcaaaaagaaaaaaaacctgacattttatctgtatatatttaatagatttataaagaacatgtgtatacatatatcaatatagatgtaccagcaaggaagatttagaacatataactatgtggcagggttagaaagaacataattctttcccagaaggggtgcagggaactatacttaatcagctaccagttacaacataacttaagtcatttctcattaaaatatatctctactgcatattctggttgataaattttccatgttttttgtttatgaagattatccaattcatttctttgtagataaagcctaagaatagaaaaaaaaattgttacattttattttggggytaactgaaaagccatgtagtaggcacccttgttagagcttgaagaaacaaacaaaaaaaagacttgctcaccatgaatagaacctcagcccctttttgtgtctcagttggctccttctaccttttcggtgagacttaaaaatatcttaatcttcagcaacacatcagtaacacatgctactga

SEQ ID NO: 434722 - DNA, 579 bp, Homo sapiens
gcaaataactcctcacctaccaataacaactttgaatgttaatagattaaataccccaagaaggatatagacttgctgagtggattaaaaaataagacccaactgggyacagtggctcacgcctgtaatcccagcactttgggaggccgaggcgggcggatcaggaggtcaggagttcgagaccagccgggccaatatggtgaaaccccatctctactaaaaatacaaaaaatcagctgggcgtggtggtgggcacctgtagtcccaactactcgggagggtgaggtaagagaatggcatgaacccgggaggcagagcttgcagtgagctgagatcgtgccactgcactccagcctgggtaacagagcgagactctgtctcaaaaaataataataaaaataagacccaactatattttatctaaaagaaactcaccttacctctaaagaaacacatagactgataatgaagggatggaaaaagatattccatgcaaatggaaaccaaaagtgagcaggaatagctatacttatatcagtcaaaacagactttaagttaaaaaccataaaaagtgacaca

SEQ ID NO: 434723 - DNA, 579 bp, Homo sapiens
gcaaataactcctcacctaccaataacaactttgaatgttaatagattaaataccccaagaaggatatagacttgctgagtggattaaaaaataagacccaactgggcrcagtggctcacgcctgtaatcccagcactttgggaggccgaggcgggcggatcaggaggtcaggagttcgagaccagccgggccaatatggtgaaaccccatctctactaaaaatacaaaaaatcagctgggcgtggtggtgggcacctgtagtcccaactactcgggagggtgaggtaagagaatggcatgaacccgggaggcagagcttgcagtgagctgagatcgtgccactgcactccagcctgggtaacagagcgagactctgtctcaaaaaataataataaaaataagacccaactatattttatctaaaagaaactcaccttacctctaaagaaacacatagactgataatgaagggatggaaaaagatattccatgcaaatggaaaccaaaagtgagcaggaatagctatacttatatcagtcaaaacagactttaagttaaaaaccataaaaagtgacaca

SEQ ID NO: 434724 - DNA, 579 bp, Homo sapiens
gcaaataactcctcacctaccaataacaactttgaatgttaatagattaaataccccaagaaggatatagacttgctgagtggattaaaaaataagacccaactgggcacagtggctcacgcctgtaatcccagcactttgggaggccraggcgggcggatcaggaggtcaggagttcgagaccagccgggccaatatggtgaaaccccatctctactaaaaatacaaaaaatcagctgggcgtggtggtgggcacctgtagtcccaactactcgggagggtgaggtaagagaatggcatgaacccgggaggcagagcttgcagtgagctgagatcgtgccactgcactccagcctgggtaacagagcgagactctgtctcaaaaaataataataaaaataagacccaactatattttatctaaaagaaactcaccttacctctaaagaaacacatagactgataatgaagggatggaaaaagatattccatgcaaatggaaaccaaaagtgagcaggaatagctatacttatatcagtcaaaacagactttaagttaaaaaccataaaaagtgacaca

SEQ ID NO: 434725 - DNA, 445 bp, Homo sapiens
ggagagtacaccatatttcctccaattgaattcttagacaagtattattttgaaaaaaaattccatccattcaggaataaatgttcttctagcttgaaaatgtaaaaagtatccttagaagaaattaacttcattagaagtttttttttttttaaagaaaacaggaatgcagaatgttacttactcatcaatagtgaacctttctcatttttactggatattgtgcgattcccagttttgtagatttcacctatgagcaagtggtattgatagcaaaagcaaacatgttttgctgactaaagacctctttatgctcactgggattttgttattatttgtttctaatctcactagagtactgagtactcctattgcactgacctgaaggcattttaccatgtactcactgtaacgaaacaayacattcttaaactggcttgtgtct

SEQ ID NO: 434726 - DNA, 569 bp, Homo sapiens
tcactgtaacgaaacaacacattcttaaactggcttgtgtctgaactgcagacatattcaggagatttttcttctgcttctttcttgcccagttgtataaccattcaccagcttatgtcaatgttggagaggaagtgctgccatagaggaagttaactcatcatggttataagctgttggtgtctaaacaaagattacatgggaaacagagggcaaatacaaatagttcttcaaattaccctgagttttcattttctagaaatttttatcatgggccatcagtgaagaattcacggcaccacttaattaaactgtgtgtctgcatactagctatacattttctgtaayggagctgcccagggttgaggcaaaattagacagattgagcaaggcaagcatttcctttttctttcccctctccaaacaaaagaaagcaggtttttgttttgttttatttttaagttacaaagtctcattgcataaatataggaggaattggtagtagtccctgtgagaaacactggtgtttcataccagggggatgatcttggatttatagtaaaagctgg

SEQ ID NO: 434727 - DNA, 603 bp, Homo sapiens
gctgcccagggttgaggcaaaattagacagattgagcaaggcaagcatttcctttttctttcccctctccaaacaaaagaaagcaggtttttgttttgttttatttttaagttacaaagtctcattgcataaatataggaggaattggtagtrgtccctgtgagaaacactggtgtttcataccagggggatgatcttggatttatagtaaaagctggaatcagtgcttggctttgacatcatgtattcattcatctgatactcaggaagtcattgaacctcttttagttttagattattcaaatgtaaactggttataatgctatctatgtagtggatattgtattgtaaaaaattagtaataaaactaaaataacatgcaaaaacactttgaaaactctgtagctctgtgaataggttttgtgcgaaaaactgaaaataatgtgagagtttattaaaggaaaatcagaaaatccaatcaacaaatctgcccacatgcagtcattcttaaactttgatacatgcacttctgagttctttaagcatatgcattttttgtttgcagatacgagaccatacttatattcttttgtaaataacctt

SEQ ID NO: 434728 - DNA, 603 bp, Homo sapiens
gctgcccagggttgaggcaaaattagacagattgagcaaggcaagcatttcctttttctttcccctctccaaacaaaagaaagcaggtttttgttttgttttatttttaagttacaaagtctcattgcataaatataggaggaattggtagtagtccctgtgagaaacactggtgtttcataccagggggatgatcttggatttatagtaaaagctggaatcagtgcttggctttgacatcatgtattcattcatctgatactcaggaagtcattgaacctcttttagttttagattattcaaatgtaaactggttataatgctatctatgtagtggatattgtattgtaaaaaattagtaataaaactaaaataacatgcaaaaacactttgaaaactctgtagctctgtgaataggttttgtgcgaaaaactgaaaataaygtgagagtttattaaaggaaaatcagaaaatccaatcaacaaatctgcccacatgcagtcattcttaaactttgatacatgcacttctgagttctttaagcatatgcattttttgtttgcagatacgagaccatacttatattcttttgtaaataacctt

SEQ ID NO: 434729 - DNA, 603 bp, Homo sapiens
gctgcccagggttgaggcaaaattagacagattgagcaaggcaagcatttcctttttctttcccctctccaaacaaaagaaagcaggtttttgttttgttttatttttaagttacaaagtctcattgcataaatataggaggaattggtagtagtccctgtgagaaacactggtgtttcataccagggggatgatcttggatttatagtaaaagctggaatcagtgcttggctttgacatcatgtattcattcatctgatactcaggaagtcattgaacctcttttagttttagattattcaaatgtaaactggttataatgctatctatgtagtggatattgtattgtaaaaaattagtaataaaactaaaataacatgcaaaaacactttgaaaactctgtagctctgtgaataggttttgtgcgaaaaactgaaaataatgtgagagtttattaaaggaaaatcagaaaatccaatcaacaaatctgcccacatgcagtcattcttaaactttgatacatgcacttctgagttctttaagcatatgcattttttgtttrcagatacgagaccatacttatattcttttgtaaataacctt

SEQ ID NO: 434730 - DNA, 562 bp, Homo sapiens
ttaatctgaagaaagtgagatgctttgattggaccagtcttgatgacctagctaaaagggcaacaccaattcagtaacaccaggttctgattaccagtattactgattctgatttgcaagatctgggcagacrttagaggttgtagtttatacttcagcggtaacctttgagaagccaagtttaaagctggaaaattctctcctatggtacacgagtgcctccaagtggcagaaaattaaggtgcatgggtataactgaaagctaaacaccatacccagttgcacccaagcacactggcatcttggtagtggttgtttctgccagagagagtcacaggtaacttaattatatattttggatatggccaaccttcgaattttaactgtaagctttctttaaaataggcaaagaggatgatatgatttacataactagcttcaatcttcatctgtaagatttggaaaatgattcctaactcataagaatattgcaggaattaaatgaattaaaatgcttataccagtgcctggcatatgtgatatgatattggtaatatgtagc

SEQ ID NO: 434731 - DNA, 356 bp, Homo sapiens
tttgtatttttagtagagacagggtttcaccatgttggctaggatggtcttgatctcttaacctcgtaatctgcatgccttggcctcccaaaatgctgggattacatgcgcgagccaccgcgcccagcccttccctcatcaaatttttaagtacataatgtagtcttgttaattctaaggacaatgttgcacagctgatctcaagaactccttcatctggtataatgaagactttctatccattgaacagcaactttyaattttcctcctctcccagtctctggcaaccaccattctactttctattactgagatttttgacaactttaattactttatgttagtgcaatcatgca

SEQ ID NO: 434732 - DNA, 642 bp, Homo sapiens
tccattttctcaaaattcttgccaacacttttcgtttgtttggttttgtcttcattttcattttgatactggctatcccaacaaacttgagtttatatctcattttgaattttatttgcattttcctgataactagtgatgttgggtgtcttttaatatgcctattggccatttgttgtatattttctttgaaaaaaatgtcttttgtccatattttactcagattatttttatttattattttgctactgggttgtagaaggttcctrtatattttggatattaacacctgatatgttttgactctgtgtccccacccaaatctcatcttgaattgtactcccataatttccatgtgttgtgggagggacctggtgggagataatttaaatcatgggggcagtttcccccatactgttctcatggtaccgaataagtctcacgagatctgacagttttatcaggggtttccgcttttgcatctttctcattttctcttgctgcctccatgtaagaagtgcctttcacttcctgctatgattctgaggcctccccagaactctatgttcaattaaagctatttttcctcccagtctcgggtatgtctttatccagcagtgtgaaagcagactaatgcagtaa

SEQ ID NO: 434733 - DNA, 560 bp, Homo sapiens
tagttatatttgcaaactgccatcactgcagcacccagataaacatttgatgattaactggacaagatgtgtgatacattagatgctgggaatcctgagaactattgtagaatcctgcctaccacaacagagtrtagtttcatttattctttcactaatttcctgcaggaaaaagtgagatcatgctattgctctcagtgaaatttactattatttgaagataatgaatctggagtaaaaataaatatgatttacagtacactcacatacacccacaaatataaatcagtagtcatatgagtgaatgcttaagaaatatcaccatcaaaaatcaaaagggaaatgagggaagcagggaagaaggtggcagaaattaagcctacacccttcatgccccctaaggaacagcaaattttaacaactatctgcatacagaaaagtactgccacaagaaccacaagacaggtgagtaatcacagtacatggttttaatttcatattgccgaaagaggtattgaggagggcaggagaaacaggcttgaatctttgatgccacccca

SEQ ID NO: 434734 - DNA, 560 bp, Homo sapiens
tagttatatttgcaaactgccatcactgcagcacccagataaacatttgatgattaactggacaagatgtgtgatacattagatgctgggaatcctgagaactattgtagaatcctgcctaccacaacagagtgtagtttcatttattctttcactaatttcctgcaggaaaaagtgagatcatgctattgctctcagtgaaatttactattatttgaagataatgaatctggagtaaaaataaatatgatttacagtacactcacatacacccacaaatataaatcartagtcatatgagtgaatgcttaagaaatatcaccatcaaaaatcaaaagggaaatgagggaagcagggaagaaggtggcagaaattaagcctacacccttcatgccccctaaggaacagcaaattttaacaactatctgcatacagaaaagtactgccacaagaaccacaagacaggtgagtaatcacagtacatggttttaatttcatattgccgaaagaggtattgaggagggcaggagaaacaggcttgaatctttgatgccacccca

SEQ ID NO: 434735 - DNA, 468 bp, Homo sapiens
ggtatgagtaccagcttagcctcaatagaatagaacatcaggcaaatttgttaggtttttgacttaaatcctggctcccaaatagcatctctggacccatgagggcctgaaaggacttgctgttctgaaagaagggacctagatagatttaccacctgctgattgcagagccctaggaccttgagtgagcataggaggtagccaggtagtggttataaaaggccttgggtgagacacagtgttgtgctggcttcaggtctgaatcagcacagtcctagtggtgatgaacacaagggtgcttgtgtcaccccagccccagtkccaggtggctcagcacacacacacacacacacacacacacacacagagagagagagagagagagagagagagagagagagagcaatagagagagagagagactccatttgtttgggagaaagtaagggaaaagaacaagagtcactg

SEQ ID NO: 434736 - DNA, 522 bp, Homo sapiens
tatagaacaccacgcagatttaacccaragaagactacctcaaggcatctaataataaaattctcaaaagtcaaggatcctaaaagcaacaagagaaaacaaacaaataacacacagtggaactccaatacatctggcgacaaacttttcaatgggaaacttacagaccaggagaagtggcatgacatattaaaatgctgaagaaaaaaaaatcactcttgaatagtatatctggcaaaaatatgcttcaagaatgaaggatatttcatgcttgaaggatattttcctttagactttcacagacaaacaaaagctgagggatttcatcaacaccagatctgtcctataagaaatgctaaaaggaactattcaatctgaaaaaaaaaaaaaaaaaaaaggatatcaatgaccaataagaaatcatctgaaggcacaaaacttactggtaacagaaagtacacagaaaaacatagaatattataagatagaatattataagactgtaattgtggtgtgtaaacc

SEQ ID NO: 434737 - DNA, 522 bp, Homo sapiens
tatagaacaccacgcagatttaacccaaagaagactacctcaaggcatctaataataaaattctcaaaagtcaaggatcctaaaagcaacaagagaaaacaaacaaataacacacagtggaactccaatacatctggcgacaaacttttcaatgggaaacttacagaccaggagaagtggcatgacatattaaaatgctgaagaaaaaaaaatcactcttgaatagtatatctggcaaaaatatgcttcaagaatgaaggatatttcatgcttgaaggatattttcctttagactttcacagacaaacaaaagctgagggatttcatcaacaccagatctgtcctataagaaatgctaaaaggaactattcaatctgaaaaaaaaaaaaaaaaaaaaggatatcaatgaccaataagaaatcatctgaaggcacaaaacttactggtaacagaaagtacacagaaaaacatagaatattataagatagartattataagactgtaattgtggtgtgtaaacc

SEQ ID NO: 434738 - DNA, 593 bp, Homo sapiens
gaggaataatatccatcgatttttttcacagaggatgtctgtcgttcttaaaactcagctttttattacttccaagtcatgctagtatttatcttattctgtttacatttgtattgatatgaccagtgtagctaggaaaatgtgaacacatgtaagaatgtaactttaggctgygaaactggaagcagaaattctgtgatgcaagagtcacattttttcaaatgtattcccatgtgtcattaagtcttaagatgccatcgattgtaagacagaccattattataggtaatactaagaaatttttaaatgcagcttattaaaagtgaatcacttgaaagacaccttaaatataaaaactatacacaacaaagttaagggaatatcataaataatggaaaattgttttcaaataaatgttaatatttctaccagaaatgcatcagaggaccaggttctatttgtccatcccaatagtagaggttgtctcactttaattttggccaatcttttcagtgtataattgtgtttctttgtagctatatttacatttttcttcttactgatgaattaaagcataccttcacatgtgtatt

SEQ ID NO: 434739 - DNA, 538 bp, Homo sapiens
agtaaggaggaatatgagtagacagttcagaggagagctgggcaagaaaataggagaagctgctcagaatcactactccataggcaaataaaaatgaagaaaatatacaacataattgtatagtcttcagaatggcaacaattaggaaagataataatttaacttgattttctggcagctattgtaaggaagaatacatttccatacacattggtagaacttaacaagcactagccttttcagaaataaatatgccaacatgtattaataataatttaacttgattttctggcatctattgtaaggaagaagacmcttccatatacattggtagaacttaacaagctgtaaccttttcagaaagaaatatgctaacatgtattaaatatttaataatattaatttattattgtaattgtgttgtattaatgaccttatatattacgtatgttatatgtgatacatatgcatgtatatttgtatataatctcctgtggtccaaaaatcccatgtcaggatcctacccagagagaaaaga

SEQ ID NO: 434740 - DNA, 538 bp, Homo sapiens
agtaaggaggaatatgagtagacagttcagaggagagctgggcaagaaaataggagaagctgctcagaatcactactccataggcaaataaaaatgaagaaaatatacaacataattgtatagtcttcagaatggcaacaattaggaaagataataatttaacttgattttctggcagctattgtaaggaagaatacatttccatacacattggtagaacttaacaagcactagccttttcagaaataaatatgccaacatgtattaataataatttaacttgattttctggcatctattgtaaggaagaagacacttccatatacattggtagaacttaacaagctgtaaccttttcagaaagaaatatgctaayatgtattaaatatttaataatattaatttattattgtaattgtgttgtattaatgaccttatatattacgtatgttatatgtgatacatatgcatgtatatttgtatataatctcctgtggtccaaaaatcccatgtcaggatcctacccagagagaaaaga

SEQ ID NO: 434741 - DNA, 587 bp, Homo sapiens
gtggtgccacttccacttccaccctttgaatcctggacccataaatcctggctataggagcaagagtaccatatattggatgctgattcagagcatacacagccttctggagaactttgccacagcgctrcaaagtattatcacctagctggcattgtaattgtgacttcaaaaggccattccactgttctatcaatccagctgctacaggatggtagggaacatggtaacaccagtgaattccatgagtgtgaacccactgccacacttctttagccataaagtgagtgccttcattggagacaacgttgtgtggaataccatgacactgaatcagacattctgtgagtccatggatggtagtcttggcagaagcactgccaaggataggcaaaggcatatgcagagtaagtatctattccagtgaggacaaaccactgccctttccatgatagaagagatccaaaataatcaacctgccactaagtaggtggctgaccaccctgaggaaagggtgccatatcaagggctcagtaatggtgttttctgctggcaaattatattagtttgtttccacacagctataa

SEQ ID NO: 434742 - DNA, 574 bp, Homo sapiens
cttcatccattgcatccaaattttacacttagcttgatcaggtttgctctgataaaggagcataaaagattggacttaaggaatttcattccacatttccatttgatagcaaaatgaatctattgtagttgtaagatagygttatattgtaaaggccaagagagtggccaaattttttcagcttctaaagaatattggtgccaaacagtattacaaaagattgtcattttcctttgttccattggctcataactatattcaggccaattttggagaattcacatgcaaggaggccaaattatggaatggaattctgattttccatgactatgttaactttctctctctctctctctctctctctctccccctctgcagtagattgtatttgagtaattggaacgtattatcaaaatacattctaactactcaaatacattattaaaatacattgtaactaatcaaatacaatctaagtactgtagtggtaactaacaggccccaagaatgtcaaacctgaaatagtctgggtgctttatccctttctcagtcatttgggcttgtattagtccct

SEQ ID NO: 434743 - DNA, 574 bp, Homo sapiens
cttcatccattgcatccaaattttacacttagcttgatcaggtttgctctgataaaggagcataaaagattggacttaaggaatttcattccacatttccatttgatagcaaaatgaatctattgtagttgtaagatagtgttatattgtaaaggccaagagagtggccaaattttttcagcttctaaagaatattggtgccaaacagtattacaaaagattgtcattttcctttgttccattggctcataactatattcaggccaattttggagaattcacatgcaaggrggccaaattatggaatggaattctgattttccatgactatgttaactttctctctctctctctctctctctctctccccctctgcagtagattgtatttgagtaattggaacgtattatcaaaatacattctaactactcaaatacattattaaaatacattgtaactaatcaaatacaatctaagtactgtagtggtaactaacaggccccaagaatgtcaaacctgaaatagtctgggtgctttatccctttctcagtcatttgggcttgtattagtccct

SEQ ID NO: 434744 - DNA, 551 bp, Homo sapiens
cagtccaccattaacccaaaagtccaagtccaaagtttcacctgaaacaaggcaagtycctttccacctacaagcctgtaaaatcaaaagcaagttagttgccataggggcaactaacctacaagcctgtaaaatcaaaagcaagttaggggccatagacctgagttaataaaacagtaccaatataactgtgtagcccacatacactggggctacaagcgttgggtaaatacacccactccaaatgggagaaattggccaaaatgaaggggctacaggccccatacaagtatgaaatccagtggggcactcaaatcttaaagctataaaatgatctcgtttgactccatgtctgacatccaggttatgctgatgcaagaggtgaattcccatggccttgggcagctctgccaccgtggctttgcagggtacagcacatgttcaacctgcagatggaaattcctttggaattgcccaaattgggcagaacataacacattgtctggcaccctcaaaagacactcacctgtacagacacagatgtcagattt

SEQ ID NO: 434745 - DNA, 567 bp, Homo sapiens
gtggacaggcgccctaaatcacacctgtaagcccagcattttgggaggctgaggcggggggctgagggaggagaagcgcttgaaccagtgagccaagacggcaccactgcacgccagcctaagcaacagagtgggactccctctcaaaaataataataataataataataataataataataataataataataatacaaaaggccaatagactttgaaaaagactgacctggtatcttgtcyatttcctttcaaagttgctgtccttgaggtaagtaaagaacatcagtttctgacaggcccagtaatgccaagatattttggagacctcaaaaactgataaattcacccaattcgtacaggtattacagatatagtctgagggaaagtcatatccttggcttggctcctacgtttccaaaggctttttgagaatctaatatcagattctttatgaaaggttttcagcaacgccaatagaaaaaagaacctatgtgataactcactattcttactgcacgttatggaaattattaggtcacattaataagacaatttattttacaa

SEQ ID NO: 434746 - DNA, 491 bp, Homo sapiens
ggaccttctctctagggaactcatcaaataattggaaaagatcaactaccagagaagagaagagactagtagtcaccacagcactcargtaaaatattcttgcattctttgagggtagatccaagagagtacctaagaaactctatcttcatagcaagatgaccactgttccttggaaccattgtctcagcactgggcttattcattcatcccattttcccctcccttatgaagaaggtgtttaagcctcaaccatctgattcctcttttagttcatattttgtatgatacttgtacacacatgtgcacatagtagtaattatttccttcattagaacgttcataacttttgtaggtttgtcagtctttgtagggtaagcctcaaccaaacctgtaaatttatcaacaaaaaccaacaaatagcaaaattttccagggttctgaggcattatagtaaaatccaattgccagtcttctctaggatatgttcc

SEQ ID NO: 434747 - DNA, 700 bp, Homo sapiens
gtggcccccatgcctcaaatgtttcctgtaggtcaggcagctcttcttctttgattctagctataaccacttagaaggctgcttgtcaattgccttactatcacctgacagtcacctgacatttctagggcctcacccttccttgctcatgtctgcctaactacctcctttaacaaaatcagaaagtgtaaaatgatcagctttgttttttcctctcatgactcttttagatatttggagtcctctgtggtttcatataagtattagattaggttttctattgccataaaaattccgttgggattttgataggagttgcattgaatctatagattgcttttgatagtgtggacttttttttaataatattaagtcttccaattcatgattatgagattcttktcatttatttatcttttctataatttatttaatcagtgttttgtaatttttagtaaaagtattttgcctctttggttaagtttattcctaagcattttatccttttcaatgctgtcgtaaatgaattattttccttttcagatagcttgtttctagtttatggaaatccaattgatttttgtatgttttttttatcctgaaactttactaaatttattagttctaacagtttattttagtagagtcttagagttttctacatatatgactatgctatttgcaaaaatgatcacatttt

SEQ ID NO: 434748 - DNA, 434 bp, Homo sapiens
ccattggtttcctgacaaaggaactcagataaaacaaatgtaactttctcagattttaagattagaagggtttgtttctttgtttattcaaaagaaactgttgaacatcagttctttgggacaattgggtcagtttcaagacaattgtaatttcactgttctgtactatttctggtttgagagttttgaggtcagtgtgtatgtttayttacaaaaaaggcatgagataaagtagtaataaattatataacaaagtagaaatttattattgaataaatatatttgattcacctgaaatattcatataaaccagtgtttctttagtttgtgagtcatttatgatggtggcccctcccaaattaagtctgttaaatcttttctaatttatttaattcaattatgatacaattgtgctatagacatttacgagttta

SEQ ID NO: 434749 - DNA, 634 bp, Homo sapiens
ctgttctgtactatttctggtttgagagttttgaggtcagtgtgtatgtttatttacaaaaaaggcatgagataaagtagtaataaattatataacaaagtagaaatttattattgaataaatatatttgattcacctgaaatattcatataaaccagtgtttctttagtttgtgagtcatttatgatggtggcccctcccaaattaagtctgttaaatcttttctaatttatttaattcaattatgatacaattgtgctatagacatttacgagtttaagaacatttgtrtaagttctttaactcatatgaaaattcaacaatattgattcttaaattgaaaattgctttatacttctatttttctggtgcagaactgtatcattgttttttcagttaccaagttgaaaactttttcttcttcagttttcatttctaaagtattaagttcaaggataagtattgtttagtgcctctcaaatatatatatatatttttctcagaacactctcttgctttaataaaaaggttttaggataatgtgacctgtatctatttctcctttatcatttccccagaatcccattaattttctcagaattcactctttccatattcttagtggtcatgtaaa

SEQ ID NO: 434750 - DNA, 578 bp, Homo sapiens
aacaatagatgctgacattgcatagtgtgagccatgaattaatttgctctgacaatgacacctttcaaaggacagttactggccataaaccacaatattttgctcagaatataaaatacaaatataataaaatcatttcttattatattaaatattacaagattatctagggaatatttatttctcttttatgtttgggagtatatgtgacactgtggataactagaagttctaatttcttattttcttactgtctcagatttgaaacatttagttatactgacctacaaaagtgatttcattctaaaaaagacttgcctataaaacaatagctgaagcaaatttgtattattttaaacatctgcatttatgaaattgccctagggtgaaggaaatttctgtatttttgaaacagaatatatttaatatagtgaatttagggacataggcttccccatcaaaatcaaaatgctatcataaatagagaagatagaagatgattgtacatttcattmatttacaaatttaccctaggaggtttaggttggctcagatcaccttttgtttctttcatatct

SEQ ID NO: 434751 - DNA, 570 bp, Homo sapiens
cttgctcccactctggccatgtgccatgtgatgtgcctgctcccacttcacctttaaccataagtaagagctacctgaggtcttcccagaagccaagcagatgccagcaccatgtttcctgtacagcctgtagaatgatgagccaattcaatctcttttctttataaattactcacactcagatatttcttgacagcaatcaagaatggcctaacacgtggcgcatcagaatttatactacaaaactactttcaaagaagacaactacttataagtaatatttacaaaggattatttgggtcatgagtgctataagtaaatataatttcaaacaacaaatattgaataatgtttactgaaagtttatttttacttacttttttcattcaaaataagcaagttacttttaacttaatatgaagatttaatctttgttatttgtcatgttagctgtcagatctttgagttattcaattacatagcgaaaayacttagttaataaaagtttaatacaatttaagtttcccaagactattaaatctcacatctgtaatgtatcaaaaagcacat

SEQ ID NO: 434752 - DNA, 567 bp, Homo sapiens
aatgaactacatattacacagagaaaagtattgagcattagcacaattcgatacccaaattgattatgtaaaatcagtgagtgactcatgatattttaacaatttatcttgtccttatttgactccatatgttctatgcttgaggcataggctgggtctgtatttattttccatgaagagaaattttcctctattcattatttaggaactattaattttcaggaagaaaaggaacttgaccatctctcattgttttcttccttttgatttttttgtgatttcttaaaaatgcatattgcaaactttcactatccatccttattacatcccttatataattgaaacttmtactacttaatcaaatttgaaatcacatctgagggtgtaacatgtggcatccatctatgattcaaatagcatgagcattatttatgtcaaaacaatatattcagtaagaatccctcaccctggcatgaaaatatgtttattttgtttaaagattataaatgcacaggttcatactgcaattagtacctatattactatagaataattttatagctaaaa

SEQ ID NO: 434753 - DNA, 567 bp, Homo sapiens
aatgaactacatattacacagagaaaagtattgagcattagcacaattcgatacccaaattgattatgtaaaatcagtgagtgactcatgatattttaacaatttatcttgtccttatttgactccatatgttctatgcttgaggcataggctgggtctgtatttattttccatgaagagaaattttcctctattcattatttaggaactattaattttcaggaagaaaaggaacttgaccatctctcattgttttcttccttttgatttttttgtgatttcttaaaaatgcatattgcaaactttcactatccatccttattacatcccttatataattgaaacttatactacttaatcaaatttgaaatcacatctgagggtgtaacatgtggcatccatctatgattcaaatagcatgagcattatttatgtcaaaacaatatattcagtaagaatycctcaccctggcatgaaaatatgtttattttgtttaaagattataaatgcacaggttcatactgcaattagtacctatattactatagaataattttatagctaaaa

SEQ ID NO: 434754 - DNA, 573 bp, Homo sapiens
actccttgcagagtcacccttcctggtaagacttaagtaaggttcacagatgacccctttgtttacctatgacaaggccagacacsgagcctccaaaatctcattctttgcctcagattattaactaaattgttttgttcttactgaccaattagaacaaagtgtctgttaaccaaactttgttaaaagattttttctttccccaagactgctgaacattcatctactctcagcctgagccagcataggacccctctgaaagggccactcctggagaatagacgggcttgagcacaaaacatttgctaatgtactctccagtcatggcaccctttcaattcacctccccatgcatgtttcttttacccttggttactcctctctacaaaagaaaaacccttttgcctaactcttgagcaacatgcagatcttctattcagagcattctttatattgcagtagccttttcaaataaagtctctcttgacccaagtctagatttgtttttaattcaacattatataacatatttacatcacggaaagttctgcgaagggtatatctgaactctct

SEQ ID NO: 434755 - DNA, 549 bp, Homo sapiens
aatgattctatcacccaagcactgagcatagtacctaatagttaatttttcaacccttgccccctaccccattcccttctctaattgttcccagtttctattgttgctatctttatgtctatgagttgttcactgttttgacttataaccatactagagttatgtatgatttacacaccattacaacagtattggaatattctggatttgagtatgtatttacctctaccagtaagttttagattttcatatgtgttcataatagtaattatcttctttatgtttcaacttgaagaacttccttaagcatttcttgtagggcaggtccagtggtgatgaattccttaaattttttcttgtctgggaaaaactgtctccttcatttctgaawgacagacttgctgggtatagtattcttggctgactgtttttttttttttttttttctttcaggactttgactacatcatttcattctcttatggcctacaaggtttctgctgagaaatccactgatattctaatggatattcctttgtatgtgacttg

SEQ ID NO: 434756 - DNA, 558 bp, Homo sapiens
tctatatattttagtaactcccaaattattatatctagccctgacttcattcttaagcttcagatttgcatttcatttcttgatctcccattagtgttcaatattgtatactcatcgtgtctaaaaatgaattaatttccaccctccaaatcagttccctgtaactattccatttctgataatgctgttgccattcctaaaatctggacaccatggagacattttgatccttcctcctcttttgctccacctattccattagttgccctgctatatgaattcactgtccctaattttttttcaaattttttttcttaattgattcattcatttatttaacaaatatttattaagaactaccatctaccaggtactatttatggaaccaargatatagcagtgaacataacagacaaaaattctggccctcacagagccaatagtctagtggaggaagacacacaagcagataagtaaaatacatagaatgtcagataatacaaagttatatggagaaaaattagggaagttggagagagaaggtcaagacaggatgtg

SEQ ID NO: 434757 - DNA, 595 bp, Homo sapiens
tatttgtgaaatgacattgcagtttcttagcccaagatgactactagtgctgtctcttccccctactctcttctctcaagaacctgtccaaactacaaggcttattatgaatgccatgtattccatgggaatacttcatgattttctgatctttctccccaagctaagtttaatctctcatttctttgaattcccataataacttacttatggttttcttacatctattacatttatttgcctttcatcttagtcatttttatctaatctcgcttactagatattaagttcttaaacggcagactgtgtcttactcattttatatcccttgtgatgctagtataatgccttgaacatggtagatgctcaatagacatttgctgattgaactgaatctgttttactatttatatacttagttgtatacaaattttcagatttctaagtcatacttccaaggtattaaatctctgtgcaatttatttcttaggtatcctaagtgttcaagcttagaaagactatgcttttttatctgcagttgcagraaaaatagatttgtcttaaatcttgttttaactacctaaggaccttatac

SEQ ID NO: 434758 - DNA, 538 bp, Homo sapiens
gtttaatgggcacagagtttctgtttgggaggatgaaaacgttttagaaatggatagtggtgataattgtacaatactgcaaatgtgcttaattccactgaattgtacacttaaaaatagttgaaatggtatattttatgttatgtacattttaccacgggaaaaaaaaaagactaagtgctctgggacttttttccttttatacttctactttccaaaatttctcaaaggcctttttggttaactggaaaaaaagatattataagattctgagactataataattctaagagattaacttagttggaagttttaatgagttcaacactaaacagacaagctcacctttcacagatcagccaggtagccatgctatcttcttaaaaccaaataagacagggaacattggtaacacccatcaccaccaaatgcccctcttctggcagaacttggtggactggcacttccttcaatccccaaraaaagcctaggtgttcaagtttaggggctcaccaaaacccttgcatgggaactgggc

SEQ ID NO: 434759 - DNA, 634 bp, Homo sapiens
acacttgtacaaatccacttcattctggccctcggtttccctgtcwactcactgaagacatacgttctccaatcaaaactgctgcagtggaagaaatctattctggctgtggatgctctcatacagcattttttgcattgtacagggatcgatagatatttgttgaattaattaatatatcaagaaatcctaggagactgttttacccttcaagggacaacatcatttcagttccgcttggcatggggcggcttctctgttacttagattgagccttcagagtcactccaggagtgaggctgcttgagtcccacccattcccatagttcccaggctcctgggtctccttttcttcgggcgagccattgaattgcaaacacagcaggcatggtttcattccaaacccagagctgttttaattagtttaacgtctgttaaacgctttgaagattggaagcaacagataagtactggatgatgttattaacaactgcagttaattgcaaacatttctattaatgctagtttctgcctccttttctttgctctactttctttccaaggttcccaaattcttagcctccccctcctttcctccccgtactggcgctatagggttaaactggggcggagc

SEQ ID NO: 434760 - DNA, 538 bp, Homo sapiens
acggcttggcccttctgctcgtgatgaggttctctgcccgcggtgcttgttttttcgtgtctagagctgatgccagaaccagcaggctcccctttggagttggagctgtaaacagctgtaataactgttccacgcccgcccgttgaaacaacttttaaccgcattttcagcgcgggtccttgtgcgctgaccagaacgtgggcttgttcacacttacctgcaatttgagactgattgtcctcggcgttctagtgaggatcagcgcccctgaggaattctggtagaaatatgccgtcttgctagacaacttctgaacagcaatttwaaaaatctatggaaataaaactcaccctttgcatgccggttctgattcttaagcggggtaggtgtgcggtgggaagggtgggtgggaagcgcttttactactgttagcttgagaacgggaatctgccaatggaataattactcaggactcgtcccccaagagcagttttgtttgtttttgcaatctttatggtgtttgtgccctaataagcaa

SEQ ID NO: 434761 - DNA, 563 bp, Homo sapiens
atgttatttaacttgtctaccttatctagtaaactgaagtccttctctactaaacccctctgctaaacccctttttgtatgactatgtccacaatgcctagaacaatgtcacgcacaccrtaggtgctcaaactggttcatggtttttttttttttttttgatgctcaaacttttgaaggaaagaattagaatgtgatactttattataaatccctaggcagaatacgttcaaggaaaccgtttcttcttgctactgtaactttttgttgtcatactttctatttattgagaggattatgtttttcttgggacctggacttatgtgaagtgaacaaaacaagattaattgtgctctgtctgtcagacatcccacctcactttctccatcatgctccagtggggtgtggcaaggttgtagcattgtcacaagtgggacaaggattggaagggcaggacaagcaaaattttcaaccgcaatttttttagcattgccctgggaaatcacacaatagtagagctgaaaagaatttcaagagactgtcttatccaggccctctgcctt

SEQ ID NO: 434762 - DNA, 563 bp, Homo sapiens
atgttatttaacttgtctaccttatctagtaaactgaagtccttctctactaaacccctctgctaaacccctttttgtatgactatgtccacaatgcctagaacaatgtcacgcacaccataggtgctcaaactggttcatggtttttttttttttttttgrtgctcaaacttttgaaggaaagaattagaatgtgatactttattataaatccctaggcagaatacgttcaaggaaaccgtttcttcttgctactgtaactttttgttgtcatactttctatttattgagaggattatgtttttcttgggacctggacttatgtgaagtgaacaaaacaagattaattgtgctctgtctgtcagacatcccacctcactttctccatcatgctccagtggggtgtggcaaggttgtagcattgtcacaagtgggacaaggattggaagggcaggacaagcaaaattttcaaccgcaatttttttagcattgccctgggaaatcacacaatagtagagctgaaaagaatttcaagagactgtcttatccaggccctctgcctt

SEQ ID NO: 434763 - DNA, 563 bp, Homo sapiens
atgttatttaacttgtctaccttatctagtaaactgaagtccttctctactaaacccctctgctaaacccctttttgtatgactatgtccacaatgcctagaacaatgtcacgcacaccataggtgctcaaactggttcatggtttttttttttttttttgakgctcaaacttttgaaggaaagaattagaatgtgatactttattataaatccctaggcagaatacgttcaaggaaaccgtttcttcttgctactgtaactttttgttgtcatactttctatttattgagaggattatgtttttcttgggacctggacttatgtgaagtgaacaaaacaagattaattgtgctctgtctgtcagacatcccacctcactttctccatcatgctccagtggggtgtggcaaggttgtagcattgtcacaagtgggacaaggattggaagggcaggacaagcaaaattttcaaccgcaatttttttagcattgccctgggaaatcacacaatagtagagctgaaaagaatttcaagagactgtcttatccaggccctctgcctt

SEQ ID NO: 434764 - DNA, 554 bp, Homo sapiens
tctagtttacctctcctaaccatttaagctgcgcagatcaacctgtgcttgcatttcgcagtctgtaaaaggaggatccttacacctaccattttcacttacaggaacattgtrtaagcatttgtctttactctgattctttttaagtcttcgactacaaagaaactgattttccatccacacccacagcaatacaaaagataacctccctggactggagattcagtgattattttttgactccaaagtgtctgatctgcagtttgataatcaagaaaaatccatttttatcgtggcctagactagcttctagtctaaatattagtgtgctctgttttaatatttctccatgtattaaatcagagttttcagagcaaataaaataaggatgagctttaattttctaaaagtatttctttactaaaggattccttttgggttgaacaggttcttggtagattttaaatgagttgactgatacaaattcagtttatactacatttcgggaacatccttttgttaacaatgagctacatttgtacaggcagtcccca

SEQ ID NO: 434765 - DNA, 586 bp, Homo sapiens
gaaacagactaattcaatggcaataccttttgtataggtcctgtgcttaaaggaggcaagtataaattttctaataagaaatccctgcttcttttgggtgcagtggctcacacctgtaataccagcartttgagaagctaaggcaggtggatcacttgaggccaggagttcgagaccagcctggccaacatagtgaaaccccgtctcttctaaaaatacaaaaaaattagctgggcatggtggtgcacgcctatagtcccagctacacaggaggctgaggcaggagaatcacttgaacccgggaagcagagtctgcagtgagccaagatcgcggcattgcacttcagcctgggcgatagagcaagactctgtctcagaaaaaaaaaaaaaggaaagaaagaaatctctgcttccgtactatcaaaacttctaccctagaataccccctggcaccttctaacccaacctaatacagagattttgtagggacccattaacaagctcctatataattataagcagctctcacagtagggttgaaagagaatataaggaaaattagaagtactgtatttttgctattgga

SEQ ID NO: 434766 - DNA, 586 bp, Homo sapiens
gaaacagactaattcaatggcaataccttttgtataggtcctgtgcttaaaggaggcaagtataaattttctaataagaaatccctgcttcttttgggtgcagtggctcacacctgtaataccagcagtttgagaagctaaggcaggtrgatcacttgaggccaggagttcgagaccagcctggccaacatagtgaaaccccgtctcttctaaaaatacaaaaaaattagctgggcatggtggtgcacgcctatagtcccagctacacaggaggctgaggcaggagaatcacttgaacccgggaagcagagtctgcagtgagccaagatcgcggcattgcacttcagcctgggcgatagagcaagactctgtctcagaaaaaaaaaaaaaggaaagaaagaaatctctgcttccgtactatcaaaacttctaccctagaataccccctggcaccttctaacccaacctaatacagagattttgtagggacccattaacaagctcctatataattataagcagctctcacagtagggttgaaagagaatataaggaaaattagaagtactgtatttttgctattgga

SEQ ID NO: 434767 - DNA, 579 bp, Homo sapiens
ttctagttgaagtagatcttagaaattacccaacccaggatgaataccccattttacatgatgtgattattacacattgcatgcctatatgaaagcatctcatatactgcgtaaacatacacacctactatgtacctacaaaaattaaaaaaaaattcaagaagataccagagccatattttctactatcctagtaaacataagctatacagcaaatatttactgtgccaaaccgcatcacacttgaaacraatggaatgttcttaattttcaagttgctgtctttaaaaatattcttcagaatgactcatgatatctttagaggggccaaaggggtttcccctcaatatcagaatttctttacttacaaaattattaacacagtgtagtctaatccaaaaaagaaaagaaattactccatctgccacacagtatacagttcttagtacactatctctgcaggtagttgccacttatgtgcctgaagaacttttaatgtgaagtttactgtcttagaaagcagcctgtttcattgttggacagctcttggttagaagatttttcttaagttgactcaca

SEQ ID NO: 434768 - DNA, 564 bp, Homo sapiens
ccatttaccatctgatgccgatcattaaatatcagttctgtttatctgaaggctcctacccagagattctacccagtgaaactcccacagcagcgcaggtagatggggctgacctggcctctccaatgtctcctcgaactagcaaaagccgcatgtccatgaagctgcgtcrttcctctggctcagccaataaatcctaaggagacaagcagcccagcagtgatcagcagtagccaccttagcatgaacatagggttaaccctttcaggccttcatgtctgccataacatgcatgtttcttcctgtacatttatttgagaaaacactggatttaaataattttaaataatttgtagcttaatattaaagatttaagttatttattgtttcatttttttcccacaatccaagctgccatattttgagggcagggggagttttattctacaccctttaccttcctagataattatgtctaagtagttttatctttaatttcatggttaactgtgagccaaaatacaattggacaattagtctcattatttattgtgctccattgca

SEQ ID NO: 434769 - DNA, 618 bp, Homo sapiens
tttctatgatcctccaaatgggatctgaataatccagttatcatgttagcattgaagataaagaactagtatattatatttattgggtctactaaaatttcatagacgggtagaattgactcttcagattccagaacaacccttcaggtcttggatatacaaactcctttagtgtagtgtccttgtgagcattgtctgtgggcgccaactttcaagtagttggcttgcagctcacaccagaatggaaaggacatgtttctaggaccctgaagagaattttcattgttcactgtttttatgcaaccaacaggatagtatgataattgtgtgtgttcatttaatccgtatttattgatcactcgtcttacacagtgtacttaggaatacagagataaatagaacacaggccctactcatgaaactcataatttgatagacatggcagyatcaataatttttgagtttgggcactacatagtcctcatgcaattgtttggctttcagcaagtcactttgagcaccagtttctttaaatgggtctaatggcaacattgctggttgagataatgtatgtgatatgtctcacttagtgtctgatacatggtagatgataactat

SEQ ID NO: 434770 - DNA, 535 bp, Homo sapiens
aaaatgtatggttgttagacttgcagtgaaaggcggaacagccatagcaaaggcactgaagcagatggtgtgagtttaaacaacattttgactggtatatttagctatatagtgctctctaggagttagaaggctagaaaggcagattaggactaaatcaagaaccagaatgtcatgctaagtcgtttgtaagtagtatagaagtaaatgatgatttttaaatagaggaatcagagtaagctttatcttgtaataatgaaaaagatgaattggacagtaaagaaattatttgggaagctggtaaaacagtccagactagaggtagctgaagaggcttacttaaattcagatagttaagtggycagggtgtcctttagggaagtggggtgagggaggggatgggaggagatcatgcttgacataaaacttattataagttgtttcttgcaaaagtgacttaggattggaagtctggaatgctgcaatggaagagttttccttacttaacttttctctgaaattaaactgccaatgt

SEQ ID NO: 434771 - DNA, 268 bp, Homo sapiens
cgccaaacagtcttaaatgtaatgcttggtgtaaagcaataaattaatctaatagacctcatcaagcagycgcctttctttttttaaaataatttttaaaaagcaattttaaatacataaaagctgcaagtacagtaccgataacttttttttttctgaaccacttgggagtaagatgttgaccacaacttcaaaaaatttagtatttttttaaaaataggaacattctctacatgtcctaatatgaaagttaggaaattagcacata

SEQ ID NO: 434772 - DNA, 368 bp, Homo sapiens
tcaaaataatccttaagccagagtagcatattttggggcagcacactctgaacctctcagcattccgcagtgtggtggggggaaaagaggctggaggacagacattagtgtggccaccactggcatctcttaagacatgatgttggcccaagctggggtggggttggggttgacaagagaggtggttgctaccaaggcagtagcaatgatgacatctggtgaatagttggatgtggcacattaatggagatggaagagcctagatttaggcttaggcaacttgacggagaacccaggagggaagcaggatggcagracggagatggggcccagggtcagccccggggggcatccaagggacaccatgt

SEQ ID NO: 434773 - DNA, 546 bp, Homo sapiens
ttggaacagcagttcagctgagtaactgcaaacataatttggttcctgtgggttgagtttgttccaaacctcaaagattaaattttgcaactgaaaattaagcttagcactgtggttttgcagatgaagatagaaagtagtggaatatattatttaagcccccaactcacaacatttgcaatatttragtgactatatacacaattatcatttactgatatatttgatggaatttatatctcgctgatttgataatataacaaatttccaggcctgcttttagctcaggactatttgttaaatatgggataaaaataaatgatatacttattaaatacatatttatcactgccaaagatcaggcatagttagaacactgaattcaaatttagtttaaatttgataaacatctaattatccattcatcaaagatgttttgagcccctactatgagggaaaaactaggctagacattgaagaatcaaagggaatacttaatgttccatccttcagggagctcagagtcatcaggtaaactgacaaatc

SEQ ID NO: 434774 - DNA, 463 bp, Homo sapiens
gtagaagtttctccaaatggacccagagtcagttacttgtatggcagaggagtttggaggacaatgggacattctctctttaatctctactagggctggggaaggaagtagaccccactgaataacctcctcattatgtggctatattaaaattgttgaatatctatttatgtaaatcatatgctataaaggttatttgctgttaaagtctccaattaaaattccaattgacagtcaagaatccttgaaatagcctaatcaaataagagtagatcaccactttatccaaggaataagcatcctctaggcagaggcrccatcctgtttttcttttttccacacctagaaaatcttcagcagctaacaaaatcaactgactagtatatgaaatgtatttgtaaataaataaataatcagcaactcagagaacatttattaaaagttttctaaagggtagagtagg

SEQ ID NO: 434775 - DNA, 640 bp, Homo sapiens
acccacaaaacttcacagcactatttgcccatggtagaggattaaaggtctgtatcgaggttttccgtcagccagattttattttttctatctactggtattaaatgaaaatctggctaaatcatagtaatcgaccccttttttttwaaaatacatattagaaaacgctaaatttgatgataaggataatatttataggaatgggagttgctttctctccaaatacagttgttattttttgacttcccgaaacactacaatattgcaaaattaatgagaacacagacacaaagaaggaaacaacagacactgggacctaccagagagtggaggatgacaggagggagaagagcagaaaaataactatagggtgctaggcttagtgtctggtaataaaataatctgtacctcaaacccccatgacatgagtttacctatatataacaaatgtgcacatgtatccctgaacctaaaatgaaagttaaacaaaaaatccctacacttaaatttcttcattgaaacgttttatggtgaagacatcagcaataggtggagtaggacctcccagtgtttgtctctcacggaaacattaatttggacaactattgtttcacaaaaataccttcacaagagctacaaa

SEQ ID NO: 434776 - DNA, 640 bp, Homo sapiens
acccacaaaacttcacagcactatttgcccatggtagaggattaaaggtctgtatcgaggttttccgtcagccagattttattttttctatctactggtattaaatgaaaatctggctaaatcatagtaatcgacccctttttttttaaaatacatattagaaaacgctaaatttgatgataaggataatatttataggaatgggagttgctttctctccaaatacagttgttattttttgacttcccgaaacactacaatattgcaaaattaatgagaacacagacacaaagaaggaaacaacagacactgggacctaccagagagtggaggatgacaggagggagaagagcagaaaaataactatagggtgctaggcttagtgtctggtaataaaataatctgtacctcaaacccccatgacatgagtttacctatatataacaaatgtgcacatgtatccctgaacctaaaatgaaagttaaacaaaaaatccctacacttaaatttcttcattgaaacsttttatggtgaagacatcagcaataggtggagtaggacctcccagtgtttgtctctcacggaaacattaatttggacaactattgtttcacaaaaataccttcacaagagctacaaa

SEQ ID NO: 434777 - DNA, 616 bp, Homo sapiens
attgttaccatagaaatacaaagaatcataagagactaataggaacaagtataagccaacaaattggacaacctagaagaaatgaataaatttctagacataaatttctacctaccaaggctgactcatgaagaaayagaaaatatgaacagaccaataatgagaaaggagattgaatcagaaatacaaagtcttccatcatagaacagcccaggacataacagcttcactgatgaattctatctaacattcattcattattcattcattcatccatccattcattcattcatttatagagacagggtctccctctgtcacgtaggttagagtgtggtagtgcaatcaaagctcactgtagcctcaaactcctgggctcaaggaatcctcctacttcagtctctggagtagctgggactacaggtgcctcctgctaccatgcttggctaatttatttgtttttgtagaggtggggtcttgctatattgcctagactggtctcaaactgttaggctcaagctatcctcctgccttagacttatcagagcactgggattacagatatgagccaccatgcttggccctatctaacacttaattaagaaataataccaat

SEQ ID NO: 434778 - DNA, 526 bp, Homo sapiens
gcaatctcagctcactgttcaatctcactcccaggttcaagtgactctcccacctcagccccacaaatagctgggaccacagacccgcaccaccatgcccagctaatttttgtattttttgtagagacrggatttcgtcatgttgcccaggctggtctcaaactcctggactcaggcaatccgccagcctcagtctcccaaattgctgggattacaagcatgagccaccatgcctggccttattcttcctatcagaaaaatcaaataaacagacaaacaaacaaacaaaacctggtttatagtgcagtccagcaggtaataacatcagttccatacagttgtcccaactatagatgtttggaagggaaatgacaatcaacacatgttatactactcttcctttgatcaagcttatatttaaaaagcttttttatagctttgctgtacataaatgttttctattagagcaacactgtgtaataattaatcatttatgtgtccgatgtcaggtgcctatatatttaaa

SEQ ID NO: 434779 - DNA, 563 bp, Homo sapiens
cttgtttcacaagccacagaattagtatttgaattaatttctgttaaacttaaaaaagtattytgttgccttagaaaactttactgaagcctttttatatcaaaacccttttatataactaattattatgtttccaagtttgcacatagctacagagacttttatatacacatgcaaaggtaatattctcatggaataaattcttttatagctatctaagtatgtgaactttaaattagtatcaatattatttcatttttggtctaaaagaaggatatacctatcctaactcttactcagtcgttacgatagttgacccttgaacaacatgagtttgaactgtgtaggtccacttatatgtgtttttttttaaataaatatattggaaattttttggaaattagctacacagttttagaggttcccacacaggcactgaggttccactcaggcactgagaacatttccctgctaaatgaaactgtaaaagtggagattttcattctctatagttttgctttggccaggacatgaaaaacacagtggataggataaaaggattt

SEQ ID NO: 434780 - DNA, 563 bp, Homo sapiens
cttgtttcacaagccacagaattagtatttgaattaatttctgttaaacttaaaaaagtattctgttgccttagaaaactttactgaagcctttttatatcaaaacccttttatataactaattattatgtttccaagtttgcacatagctacagagacttytatatacacatgcaaaggtaatattctcatggaataaattcttttatagctatctaagtatgtgaactttaaattagtatcaatattatttcatttttggtctaaaagaaggatatacctatcctaactcttactcagtcgttacgatagttgacccttgaacaacatgagtttgaactgtgtaggtccacttatatgtgtttttttttaaataaatatattggaaattttttggaaattagctacacagttttagaggttcccacacaggcactgaggttccactcaggcactgagaacatttccctgctaaatgaaactgtaaaagtggagattttcattctctatagttttgctttggccaggacatgaaaaacacagtggataggataaaaggattt

SEQ ID NO: 434781 - DNA, 533 bp, Homo sapiens
cattgcaggaagagatcagatagcctgacttctttctaataaaggtgtattgctataatctggggctgtactttccacatttgtccttaactacaacatgttttgtcaattaccacatatttcatgtggtaaagtaaagaaaaatctcttttcatagaggcatcgtacagtataaaattgctttacaactttttgactctaagagcttaggttgaggaaacataggattggaatataactgtttagcaaatatagtagttttcaatgacttcaaatgcaaaatgtatttatgttgaggcawcacttacaaatgaggcaaatataaaataaaacagttgcttcaaaaggcagtggcggggctgggtgcggtggctcatgcctgtaatcccagcactttgggaggctgaggcgggtgggtcatgaggtcaggagttcgagatcagcctggccaatatgctgaaaccccatctctactaaaaatacaaaaattagcctggtgtggtggcacgcacctgtagtcccagcagctaggg

SEQ ID NO: 434782 - DNA, 533 bp, Homo sapiens
cattgcaggaagagatcagatagcctgacttctttctaataaaggtgtattgctataatctggggctgtactttccacatttgtccttaactacaacatgttttgtcaattaccacatatttcatgtggtaaagtaaagaaaaatctcttttcatagaggcatcgtacagtataaaattgctttacaactttttgactctaagagcttaggttgaggaaacataggattggaatataactgtttagcaaatatagtagttttcaatgacttcaaatgcaaaatgtatttatgttgaggcatcacttacaaatgaggcaaatataaaataaaacakttgcttcaaaaggcagtggcggggctgggtgcggtggctcatgcctgtaatcccagcactttgggaggctgaggcgggtgggtcatgaggtcaggagttcgagatcagcctggccaatatgctgaaaccccatctctactaaaaatacaaaaattagcctggtgtggtggcacgcacctgtagtcccagcagctaggg

SEQ ID NO: 434783 - DNA, 473 bp, Homo sapiens
tcaatttaccacccagctacttctcaaatttcttagttactctcaattttttctgctactgctttagtttagatcctaattactacgcttatatataattacaatattctactgccagtttgtctttagttacctctttttattatattattattattattattattgagatggagtctcactctgtcacmcaggctggaatgcagtggtgtgatttccactcactgcaaactccacctccaggattcaagtgtttcttgtgtctcagcctcctgagtagctgggattacagacatacaccaccatgcctggctaatttttgtatttttagtattgacagggttttgccatgttgcccagactggtctcgaactcctggccttatgtgatctgcccacctcagcctcccaaagtgctgggattacagtcatgagccaccgtgcccagcctacttatctcattccactgtattt

SEQ ID NO: 434784 - DNA, 473 bp, Homo sapiens
tcaatttaccacccagctacttctcaaatttcttagttactctcaattttttctgctactgctttagtttagatcctaattactacgcttatatataattacaatattctactgccagtttgtctttagttacctctttttattatattattattattattattattgagatggagtctcactctgtcacccaggctggaatgcagtggtgtgatttccactcactgcaamctccacctccaggattcaagtgtttcttgtgtctcagcctcctgagtagctgggattacagacatacaccaccatgcctggctaatttttgtatttttagtattgacagggttttgccatgttgcccagactggtctcgaactcctggccttatgtgatctgcccacctcagcctcccaaagtgctgggattacagtcatgagccaccgtgcccagcctacttatctcattccactgtattt

SEQ ID NO: 434785 - DNA, 473 bp, Homo sapiens
tcaatttaccacccagctacttctcaaatttcttagttactctcaattttttctgctactgctttagtttagatcctaattactacgcttatatataattacaatattctactgccagtttgtctttagttacctctttttattatattattattattattattattgagatggagtctcactctgtcacccaggctggaatgcagtggtgtgatttccactcactgcaaactccacctccaggattcaagtgtttcttgtgtctcagcctcctgagtagctgggattacagacatacaccaccatgcctggctaatttttgtatttttagtattgacagggttttgccatgttgcccagactggtctcgaactcctggccttatgtgatcygcccacctcagcctcccaaagtgctgggattacagtcatgagccaccgtgcccagcctacttatctcattccactgtattt

SEQ ID NO: 434786 - DNA, 599 bp, Homo sapiens
atttctgtttgtgccactttctttcatacccttcagctgcctcattttttcatatacttgaccatgggtttcatatacttgactacccctaaaatgggtagctttaaactctttctgctgcctaaaaatacttattcttctagacccagattaaatggcatctcttctatatgatatttcctaatatctctggaagatgtgatcactcctttcatactttcatagaactgtaactataatactataattacttattggtttaaaggtttgtttcttccacttagatgcaaggtcttgagagcagaggtgctatcttactaatttatctatcttcaaggtaaatacagcarctggaatatagaaggtacttaaaaaatgtgcatgggatgagtgaatgaatgactgcagtgcatttctaccccacctttctgaattccctctgagccaaaaggtggtctttacctttattaagacctgtagtcctctattacccactctagattaaaaagtagaataaatcttgagagaattaagttctctttattactggggcccagcattgtctgtggctgtttaatttgtcaatacttacgaaacta

SEQ ID NO: 434787 - DNA, 600 bp, Homo sapiens
tggctttcatcaggtttgttcgcttgcttcccaaaatgaagcaagcaaaagcaagtgaatggcacatataagagaagttattacaatgaatgaatattgattgtaagctaaataagaagaaaaataaggacacatatgtgagaggtacaggaaacatttatatgaataatgaattgtaaatagttaaatagagatcaaaagattgttaagtttggtggaaagacaggaggcagtggtgagaaggaggaacagaaaaaattgagatgatggagaggctgcaattattggtaatcagaaagtttgtggtatgatcatgagtagtgagtttgtataattttatggagaacaaagtaattggcagagagaagtaaagacactaagagaccaggctatcataaaaatagtccacacatttatgaaatcactaagaatcatgaaggagtagtgttagaaagagtggcaatgaaccagtatgtcaatcatcaagaaattaggaggaatgacccaggtggcactgcagactgcaacaaggagagctaatsgtcagtatagtctaatgatataaaattcaaagttgggtgctttttgagcaagatagag

SEQ ID NO: 434788 - DNA, 571 bp, Homo sapiens
ctaattttgtctctaatatggaagaaactattggcaattaggaaattatgttgggtagcatggaacgttacccaccagccaacttaacttgagtaacaaaaaagaatamttaaaaaataaaagatttaagtacagattttaaagtccattcatagagttccagtgtccaaggcatatctgtgtggcaaagggtcagaagcaaggacggggcttgtatctcctcttctttcaatctgttgctatctctttgggctctagttctctcactgctaagaagtataagtccccaaacgagaaagctaaaagaggaaaataagcacttcaggatattgtcaccttgtcctcatgtcccgggagtcaatgatttcttctgtgtctccaaattcaggtatcattaccttaaaacataaaatgttagaaatagaaagaactttgaaaatcaagactctgggaaagagaaaccagtaataagtatcaccagttcaactaagatctgatttggtcagttagaaaattaactaaaaatatcagtgcatttagatcttgttatggggctatgcagactgtatca

SEQ ID NO: 434789 - DNA, 574 bp, Homo sapiens
acaagaacctgaaaggtcagtctgattgcagcaaagttaccatgggcagcctgatattaaatgaagatgtaaaaagaagcagaagacagatttagaggccaggaagcatatatatacaatacttactgataacaagcctagaatttttatagagataattcagcttaaaagcactcttcacaagcctatatggcacatgagcttatatatgaccagactcaaatcacacatgtaataagtcttaaaaatagaactgcaggcctggtgctttggctcatgcctgtaatctcagaactttgggaggccaaggcaggcaaatcatgaagtcaagacattgagaccatcctggccaacatggcaaaaccctgtctctactaaaaatacaaaaattagctgggtgtggtggtgcacgcctgtagtcccagcyacttgggaggctgaggcaggagaatcacttgaacccgggaggcggagattgcagtgagccaagagagtgccactgcactccagccgggcgacagagcgagactccatctcaaacaaacgaataaaaaaaataagacttctgatgcca

SEQ ID NO: 434790 - DNA, 494 bp, Homo sapiens
agtgaaaccctgtctctactaaaaatacaacaaaattagccgggcatggtggcaggcacctgtaattccagctactctctccctctctctctcacacacacacaaacagacacacacatcattttgggtcaagagcaaattagtggttgtagaaactcaagagtgacaaaatcactcaggaagaatccataaagtgagatggtaagggggcctagataagattcctgaatagtgctaatatttaaacaataacttggttagaaagtgtccctaaaacaattctaaaaagctagagagaragcaggatcaaataataaaattgaaaactaaagaggaattttgattcctaattctcaatagtttcaaattctatagagaggctgtctcaactgaactagcaaatttattccctagggaaagccctttctgagatgtagataaaccaaataataataggttgagaaataagtgaagacgcacctcacaacccaacc

SEQ ID NO: 434791 - DNA, 596 bp, Homo sapiens
tgaatcctggagtgtctaccagagttcaccactcaaacagctattatattgtggtgttttgtgtttttcactagactgcaagggcctaatgaggaagacatgttctctaactttgtatcactattacctaatcacaggccaagcaggtcctgtggcagagcacgtcatgagaaactacttgccttggtgctgaccattaagtcagtgtccaaattcacagyttccttgtgagtttatgaagtttccatagcagcttcctgggctatagaaaccacatatcccatttattgtctcttctactcttggtaaactctccttttatcagtgaaggggaggagcatacatatataacctgcccacccacacctaccactcctcctcaccaaaatcccccaccctctgaatcaaatggtcgtattctgctttgaataaattaattctaatttcctggacatttttagattattcatctacagggatatgtacagggaccatgttgatgttaatttatcactcattttaaccaggatgtctaagaacaggtaagactaaatctcatgaaacatttaaaaacagtgaaaccagtaagtaatata

SEQ ID NO: 434792 - DNA, 596 bp, Homo sapiens
tgaatcctggagtgtctaccagagttcaccactcaaacagctattatattgtggtgttttgtgtttttcactagactgcaagggcctaatgaggaagacatgttctctaactttgtatcactattacctaatcacaggccaagcaggtcctgtggcagagcacgtcatgagaaactacttgccttggtgctgaccattaagtcagtgtccaaattcacagtttccttgtgagtttatgaagtttccatagcagcttcctgggctatagaaaccacatatcccatttattgtctcttctactcttggtaaactctccttttatcagtgaaggggaggagcatacatatataacctgcccacccacacctaccactcctcctcaccaaaatcccccaccctctgaatcaaatggtcgtattctgctttgaataaattaattctaatttcctggacatttttagattattcatctacagggatatgtacagggaccatgytgatgttaatttatcactcattttaaccaggatgtctaagaacaggtaagactaaatctcatgaaacatttaaaaacagtgaaaccagtaagtaatata

SEQ ID NO: 434793 - DNA, 516 bp, Homo sapiens
gtgatatgaaaatgttttatttctattagttacagtcacaaatcctcctatggattgttgcctacatttgtagttcaaggaagtgctaaatttgagttagagttcagcttttgataggtggagtggtagaggcaaccttttttttttttcctatccacattcctaccagactctgggttaattagacaagaattacttgtgactgactaaggttatacaactcttagcagaatattagtgaatgagaggtaatctagaggaagacaggcagaagtatgggtctgaaaatcatgccaaatgcagatgctgaaccttcagaggaaggcartttgaaaactgccttcaagtactaatacacaagttttactacgagccaggtggtgttttcagcagttgtaatttacttgcatcacacagtctagtgacagggacagaaggcagggaaattctgggcagaggaggatgggtccccagagaaggccccaccctcaagcctgcaactgtggcccaaagtga

SEQ ID NO: 434794 - DNA, 541 bp, Homo sapiens
tttttcgcagttttctagagtttgtaggattattaaaatgtagacctctggagatgaaygaataaaatcaaggcttagcaacagcatataaaaagaatagaaagaaagcacgtttctatttaagacaagggtactgataagaaggatattggtaggtacagggaatcagcatcttcaaacatttcttccatctttccaatcccagcccaaggtctgcctgatccaattttcactggctctccttctttatatcgcactcatagattgcatgtcataatttatggttcattttacacttttttagcctgcacaatttgaagctcctggatgtagaaactgtttcttgtttctttttttttttttcttgttccttttggatctcctaatgtgcctactctacttagtgcatggtagatgactaattaattgattaggtagatttagagaaaacatttcagcactaacaagtttgatctcttatcagagagaggtttaaattcagaaagtaattggcaaaatgcttggaatcagagactacact

SEQ ID NO: 434795 - DNA, 544 bp, Homo sapiens
acaggatccttggggtgtcactttgccagctggaaatctctgtggccagtggcgcctttgcctgagttttgcttgcgcccactggctgggctcattctgcccacttggcggggcaggctacacttggctatgttaccagcccagatcccatgcctgctaaaggtaagacaggcgcagagcagcaaggtgtgcatgagtgagcaagcatgggayccagccactgtacacaggcagacacaccggctgtggcaggacaggctgctccaggcaccagcatgggtgccagctccctgcaaggctgcagctggaccaggcatatcgcaagtggcttccactgctggcaccagggaatgaggtggcgcctggaaacttggagatactaggaactgtggagtcccaaagagggtgtcacagtcctggctcaaggagcttctagctctgggctccccaaggggctgcagctcttctctctttctcccttctttccttttcatcaccctcaacatggcaagtgaggggcgtgtttcagatctgtttgtgttac

SEQ ID NO: 434796 - DNA, 620 bp, Homo sapiens
tcaggactgagctccagcttgtccctcaggctgtcaggacctgccctctgtggtgtttccatggtaaccttgctttaggaagagaatgatgcttttaaaatctgagtcctaaagatttcgcttctctggctttatgttatttaatactgattttatggttatctcttttgttcttctctaagagtgtctaggatttctgacttcacagattctggtttactggttgtcaggcagatgaacatttaagaatcacttgggaagttttctcaaattatgcaatcccatcaccctggaagattttatatgtgctcctgaccccaatgtagaactactgatctaatttctctactgtctgataaatgaacttactgcattataaccactatattttcatttttgttttccttttacatcttcagcccaatatcatacctgctttgtttatctgctagtcaccaaaggtctccatttctgtccccccgtcgcagctctaaaatgcgggtttcatcyggcttgcaaagatgactatcagatcagatcactggatcaggataatggttacttcagagtcacacatttagttcatatgaaaatacccatctgcctacctaggagacctc

SEQ ID NO: 434797 - DNA, 570 bp, Homo sapiens
ccttttctgtcccttggcctaaatttttttttttttttttaaagaaccagggttcttccagaatgcaaacagacctcagtgaaccaatccattccatcatgaatgttcaccatattcttgatgcaagacattccctgccttgatccatatccagcagctcttatttttyttcttggaaccattatctaataaaatgtgtataattgtgtgtgcgtgtgtttgtgtgatgcatggaggaacagagagcaagggtgagagggtaaaacaaaacaatgctttgaagaaggtagtatcctctttattctctcctatcttcatttgtccaacagaaatacagagctgagtcttaggggagctgagttctgctaaaacctattaattcccagtaacatggaccagtcactcagcttcaatgtattttcgtttccccttttgcaaggtcggggtagcacatggaatcaaatgagatgtgaggccgaatttgaaaagcaaaggaagccagtactctgcacaatgcctttaggactttctactattgccctctatttttctataattccagcagctgac

SEQ ID NO: 434798 - DNA, 570 bp, Homo sapiens
ccttttctgtcccttggcctaaatttttttttttttttttaaagaaccagggttcttccagaatgcaaacagacctcagtgaaccaatccattccatcatgaatgttcaccatattcttgatgcaagacattccctgccttgatccatatccagcagctcttatttttcttcttggaaccattatctaataaaatgtgtataattgkgtgtgcgtgtgtttgtgtgatgcatggaggaacagagagcaagggtgagagggtaaaacaaaacaatgctttgaagaaggtagtatcctctttattctctcctatcttcatttgtccaacagaaatacagagctgagtcttaggggagctgagttctgctaaaacctattaattcccagtaacatggaccagtcactcagcttcaatgtattttcgtttccccttttgcaaggtcggggtagcacatggaatcaaatgagatgtgaggccgaatttgaaaagcaaaggaagccagtactctgcacaatgcctttaggactttctactattgccctctatttttctataattccagcagctgac

SEQ ID NO: 434799 - DNA, 542 bp, Homo sapiens
gcatgttggccagactagttttgtcatttgagaagagcatagacttgttgacttaaaaaggtcagtgatgctactctcacttgttatatgaccttggtcaagtcacagaacttctctgtttctttctgttttattttgttttactctgtttaatttggactttgggtagcccaaggtccttttcagaactctacaaaatctgttccattgacagagacagaaaacattcttttaggacttttgcacttatcacttacttaggcttctgaatcataaaagtttggatcctctcatcttcctcccctttccaaatgcttggggctaattgtaaggagcagtagacttacaggttcatattctgagcttctaagaacctgttggcaaagtgaggagacaatgtttgtcctccttaactctaggaggtgagactgagtagctctggggtggacatccagggagcactctgtgaagccagggcaggggmttcaggatgcatgacagccccacaaggacttgagagggccattttaccttctgaacct

SEQ ID NO: 434800 - DNA, 590 bp, Homo sapiens
tttccttagctaaatggtgtgaatgcagtcttctgaattctacacctcctccattaaaaaaaaaaaagtaaaagagaaaaggtctctaaccattctgtctaaaagacagcttttgggtgacagaaagagaacatctttatcattgaatttcctttgaaggacattctaaattcaagggagcatttcctgaatagggcaactccatctagccctacaacataggaacaacatcaggaagagcaccatccctgcactgtagcctcctaactggtttcttgtgatccaatctcatcctcctgtaatgcagtggtcctgaaacatgagtgtgcatcagaatatcctggagagcctgtgaaaacagattgctgaactctacccccagagtttctgagtcaggatattgagrgtggggcctaagaatgtgcatttctaacaggtttctaggtgatgctgctggtctgggaacctcctttgaggaccactgctggaatccattttgcatgcagcatccacagtaatctttaaacatgtaaatcagatcatgccattttgttacttaaaaccctggggtatctttccgttgcacttaa

SEQ ID NO: 434801 - DNA, 588 bp, Homo sapiens
gacaaagagagcaaattctcccatcatctaccagtttgttctattcagactcctcagtggattggatgatgtccacccacagctgggtagggcagatcgacttgactcagcttacctatttagatgataatatcttccaggcctaccctaacagatgcacccagaaataatgtatacccagcaatcttggcaacccatgagccagtcaagttgtcacatacaattaacgattgcagtatagctcaatgaattttgacaaatgtctacacctgcatagccatcccagtcgatccatggaacatttttgtctccctcaaaattcctgtgtacccccttgctatcaatgcccycttcctctcctccactgtatttccaggaaaccaatgatctgctgtcactgtagattaattttgttcatgctacaatcccaaataagggaatcaaactgtatgtggtcttttgtgcttggattttttactcagaatgaagttttagtttattaacataaaggagtcagtagttatctcctttttatagctcaatagctttctatttatgagtataccgtgatttgtgtatccattcacc

SEQ ID NO: 434802 - DNA, 502 bp, Homo sapiens
ttctctcccagtacttgtgggatattaagctatgtgagattttgattttcttataaatctcttatcatgtggctgggrtgactgattgggtgtgagctgaagtgttgatgtgacccagtcagagggctatgtgctaggtcccatgtccacattctctaccccgctccggggcctgggtggctatctcataagaatggcattaaattggctttcttgccctttggcctctggtcagagagttcaatgggtggaaggaagagagtgtttgtttccgtggctgtctccctgcaagggggcccagaggaggcaaagctctgttagttgtcccatccatgcagccttccatgtctctgattcccataaacaaaccgtccgcttaccccttcaggtacatggaggtgatggtgcaccgttgtcagcaccctgggttacagcactcttcttcagtttccctgttccctgctcatcaataggaactagtccctttattaaattctcttca

SEQ ID NO: 434803 - DNA, 555 bp, Homo sapiens
agttgtcccatccatgcagccttccatgtctctgattcccataaacaaaccgtccgcttaccccttcaggtacatggaggtgatggtgcaccgttgtcagcaccctgggttacagcactcttcttcagtttccctgttccctgctcatcaataggaactagtccctttattaaattctcttcacgtataccagttttgagtgccagctttttcctgccaaaactctgacacaccaggcaagctggattgccaccggcctgcaaatgggggcaaacctaaactccaggtgccaaatagctgttgggcagaatgccattcaattacagtgamaacaggggtcctctgcttctgttaccttctagttaagggttggtttctcttagttttgtctttaaaatgttgtatcagaaatgtctaatttcgtgaggagtccaagttgcttattgaaaagaggtcatgagtactattgcttaatctaaaaaatcatttatttgatatattcattttgggtggggtaaaaaatgaggtactacttttgctattatgaaaaaataa

SEQ ID NO: 434804 - DNA, 555 bp, Homo sapiens
agttgtcccatccatgcagccttccatgtctctgattcccataaacaaaccgtccgcttaccccttcaggtacatggaggtgatggtgcaccgttgtcagcaccctgggttacagcactcttcttcagtttccctgttccctgctcatcaataggaactagtccctttattaaattctcttcacgtataccagttttgagtgccagctttttcctgccaaaactctgacacaccaggcaagctggattgccaccggcctgcaaatgggggcaaacctaaactccaggtgccaaatagctgttgggcagaatgccattcaattacagtgacaacaggggtcctctgcttctgttaccttctagttmagggttggtttctcttagttttgtctttaaaatgttgtatcagaaatgtctaatttcgtgaggagtccaagttgcttattgaaaagaggtcatgagtactattgcttaatctaaaaaatcatttatttgatatattcattttgggtggggtaaaaaatgaggtactacttttgctattatgaaaaaataa

SEQ ID NO: 434805 - DNA, 649 bp, Homo sapiens
ataccattctagtcaaatgatctatttaagttggctgtttgatttatttgtgagataatatcacattttaaaagtttcagcacatactgttttttaaactattaatattgtgttccttcatatttatggagctatactagtcctgaagctttaatgccactctactcctccaaatactgtatgtgtgcagacatgaaaataattagagtatattcaaattaactttgtttggggaacagtgtggcaccctatgcccatagtttagtgcacatcatgtcgkattttctgtcctgtaccctttctgcctctaggaacagcattttcctctcttaggaactgcctcttccccagatccaaccatatggttactcaggatccaccctggtcttccgtgatgctgtcatactctgacctcaagtaatttctctagaagcaggcacatagccagagttcagccaataggaatgcttcccctgggatttttgtgaaaggaagagaggaagagtcagttcttctctagagatggaaactattcataaaatcaggttcccttggcagccagttttcctctcacttgaaggaagcctgtttttggtggcagaaactaaagtggacagaaatgtgggtcagaggttagccttgccacagt

SEQ ID NO: 434806 - DNA, 649 bp, Homo sapiens
ataccattctagtcaaatgatctatttaagttggctgtttgatttatttgtgagataatatcacattttaaaagtttcagcacatactgttttttaaactattaatattgtgttccttcatatttatggagctatactagtcctgaagctttaatgccactctactcctccaaatactgtatgtgtgcagacatgaaaataattagagtatattcaaattaactttgtttggggaacagtgtggcaccctatgcccatagtttagtgcacatcatgtcgtwttttctgtcctgtaccctttctgcctctaggaacagcattttcctctcttaggaactgcctcttccccagatccaaccatatggttactcaggatccaccctggtcttccgtgatgctgtcatactctgacctcaagtaatttctctagaagcaggcacatagccagagttcagccaataggaatgcttcccctgggatttttgtgaaaggaagagaggaagagtcagttcttctctagagatggaaactattcataaaatcaggttcccttggcagccagttttcctctcacttgaaggaagcctgtttttggtggcagaaactaaagtggacagaaatgtgggtcagaggttagccttgccacagt

SEQ ID NO: 434807 - DNA, 649 bp, Homo sapiens
ataccattctagtcaaatgatctatttaagttggctgtttgatttatttgtgagataatatcacattttaaaagtttcagcacatactgttttttaaactattaatattgtgttccttcatatttatggagctatactagtcctgaagctttaatgccactctactcctccaaatactgtatgtgtgcagacatgaaaataattagagtatattcaaattaactttgtttggggaacagtgtggcaccctatgcccatagtttagtgcacatcatgtcgtattttctgtcctgtaccctttctgcctctaggaacagcattttcctctcttaggaactgcctcttccccagatccaaccatatggttactcaggatccaccctggtcttccgtgatgctgtcatactctgacctcaagtaatttctctagaagcaggcacatagccagagttcagccaataggaatgcttcccctgggatttttgtgaaaggaagagaggaagagtcagttcttctctagagatggaaactattcrtaaaatcaggttcccttggcagccagttttcctctcacttgaaggaagcctgtttttggtggcagaaactaaagtggacagaaatgtgggtcagaggttagccttgccacagt

SEQ ID NO: 434808 - DNA, 659 bp, Homo sapiens
gctccttggggaaaatatgtaacaacagtatgtagcattacttgggcttcttttctctatcagtcagaattggataaacaatgctgcagaacaatgctgcagtaacaatcacctaaatttatgtggctttctacaataaaaaactgtttcttgcttatgtcatcatctgtgtcaggctggatggcttctctaggcagctttcttcaggcagtgactcaggtatctgggtttcttccactgtatgtctctatcactgggcatgttccaatgcctgtttcatggatgggacaaagaaggtgtttacaatcacatggatactttaaaggccaagcccagaagtggcatatcttatttctacctatgttccagagactagaatttagtcacatycacaacctaactgcaagagagccccaaaattgtaaaatgtagaacatacgagtgggaaaagaaattttacatttcagctactttgttttctggggcttgggatagaagaatggggatagaagtagacaggagggagcttttggttagattggtgacaggtcattgtaggaagaaaggacatgttaaacccagtaatactgtagaaatcaacactcaaataccaaatctttaaaacaccactttggatgctgaagccttagcaatgctaa

SEQ ID NO: 434809 - DNA, 659 bp, Homo sapiens
gctccttggggaaaatatgtaacaacagtatgtagcattacttgggcttcttttctctatcagtcagaattggataaacaatgctgcagaacaatgctgcagtaacaatcacctaaatttatgtggctttctacaataaaaaactgtttcttgcttatgtcatcatctgtgtcaggctggatggcttctctaggcagctttcttcaggcagtgactcaggtatctgggtttcttccactgtatgtctctatcactgggcatgttccaatgcctgtttcatggatgggacaaagaaggtgtttacaatcacatggatactttaaaggccaagcccagaagtggcatatcttatttctacctatgttccagagactagaatttagtcacattcacaacctaactgcaagagagccccaaaattgtaaaatgtagaacatacgagtgggaraagaaattttacatttcagctactttgttttctggggcttgggatagaagaatggggatagaagtagacaggagggagcttttggttagattggtgacaggtcattgtaggaagaaaggacatgttaaacccagtaatactgtagaaatcaacactcaaataccaaatctttaaaacaccactttggatgctgaagccttagcaatgctaa

SEQ ID NO: 434810 - DNA, 659 bp, Homo sapiens
gctccttggggaaaatatgtaacaacagtatgtagcattacttgggcttcttttctctatcagtcagaattggataaacaatgctgcagaacaatgctgcagtaacaatcacctaaatttatgtggctttctacaataaaaaactgtttcttgcttatgtcatcatctgtgtcaggctggatggcttctctaggcagctttcttcaggcagtgactcaggtatctgggtttcttccactgtatgtctctatcactgggcatgttccaatgcctgtttcatggatgggacaaagaaggtgtttacaatcacatggatactttaaaggccaagcccagaagtggcatatcttatttctacctatgttccagagactagaatttagtcacattcacaacctaactgcaagagagccccaaaattgtaaaatgtagaacatacgagtgggaaaagaaattttacatttcagctactttgttttctggggcttgggatagaagaatggggatagaagtagacaggagggagcttttggttagattggtgacaggtcattgtaggaagaaaggacatgttaaacccagtaatactgtagaaatcaacactcaartaccaaatctttaaaacaccactttggatgctgaagccttagcaatgctaa

SEQ ID NO: 434811 - DNA, 586 bp, Homo sapiens
gctggacaaaaacacaaattgttcattaatatcattttaaatccatgaccataacctcacattggccctcaggtattgggtcagttcactgtgtttgtttccctattaagtcttccgttctccttgatgactatttcaaagttcctcgtttctcgaatcacccaaaccctttgcccttgtctctctccagtcccccatcacatctaccacctcacctatatctctgttcatgtagtcggctttccttctcattgctatggatcaactacctgtggaaggccaggtcctccactggatcatagctcttcctacctactcaagagcattgtcccagcaattttttcttttctctctttgttgtcaaatttctcctctctcctgaatcattcacatgagcatagaaacatgctrtcagtatgtctaaaaagccaataaactttccttgacccatatttctttccagggactgccccagttctctacttcccttttaactaaagatctgtctctgtttgcaatatccacttgccctcctttccatactagataatctcacattgccaaatccaatggtcaatttgcaatc

SEQ ID NO: 434812 - DNA, 547 bp, Homo sapiens
ggggtccaggctgccattccaccctgaggcaggacgcttgggctccttttggtcaagccattagcatagcagtaaagaaaccctgtcttgaaaggcattgttttattacaaatatatcaccctttgagaatcattgccctgtgtgaggttgtatctatacgacatcacaacatatcagccaaccatcttagacaacgagaacaacccatatgactattttgttcttgtaatgtgttccacgagatgtatagatattcactggaaagaaagaggacatccatgatcctgtaagaactaaaacctctacactgaataaaggtaaacacttattttatagaaagacatcttagagcctttaactaattactatatgtttcctagaggaatataagttagcagtgttttcctaacacctaaccacaggtcctctctacaccaccctctctctccyttgtttcctatgtaacatctattaacaactatatttttgaaactctaagctaagaacattgaacaaagcaggcagacactgccttaggcttcactg

SEQ ID NO: 434813 - DNA, 595 bp, Homo sapiens
aatgcatttgtatggacagcaaaccaatggaaaattgaactcaatctctagtgttacaattactgctgccatattattcttttattactataccttaattaaatttatcttgccartacttaaaaactatgaacacccccaaatattgaaaatctcagaccattaagtcacctttctgttacacataggattctgttttaggacacaaaaaggacaatattataatgtaattgttgctcttaggagcagtgagtaataccaacccatcactcgagcatcagaaatttacaacaacattttgttatgccatgtagctgcaggctactttttctttacccacccaagactaaaaatccaataatttttctcataatgggagtgatgtggcttgagaagtatctgtttatgattcatgctaaggactgagcacagtctgctacacacaagcaagctgctttgcctcaggggaaaacatgttctgtgttgcattaacttagttctgaagcaaaatatcacagccgcgcatcatcaaattagagcctgaataggctgcacaatcatcaactggtgctgagattccctttcacattagaga

SEQ ID NO: 434814 - DNA, 572 bp, Homo sapiens
tttctaagctgttttgctttctaataaaaatgatttaaactcaacctctatgctcatcagtacagtcttgtgcttaaccttttgccctggcttattgtgtttatttttaatgttacttctcatctccatagtagtttgcactgagcaacattaggaagaactgtgttcacccacagagtagaacacaccaaccaacaattcatattattccttcagctttacctgaacttgagaatcatgctatctatacttgaggaagttccctsgataatatagctgcttatcaagagacatgacaaattaagagaaacaagagacagagatccaagcttgaaactatatgaactcaaatggtgatccctacccctgactcacaaagtataaggataaagaaaactgtatatgcttagaactttaaaaaaggctctcattctcttttttctttttacttttattaatataatgtgcattgtacacataagaccttagatttatttataaaagcactatgtgtaataaactctcatctactaggaatctgagaagaccatctggaagaaagagtatgcatg

SEQ ID NO: 434815 - DNA, 664 bp, Homo sapiens
tactaattccacagcccacaattcccattttatggatgaagacaccagggatgagagaggttaataactaaaccacatctggttacactgcagagctggaatgcaaaacaaagtgtgtccacctccaagccacgctcttttcccattatatgaccgtgttgtctcttgcatttatctgtgtttcttaaaatcctctcagtaggtagatggggatagatacctctcagctttcccccaagctcctgcctcctcaggtatttagtgccctgtaagcagktcagcagaatcctgactactgagagaagagaggctctgtcattctcatggggccacccagttgcacctgtgctgaggtcaaagacattgctgcctccacatatcagagaggcagctggagtgagtctggacatttacaaaggcacaggaatcttgccaaagacatcaatgttcctaaaactgtgactcagtctttacagagctcttgagtgtctccaatgtatttaataagtagttttggcagcttactctgcactggccctgaggcaagctgtagggacataaaaatgacagatatgggtcctgccctcaagtataaaaataatagctcacaattgtcagcatttagtatatgccagagatcctctcttgcttcacatactttaac

SEQ ID NO: 434816 - DNA, 664 bp, Homo sapiens
tactaattccacagcccacaattcccattttatggatgaagacaccagggatgagagaggttaataactaaaccacatctggttacactgcagagctggaatgcaaaacaaagtgtgtccacctccaagccacgctcttttcccattatatgaccgtgttgtctcttgcatttatctgtgtttcttaaaatcctctcagtaggtagatggggatagatacctctcagctttcccccaagctcctgcctcctcaggtatttagtgccctgtaagcaggtcagcagaatcctgactactgagagaagagaggctctgtcattctcayggggccacccagttgcacctgtgctgaggtcaaagacattgctgcctccacatatcagagaggcagctggagtgagtctggacatttacaaaggcacaggaatcttgccaaagacatcaatgttcctaaaactgtgactcagtctttacagagctcttgagtgtctccaatgtatttaataagtagttttggcagcttactctgcactggccctgaggcaagctgtagggacataaaaatgacagatatgggtcctgccctcaagtataaaaataatagctcacaattgtcagcatttagtatatgccagagatcctctcttgcttcacatactttaac

SEQ ID NO: 434817 - DNA, 582 bp, Homo sapiens
tgcactctttcctcttcttccaaatttgaagctcatcgcaggtgggcgtgactggctgtatgccagagaataaatgaaggaagatagtagatactaaaaaccaggtgttttcacaaattgaactttaaagatccttgtattgggtaagtccaaaatgtaaatggaggctgaattagggttaaaaaatatttttaagttcctgttcatttctttgattcctcaaggygataattcagtacaatcaagtcattaagtcaggtaggtttcagagtacacacttgagggacctccctcccccttctgtcttgtactgtctctctctctctctctctctgcttccctccctctttcccctccactcttctcgtatttatcaggtattatttgagcacccaccttgcaccagtcaatatcctaggagctccaaggtaagcatggccctgccttctgccattcagaggaccttgatcatctcatattgatctgctttttaaaatttattttcatttttatttaatttcagagacagggtctcactctgccatccactggagtacagtactgaaatcatcactcactgca

SEQ ID NO: 434818 - DNA, 555 bp, Homo sapiens
ctcatgcccttttgctcttaccctttttctttctctcagttgcctgccatgtagtcctgatagctggagtttcagcagttaccttgaaacatgaggaaatctttaggatagacaccrgtgccaaggagggtacagcagaaagataaacagaacttggatccctgatgataacccctggagtacctactttcagatttcttttatttgagagaaaagtaaacccgtatgtttctaagccatcattaccacacactttctgttctacacaatggaatgtaatcctttctgatttgctaacctcaagctcaccagattttttttcagctcaagaaagtcttatggttacctattgcttattgtaaaaatataaccagttctgcttaatccagagtgtcctacagaaaatatgttaagtaattccaaggggcacaattttctagaatgcaatgggaatagagtcatccgatggaatataatatagtgtctcagtatgggcctcaaaaattgtagccatcagtgtcacagtttaaattcacacaaagagcacacccagag

SEQ ID NO: 434819 - DNA, 631 bp, Homo sapiens
aagtttctagaaaccagaatttttaaaaattttaattgtgataaaaaacacatgacaacatgacataaaatttacmatcttaaccatttttaagtgttcagtaaggttaactgtatgtacattgttgtacagcagacctgtaaaattatttcatcttgccaaactgaagctctatatccagtgaaaaacaaagccctatatccccctttccgtaggtcctggccatcaccattttattttctggttctatggatttgaccactttatataagtggaatcacacaatacttgcctttttgtgatttgcttatgttagcataatgttctcaaggtttatcctgttttagtatgtggcaagatatccttctttttaaagggtgaatgctattccattgtatgtatagaccacagtttatttattcatttatccctcaatgaacatttgggttgcttcaacctcttggctaatgtgaatagtgctgctatgaacatgggtgtgcaaatatctgtttcagatcctgctttcaattcttttggatgtatccccagaagttggattgctggatcttatggttaattctataattctactcttagttttctaaggaacctccatactgttaacatagca

SEQ ID NO: 434820 - DNA, 631 bp, Homo sapiens
aagtttctagaaaccagaatttttaaaaattttaattgtgataaaaaacacatgacaacatgacataaaatttaccatcttaaccatttttaagtgttcagtaaggttaactgtatgtacattgttgtacagcagacctgtaaaattatttcatcttgccaractgaagctctatatccagtgaaaaacaaagccctatatccccctttccgtaggtcctggccatcaccattttattttctggttctatggatttgaccactttatataagtggaatcacacaatacttgcctttttgtgatttgcttatgttagcataatgttctcaaggtttatcctgttttagtatgtggcaagatatccttctttttaaagggtgaatgctattccattgtatgtatagaccacagtttatttattcatttatccctcaatgaacatttgggttgcttcaacctcttggctaatgtgaatagtgctgctatgaacatgggtgtgcaaatatctgtttcagatcctgctttcaattcttttggatgtatccccagaagttggattgctggatcttatggttaattctataattctactcttagttttctaaggaacctccatactgttaacatagca

SEQ ID NO: 434821 - DNA, 553 bp, Homo sapiens
tatagagctaaatacaagtgttgtgaaaacatttttatagaatgatgtgggaccacaggatcatattattctagaacatttagggccagaagggcacttagaagcacttagcctaatttccgtatatagatgagaaaacaaatatggggtaggaggaagtaactttacccaaagtcaaatagataataggaccagattattctgcaaaasaagattttttctgggtgaaaaacaagaacattcaggcaataaaatcttataaaactctaaaagagactatgggctatttgctcctagaatttgtattttaaaataatctattctatttgaataatgattaaagaaaacacaagatggtgttttgtcatttcaattcaattaatgaatttagatacaattcaatggggcaaatacataaaaagatcacaggcatatttttgtaaaaaatttagtcttctgcttttctgttaaaaacgttttcattctgggaatattttctctacagaaacacagagcaaattttgcaccaggagcaaaatttttaatgctatgt

SEQ ID NO: 434822 - DNA, 553 bp, Homo sapiens
tatagagctaaatacaagtgttgtgaaaacatttttatagaatgatgtgggaccacaggatcatattattctagaacatttagggccagaagggcacttagaagcacttagcctaatttccgtatatagatgagaaaacaaatatggggtaggaggaagtaactttacccaaagtcaaatagataataggaccagattattctgcaaaacaagattttttytgggtgaaaaacaagaacattcaggcaataaaatcttataaaactctaaaagagactatgggctatttgctcctagaatttgtattttaaaataatctattctatttgaataatgattaaagaaaacacaagatggtgttttgtcatttcaattcaattaatgaatttagatacaattcaatggggcaaatacataaaaagatcacaggcatatttttgtaaaaaatttagtcttctgcttttctgttaaaaacgttttcattctgggaatattttctctacagaaacacagagcaaattttgcaccaggagcaaaatttttaatgctatgt

SEQ ID NO: 434823 - DNA, 620 bp, Homo sapiens
aatgctaattttaactacttttaggcttttgaataaaacctctttgtgatcagtttacttttttaatcctttaaggagtcctggaccycagtgtctggtctggggaggcagggctaaatgcaaactcctcttagcccggcgacacctacatggttaactagaagcacacatgggtccagttattctaattaaaaacaaaccttaatgaaaagatatctgcatcgtgtcccaatacctccatgtccaacaagttatcagcgggatgtgtggaatgaaaaggtcttccagcagcccgggctcatcactgcctggtgatttaattcaagagcccagatcataaattggacttgacgtcaaacagcagccaaggctgagaatccgcctggcctgggtgtgctgggcttgctgtgggctgactaaccagcaggcatgctgtcacgtctgggtcatctgctgtcagcggacggttccctgtgggaggtccaggttgcgagcactgctgtagtctagacaggaggtgacaaacatgttgacctttgggacaagattgatctctttgttttttgacaggagacctttccagagtggaatctcaggaggaagagtctagaagtttcatc

SEQ ID NO: 434824 - DNA, 614 bp, Homo sapiens
tatatatacagaactttccacccaattgtagcagaatacacatttttttcaagtgcacaggaaacattctccagtatagatcacatgttaggtatccactggatgtcttgaaacatattcctcatgaataagggggackactgtgccatatggtttcagcaatcctacttttaggtatatatccgaagtaattgaaagcagcatcatgagatctatgctcccatgttctgcacttttatgtacattgcagcattagtcacaatagccaagatacagaaacaacctaagtgtctgtcaacagatgaatggatgaagaaaatgtggcatagacataacgaatgaatagaatacaacagaatgttattcagccttagaagggaatcctgccatttgcagtaacatggatggagctagaggaaatgctaagcaaaataagcaaggcagaaaaagaaatactgcatgatctcactttttgtggaatctaaaatagtcaagtgcatagatgcagagagtaggatggtggttgccagaggctggggagaggggatgatgtcagtttaagggtacaaaaatggtaactatgtagaagtgataggtatgttaattagctcaaa

SEQ ID NO: 434825 - DNA, 538 bp, Homo sapiens
tcctttgcagaagtatcagagtcacaagccaatgaaaataaatagagaagaaggggctcaggatgaaggaagcagtgtggcaaggatcttcaactttctccaaatagtaatataagtggtgatggttgttgtttctccttctttttatcctcttcttcaccttcttatttttaaaaagttacatgtacataatttacatggtaaaattctgacctcaggggtttaatggatggatacacagtatccatgctatgaagcagaaagtggactgacctatgagagagttggaaataagctaagttcactttggggtcttatagcaccatgggagtttcagggttactaatgtcctgtgtgcaaatcacaggccaaagactgcatgagagaaggtgacaaaatgggattgatggatgacagagccaaagtctctgttcagacaacactgtgtaaaagaggctgcttatggggatttacctctyccagacactatgattgcaaccacagctatcagttaggcctgtcctgttcaggttccatc

SEQ ID NO: 434826 - DNA, 641 bp, Homo sapiens
ttgggtggtcatgtgactcagttctgaccaatgacctatcattagaagtctgctaggcagtacctggggaagattttcctgctttgataaaagtgcaattatctgcaaggaaaaaatttgtttcccttgcccattttgccttatttgagatgctgactagatctgtatagctcaatttgtgaccttgacatgacacataagataaaaagcttatagatggaggtagatgaagcataattatggaaaaagcctcagtttttttttttggttgttttttagactgaatttttgaagatattattcagttgctaaattgccctcatggtgatcatggacaagatgttataggcttgatgatgcatgaggaatagtacacagaaataactagtgagttaagaatctctttatatgatagtagaacaggccattttgtgctggcattgccctctctgtcagctaagtggtatcaaaggcagtgagcatgcagttctgaacttccctgattattgaattccttgtgttgccactakcatttgacatcaaatttgggcacattcttgagaaatagggagggcatcagagaatcgctaaattgtattgctaaggtataatacattattttttgccagttggtagtaagt

SEQ ID NO: 434827 - DNA, 620 bp, Homo sapiens
ttttttacaacctagtgaaaaagagttaagacatcctgaaggaagaggcaagactcaaggaagctgacacctgtggttctgggaagctgtctttgctttgcttatcttattaatgctggagggaggctgatttggaagacacatcataaggagaagtgtagagtatgaatcagagcatcagttctgttctggaaagaacaaagaaagggaagtctggaaagtcatgtgaatacactcactcttacagaacaatctcttcctctactygacggaagagaccaaagtccatccttttcttgagactctggtctcagtagctgtatgttgagcgtgatcctatgacaccatagaaacagctctcagtggagagtccggggctgaagttataggtctagcctattcacatttctgtcactcatttgttgactctgggcaagccttgactgctcagaacctccttttcctctgtgtctaaaatggtaaaaatcacatgaccactgggatttttgtacattctagggttctgagcatctagaaagaggaacaaaggaatgtgtttatacatacaaaagaagacagcttcttgtgtattttgctttgggaattatatgtgccatttg

SEQ ID NO: 434828 - DNA, 620 bp, Homo sapiens
ttttttacaacctagtgaaaaagagttaagacatcctgaaggaagaggcaagactcaaggaagctgacacctgtggttctgggaagctgtctttgctttgcttatcttattaatgctggagggaggctgatttggaagacacatcataaggagaagtgtagagtatgaatcagagcatcagttctgttctggaaagaacaaagaaagggaagtctggaaagtcatgtgaatacactcactcttacagaacaatctcttcctctactcgacggaagagaccaaagtccatccttttcttgagactctggtctcagtagctgtatgttgagcgtgatcctatgacaccatagaaacagctctyagtggagagtccggggctgaagttataggtctagcctattcacatttctgtcactcatttgttgactctgggcaagccttgactgctcagaacctccttttcctctgtgtctaaaatggtaaaaatcacatgaccactgggatttttgtacattctagggttctgagcatctagaaagaggaacaaaggaatgtgtttatacatacaaaagaagacagcttcttgtgtattttgctttgggaattatatgtgccatttg

SEQ ID NO: 434829 - DNA, 405 bp, Homo sapiens
aaatgtggggttgtaggccccactggggcattgcctagtggagctatgagaagagtgccactggccttcagaccccagaatggtagacccatcgacaacttgcactgtgtgcctcaraaagccacaggcactcaatgccagcctgtgaaaacagccatggggtctgcaccctgcagaaccacactggcatagctgcccaaggctgtgggagcctacctcttgcatcagcatggcctagatgtgagacatggaataaaaggagattttggagttttaagatttaatgactgcccagtcaggttttggacttggccaatatctcctatttggaatggaaacatttacctagtgcctgtacccctgttgtttcttggaagtaactaacttgtttttgattttacagga

SEQ ID NO: 434830 - DNA, 646 bp, Homo sapiens
atccaaaataattgaaatccaggtttcaaagaaatattcgtatactcatatcacagcagcattattcacatagctaaaatgtggaagcaactcaagtatctgttaaaagataaatagataaacaaaatgtagtatatacataacactgaaatactattcagctttaaaatggaagaaaatcctatcacactctacaacatggataaaccttgaggacattatgctaattacataagccaatcacaataagataaatactgtatgattcacttatataggtacctggagtagtctaattcaaagacataatgtagaataacggatgctaggaactgggggcaaaatgcaatgtgtagtttttaagtgggtatagagctcttagctttgcaaaatataaagatttttgaatgtacttaacaccactgaactatacacttaaaaatggttaagatggtaaacgctgactacaattttagctaaattaaaaataaaaatatttttaaaagagaaaaaaatgaactagggaaatcattaasttctttggataacaaatttgacaggaattttttcccttttattgttattattattattttgaatttggagctggagcctaacttcacataattactagctataaaatgaa

SEQ ID NO: 434831 - DNA, 473 bp, Homo sapiens
catacccaatagataaggttttaacgaattcagaccagcttccacccttacactttatgactgaatttaaagcctacttatttgaaaattacttgccaatttaagttaatctaattttcttataccttgatctaacagctaatcaacattctaccaagccactatggtgaatgagaaaggcagccatcaaatagaacaactaattctgatatgttgactagcactatgtgaaggacagactggacaataaatcaatggaattgggtgctttttgtcctaagcccacaaattcatttacaaattccaacttcatatttcatgtctgataaacaattccttatgcattgagaaaayatgtctgtgagtattcatagggggagaggcgtgaaattcaattgttgagattttaccattcaagaaaaactttacatataccatagcaattaatttcacactaactgtacaaggcttta

SEQ ID NO: 434832 - DNA, 473 bp, Homo sapiens
catacccaatagataaggttttaacgaattcagaccagcttccacccttacactttatgactgaatttaaagcctacttatttgaaaattacttgccaatttaagttaatctaattttcttataccttgatctaacagctaatcaacattctaccaagccactatggtgaatgagaaaggcagccatcaaatagaacaactaattctgatatgttgactagcactatgtgaaggacagactggacaataaatcaatggaattgggtgctttttgtcctaagcccacaaattcatttacaaattccaacttcatatttcatgtctgataaacaattccttatgcattgagaaaacatgtctgtgagtattcayagggggagaggcgtgaaattcaattgttgagattttaccattcaagaaaaactttacatataccatagcaattaatttcacactaactgtacaaggcttta

SEQ ID NO: 434833 - DNA, 473 bp, Homo sapiens
catacccaatagataaggttttaacgaattcagaccagcttccacccttacactttatgactgaatttaaagcctacttatttgaaaattacttgccaatttaagttaatctaattttcttataccttgatctaacagctaatcaacattctaccaagccactatggtgaatgagaaaggcagccatcaaatagaacaactaattctgatatgttgactagcactatgtgaaggacagactggacaataaatcaatggaattgggtgctttttgtcctaagcccacaaattcatttacaaattccaacttcatatttcatgtctgataaacaattccttatgcattgagaaaacatgtctgtgagtattcatagggggagagscgtgaaattcaattgttgagattttaccattcaagaaaaactttacatataccatagcaattaatttcacactaactgtacaaggcttta

SEQ ID NO: 434834 - DNA, 520 bp, Homo sapiens
acttttcataactctccctgaccacttttgaaaaggtcattgascatatttcttcttcagcttcttaatgaatttcttttgtgcctcatattttttactacaggcaggtggcacctttgccagtacaggtcttttgaaatattttgagtttccatgtatttgattccagccaaatctgtgtgccagagtcgcttctaaaatgcttttaaaaatcatctctctttatccttaattactgaaagtttggctacttcaagattccatgggctcatgctcctgcatttcctaggagccttattgtctgacttaaaagatccattacatgcaccttcaactttccattggttttaacaagaagtgtcacagccacagactggatttggtctttgttctgaggtcacagcttactgtagtgctcagagcaccgttggctctccatatccacaggttccgcatctgtagattcaaccaactgtggatcaaagacgatctagcacagctacttttgtttttgtttttt

SEQ ID NO: 434835 - DNA, 520 bp, Homo sapiens
acttttcataactctccctgaccacttttgaaaaggtcattgaccatatttcttcttcagcttcttamtgaatttcttttgtgcctcatattttttactacaggcaggtggcacctttgccagtacaggtcttttgaaatattttgagtttccatgtatttgattccagccaaatctgtgtgccagagtcgcttctaaaatgcttttaaaaatcatctctctttatccttaattactgaaagtttggctacttcaagattccatgggctcatgctcctgcatttcctaggagccttattgtctgacttaaaagatccattacatgcaccttcaactttccattggttttaacaagaagtgtcacagccacagactggatttggtctttgttctgaggtcacagcttactgtagtgctcagagcaccgttggctctccatatccacaggttccgcatctgtagattcaaccaactgtggatcaaagacgatctagcacagctacttttgtttttgtttttt

SEQ ID NO: 434836 - DNA, 520 bp, Homo sapiens
acttttcataactctccctgaccacttttgaaaaggtcattgaccatatttcttcttcagcttcttaatgaatttcttttgtgcctcatattttttactacaggcaggtggcacctttgccagtacaggtcttttgaaatattttgagtttccatgtatttgattccagccaaatctgtgtgccagagtcgcttctaaaatgcttttaaaaatcatctctctttatccttaattactgaaagtttggctacttcaagattccatgggctcatgctcctgcatttcctaggagccttattgtctgacttaaaagatccattacatgcaccttcaactttccattggttttaacaagaagtgtcacagccacagactggatttggtctttgttctgaggtcacagcttactgtagtgctcagagcaccrttggctctccatatccacaggttccgcatctgtagattcaaccaactgtggatcaaagacgatctagcacagctacttttgtttttgtttttt

SEQ ID NO: 434837 - DNA, 520 bp, Homo sapiens
acttttcataactctccctgaccacttttgaaaaggtcattgaccatatttcttcttcagcttcttaatgaatttcttttgtgcctcatattttttactacaggcaggtggcacctttgccagtacaggtcttttgaaatattttgagtttccatgtatttgattccagccaaatctgtgtgccagagtcgcttctaaaatgcttttaaaaatcatctctctttatccttaattactgaaagtttggctacttcaagattccatgggctcatgctcctgcatttcctaggagccttattgtctgacttaaaagatccattacatgcaccttcaactttccattggttttaacaagaagtgtcacagccacagactggatttggtctttgttctgaggtcacagcttactgtagtgctcagagcaccgttggctctccatatccacaggttccrcatctgtagattcaaccaactgtggatcaaagacgatctagcacagctacttttgtttttgtttttt

SEQ ID NO: 434838 - DNA, 523 bp, Homo sapiens
attatcatgcattagtacctagactgcraatatattgtattacaaagtaaaagaggagtaagcttgcaggtggatttgaggttgctaatcagtttacattaacaagattatcttagattattctggcaggcccaatgtattcacaaagtatcctcaaatggggatgaaacaggcctaagagccaaaaccagaggagtagaatcatgagaaagggcctactgactactcttgactttgaagattataggggtcaggtgtcaagtaatgtgggcaactgctagtggctagaaaaggcaaaaactagattctcctctagaatctctagaaaggagcatagccctgccaaccccttgatttctacttcagtgaactataagataatatatttgtagtgttttaaactactatatttgtggaaatttgttgcaatagcaatagaaaaatggaaacactgcttaatgactttaaagacatatagaatatataagggaaaataagaagaataaaaaatgaagaataaaat

SEQ ID NO: 434839 - DNA, 523 bp, Homo sapiens
attatcatgcattagtacctagactgcgaatatattgtattacaaagtaaaagaggagtaagcttgcaggtggatttgaggttgctaatcagtttacattaacaagattatcttagattattctggcaggcccaatgtattcacaaagtatcctcaaatggggatgaaacaggcctaagagccaaaaccagaggagtagaatcatgagaaagggcctactgactactcttgactttgaagattataggggtcaggtgtcaagtaatgtgggcaactgctagtggctagaaaaggcaaaaactagattctcctctagaatctctagaaaggagcatagccctgccaaccccttgatttctacttcagtgaactataakataatatatttgtagtgttttaaactactatatttgtggaaatttgttgcaatagcaatagaaaaatggaaacactgcttaatgactttaaagacatatagaatatataagggaaaataagaagaataaaaaatgaagaataaaat

SEQ ID NO: 434840 - DNA, 621 bp, Homo sapiens
tacacagaatttcttatacctctgccaccccaaaaacaacaagactaacctctcttcttccccttcctcctcagcctacgcaatgtgaagacaagagcaagacctttatgaggatccacttctacttattaaataacaaataaattatctctttcttatgatcttcttaataacattytcttttctctagcttacttcactataagaatataatatacaatatatataacatataaaatataggttaattgacagtttatgttatcagtaagcttccagtcaacagtatgctattactagtgacatttttggaaagtcaaaagttgcccatggattttttgactgcatgggggttggtgtctctaatctttgctttgttccatggtcaactgtatttatgcctcttttatagtacagattgtaagtacatgcatacatgtctgatttcttcacaaaggcacccagttccttgagtagaggatcttgcctcttatctttgtatctaatggtattactgggcttaataaatttgaagtgagggactgaatgaatccaatttcatcaaagaattgtattgtaaaacttaattcatagaatctctcataaagaaggaatatgaca

SEQ ID NO: 434841 - DNA, 606 bp, Homo sapiens
tttatctcaacttcttgtttatacttaatttgcgttgaattttgtcattggatcatcgagttagccctctttgcagttatgtgccctcattggggaaaactgatgtaacacgaagggattttaaaataagctgggctggaaaggaagagagaaggcatactaaacatcaccaatgtgaaactaagaccataattaaaatatgtaaataaaataaattttaaaaatttataaagcttattttttgtccatggaggattaaaaaataaataaaaattttaaaagcttgtttttttgtccacagaggataaaaaagtaggagtgttttaggacactctgtcaacatgaagtgaaaagcagaagtgcgaaatgttggagttcctaaaaacactaatccatgmattttactctttctttaccctctgttgtcaggtggtcttcagtcccatggctctcaatattttctgttcctttaactccctggcatgatcctctactgagagtaccaggctggctttgcaagctggatatttaaaatgtttcttaaatttagcatattcaaaactgtactatttcttcccccagttctgtcatcagctctacattact

SEQ ID NO: 434842 - DNA, 555 bp, Homo sapiens
ttctgatatgttgatatatattaaacccattaaaggagagaattagagccaagtgattgtatacattaatagatttgttggkaagctattttctcattttctttttaagctatggactactaaaaatatccacattcacctaagagacacactcacacaatactttgaccaaaaaagccactctatgacatctcatttgtaatgaataaaaatggtagataaactgttctccagtagttacatgacgaaatatttctatgagaaatactaattgaaattagactatcaccaggtgtggttgctcacacatgtaatcccagctacttggaagcctgaggcaggagaatcgtttgaggccaagagtttgagaccagcctgggcagcatagtgagactccgtctctaaaaatataaatacatacatacatacatacatacatacatacatacatactataacctatgtggagtaaatagacaccagaggtcactgaatcacactttgcaattagattctagctgaaatggaagagacccctaatgttaccttaccaac

SEQ ID NO: 434843 - DNA, 529 bp, Homo sapiens
atctagtttataagacataaccaatgctgggttctaacatgaaaactagagacttggaagtttatttgttcaccaacattttgaactgtgtcttagctcataaaaagrtcaataaatactccttgaattaatacatatatgaattaattgtaggaaaataataaattttctgaagtcatcagtgtttatactcatggttattcatgataatggttctaaagaatttgaaaatttattcaaaacgtatttactgcgcaccaactttttgctagacatgcacacagattatattttcctattcagttttattatcctttcatgttattagaatacatacaggaaaaatttttaaaaaactaaaataatacaatttcaaatatttgatttctgtcagtacaaatgacatgttgagaaattcacaatcattaacctaataattcacagttttgccacttcctacacatgagttgtctctgctatccatagggaaagattgtgtaaaggaaagattttaatagagcactgtggt

SEQ ID NO: 434844 - DNA, 469 bp, Homo sapiens
gaatcattaaatagaccagtcactgtaataaatacatgtggatatatacattctgttaatagacttggcatagtctttcatggtttcaagtgttaaggtttattgtggtattaaagaaaaccttatagactttcattttctgaacgatagtggattcaatatatagccaactctactgraaacactaagcaaactggatactatagaaaaactcttttgaaatgactgatgagctggcaagttagtaagacgtattcagtgagcaaaaactaagcaaaatctgaagcctagtataagagccaatccctgaagctagcttgaagacaatagccaacaaagtgaccttcacttttatcttttgtggcctcacgggaagaggagacaggataagaatttcccataacataaaggatactatcacatggatccaggaactccaatgaataccaagtatgagaaataaaaataa

SEQ ID NO: 434845 - DNA, 469 bp, Homo sapiens
gaatcattaaatagaccagtcactgtaataaatacatgtggatatatacattctgttaatagacttggcatagtctttcatggtttcaagtgttaaggtttattgtggtattaaagaaaaccttatagactttcattttctgaacgatagtggattcaatatatagccaactctactgaaaacactaagcaaactggatactatagaaaaactcttttgaaatgactgatgagctggcaagttagtaagacgtattcagtgagcaaaaactaagcaaaatctgaagcctagtataagagccaatccctgaagctagcttgaagacawtagccaacaaagtgaccttcacttttatcttttgtggcctcacgggaagaggagacaggataagaatttcccataacataaaggatactatcacatggatccaggaactccaatgaataccaagtatgagaaataaaaataa

SEQ ID NO: 434846 - DNA, 542 bp, Homo sapiens
gtggctgtaatctaggtgctctggtatttctttgatactttggcatttctttggaagatctggtgatgaaaagttacattaccaattgtattatttggaatcctggtgaacagggaaacaaagtagcgagcaytcacagaagaaatatttgtctttttctgtcccagaattcccaacaaagtcctatctggaaactacatttagaatacaaaaactcatcccacattaccattgtttatcaacaccatttatgtaactactccttatgtcttaactttctccttccattccagaacaaggctagtttacttttcataacctaaatgctcatcaaagcagttttctaaaaagaggagtatttgtttcctcttcaaactgcagttgtcacatttcttacctagcatcagagaactcaacaccaactgcagccatcaagaatgtagaaatgtcttcatttgcttttacatttgccttttccctcttctcccacatatagctatttttatattccaatagtcatttctattggagtgtgcagcagt

SEQ ID NO: 434847 - DNA, 520 bp, Homo sapiens
ttaaaaagttgaaaaatagacaacaaaaaatgaaagaaagtatcaggaggaaaaatatgaggctatatccgcagtacttcctctatttaacatgctgtcaaggtggtaaataggcaaacataaagcttttctaagaaatacatgtccagaaactaaacaagaactttggtgtatcagcttatttcacccagaactacagtataagcatcagtttcaaagttatgagatgtagcagyagatatttctgatatgtttatcctgatctttagacagtgttttcataccatgtaagtagccaaaagatcatcaccttttgtttcttgtgtgactaattgacatgcttttgagcaacagaagttcactcaaatcacaactgataagaaattgtgtcgagtgatttgttgcatttccactggtattactcagctgatggtgtcataacaaaaacatataccctttactgaattaaatcttccaagttcaatgttttggaagttttacattgtctaaagattttaga

SEQ ID NO: 434848 - DNA, 520 bp, Homo sapiens
ttaaaaagttgaaaaatagacaacaaaaaatgaaagaaagtatcaggaggaaaaatatgaggctatatccgcagtacttcctctatttaacatgctgtcaaggtggtaaataggcaaacataaagcttttctaagaaatacatgtccagaaactaaacaagaactttggtgtatcagcttatttcacccagaactacagtataagcatcagtttcaaagttatgagatgtagcagtagatatttctgatatgtttatcctgatctttagacartgttttcataccatgtaagtagccaaaagatcatcaccttttgtttcttgtgtgactaattgacatgcttttgagcaacagaagttcactcaaatcacaactgataagaaattgtgtcgagtgatttgttgcatttccactggtattactcagctgatggtgtcataacaaaaacatataccctttactgaattaaatcttccaagttcaatgttttggaagttttacattgtctaaagattttaga

SEQ ID NO: 434849 - DNA, 457 bp, Homo sapiens
gcatgaagcccaaagaggctaattagcttgcctgggatcatcctctcttttttcttttttctgagatgggtctcactctgttgctcaagctggagtgtagtggcgtgatcatagcccactgtagmcttcacctctcagtctcaagcgatcctcctacctcagcctcttgagtagctgggaccataggcatgccaccatgcccaagtagagatgggggtctccctatgttgcccaggctggtcccgaactcctaggctcaagcaatgcccccacctcagcctcccgaagtgctgggagattacaggagtgagccaccatgcctggcccatcctcttaataaatggtagggctgagatttgaacctaggggcctgactcaggagtgagtactgcttaccaggaagggaatgtggtcagcatgacaacaaaggcatctctgtcctccttaaatgcagcac

SEQ ID NO: 434850 - DNA, 586 bp, Homo sapiens
attttaaaatggggaaaagaatttcttgggtacctattcttacctgtggaatggaaacataaatatttgtggaaccgaaacacactaatgcataataaagctttcagttgcaaatgcaatggagagtggtcataaatgaatagtaattacaagattagcatgctgtgggagtcatattttaggccaactcataattttgaaatagagtttggaaaagcgtttcacccaggttatgcaagattcatggctataatctggtggcaggcactagcttagggaagccgggcstgcattcaagttctggttctgcatcttagccatgtgactttgggccattcccttaactttcatgggtctacatttactcatatgtggaatgggaacataccacccaccatggtggcatgagagctaaaagaggtgatggatatagttcatacagcacagggtagggagaggggaagaactgtccccacgtgaccccactctcctgtggcttgcactccagccctggcagtgtgagcgcagaggtcatgccagataaatgtctgctgagtgctggctgagggacactcactcagaagcc

SEQ ID NO: 434851 - DNA, 505 bp, Homo sapiens
attgaggaaagctgtttcaaaaatgatatatataaagtaaaaattacatgttcaggaaaaaaatgaagctgaaatacaatgtgaagaatttatcagatctgagatattgatcctgataacacacattttgggaaaatattttccaaattatcttttggcatatctagatagatagatasatacatacatacatatttggaatctctatctacctatttatctatctatctatctatctatctatctatctatctatctatttacataaagagagggagtggatccaaagagaaatttcaaataaatattcagatgttactgcttttatttatttatttattgctcaagctagatcaaaagtttgaaatttgtttagtattattttgcatgaaaattgttgcagatctaaaattccaacacttctgaataagaattttactttccatgtacttattacaattattttttccacaatacaaatcgattcagttatctctcttgctta

SEQ ID NO: 434852 - DNA, 505 bp, Homo sapiens
attgaggaaagctgtttcaaaaatgatatatataaagtaaaaattacatgttcaggaaaaaaatgaagctgaaatacaatgtgaagaatttatcagatctgagatattgatcctgataacacacattttgggaaaatattttccaaattatcttttggcatatctagatagatagatagatacatacatacatatttggaatctctatctacctayttatctatctatctatctatctatctatctatctatctatctatttacataaagagagggagtggatccaaagagaaatttcaaataaatattcagatgttactgcttttatttatttatttattgctcaagctagatcaaaagtttgaaatttgtttagtattattttgcatgaaaattgttgcagatctaaaattccaacacttctgaataagaattttactttccatgtacttattacaattattttttccacaatacaaatcgattcagttatctctcttgctta

SEQ ID NO: 434853 - DNA, 585 bp, Homo sapiens
tttggctttagttctggtttgcttttttttcacactgtctcatactgtacctaggttggagagcagtagcgtgagtgatctctgctcactgtaacctctgaatcccaggttcaagccatcttcccacctcagccttcggagtagctgggactacaggtgcctgccaccacacccagctaattttgtgtgtttttgcagagatgggatttcctcatgttggccaggctagtctcaaactcgtgagctcaggtgatccacctgcctcggcttcccaatgtgctgggattacaagtgtaagccatcatacctggctgcatttgtgtcttaatagctactctgcagcagttaaatgctaaattgagagaacattgggttccaaatatatcatatttatagttgctgctatgtaatatcgtgatataaaagtgatttttaaatgcacaataacctaccktcattaatattaatacttaaaaaattttaagtaagaagacagattcataagcagtaaataaatttctcaggggaatatggagagtaaatggtaaaccttggatttgaatccaggtaggtttgcttctaaaa

SEQ ID NO: 434854 - DNA, 284 bp, Homo sapiens
tataatatactttgtcttgaagtctattttagttgatattaatatagccattgcaatcttcttatgcttataatttctatgctgtatcttttcccataagtgtattttcagtttctatgtgtctttatgttgacagtgcatttttgtagacaacatatagttagatatttcattttaatctagtctggtaatttctgtttttattggtctgctcattccattaatatttaatgtaatattgatatggkttgatttagtcctataaacttttgttttgtttgttc

SEQ ID NO: 434855 - DNA, 582 bp, Homo sapiens
aataactatattacttcatatcctaaatgaacattcatgatcaaaaaacttctggcaaaattggtaaaataaattaactagttaattattttttaactaagtttgaaagaaaatttcttgggttttttttggtttgtttgttggttggtttttctatctatggatcatgatgtgaatcttttacagagccgctgagtgtttttcccctattctagctatgctgagttttgggctatcttcaataattagtgagtttaacagcaagtagaaaatttagagacttatttcacacaaagatgatgaacatatggaataagctgctaacttagtccattggagcagataataaaatttagtttagcaacayaaaatttgtttctaaaagagggtgaagatagcaggaaagaattagagagaattgatgccagtgtcttagagaatgtcagatactcagataaagaaggttttctaatgctcacatggcctttccgcgcacctctgtcttattattttttatgtccttaggatattttaattttctggaaacgaatataattgtgactagctttgcaaaaattgctg

SEQ ID NO: 434856 - DNA, 582 bp, Homo sapiens
aataactatattacttcatatcctaaatgaacattcatgatcaaaaaacttctggcaaaattggtaaaataaattaactagttaattattttttaactaagtttgaaagaaaatttcttgggttttttttggtttgtttgttggttggtttttctatctatggatcatgatgtgaatcttttacagagccgctgagtgtttttcccctattctagctatgctgagttttgggctatcttcaataattagtgagtttaacagcaagtagaaaatttagagacttatttcacacaaagatgatgaacatatggaataagctgctaacttagtccattggagcagataataaaatttagtttagcaacacaaaatttgtttctaaaagagggtgaagatagcaggaaagaattagagagaattgatgccagtgtcttagagaatgtcagatactcagataaagaaggttttctaatgytcacatggcctttccgcgcacctctgtcttattattttttatgtccttaggatattttaattttctggaaacgaatataattgtgactagctttgcaaaaattgctg

SEQ ID NO: 434857 - DNA, 587 bp, Homo sapiens
tagtgttccaggattaaatctcttcatcttataagctcaacaaaactgaaatattttaaataggatatcattcatgaccatgacaatacaatatcagtaatttaatgcctcaatcatgatgatttaatcttttatgatatgcctttggatgatctasttaagagtgcagattgcaaaatagttatgttttttcataaaataatactgcattgagtcataatatgcctcttttctctgttacctatgcctaagttttgtaacctcaaatagtcattatgtaaagaagccactgttcttaatactgtcttgaaatgtagattcataattacaatttccattgaacaactcacctagatgtagacatagatgagttacaatagacactgtaaacacaatatgtttaaatcttaacttactgactctccactgacaacctcgtccaccttctcactttcctactggttagtggtatccttttcttttttttttaatgacattcactcaacagattcattcaactaatttcatgaagctcatactacatgccaaaattgtactggatgctggagatactaaaacgatcagga

SEQ ID NO: 434858 - DNA, 407 bp, Homo sapiens
tgatcatggtggataaactttttgatttgctgctggattttgtttgccagatgtttttatgaggatttttgcatcaatcttcaataaggatattggcctgaaattttctttttttgttgttgtgtctctgccagattttggtatcaggatgatgctggcctcataaaataagttagggaggagtccccctcctcaattttttgaaatggtttcagtaggaatggtatcatctcttctttawacatctggtagaattcagctttgaatccttccatcagggctttttttttttttttttttttttttttttgattagtaggctatttattactgcttccattttagagctcattactgtctgttgaagggttcaatttcttccaggttcagttttgggagggtgtatg

SEQ ID NO: 434859 - DNA, 587 bp, Homo sapiens
gtatggttttctgtgattttcttggtcttgatttctaattgtattgtgctatagtcttagagtgcttgttatgatattagctcttttcgtttgctgtagattgttttatgtccaattctgtggtcaattttagagtatgtgccatgtggtgatgagaacaatgtatattctgattttgaggtggagagttcygtagatgtttatcaggtttatttaatccagtgctgagttcagttcctgaatatatttattaattttctgccttgatagtctgtctaatattgtcaataaggtttgagtctcccacaattgttgtgtgggaatctaagtccctttgaaagatcctaagaacttgttttattaatctgggtgctcctgtgttgggtgtatatatatttaagaaaataaggtcttgttgaattgaaacctttaccattatgtaatgcccttctttgtcctttctgaccttggttggtttaaagtcttttttgtctgaaattgggattgcaacccctgcctttttctgttttctatttgcttgttagatttttcttcatccctttattttgagcctatggttgtcattt

SEQ ID NO: 434860 - DNA, 587 bp, Homo sapiens
gtatggttttctgtgattttcttggtcttgatttctaattgtattgtgctatagtcttagagtgcttgttatgatattagctcttttcgtttgctgtagattgttttatgtccaattctgtggtcaattttagagtatgtgccatgtggtgatgagaacaatgtatattctgattttgaggtggagagttctgtagatgtttatcaggtttatttaatccagtgctgagttcagttcctgaatatatttattaattttctgccttgatagtctgtctaatattgtcaataaggtttgagtctcccacaattgttgtgtgggaatctaagtccctttgaaagatcctaagaacttgttttattaatctgggtgctcctgtgttgggtgtatatatatttargaaaataaggtcttgttgaattgaaacctttaccattatgtaatgcccttctttgtcctttctgaccttggttggtttaaagtcttttttgtctgaaattgggattgcaacccctgcctttttctgttttctatttgcttgttagatttttcttcatccctttattttgagcctatggttgtcattt

SEQ ID NO: 434861 - DNA, 495 bp, Homo sapiens
cttgcatccgcagcagtggcagggcagggggcatgtgcacacatgcattgctgaggcagggaaggcaaaatcctcccatggacacacatgccagtaaagcaatgtaggtggtgaccatgggcccatgggaaggggagagaagggcagactggtgtgtggtcatcagggccaacccactgcagttctctattggtcatatgtcctccaccagtgcagaagctatgatgcagaccctcagtactcctaatggtatattgcaagcaggcacggcagaggctggggccccagggaaagacaggagatcaagggatgctcaggtcagacsggccccatctgatggacaagaccaccctgctgagctcagctccaatagttcccctaggactaaagtctcttacgagagcaagtcaagcctaggcggataggtgttcctggccatgctcctctatgacactctcacaccaaaccctctggactttacactggctggcatgc

SEQ ID NO: 434862 - DNA, 595 bp, Homo sapiens
caaattagatgtgttttttaatcatcctgtagatctaattgttcaccaaatctggctgatttcctttgtaaaccttgcttaaatttacatgctatcctctacctgtagaaacagcarttgagatcaggaatatagcaaacctcacctggactagtctctgagtgagaatcaaatagttgtcctcaatatcatttttttttctttctccctcagcaacagaaactgaattttagctgggtatgtagccacacaaaataaaatgttcattttctagcttcgctgacagctagatgaagccaaattcttgaagccaaattcttgacaaaaaaagatataattagaaatggtgtaagcaaattttgggacatgtccttaaaggggaggtgacatacttttctcattctttctttctactggctagaatacacatatgatggatggaaatggaacaacaatcttggatcataacataaatgacaagtgttgaggatggtaatctaatgatacagaaaaagtctaagtcttcgttggttgaggaaccactttgataaccctagactaaaaatgtttaaacttctttttgtttcaattactg

SEQ ID NO: 434863 - DNA, 585 bp, Homo sapiens
atcctgttgaaacttaacttagattctgtcactcttgasttcaaaatgtccagcgtcctcccatctcacttagagtaaaagtaaaagtacttgcaaaggccctcaccttaagccttctctaatttaggagtccattatatcttcttcagcttgtttgcctactctcttctaggtgctctttgccatctttctgttctttgaacatgcaagatactctccaactccagggtctttgtactgctagttctttcatctagaatgctctttcttagatatgtttcctgtcatatcacctgttaagcaaggttttccctggctaccttatctgaaattatgatctcccttcccttaaccaactcaagtactccttatctcacttcattatttccagcacatatcactttatcatcccatgtaatttacattgttcatgatctaactctttcaacccttccaaatataagcctcattataaaaacagattttgcctcttttgttctgtgctgcttcttctagaaaaatgtctgccacatagtaagtgctcaataaatattcattactattgactaactttcccatatttat

SEQ ID NO: 434864 - DNA, 594 bp, Homo sapiens
gtatttttaaagttttagaagataaagtttgaaataaatgtaataaaaaataaaaataaaccagaaacatcatatgtggggaaaatttaagactaaaggtataccagtaacaagtcataatttttcattgaaatagtgattaattatcaataaggagttcaatgtttcagactaaagctgggaataaaataacaatttcttaatgagtaagactcaaaataattcagtttagaaataatgatggcaatattgcctgtttcttgggatccatgtacatgccaatggcattttactgagtctttcatgttcatcactttcatagtgcaactatgagacaggtgctgtcatcaccagtgtacrgaagaccgtgagtcttgggaaatttaagtgacttgtaaggtctaacaagtggttggtgtttggttggaaatcaggaaaacgtgattacttttagttactgcacttcaccttttcaggtcaaataactgaaccagtcataggtggttaacataggtaggttaggatgcttggacaagctaccaagccagatcaaattttttatacattatttatatgaggtaaataatatgtgca

SEQ ID NO: 434865 - DNA, 594 bp, Homo sapiens
gtatttttaaagttttagaagataaagtttgaaataaatgtaataaaaaataaaaataaaccagaaacatcatatgtggggaaaatttaagactaaaggtataccagtaacaagtcataatttttcattgaaatagtgattaattatcaataaggagttcaatgtttcagactaaagctgggaataaaataacaatttcttaatgagtaagactcaaaataattcagtttagaaataatgatggcaatattgcctgtttcttgggatccatgtacatgccaatggcattttactgagtctttcatgttcatcactttcatagtgcaactatgagacaggtgctgtcatcaccagtgtacagaagaccgtgagtcttgggaaatttaagtgacttgtaaggtctaacaagtggttggtgtttggttggaaatcaggaaaacgtgattacttttagttactgcacttcaccttttcaggtcaaataactgaaccagtcataggtggttaacrtaggtaggttaggatgcttggacaagctaccaagccagatcaaattttttatacattatttatatgaggtaaataatatgtgca

SEQ ID NO: 434866 - DNA, 480 bp, Homo sapiens
gtgctgtcatcaccagtgtacagaagaccgtgagtcttgggaaatttaagtgacttgtaaggtctaacaagtggttggtgtttggttggaaatcaggaaaacgtgattacttttagttactgcacttcaccttttcaggtcaaataactgaaccagtcataggtggttaacataggtaggttaggatgcttggacaagctaccaagccagatcaaattttttatacattatttatatgaggtaaataatatgtgcatatgtgcatagtctctctctttgaaatgcctatatgctctctaaagacatattttataattaaaagtaggctgtcttatcttaggccaaatatagggatamaacaataattactaattaatataattttctaatagaattttttacgttgtttgcccatgagttgtgtgatatgtgtttgcaagttttgcctggatataaaagcatatgagtggagaagtggta

SEQ ID NO: 434867 - DNA, 480 bp, Homo sapiens
gtgctgtcatcaccagtgtacagaagaccgtgagtcttgggaaatttaagtgacttgtaaggtctaacaagtggttggtgtttggttggaaatcaggaaaacgtgattacttttagttactgcacttcaccttttcaggtcaaataactgaaccagtcataggtggttaacataggtaggttaggatgcttggacaagctaccaagccagatcaaattttttatacattatttatatgaggtaaataatatgtgcatatgtgcatagtctctctctttgaaatgcctatatgctctctaaagacatattttataattaaaagtaggctgtcttatcttaggccaaatatagggataaaacaataattactaattaatataattttctaatagaattttttacgttgyttgcccatgagttgtgtgatatgtgtttgcaagttttgcctggatataaaagcatatgagtggagaagtggta

SEQ ID NO: 434868 - DNA, 522 bp, Homo sapiens
aacaaaacaaatacaacatgggcataagcaggaagaattaaaagtcttttcatyttttccttttctctcctcatactactattaagcagtgagtttctgttcaaattcaacactctttcaaaaaacaaatggtgtatttcaggtttgctctttattcttcttttttcattaaaatagcacacattcattgaatgtctttttttttttttttcaaacttcctggaatcaaggccaagggttgacatttacagcgataagtgatccaagtgctacattagcatctatttattaaagatgatctttcctgtacagtacagctaggacatttggcctaatttactatactaacatttccaatttggctttgagtagggagttgtgccaacagagctctgtcctatggtgaaatagtgcctaatcagtatttatgaatagggttttagaagtcactaaagagcacaggaagagattttaccttcttaaagcacaaataatgctgagctctgggaatctgtatagcac

SEQ ID NO: 434869 - DNA, 645 bp, Homo sapiens
tgtttttatttggcatgctcccaatttgatcaatgtcactgagattatataaacgktaactgtttcagttaacattttgttttttattatctgatagagatatgcaaattattacagattttagtcctttacgacctccagcaactccttgtgctgactgtgattcagtttctttctaaaatttgttgctgaaggtatttttaacatgagaggaggactcattcttaaatatagggcagttctttacagaactttctctgttatgcaaacgcttctgtctcagaaaggtagaacctttcaactgggcatgatttgcagctgtaaactcttgctaagtaatttcttatgatttcaaattctgggtgatttgttattaatttgcagatagagtctcagggaactcttctggaatacaaaagttactttgacttatgctttcagcacagcattgaacacccaatgcctggagaggttttaccttgagatagcatgacagtgctttccatgtaagacagaaaacctattgatgacttagagtaagtgcgtgtactgtttttcctgggcataaagggagggtatgttgttcaaatcagaacctatgttttcatttctacaactgttacagccaaaatattaaacttattt

SEQ ID NO: 434870 - DNA, 629 bp, Homo sapiens
aagtaatttcttatgatttcaaattctgggtgatttgttattaatttgcagatagagtctcagggaactcttctggaatacaaaagttactttgacttatgctttcagcacagcattgaacacccaatgcctggagaggttttaccttgagatagcatgacagtgctttccatgtaagacagaaaacctattgatgacttagagtaagtgcgtgtactgtttttcctgggcataaagggagggtatgttgttcaaatcagaacctatgttttcatttctacaactgttacagccaaaatattaaacttattttacctaatcgccatccttttattggcatatgcaatgcaggagattcagtgacatctaggctaacaaactgtcctttgtggaatccctttatgctgctcttggtgtggtaggcctgaaaatggtcaccaaagatatccamatcctagaccctgtaaatatatcactttacatggcaaaagcagccttgtagacgtgatttaaattaaagatcttgaattgaggagattattctagattagttgggtgggcctaatgtaatcacatgggtccttgtaagagggtggaaggagaaacaaaagaggaaaaggcaatatgac

SEQ ID NO: 434871 - DNA, 579 bp, Homo sapiens
tgatagggtcttaataatgtgcgagaggaaggaagtcagtggagaatattgatagggctttaggacctgagttggatgatttcaaggtgtgtactgcaaaaggggagttagctgagattgggaagtgtctatgacataatagctttaatagcttgtattygtggacacaagaaagtaaagatcttgaagtcacttttagcagtgagctcttaattttgataaataagatcttgtatttcattaacaatcacatttctcaggcacacgtattttctgggacaagtaacaaagtgacttttgctttcctgtattatttaacttaggaacaggaaagttcaggcataactcagagatattgtgagttcagttcagactgccatgataaagcaagtcacactaactttttgttttttcagtgcatataaaaatgatttttacactatactgtagtatattatgtatgcaataacattatgtctaaaaacaatgtacagatcttaattttaaactactttgttgctggaaaattctaatgatcatttgagtcttcaataagtcataatcttctagctggtggaa

SEQ ID NO: 434872 - DNA, 453 bp, Homo sapiens
aatcctgtttagaaaagaatcttgaaaatgatgtctcagtttctaacagaaaggtaaaaaattttataagagtgatgaacactgaaaagataatgtctgaaaacagttttctccttatgttaggtttggaaaatgtggtcttgaaatttggtgaaaatacaactcacagagaattctaaaagactayccctcagactgattggtctgcaatttgggatttatgaaaaatgtttgctctttttaaagatagaggagaattatagattttggctaatcagagagaactttcctattaagttaatcactacaaaccctgggccctaagacacagaagagatttaaattctgagagtaagagctctcttggtacccaattcaattttatgggaataatcagatgattaagagaaaaaagtagtgactcaagaggtctttgggattctcctgcaaatt

SEQ ID NO: 434873 - DNA, 529 bp, Homo sapiens
tcaatggggactcattcaatatgggatatagggtctaactgagcttatatctactctggggaagtagacacctgataactagtttatgatttaggctatagtgtgatatgtgtggaaattcaatggggactcattcattstgggatgtagggtctaacttcagcatagaaggtagaaatagcccagttgcagtcttacgtcctgccccacaacaaattcagagcagccagattgtgtctcttgcactagaacagattttttttttcagttaagaagctgacaaagtaattattttgcttgtagggatcatgttgtctaaaaaataatatttttaaataccaaaatcaattttatcttggtaagaggctcactcagtaagaggcacatgggaaaactgaaacccttaaaagtgattcaggcaggtccattgactcaagatctctctaggcacatgcctattgcccattgaggtgtgaattacctccatgggttaaattgttgatgtagtttctgttaaatatagaatatg

SEQ ID NO: 434874 - DNA, 529 bp, Homo sapiens
tcaatggggactcattcaatatgggatatagggtctaactgagcttatatctactctggggaagtagacacctgataactagtttatgatttaggctatagtgtgatatgtgtggaaattcaatggggactcattcattctgggatgtagggtctaacttcagcatagaaggtagaaatagcccagttgcagtcttacgtcctgccccacaacaaattcagagcagccagattgtgtctcttgcactagaacagattttttttttcagttaagaagctgacraagtaattattttgcttgtagggatcatgttgtctaaaaaataatatttttaaataccaaaatcaattttatcttggtaagaggctcactcagtaagaggcacatgggaaaactgaaacccttaaaagtgattcaggcaggtccattgactcaagatctctctaggcacatgcctattgcccattgaggtgtgaattacctccatgggttaaattgttgatgtagtttctgttaaatatagaatatg

SEQ ID NO: 434875 - DNA, 542 bp, Homo sapiens
gcaccttggaatgtggtctccagtgaatctcctcctggttccatgtgtgagtcctgggagcagtttgtttccctccttactgtatcttctccttttcctgtactccctgcttttcttgctcttttctcttgatatatagagacattttcaacagagttctttgccaggtaggacagactttcctacactcttgcttcccacacactcagctctaacccactttgttaaaatacaaacttttycatgtttctaagttgtcacaaaaccaccagcatgagggacactaacacacacacaaggctgagaggagtcatgtgggtcatgtgaggaataggccgtgcatcagctttggtctgtcgtctcccaacaatgcatcttgatgagataagtatatgaagctctgattaggttcaatattttagtcaaatgagctgtttacctccactccccaatgtgtcagtgtagacgcaagatgacttggatgaatatgttagaaactttgagtttgcaggggtgctttcttcctgagaatggcaaattag

SEQ ID NO: 434876 - DNA, 571 bp, Homo sapiens
tggaaagtttatgggattatcaattctcttgaagtaataaaaatataactcttcatagctgttaattgagctgaactgagaatgctaggttcaacatatattttggtatcactttaaaataaaaatattatgactttctatataataacaaataaaaatcctgtctcctttggcactattacatctttgacagaaaagctgaaaatagttgattaatatttggtttgtaattctgatggtatacctaaaaagtgcaggataagtcaagataatctttaaaggaatcatggggtatttatcgaaaagaaccagttaataatgttacaagatgcccattaggcacaggcatgtgaattaggttctctgggaagttaagaaataggatattaaaaaaaaaaaccacgatattcaatccctatcttcaaggtactaacttttaacttgaagagcctatgcaacggaaattccagtgtcagcatcatatgacaaaayaaaaaagaagatgacccccaaacaatcttagcacatatgtattgttgactttggctgggaaggacaggcagaaggagaa

SEQ ID NO: 434877 - DNA, 598 bp, Homo sapiens
gtatatgtaaagtattgtgtgtaaatgatatatggtattgtatgtaaagcacttaggatggtcctaggcaagagttagctattattaacattttagaattatagaaatgtaattatatataataagcattacaagtgaataatttaaaaatttgcttcctaaatataagttaaatgtaatttcacataaagggtagtaggtgagataaaaaaatgtaaaaaccttctaaccacaaaagattgttcttcattatttaaatggtttcacacttccttgtggtcaatggaattatatccactcatttttgtgtcaccgacttgacctgagcatttattaaatagaagatgttcaataaatgttgacctgaaataatctgaattctaaccagctgctattcaaaggctacatttattgagatccaaggatgccccaggcactggggatacaaagataaataaaacgtggattctgcattcaagggaagcacaccctagagtgggaggcagacatgtaaagaaacaactgcatccccagggaagtggcacaagcgagaaatgtgtasagggctgggggcactgagtgggcagagaccctgggg

SEQ ID NO: 434878 - DNA, 610 bp, Homo sapiens
gcagtttaccaactgttctatagaatatttttgcaccctgtagaattgatctatcccaaggcatawtcaacgtgatatacacagcctttcttttcttttacaccaacggaggattttaggctggctttaaagttctaatgaatgctcctgggtacattttgttttttccttcatgtcagaaagatggtattttatttatccctaggtagtacatgttagatcatcatactgtcagagacctctgtgaagtcaatcccagatttattgcttgttcccatttccttcaagcacctacaacatttgggctgaaacttcgtcatgattaaagaagcaaagattgtatcaccttatttatcaggaaagaaaagaaagcagttctgtgtctgtgggctctaccattcctaggttcttcctatcaagcaaatctgctggcatttaatgctatggcctcagtttaagttgacatacatattagacatttttatgtggataaaaccaaagaagagggggatctgtatacagtgatattttgatcatcacccatgaaacaaaaaaagaatattttagatataatccaaatttttgaaaagtggccttaaataacttacat

SEQ ID NO: 434879 - DNA, 634 bp, Homo sapiens
ttgtgctctttattttacatttttaggttgaaacttaagttgttgatttgagatmtttcttctttctgacataggtgcttaaaacagtaacttctctctgatagttgcattcactaattatacattatagtaagcattatgcaacccataaattttgaaaaaaattgttttcattaattcaatgtatttttgaatttttttcttgtgatttattctttgatctattagaggcttattgtttattttcaaatattctattgtgaatctaatttaatttcaaccaagatttgtgaacatactttttatgattttgatatttgtaaatgtattgagatttgttttgtggcctagcatatggtttcatatggtttatcctggaaaatcatctttgtgtgcttggaaagaatttgccttctgcagtcacaagacggaatattctataaatgttagttaggtcaatttgattaatgatgttgtgcaagtcttttatgtccttgttaaatttctgtctagctgttctttccattttttgagaatgggatattatttttgtctatttctcttttcagttctgctcatttttttacttaacgtattttgaatctttgttgttagtcgtgtatatatttataat

SEQ ID NO: 434880 - DNA, 483 bp, Homo sapiens
gttttttctttctgttcttcaaatgggatacattctattgatatacctttaaattcactgtatctttctgctgctatctcacatctgcatttgaaccccctctggtgaatttgccatttcagttaataatgtgtttttcaatttcataatatccattttattcatatttgtatatgtgtgtgtgcatgtgtgtagatactatatattgcatgaaacaatatacaagattagttgttaattgaaaaaaggctaaaactatgtrtagaagatgttttactttgtgtaaaaataaggtatttttattattatttatctatacttgtgttttcatagaatgtttttggaataacaatagtttttctggaaggggcaagagaatttgggatattatctggagaaagttacattctattgtaagctcatttttactggttattttttaaaaacatatgcaaaattttcttatttggtggtaaaaactac

SEQ ID NO: 434881 - DNA, 512 bp, Homo sapiens
gaccatcctggctaacacagtgaaaccccgactctactaaaaatacaaaaaattcgccaggcatggtggcgggcacctgtagtcccagctactcaggaggccgaggcaggagaatggcttgaacccaggaggcggagcttgcagtgagccgagatagcaccactgcacttcakcctgggcgacagagcaagactccatctcaaaaaaaaaaaacaatgtacagaaacatcattttacagatgaggagactgagcccccaaaatggtaaatgacttgagcaagtgcacatggtttgcagataaattaggtatagattctttacttgtgaaataattatttgccctacaaaatgctacagtctggtttttattttaattgcttacaatacaaatttcttatctctattaaatttgtaagactctgatttgtacacaatttaggaaagcatttattgcacctgtatgtaatttcagtctagacataacaattatgatactagaagtttatcatct

SEQ ID NO: 434882 - DNA, 337 bp, Homo sapiens
ccagcctgtctctccttttcctcaaactcagtctaatggcagtctccagcttgcttcccacmgaagaattgttcttcctctgatttccctcccttttggaagtcaagaaacccagccctcactggggcccaataaaaagggaggaacatcacttttccctcaccctcagtctcaggcccttctttcagacaatggcgtaataatctgcacagacatgagtcccctaaagaaaggcaaaggttcatattaatatagagagaaatttagctcccatattgtccaaagttttccattctgaaataaaatttttgactttacctttgcaaaagacaaatga

SEQ ID NO: 434883 - DNA, 453 bp, Homo sapiens
aaaggctgagaattgaaaatgtgaaaataatgcagccccagtgtaaaaaaaaatccagatttttcaattgccattctgcgagtaaaacctaggaattaacctgtggcctttttgttttattgtttcataaatgagtaatagctagagggaggtatcccttagaccatttcaggcccaattgctacagagaagaaaatgatactatgaagtcacataaggatgamacattttagaagtcttaagatgtgactctttttttttttttaaacacgctgggcatgtgagctaccttctggatggtatcttggtccaagtttccagaactactgccctttggtgcctgagtctcaatgatggggagaacagggcactataaattcagaggctctggatttagaattttcttggaacaattcggtatacctgttatttgtgaatgcatttcacatcatt

SEQ ID NO: 434884 - DNA, 637 bp, Homo sapiens
gggcctgttgtggggtggggggaagggggaggatagcattaggagatatacctaatgtaaatgacgagttaatgagtgcagcacaacaacatggcacatgtatacatatgtaacaaacctgtacgttgtgcacatgtaccccaaaacttaaagtataaaaaaaaagaattaaaatatgtgataacagtaacgcaaacagtgggagagatttaagtgaaattaaaatattctgagattcttagtacatgctgtctggaaaatggtaaaagtactcatttatattgggcttttgtaagttaagcatgcattatatgttctctacaattttaataacggaataataaaatagggatgggaaacaaaatataataataatacttgattaatccaaagagtagcaaaaaaaggagagaaaaataatatagtctcagtaagagaaaacagatgatggatttaaaccccaaatatacccaaaattacatcaaatgcaaattgattaaatctaattaamtgattataaacaaaacagtgcaatcagtacccaatcacctgcagcttacaagagatacattttgaatataagagcttgaaaatgttgcaaggatagaaaattctagataaacattaaccaaaagaa

SEQ ID NO: 434885 - DNA, 463 bp, Homo sapiens
cctgatttatgacaaaggtgaaactgcagtgcagtgaggaaataataatcttttcaataaatagtagatcacttggatattgatatgcgggaagaaaagaatttsacccctatcttacgtcataaacaaaggtcaattgtaggtggattataaagctaaatgtaaaaggttaataattttaaaaaagcttctataacacaggtgaatatctttatgacattggggtagacaaaaatttcttaaacaagactaaataagcattaactatacagaaaaagtctgataaattggactacgttaaaactaagaactttatattaacaaagtcaccattaagagaaagaaaaggcaagttagactgggagaagatatctgcagtgtttatgtccaatataatatctatatccagaatatataaagaactcctacaaatcaattacagaatatattcaaagagccaatt

SEQ ID NO: 434886 - DNA, 604 bp, Homo sapiens
ctccaaacccactcttgtattttcaggctttgtgacacttgagaggatattttgcaaaccacgctcctgatttgccagttggctttccggttctgccaaaaaggggagctagagggaagtgggaagcctgtaggaaaaagaaggaagaggtttgcttcttcctttttacttcctgtgcacttcctgtttcctgattttttgggattcgtcccagaggttgcattgccttctcttcacagcaggtgaattcaatggcgcagtttttccaacactcacataacagcctcaacactctctgctccaagtaccagctgagcagctccctcctcaagtttccatgttttaataattctagccttttctctttgaccctccaggcctargagtggcagctgcttcctgcaattctacctccctgggacctgaaagttgttttacactttagataattaacaactttctacctagttaacaattcatgttaagcatgctctgttgaagatgtgagttctgcctccagaatgggtcttgactgacacaacctccaagagttatatactctgtccttgctgcctgtgtgatgacatacaatttgttgattatt

SEQ ID NO: 434887 - DNA, 512 bp, Homo sapiens
ggaatctggatttacatatgaaatctggtaagttttaaatgttgactacaatttaaaaaattgaacactgtggcttgtttcactgtggatgaaacaaatacttcattagccccaactataagtttcacctatccatctaaacattcattttactctgcttcccattcaaataccttgttacttcactcataaacttcccaaacatctaagcctgtaactattggcttcttttccacatccacggttctctccttatccaacttcaatatgtttcccactcttctgaaagtgtattcttgaaggtcactaggaagtttctaactagttgatatggtctggacatttgtcatccaaatctcctgttgaaatgtgacctagcatgttggaggggatcctagtgggaggtgctggatcacagggacagatcycttatgaatggcttagtgccatccctttggtattgagtgagttcttgcactgagttcatgtgagatctggtcatttaagattgt

SEQ ID NO: 434888 - DNA, 602 bp, Homo sapiens
aaatttaaataattattttatttatcttttgttcatcagagctctacgtaactccaaaagcagatgcaaaatctaagtgaaatgaaatcagcattgctgacttttattatagccatgacatacaggaaaaattgctaatcccttatgaaaatattcaatatctctatgctcttaggggtgcctgaggcaactcctagtgcagatagcatgtggagtctcatggtgactaactgtaattgaattcaataaaaaactccattatcataatagtctagggtgtcaataaaattgatacttctataataggaaaaatataaaatatacccaagggcatacaatgggaagcttttaattattattattgatccagagaattattttyccctgattctggcattactctgaaatccagtatttctgtcctcacttgtttatctccctttaaaaagctaaggtcaaaaagtctaaagaaaattcatgggcaggccaaactaagtgctatttctgacaaataacatttatttggtgcttatttttagtcacacttatcttgttgatttatgagacagctagcaagaacctttgcaaaagtgttttgagtt

SEQ ID NO: 434889 - DNA, 592 bp, Homo sapiens
tataaatagacttaataaaaaacctacctcatatggttgtggggaggaagaaataaagagtctgcattaacaataacagctaacactgagagaaagagagagagggagaatgaatctatgtgtactcaattcattatatcctcacaacaatcttagacactaggtactattcccatgcccatactacagatgaggaaactcaggaacagagaaattgagtgacttccccaaagtggtatagataataagyggccaagccagattctgacccaaggcaatctagcaccacctgcaatactaggctcctactgcaaaactatgctcaaaattctctatatggattagcagacaaaatgaggacaaatagcagatgcaagaaaaatgcaagggccagaatctctaaggatttcaaaggaggtccctgatccctcaggtgccaggagtaagatttagacctagatccacattttatcatattccgtccttttctttgcatactctagctggatgggccttgaatgaggacacaaaaggcaccgtttgaagtccccagaacactgctggctcctccaactcagcaggcagggaggac

SEQ ID NO: 434890 - DNA, 564 bp, Homo sapiens
tcaactaatacaaatctgttgtttttctaatttgctcttccaaacatgtcttttcaagttcttttgagttgcagttgttttgaagtgggggagaagaaaagttttctctcttttcagggacaaaaactcaaataaaagaggtacccccattcagctaatcatggcagctttaacaatatatgggcaaaatatacaacttacaaaattagaggctttatgaagagcctccctttataaccaagttattttagaacagagaaagataaataatctacttatcaggctaggttttccaggctttcccattccaagtcactctatgttttctttccttctttttctatttctcccttttgcctttcctaatccatatcgcaagataccatgtgcaacacgctcacccctatttaactgcacctgttcacagtattctacagtcaaaagctctacttttgcagcaactttttattgatgaatgcattttatcctgattacatgacaatgatgatggcttattcattrtttcattcagcatacttattgtgggcttactatgtgccagga

SEQ ID NO: 434891 - DNA, 623 bp, Homo sapiens
ttgctttctgtttgttagttttcctcctaacagacaggcccctcttctgtaggtctgctggagtttgctgggggtccaatccagaacctgtttgcctgcaccagcagaggctgcagaacagcaaagattgatgcctgctccttctggaagcttcatcccagaggggcacctgccagatgccagccagagttctcctgtatgagttgtctgttgacccctgctgggagctgtctccmcttcagaaggcatgagggtcagcgacccacttgaggaggcagtctgtcccttagcagagctcgagtgctgtgctgggagatctgctgctctcttcagagccggcaggcagggacgtttaagtctgctgaagctacgcccacagccaccccttcccccaggtgctctgccccagggagatgggagttttatctataagtccctgactgaggctgctacctttctttcagtgatgccctgcccagagaggagtaatatagagaggcagtctggctacagtgactttgcagtgctgtggtgggctccacccagttagaacttcccagtgactttgtttccactgtgagggaaaaaacgcctactgaagccttagtcacggcaggcacccc

SEQ ID NO: 434892 - DNA, 623 bp, Homo sapiens
ttgctttctgtttgttagttttcctcctaacagacaggcccctcttctgtaggtctgctggagtttgctgggggtccaatccagaacctgtttgcctgcaccagcagaggctgcagaacagcaaagattgatgcctgctccttctggaagcttcatcccagaggggcacctgccagatgccagccagagttctcctgtatgagttgtctgttgacccctgctgggagctgtctccccttcagaaggcatgagggtcagcgacccacttgaggaggcagtctgtcccttagcagagctcgagtgctgtgctgggagatctgctgctctcttcagagccggcaggcagggacgtttaagtctgctgaagctacgcccacagccaccccttcccccaggtgctctgccccagggagatgggagttttatctataagyccctgactgaggctgctacctttctttcagtgatgccctgcccagagaggagtaatatagagaggcagtctggctacagtgactttgcagtgctgtggtgggctccacccagttagaacttcccagtgactttgtttccactgtgagggaaaaaacgcctactgaagccttagtcacggcaggcacccc

SEQ ID NO: 434893 - DNA, 345 bp, Homo sapiens
accaattgtgcatttttgtataaagcatgatcatgtggttaagttctctttgccctcggaatgtgcacattaatcagctttgtgcaattactgtccatgctagacaaggacagagtagatcattactgctattgttattttttaccgtatatatggagcttcatacaattacaaagtgctgttcaagatggatgcaaatgttcctagggcayggaatgggaggagttacatatattgggggatagaaggtggatgggcaagtttggtccataaccaagatgtataaagctaagggcccagtacagacagcaaaacaggcaaagttcacatcttggagcaaaggcc

SEQ ID NO: 434894 - DNA, 603 bp, Homo sapiens
tatctatggagcacatttcttaaaagctcacagaatggaggaaaatatttgcaaaccatatatctgataaggggcttgtaaccagaatagataaggaactctgaaactcaataataaggcaaatagcccaatttaaaaatggacaaaggacttgagtagacacttctccaaagaagctatacaaatggccaataagtccaacgttatcattaatcaggaaaatgcaaaccaaaatcatgaggtatcactttayaatcacaaagatgggtataataaaaaagctaataacaaatgtcggcaaagatgtggagaaatcggaactctcatacacacaggaaagcaaaatggtccaggggctttggaaaacagttggcagttcctcaaaatattaaacatagagaacacatgacccagcaattctactcataagcatatgccaaagagaactaaaaacatgtattcacacaaacacttgtaagtaaatttcacttcagcattattcctaatacccaaaatgtgaaaacaatctaaattcattcaccaactgatgaaatgtggtgtacctatatagtgcaatattatttggacataaaaaggttacaa

SEQ ID NO: 434895 - DNA, 568 bp, Homo sapiens
tcccacagcatgcttaagctaaaattattgcttggtcaagtcaattaaatcatttgagaaaaactactacatgtaagtcagttaagaaaaagagttgggtgatatgggcatggctagactctggtcttctgtttagggtgaatgtattagattgctgctttggcctggttagaatattccaygttgtaaatattacagctcctaaggatagaaatgaccagctaaaaatctgttaggtcactgagggtgaatctcccacattccagatgtggcaatagggttccttggaggtacagaatcccccttaggttaaatggccaaggagcacatcccagtccctgaaaacttcatttcccaaatcttcggtcatgaggactcctcttcagaataattctcccattaaaacaaaaacaaaaacaaaacctgcaaaaactgcctggctccatttaggtgtggaaatggggagagagaggagagctaaagttagtgattctcagcatatatttgtaagagatctttgtgtgagtcatcacagctagctttaaaattgacacaaaggacacaggaa

SEQ ID NO: 434896 - DNA, 636 bp, Homo sapiens
ctttcttctttaaacttatttttaaagttggaaaacagagtcactgagtaatactcataccttagaacaaaatctctgttgtgtaggcagaaaagcaaaatagaagcgatartgtgggcaagtggaaaataacacagtgaggagaaatgatacaaactagactcagaaccagagctctaaacgcaagttgccaacccaaaaggacttcaggatcccctatgaaccattatttcaaaaaacaagggcagttggctagccaatcaagcataaatctggtagtcatccacacatcatttggagaggcctggagacaatggaggacagttttctgtgcccctgaacaataccaaagtggctgcccttccaagatgtcagtaggtgtctcagcacaaaaagtctggggaaggtcaggataagagcaatacagaaaacggctccagagactgaggtcagtcagttccacgtttaggacgaggattccatatggctgttaggaatgtgatgtggctagtacactggaggaactgaatgcttaattttatttcattttcactaacataaattcaaagagccatgagtctagtaatgaccacactcgagaactctattccagaactttagtgaaatgatctttgc

SEQ ID NO: 434897 - DNA, 521 bp, Homo sapiens
ctcatggctacaaaatggtttattcttttgcattacatctgtgttccaggcaggaagaagggaaagagtgaagggtgaaaggcagaaggcctccttgctaggctttgtctttttatttaggaagggattctgtcaatgcttcacttacatttcactgatcacgacttggtcacaagacatagctgcaagggagtgtaaacagtatttcaactgagcacatagtcatcttttagaaaatcagggctctcttagtaagggagaagggggagataaatgttgtgggagtgactactcctacacagttccaaagcrtctcaatgagatccatattcgactcaagatttgacagttgaccaagaacttggcaattaattgccacaacagttgagaaggctacaacttccatcctggtagtaatggagaaaagcagggcctgtcatttgtccaaatcacactacgtggaagcagaggaattgaataacaactgtaggtctcccagatccacagaccttattgcctag

SEQ ID NO: 434898 - DNA, 545 bp, Homo sapiens
tttgcctgatgtcctagaacaactctggcttagcttctacagagaatcaacctccccctttttgccagcgtgggaaggggcagtctcctggccataaaggatgggraacggtgtttgcagatataactgcacctttaagattttcagtcaagcttcttattttcagccccttcttgtgcctctgctctattggttttctattgtaggctgtaacaaattaccacaacctttgtgtttccaaataacatacatttattatcttacagttctttaggtcagaggtcttgtatgggcgagttctttcctggagactgtatcatgtttatatagaattggatcttattttttaatctgagattaaatttcacttaataaactagtttattcattttagttgcttgaagtatgttttatctaaaatttgtcatctcatatgatatttatgtttttaatgcttcatcattttctttcatttgttcttttatataataaattacacttgtatttgctgatttgtcaatgttagtagtattgatttgttgcta

SEQ ID NO: 434899 - DNA, 457 bp, Homo sapiens
gtggctcaagaggattcaatgtatttctgactcatctcaataacaaacacttaaatagaaactcatattcttgattttctttttgtagttctaaaacaatttgtgtatatgtggaawgatgtgtgtgtgtgtgtgtgtgtgtgtgtgtgtgtgtgtgtgtgtgttgtatctctaaaagcttctaccagcatcacatatttccttgatgttaatattttcaagatttgattgtctacattcccaaagtatagtgcttgacacaagtgactgtttaggtaccagcaattctgctgtggagtgtgtacaggaatatcagtttctgatccttcttcccataagtttaactctatggtaacaattaccttttataaatttaagaaaaatcactgttgttcaaagtaatgggatttaaaattcctcagaataaactaaaaagaaagaaagaagttgaaaaatc

SEQ ID NO: 434900 - DNA, 555 bp, Homo sapiens
tcaggcattttaaagaaagatgagggtggagaagggagaagattaggaaaacttaagtccttcagaaaagagatgggagaaaagtttttcaaccagactttgcccattgtatgccctcctgagggagtttagtttgaacttcaggttaaaatgcttacttctcttaacctctggttattaaaaaaaaactggacatatagttacacattgaggactactctcccaaaatattggggaaaacatgtagcagaatcttgcaacttctaaactttctgacttcaaaccccaaagtacaagtcttacttttccttcctttctttcctcctctccctggccccaatctgctgaaggtgatgggccaagcccaagggcytcagcagccttataaggcaagtgttctgaaaaaccttcaactcttaattttaacattaaagaaaaagttgtaatcagacttggaggaaacttagcttttttccctccctccttcccccttctgggggtacgaggttgtttttgcatgcttcatttgcttcttatcctgataggctgcattaa

SEQ ID NO: 434901 - DNA, 555 bp, Homo sapiens
tcaggcattttaaagaaagatgagggtggagaagggagaagattaggaaaacttaagtccttcagaaaagagatgggagaaaagtttttcaaccagactttgcccattgtatgccctcctgagggagtttagtttgaacttcaggttaaaatgcttacttctcttaacctctggttattaaaaaaaaactggacatatagttacacattgaggactactctcccaaaatattggggaaaacatgtagcagaatcttgcaacttctaaactttctgacttcaaaccccaaagtacaagtcttacttttccttcctttctttcctcctctccctggccccaatctgctgaaggtgatgggccaagcccaagggcctcagcagcyttataaggcaagtgttctgaaaaaccttcaactcttaattttaacattaaagaaaaagttgtaatcagacttggaggaaacttagcttttttccctccctccttcccccttctgggggtacgaggttgtttttgcatgcttcatttgcttcttatcctgataggctgcattaa

SEQ ID NO: 434902 - DNA, 613 bp, Homo sapiens
tctcctgcactccaaaatgcacgtcccagcccctgacccattagaatgaggttgtccagggatgtacggtgctcttgctccttctggccatctcatctcccctctccttttctgaagctctttcactggtcagcaacccggcccttctttgccattatgagagaaacttctctgctgtttgctgatcgaactgataatttgttttcttgaaaagcgtgttttaattcaagggagttgttgttaaggcaagtccgtctgctgtgagttttatctcctctctgttgcttcctggcagtgccacccagggtcctggcatgcatcttctggaacccaaagggcaaacaacacccttagacttccacacaatccccggcttctcctccacatctttcctcagctatccagctgtgcagagctggcacacrggcatgccctgccttcattcttcccagctcatacctgctctggagagaatacacacatacgtcaatgacaacacataaaatccaatgacagcccaagaactcctaaatcttccaaattgccatctgcacttcctctctctttatatcctggcatgcctgagctgacctgccccccagatccagtccca

SEQ ID NO: 434903 - DNA, 510 bp, Homo sapiens
aaacacttggaagttaaacagcatacttctaaataattcatgggtcaaagaaggagtctcaaagggaattaaaaacacatagaactctaaggtgcagctaaagcagtgctgagaggaaaatttataatactaaatgctaacattagaagaggaaacatctgaaatcaataatcaaagttctcacttcataaaactagaaaaataagaagaaaattatgcccaaagcaagcagaagaaaggaaataaaaataagagcagaaatarattgaaaataggaagataatagagaaaaatcaataaaacaaaaagattgttcttcaaaaaaaaccaataaaatttatacatctctagcaagactgacaaaaataaaaagagagaagacatattaccacaatctcagagttgagacagaggatatcactacaaatcctgcagttgctaaaaatatgatgagcagatgctttgaacaactttacgctcataaattcaacaacttaaaagaaacggacc

SEQ ID NO: 434904 - DNA, 594 bp, Homo sapiens
ttgtgaaaataacaccacctcttttattttaggagttttatcaactagcagactgttcagctggaatcactggcctctcataatgtgaattctggtttctgtggttattagctggtgactttggtcaagctggtttgttcattggtaaaatggaggtagtggtatatattcatgaaaggctagattctaagccagtgctgtcccatgcaaatgtaatggtagccacatacgtaattttaaattttctaatagccacatcaaaaaaaaaaaaaaaaaaaaaaggtaaagggcgaaccaaagcacacgccatgattaattttcataaattgtttcattgaatgcaatagcttccaaataccatcatttcaacatctagtcaatatccagttgttcatgggatactttgtttcattttcacatgaagttttcaagatggggtgtgtgttttgcacttacagcacatctcaatttggattggccacgtggcaaggggctgccctgtgggacaggactgttttcggcctccgtagcattttgagcacgtrgctctgtgctttaggaggatctttgtatctacaccttgtctgtagaggg

SEQ ID NO: 434905 - DNA, 512 bp, Homo sapiens
ggagcctggtcctcccggctgctaacgccccaggcttcgcccctgcccccacctccacctgcagaccgagccctccccatctctccacaccctcaggatttcagacccgccttcctgcctctcctaagtacccatcccaggcgctggccttgtggctcggttcsgctcacgtcccgcccttcctcgttcttcgtgcttcgagttcattagtcgtggctccgccgctaaccccggggagaaagctccccttttactctgggtttccctccctaaacaccaacccggcagtatggagccagcctcctgcttcgctgggtggtgtgattgagagaatgtttttggcaaggcagggagagagggacgagacagagcactcaaaattccaccttcctcaccaagtcaaacctcaccttccgatccctatctcccacccagtgttcaatctccacatcgagcctcgccatcctcctccctaccccacacttactgcccctcctcccattcccgagaga

SEQ ID NO: 434906 - DNA, 501 bp, Homo sapiens
ggactggtcccctgctggggctgggacttcacctgaaactgcactcttctcatttctctctgtcttgctcccccaccatgtcctccctccaatctttcctgggagcacttccttaattactcatgaatccagacctttagatgagatacaatcttttgttttttgagacgaagtctcactttgtcacccaggttggagtgcagtggcacaatctcagctyactgcttgaaccacctcctgggttcaagcaattattttgcctcagcctccctaagtagctaggactacaggcatgcacccccacacctggctaatttttgtatttataatagagacggggtttccccatgtcggctaggctggtcttgaactcctgacctcaaatgatctggctgccttggcctcccaaaatgctgcgattataggtgtgagccaccgtgcaggtgtggtaagataaattttcattttcctctaaaggtccgcttctgacctggacccaag

SEQ ID NO: 434907 - DNA, 544 bp, Homo sapiens
aaattcagcctgaaccatgttgtgtgtaaacttggtaaacaaataggcctgagctgctgtgcgtggtcagcrttggggtggtgtgggcagggtggagagatgttgtatgtgttacatggagagagacatggtgtccaggcttctgtgcaatgatgagaaaaaaaatccactcttaactgggatctcgttcaggaagttactcttttcaactaaaggaaaatgatacaattctcccctctccccaaccaatttgcacaccgagatgaactccagaaacaaatacccacggccaggcatctggccataaaatttctaaaacagaaagaagccatcccatccccttgggtaataggtaattagtagcaggcattttactaaagggatcggagagatgcaaagctttcccagcaaagcgattgatagagaactggcactgacggtggactgggaacaagccataagcaatgacaattaatgttctgcaaatctcagggtcctgcgtaccaagtgaccaaccatctgtatggtcaggagcagaccagga

SEQ ID NO: 434908 - DNA, 544 bp, Homo sapiens
aaattcagcctgaaccatgttgtgtgtaaacttggtaaacaaataggcctgagctgctgtgcgtggtcagcattggggtggtgtgggcagggtggagagatgttgtatgtgttacatggagagagacatggtgtccaggcttctgtgcaatgatgagaaaaaaaatccactcttaactgggatctcgttcaggaagttactcttttcaactaaaggaaaaygatacaattctcccctctccccaaccaatttgcacaccgagatgaactccagaaacaaatacccacggccaggcatctggccataaaatttctaaaacagaaagaagccatcccatccccttgggtaataggtaattagtagcaggcattttactaaagggatcggagagatgcaaagctttcccagcaaagcgattgatagagaactggcactgacggtggactgggaacaagccataagcaatgacaattaatgttctgcaaatctcagggtcctgcgtaccaagtgaccaaccatctgtatggtcaggagcagaccagga

SEQ ID NO: 434909 - DNA, 601 bp, Homo sapiens
ttccctagctcctgcaccaccgtctgtgtgtacgtctgtctgtccctcccagtccttgctcggtcctaggctttcatttgaaggcagctgagggagaaagaaactgcaaacccctttggttctgtttccttgctttcaataatgaatcgagacagcgtgtgtgtggtgagggagtgacgagtttcaacgtgatgaaggagataaaacccgacggtggggtcctgccagtggctccatgcgtcactgaaacattgggtctcaaaacggatagatctccggagacgcagaggttcgcgcggatgtccagaggaggacagcgcccctgcagccacccgcggagcccagggccagggtcaaaaccctgccgcaarggctcggagctccaagcagttatgctgagggcgccggtcccaggccgccttgctatgacacgggtttccagtgaagcccaagcggattccacggccccacatcaccggaggagccaggctgccccgggatggatggggtccgcgcgctccgagaggaatgggctagtcaatgtgcgctgctaggagtgtgtggtaatcaatcgccacccctgccaaaaccaaggaccccc

SEQ ID NO: 434910 - DNA, 571 bp, Homo sapiens
catatgctgttccaatgactgcagctgcaaagcctgagggaccagagcatcagagctgatggatcccttagaggtcatcaccccaatgctcccatttcacaggtgggaaaactgaggccaagcgaggggagggctgacttgcctgtgactgtgcagttaagttagtggtagtttggggtttcacacatcatttggctttgaggccagtgttcttcccacatcaccgccatctcatagccacygtcttcctcctgatatttagtcatccctatctttggaacatcccactgtattggtttcctatcgctgttgtaacaaatgaccaaaaaatatagtggcttaaaagcagcacagacttatcttagagttctgcagctcagatgtctgacatgcatctcacggggctgaagtcaagatgtctacagtgttgctttttcttctggaggccctggggtcaagtccatttccttgccttttctgacttctagaggctgcccatcttcctcagcctgtgactccctttctccatcagtaaggccaaccttggccagttgagtttttctcagatctc

SEQ ID NO: 434911 - DNA, 571 bp, Homo sapiens
catatgctgttccaatgactgcagctgcaaagcctgagggaccagagcatcagagctgatggatcccttagaggtcatcaccccaatgctcccatttcacaggtgggaaaactgaggccaagcgaggggagggctgacttgcctgtgactgtgcagttaagttagtggtagtttggggtttcacacatcatttggctttgaggccagtgttcttcccacatcaccgccatctcatagccaccgtcttcctcctgatatttagtcatccctatctttggaacatcccactgtattggtttcctatcgctgttgtaacamatgaccaaaaaatatagtggcttaaaagcagcacagacttatcttagagttctgcagctcagatgtctgacatgcatctcacggggctgaagtcaagatgtctacagtgttgctttttcttctggaggccctggggtcaagtccatttccttgccttttctgacttctagaggctgcccatcttcctcagcctgtgactccctttctccatcagtaaggccaaccttggccagttgagtttttctcagatctc

SEQ ID NO: 434912 - DNA, 571 bp, Homo sapiens
catatgctgttccaatgactgcagctgcaaagcctgagggaccagagcatcagagctgatggatcccttagaggtcatcaccccaatgctcccatttcacaggtgggaaaactgaggccaagcgaggggagggctgacttgcctgtgactgtgcagttaagttagtggtagtttggggtttcacacatcatttggctttgaggccagtgttcttcccacatcaccgccatctcatagccaccgtcttcctcctgatatttagtcatccctatctttggaacatcccactgtattggtttcctatcgctgttgtaacaaatgaccaaaaaatrtagtggcttaaaagcagcacagacttatcttagagttctgcagctcagatgtctgacatgcatctcacggggctgaagtcaagatgtctacagtgttgctttttcttctggaggccctggggtcaagtccatttccttgccttttctgacttctagaggctgcccatcttcctcagcctgtgactccctttctccatcagtaaggccaaccttggccagttgagtttttctcagatctc

SEQ ID NO: 434913 - DNA, 571 bp, Homo sapiens
catatgctgttccaatgactgcagctgcaaagcctgagggaccagagcatcagagctgatggatcccttagaggtcatcaccccaatgctcccatttcacaggtgggaaaactgaggccaagcgaggggagggctgacttgcctgtgactgtgcagttaagttagtggtagtttggggtttcacacatcatttggctttgaggccagtgttcttcccacatcaccgccatctcatagccaccgtcttcctcctgatatttagtcatccctatctttggaacatcccactgtattggtttcctatcgctgttgtaacaaatgaccaaaaaatatagtggcttaaaagcagcacagacttatcttagagttctgcagctcagatgtctgacatgcatctcacggggctgaagtcaagrtgtctacagtgttgctttttcttctggaggccctggggtcaagtccatttccttgccttttctgacttctagaggctgcccatcttcctcagcctgtgactccctttctccatcagtaaggccaaccttggccagttgagtttttctcagatctc

SEQ ID NO: 434914 - DNA, 602 bp, Homo sapiens
aacaacaacaacagcaaagtacactttagtggtttttagtgtgcttgctgtgttgtgcagccaccaccactatctaattcatcaccctgaaaagaaatcttgtacccgttaagcagtcactgctgattcccccttccttagcctctggcaatctctttcctgcctctgtggatttccctatttgatcctggatacttcatataaatgtcatcatagaatatgtggcccctgtatctagcctctttcacttagcatagtgttttcaaggttcactccttcttaggaaccctccctgcaacctggcttctgtgagctgccccatgacttctttgctaagctygccaaaacatccattatgaagttcccaaactccacagcctttatcaatgcactggcgggagcttcctctgagcatgcttcttccttggcttccaccatgctgtcccttcttgattctccttccatttctatgatcttttcattctgcctctggcccaagtctttctcctcttgtctcctgaaaatgacctgtctcccaaggatcagcccaaggctctctgctgtttcctgtatcccagaggttctaggagtccatgactggg

SEQ ID NO: 434915 - DNA, 581 bp, Homo sapiens
ctgaaagaactaacgcaccccatctgcctctcacccgcaggtaaaagtatggtttcagaaccgaagaacaaagttcaaaaggcagaagctggaggaagaaggctcagattcgcaacaaaagaaaaaagggacgcaccatattaaccggtggagaatcgccaccaagcaggcgagtccggaggaaatagacgtgacctcagatgattaaaaacataaacctaaccccacagaaacggacaacatggagcaaaagagacagggagaggtggagaaggaaaaaaccctacaaaacaaaaacaaaccgcatacacgttcaccgagaaagggagagggaatcggagggagcagcggaatgcggcgaagactctggacagcgagggcacagggtcccaaaccgaggccgcgccaagatggcagaggatggaggctccttcatcaacaagcgaccctcgtctaaagaggcagctgagtgagagacacagagagaaggagaaagagggagggagagagagaaagagagagaaagagagagagagagagagagaaagckgaacgtgcactctgacaaggggagctgtcaa

SEQ ID NO: 434916 - DNA, 562 bp, Homo sapiens
  misc_feature (1)...(562): n = A,T,C or G
atagaagaccaaaccagccacaacaggctattaaaccaaagcttaatccagagtatggctctaactatcttcagttctatgaaggctgagaaaggtgaggaagctacagaagaaaagtttgaagctggaacagcttggttcattaggtttaagaaaagaagctgtctctataacataaaagtgcaagatgaggcagcaaakgctgatatagaagctgcagcaagttatcagaagatttagctcacataattgatgaagatgtctacattaacatcagattttcaatgcagataaaactgcctttttttggaagaaggtgccatctaggacttnnnnnnnnnnnnnnnnnnnnnnnnnnnnnnnnnnnnnnnnnnnnnnnnnnnnnnnnnnnnnnnnnnnnnnnnnnnnnnnnnnnnnnnnnnnnnnnnnnnntttacctacccaaatgctagggaccttaagaattatgctaaatctactctgccagtgatttataaattggacaacaaatcctggatggcagcacattttttaaagcttgatgcacagaatattttaagtc

SEQ ID NO: 434917 - DNA, 550 bp, Homo sapiens
agtccacacctaagtcagcattcagataagaaatcacctaaactgacattgtcataaaattatcatatttctaatctaatcttctaagggcccatttatttttcccaaaagccatttttttttctcccagaagtgccactctgcccctccacaatccttacttaaatggtktatgccccatattctaaccacctcctcagaatcacatttctttgtgaactcccatgcacacatatgtaattaaatatctttttttgttctcttgttaatcagtcttctgaaagtttaatttgcaagcccccaaactgaaataagaaggtagacgaaaagtttctcctcctagaaaaagtgtcaaacgtgaccaagtataacaggctatagaagagacctaaggctaggagagctactctaacttgtcaaaagtcatttagacttacggtctataaattttcctctctatatcataaaataacattgaaaaaatgacatactcattatatattttttagaaatttaatttttttaaaaaattaaatcttcatgcctttaa

SEQ ID NO: 434918 - DNA, 549 bp, Homo sapiens
aacatttcgaagatcaacattttcatatgcaacatacatcaatgccagagttagtgagtgttaattattagttcattctttttcctcttccatacatatttatcatggcctttagggatgcagtcatttttagctatgcagaaaggcagatcactttcttcttgataccaccatcataactgtgaagccctgctatattttcataatacctattcattttttttgttttattacctatttctggtttttcaacttttgttttggaaccagagggtgcatacgcaggttttttaggcaggcatattgtgtggtgctgaagttttgagtacaatttaatctgcccctycaggtggtgaacatgctaccaaataattagtttttttttccaaccattacaccctctctcctctcctccctttcttgtattccccagcgtctattattcccatgtttatgttcatctatgctcaatgttttgctcttacttataagtgaaaacttgtggtattcggttttctgtttctccactaatttgcttaggatactggt

SEQ ID NO: 434919 - DNA, 636 bp, Homo sapiens
ctccacaacctcaccaatatctgttaatgtttgactcttagtatgttttttgttgaacatggttatgttttccttcctctgaaattttattaagaatatgttgctctcatacacactattttgacatttttagacttaacatgcttgtatattagttacaaaacgtcttgctcttctttasaagacattgtattttaaagcaaaagaaaaaaagggcagcaaatcttctgtaatcacagagatattattttaatgtggtgccttttgatatatcagagtaataggttttctttccaaaacaataacatatttagcttttgaggaaggaaaaaagtgatcttgtttattaaaaaaccttgactttgaaactttaaacatttttattgcttccatgtacaaagaccacaaagctcctaagaggcaggctccaaaggtcacttatagtgttttgctactgaagtagaattccaccttataatatccacgagtcttcatttttacactgaaaaaaggagttcaaaatttaggaactagcacagcctgttcttgaactgtgcttgttattggaaatacttaactcaaaaacaaatcatttatttgaaactttccctactagttctaactctaccatagagt

SEQ ID NO: 434920 - DNA, 582 bp, Homo sapiens
atttgtgtgcaatttattttagtattgtctactcagtgatttctcaagcacaagcctttattagctcctgaggtgtggctcctacgaagagcacagaagagaagaaattttcaatttgttggcatctcataacagcttcaaaacacataaagtataaaagatcagaactaccatgagaagttcagaaaacatagtagcagatattgatttcactctcagtgattgatagtatagaaagaaaaagtcattaaagttttagaagaattgaagaatgtaattaatatgtatgtattcrtacaaatgaacatgtgtgacatgcatgtgtatagtatacatgtaaccaagtatggctccaagtgtgttaaaagataagtaaactagtcaaaataaaaatatgttgagggtggcacaaatgcacatatggaagctggcagccctgtgcctgccagcaccctgctacagctgaaaagcattcaccctgctgccctgccactattgctggcaagtatgaaggagcaaggaacccactgccaccaccctgacaaagtgctttggctggtactacctgtcagagtgttgtgg

SEQ ID NO: 434921 - DNA, 582 bp, Homo sapiens
atttgtgtgcaatttattttagtattgtctactcagtgatttctcaagcacaagcctttattagctcctgaggtgtggctcctacgaagagcacagaagagaagaaattttcaatttgttggcatctcataacagcttcaaaacacataaagtataaaagatcagaactaccatgagaagttcagaaaacatagtagcagatattgatttcactctcagtgattgatagtatagaaagaaaaagtcattaaagttttagaagaattgaagaatgtaattaatatgtatgtattcatacaaatgaacatgtgtgacatgcatgtgtatagtatacatgtaaccaagtatggctccaagtgtgttaaaagataagtaaactagtcaaaataaaaatatgttgagggtggcacaaatgcacatatggaagctggcagccctgtgcctgccagcaccctgctacagctgamaagcattcaccctgctgccctgccactattgctggcaagtatgaaggagcaaggaacccactgccaccaccctgacaaagtgctttggctggtactacctgtcagagtgttgtgg

SEQ ID NO: 434922 - DNA, 537 bp, Homo sapiens
ttgatgtttgttgacgtcttggcattgaagagttaggtatttattccaatttttcccaaggcaagttccaaaacccaggaaggacaatttgaatcctatactgggcatcctagttgtccaaaactgaacataaaatgcatcttcccattctctatttttataactgcctcccttttccttatgggcttaataatcttcttgtcatctagggattcctattgtctgtttattctgaccagaactgtgtgtcataactcaatttaagaattctgtccttcctggggagttagaacaaaaatccctaaaaaacatataaataaataaaaacaaacaagaatgcagttaaatggaaagacaaggatagacagagagaggggaagaaagaaaggaaaaagaaaagcyacgtttacttggctcacatatgtagcatgctatgaaacaggagagttggcatcctatccctccttgactttcttagaagaatttctaggcattctagaacatatctgaagaagtttaacaaacagtggcacttat

SEQ ID NO: 434923 - DNA, 593 bp, Homo sapiens
aagtgaaagaagcctgtctgaaaaggctacatgctgtattattccaactacatgacatttggaaaaggtaaaattatggaaacaatcaaaagatcagtggatttcaaggatgtagggaaagagagcgggaaagatgaatagttgaagcacggaggatttttaggacaatgagactgttctgcaagatatcataatggcagatatatgtcattatacatttgtaaaacccatatagtatatagccctaatgtaaactataaaattttgttaataatactgtattgatattggctcaattgtaacagatgtaccacgctaatgcaagatctttataacagaaaaaacttgaggaggagggtgatatactatccagtcagttttactggaagcctaaacgtgctaaagaataaagtctgttaattaaaaataataataatcatgtttkaaattaatggtgtgatatcttgaatggcagttgattaaaaagaaatcaataaatcatgaagaggagcagctgtcagcctctataatataataatcaggtacgctggtgtgatagaggtgtcctgcagataggtggagatgtgatacag

SEQ ID NO: 434924 - DNA, 616 bp, Homo sapiens
tgaggtcgactggagatgtgattgccatttaacctctggagtttgtcaggcaactccatgaaaaggctttgtaaacgaaaggaattattttgtggctgaaagacactttcacttactgaattaagattattattacaatattatatggtgtctcaataacttatggttaaaaaactgcattatttaagtgcactgtggataggcatcttaggtaatagtggtggatttctcacccacagttttcattttgaaaatcatacagaactcaaaagccctcactgagaaaaggcagtgagcttgtcaggaagttagcttctgtgaaaagtattattacwctgttacagataacagaggcctagacagatgagccagctctctcccacactaagacagagttaaattcagtcctgctattcatagcatatcatgtggtcatcttcctcttatccagcaaaacccaccatcccttttattacctgctgcctcatagcacacatggtattattattgcacgtgatataccacatcatatatgaatcagtattcacatacacttgaggcaatatcaagaaacgattctaaatagctctgtaagatgactcattttaacattaaa

SEQ ID NO: 434925 - DNA, 615 bp, Homo sapiens
tttattgctagcttttattttcttctgacagaatgaagggaggggttaaaaaaggccatgtttgtaattatgggttggtctttcctgtaagcagcacctactcagaaggccaccaagagtcacttcagtagaatgaaagcttccaaggcatttatgagttctgtgttaagaacttgggtcaaagaccaaatcttacaaaacaagatgctcccagcacacatattgtttaagaaatcacaataattttaggatatgtgggcatgaaatgcagatgaaaatcaattatatatttcttattacatgtcacaatatcacaccattcaccagaccacaatgtatctgaaaaactaaattttgatgtctttcatgmacattagacccagtggatgagttcctttacattttgccagatgagcttcacagccatgatggtttcctattggtacatctccaggatttcaaaatttctgcagcccaaatcttcaaagacaaggaattgaataagaacatcacccttgatgaggctttcaatatctgaacagtcttcttcagagacaaatttgaagtgttaggaacctcaattccttggtttgaatttatgagtgttttgacaaa

SEQ ID NO: 434926 - DNA, 560 bp, Homo sapiens
cactctctaggctccctgttaacatgggtaaaagccactttaatacccatgggtggcactctgtcacagtagccaggactcggggatataaggagggaggaaagaaagaggaatgcctcactttccctccctcatgtaccttgggtatttgctaagaaggggaaggaaccagggatgcctcagtcccctctttctagatgagtagccattcatcttcagtctgtacccctttcaaatgcatcctgaacctctgggactcccttgaaaaaaaatctttcttttcatttttcttcctctgtcttctcttcactgataggtaattgtgcctccgtactatgrgacactgccctcagagtgcatcctccaaactggaaagtgttagtttcgtaaacctggaactagttggcttaggatcgggctcaggggaagggaacccagaagcctgacatgctggcaaaagggaaaacctttttttttttttttttttttttttaactagtggagcttttggcctctctctccctgtgcaaactggtaaaaggactcagaatttttgagct

SEQ ID NO: 434927 - DNA, 560 bp, Homo sapiens
cactctctaggctccctgttaacatgggtaaaagccactttaatacccatgggtggcactctgtcacagtagccaggactcggggatataaggagggaggaaagaaagaggaatgcctcactttccctccctcatgtaccttgggtatttgctaagaaggggaaggaaccagggatgcctcagtcccctctttctagatgagtagccattcatcttcagtctgtacccctttcaaatgcatcctgaacctctgggactcccttgaaaaaaaatctttcttttcatttttcttcctctgtcttctcttcactgataggtaattgtgcctccgtactatgagacactgccctcagagtgcatcctccaaactggaaagtgttagtttcstaaacctggaactagttggcttaggatcgggctcaggggaagggaacccagaagcctgacatgctggcaaaagggaaaacctttttttttttttttttttttttttaactagtggagcttttggcctctctctccctgtgcaaactggtaaaaggactcagaatttttgagct

SEQ ID NO: 434928 - DNA, 522 bp, Homo sapiens
tgctgtgaaaatcctgaggccccatcttgtccacctagtgcacaggttggttggagattatctgggtagccctttttatttggctgtctcataatgcttctgggtgatatggaatcaaactcactggaagacatcaatattaacaaaccccaactaaagaaatcaaagcttttcatttgagagtgattttggtgagtcttcagtgcaattagtaggaattttggtacaatactgccatatttgaaaacctggcaaaaataaatatataaatctaaacmataaaaatcaggtacaactactcatttatttatcaatttgccaaagggagattttgctagatcctaggtaagaatttgagggcagagctgggttgggataataaataaatatgcataaagatcatctgtctcttcctccagaagtaaacagttgaggtaataaagcacatggattcatatcaaagcagtgttgaagatggacattgaaggacttgctgaaaatgcataaaactggaggaaacaa

SEQ ID NO: 434929 - DNA, 522 bp, Homo sapiens
tgctgtgaaaatcctgaggccccatcttgtccacctagtgcacaggttggttggagattatctgggtagccctttttatttggctgtctcataatgcttctgggtgatatggaatcaaactcactggaagacatcaatattaacaaaccccaactaaagaaatcaaagcttttcatttgagagtgattttggtgagtcttcagtgcaattagtaggaattttggtacaatactgccatatttgaaaacctggcaaaaataaatatataaatctaaacaataaaaatcaggtacaactactcatttatttatcaatttgccaaagggagattttgctagatcctaggtaagaatttgagggcagagctgggttgggataataaataaatatgcayaaagatcatctgtctcttcctccagaagtaaacagttgaggtaataaagcacatggattcatatcaaagcagtgttgaagatggacattgaaggacttgctgaaaatgcataaaactggaggaaacaa

SEQ ID NO: 434930 - DNA, 543 bp, Homo sapiens
gaaaagaggatcagtctaaatagatttttatttaaagacctatcttctagagatgtgagtgctttttctcagatgtgaagtctatctacctgtgatatgtcaggtcttcctttcaaaatgtctgatgtaattgccttttttgtccttctcatctttccttgaactctgtgaaaaaccatttataactgtttctacctaaattccacaaatatatttgaatggagaatatgtgttctatactggaaataatgattcatttgacactttatttctgatgagttaacatgataactatatattaaaaaagaaaaccccaccttttgttattatgaggttatgctgtatataatctaaatcacatttaaccagtatttggtgtgcggttaattttataacyagaagacatagtggacactggcatgtattcttcttcattaggattatttttaaatgaacatttaaaattctgaaaaaaatgccatcaatactaaagacagcactgggattttacattctaccaagaaatgtcttagctagtaatat

SEQ ID NO: 434931 - DNA, 619 bp, Homo sapiens
ttatcaacttatccacaaaagatgttgttgtataacagtgtgatgagggtaggtaatcattacattgaacattgtctagcattactataaggctgtcctcttcccccccacaaaaggataacgagccttggaaaaaaaatgatcccttctgcatctttttggatcagcttgggtttgattatggaggaagacggaagcagcataatagataatttgtttgagtaaaacacaattatgatgtaaacacttgagaaagagaatccagctggaaaattattgtgttagtccaccttkgagtgagagctgatttttactgtggatcctgtagaaatggaaggaagaatgtagaggtggaggtattcattcaacttgtgaatgtgagcactgtatttttaaaataataatgcttttatgggtatttttgttttgttgaaatctcacagtactgcaaatttttatcaaaatcactccatctggaaaaattctatgtggattaagccacatgggaatcagttaccctggcttaacagatatttcattgctgtgggttttaatcgataaacttgaccttctaactttgctggttatacaatctgttctgagcaaacaatgaaatgat

SEQ ID NO: 434932 - DNA, 526 bp, Homo sapiens
agaccttcgcagtgagtgttacagctcttaaagttggtgcgtctggagttgtttgttgctcccrgtgggttcatggtctggctggcttcaggagtgaagctgcagacctctgtggtgagggttacagctcatgaaggtactgtggactcagagtgagcagcaacaagatttattgcaaagagtgaaagtgcaaagcttccaaagcatggaagggaaccctagcgggttgctgctactggctggggtagccacctttgactcccttatttggccccgcccatgtcctgctgattggtccattttacagagtgctgattggtccaatttacagagtgctgattggtgcatttacaaacctttagctagacacagagcagtgattgatgtgtttacaatcctttggctagacagaaaagttctccaagtccccacctgacccagaagcccagctggcttcatctctcaatagtaccagagaaaaagcagtcctagaataggatagacatatacatcaatagaatataat

SEQ ID NO: 434933 - DNA, 508 bp, Homo sapiens
atcttacaggtgagaaaactaaggtaaattaacttgggcccaggttccaggcctagtacacaagaaagatgacatttgaactcaatattaactgtaattacactacacagtttgttaaggaaaagttataataaaaaataagatctagcaaagactcaaatttgagactatttttaacttaacatctttcaaaaatataaagtttaatttttttacaggaagctgtttaaaaaaacattawtttttttcttcttgggtatactccttaatttatattttaaggcatagttcatactgaattatggtttagtccaatttctcgagaagacagacaaatatgggttaatggctactatagtaactgattgcaaggctagctttaattagttgactgtgtaaccattttttattcataaaacaaaatttgtgttcagaatattttttattaggaaaaattgcaataagaaaaatccagcagtgcctggcaggatgcttaaagatcaacata

SEQ ID NO: 434934 - DNA, 586 bp, Homo sapiens
cagtttcactactgaggcttcacatctttgaatctgttttccagagtccttagatacatggataaatatatttctgagagctcagtatttttgctactgctgtgagttcatatgtagatggaataaagaaaatggctcaaaattgatgggaaacgttagaaagcaaagaaatagtgagagaagagaagtagaaaagtaaaagaaatgagaagacaagataaaatgggaagaaagcaaagaaattccagactttggcctgaaatttgccatcacactgctgtctcttgtcatggttaaattttggacgtttccaaatatactcacatctaacatgcttctccttacaaatgaaacggatgaagtcggttttcacttttcctaaaatgctcaacaatggttacaagttcctttctgatcctttccttcttaggaaagaagaaaaaaacactcgatataaaacctttcagaacctaaaccrtgatatcagcaggatgactttggactcaggaaaagtctagaaagtctttcaagctgagatgcatttttgaggtttggggtgacaaaaaaactaaaaacagtgtctatg

SEQ ID NO: 434935 - DNA, 639 bp, Homo sapiens
atattcacaggtactttgcatgggaaaagaaactctgcaaggctatgattggtaattatttcctaatgatggtcttagggagacttaattttcttytatcatctttactgcattttatgaattttcagtaggcatttattagtttttctgcagggaaaaacagatgcttttcaaaggaaatccacacaacaatctagaaggaggtacagcaaaaacagaatgatgaattcagtgatggggacatgagctataaaggggtttagcctactaggccaaaaagaggaaaaagtcatttccagtcaaaaaacagacagaggttgttttagggcaaaggaactttgtatgtcaagacatgcagctagaaaaggcttatattctgttacaagcaacgaatattataatatggctgggtgatacagttggaaagagagaggtgtagcaggaggctaaaaaggtagattgaagccaatgtcatgactagcagagacatctacaccagtgagaaaggcttgtaagggaaggagaaaacttttcatctactctttaaggtgttgcaactggggcctgcaaattaaactgacaaaagacagattaacaggaaaaaaggcattaatattttaaattttacatgcacagaag

SEQ ID NO: 434936 - DNA, 600 bp, Homo sapiens
tcctttataacaacacaaaaggactaagacaggtccctgcaactgtattttcaaagaagcaattccaccaaacctaaaatggcttgactgtgttcccacccaaatctcatcttgaattgtagttcccataattcccaaatgtcgtcttgaattgtagctcccataattcccaaatgtcatgggtgggaccaggtggaggtaactgaatcatgagggcagtttcccccatgctgttttcatgataatgagcaagtctcacaagatctgatggttttataagcatctggcatttctcctgctggcactcattttctctctattcccrccctgtgaaggggtgccttcaccgtaattgtaagttccctgaggctctccagctatgtggaactgtgagtaaattaaactcttttctttataaactacccagtctcaggtatttattcaaaacagggtgagaacagactaatacaaaacccttctgccggtgcctcattcctctatcttattctcttgagtgtttatcgaatgtgatcctccctccacaaaaaaattagagtcagagtatctaaataactttctccgaaatcttaaagcatttga

SEQ ID NO: 434937 - DNA, 550 bp, Homo sapiens
  misc_feature (1)...(550): n = A,T,C or G
aactgttacttcatgctgtcccattaatgatctgaccaccctcacttcactgaactyccccttacaccctaattcctccattctaaacaggtagtccccctgacttgctgctgcctgactctaaaaatactagcatagtctgtcactgtggttaagaatgcaagccaactggctttgttcaatcacaacctgccagtacctttgcttcttcatctaaaaaattaagataatagtagtatctggctcatagggttatgtgaggcttaaatggtataataaatgtaaaatgcctagcaaacctcctagcacatactaagcagaatgtctaatggtttaaaagggtttcggaagtgtagagtcaaatgtgtagttctttcttatttcaagtagctatgtgtatgaatgattttcttgatctgccacnggcactctgcccacccctgcccctgacttgcctttttttctgatcactgaattcttagcttagttcttcacttactgatttagattgcttagcacatcctctgtatcattcaccagttattgtctg

SEQ ID NO: 434938 - DNA, 650 bp, Homo sapiens
ctagctgctcctttgattcacatttctctgtgaactcccttacatgtatatgtgattaaaatcggcttttttttctcttgctaatctgtcttctgttggattaatttgcaggcctaaaagctgaatgtaagagagtacagaaaatgtttttcctctctgctacttccaaagccccaaatcctactttctacctcacaaaaagcttgggagtcctgtgacatctccagcttcattactaacaagtacaagctgaatacttttataagtgtagtgtgggtaattcctaggaacactcagttcagggctcctgattgatggatatctagtggatatccataaagtggtcaagagacattggtgtcagtctttgacgaagagaaatatgaatccaaggatcaacaggagattcactgctgtgtcatttgctratagtacggaataagaccttttccactgagctttaggacagactttttctgatgtctttttcagaaaggcaaacctcaggctttaagtcatgcaggcagagacaaattccacggatgttctggaaattcagcttataccagtacattttcactggttattacacttttttttttttaagattgagttttactcttgtcacccaggctggagggcaatggcgg

SEQ ID NO: 434939 - DNA, 633 bp, Homo sapiens
gtatatttttcattcaatcctgaaaacaagattttgagttaggttatatcaaaaactattattattatcattatacccattttacaatgaagacactgagatgcatctgttagttaagtaactaacagatgacttgcttattaacatttgtattatatgagaaaaactttattatgaaataattacactaaatcttcaggccttagaaccaaagtaatatcaataaaacatgtacatttattttcaaaatgggagttatgccaagttgggtatattttacttmttgtgtaatagcaaaaaagaaaaaaaaaaacaagtagcattggtttcttattttggtggaaaaagaattctattttctatgtatttcactctagcaatttgggataatatgcttattttaaaaatattttggatacaagattgaaaactatcagccactattgattataagaccaaatcctcgaacatcttaaaacatttgtacattgtaaattagatgggaaaaaaaactgaaaattaagctttgtgaattttacttacttttttcatgcagaactatacttaacgcctctctgaaatctgtgaagtttaatgtaatcaagtgatggtattaattcatataggttgagt

SEQ ID NO: 434940 - DNA, 619 bp, Homo sapiens
cagaacattttcaagatgaaacagaattccaggcctcagcaaaatcactggtatatgaccacagccttcttctgttctaaagcttgatgtgcctgactactattaaacacaatgctgtatttttgaaacctgttacagaatatgactaaataaatggctgcaaatttgaccttaaaatccagtaattgtcattacgcttgtcatcatcatgtggatccagttttatttctccaattccatctctcatgccttttaccatatatctcatggttatttgtagttccctgaaattcctatttctctcatgtttacctggtgttgcccacatatagcatctctgtctagaatgccatatcttacaatacttatctctttatctcagacattgcctatttcagaaggcctttatgccttcaacgccctgagtcaagtaactctctttgatctctcatgcatcctgtgtgtgatttcataaaaatattctcctttctgtatggtaataattggtttgctcttgtgtcttcctcgctagactaaaacttgtagacagcaacagacaatacctrtttaaatccatagatatcttataaatgtttgctagctaaatgaatgctttata

SEQ ID NO: 434941 - DNA, 521 bp, Homo sapiens
ctttataaaaaagtattgatcaataaattgcaaaaacaagcaacattattaataaaagtgttatactagcttttttatatctaatgactacagcaatcagtaaacatagtttayagttttatcagtgaaacatagtttacagtttcagtgtacaagcttaccactgtgcaaatgcaagctattttaaaagtaaacccttataggccgggcatggtggctcaagcctgtaatcccagcactttgggaggtgaaggcaggaggatcgcctgaggtcaggagttcaagaccagtctggccaacacagtgaaaccccctctccaatataaatacaaaaattagctgggcacagtggcaggcgcttgtaatcccagctactagggaggctgagacaggagaattgcttgaacccaacaggtggaagttgcagtgagccaagatttttccaccgcattccagcctgggcgacagagtaagaccctgcctcaaataaagaaagaaacaaataaataaataaataaacc

SEQ ID NO: 434942 - DNA, 561 bp, Homo sapiens
agtcattaagaagtgtaatgactattacaggcatacaaatccctacttacaaagataaagaaatatccattaacaccatattatgacatttgtaactgattcacctcatatcttcctttgattcatcccttcaataaatctttgggagcccatgattgacacattaaatgtttgaaacctacaatagatacatgaaaatattagaactttttgaaatatgcacagtaactctttaaatgcaatcctccaagcattcaaatactctgtctcaatccaacctctgyttactttgatccaagtcacaatgaaaagtagcagccttctaggatttctttatttaaatatagagtaattgagaaaatatgtacacaatggtttatatttgatttactttcagtagatcatgaattatgctagctaactttcaatctccagatacaaacagaatcatcaaattattttatttctcttccatattaaaatgtaagagcataagtcccctaaaatacaaatggttttcaagaaaaatttaattattatgctaggagaatggaaaacgtt

SEQ ID NO: 434943 - DNA, 561 bp, Homo sapiens
agtcattaagaagtgtaatgactattacaggcatacaaatccctacttacaaagataaagaaatatccattaacaccatattatgacatttgtaactgattcacctcatatcttcctttgattcatcccttcaataaatctttgggagcccatgattgacacattaaatgtttgaaacctacaatagatacatgaaaatattagaactttttgaaatatgcacagtaactctttaaatgcaatcctccaagcattcaaatactctgtctcaatccaacctctgcttactttgatycaagtcacaatgaaaagtagcagccttctaggatttctttatttaaatatagagtaattgagaaaatatgtacacaatggtttatatttgatttactttcagtagatcatgaattatgctagctaactttcaatctccagatacaaacagaatcatcaaattattttatttctcttccatattaaaatgtaagagcataagtcccctaaaatacaaatggttttcaagaaaaatttaattattatgctaggagaatggaaaacgtt

SEQ ID NO: 434944 - DNA, 596 bp, Homo sapiens
cagggaaaatagacccgcttagtttagattatgctggacttggtatttttgtttcaaaatccagtaaagaaacatggtccgtatcattgcctgtgacatttaccctcaggaaagatgccagcactgaagcatcctggtggctgacaggtgatctctttagctctgtgaccctcgcgtttataagaggtgagacatggtgatttgttcctgcaggtgaagggaagggaacagtgactggagaaagggaggtcattttgctgctgcttgtgagatgtatctgattgaacggtgaaaatgatctgtgtatccagtttttatgtttaagcagacttttcagaagcactgaattgtatggcacgtgggacagtgttaaatcatgctagtattacatttttgtgtgtatggtttagatacatttccagaacgtattgctgacatatgcattgtcttgcgatgatgaggatggagtgccagttccaggaagggcccgaggaggtrcaggccagttgctaggcgtccagcagactagtgattagatgcagaagagcattattattctccatccagccagtactgtgcagaaaacaaacacacag

SEQ ID NO: 434945 - DNA, 507 bp, Homo sapiens
tctcttacctggtctctctccgcctagcggctcccgccgcccctgccgcctccctggaccgttagccggcgccgrcgccgccgcatccccggcgcagggcgggcggccgggacgcactggccacttttctggtcccgggtggagcggctgttgcttctttccgcacttttccccactcttgtgcccttcggcgcctccctctccccctcctcctggccccctcagcgcgattctccctcagcgcccaggcccccgggagccgcggaacaaacttgtgcccggcgctgaccgtgcaaagtggcttccgcgcgccgcggccccggccggcgccgtcgctgtcgctcgggccccgcgactcgggccgggctgtgggcgcgcggcaggcgggctgcggcggcggcgggacggggcggccgcgggttgcgtggggtttgtgcgcgcgtgtgcgcgggcgccggctgtgcgcgccgcgggcggacagggttcggccggcggcggtaaagttgg

SEQ ID NO: 434946 - DNA, 203 bp, Homo sapiens
gatgggaaggatccaagtatgtaaagattatgttatagatcagctttggtctgtcctaaaagaaatttgccagtggattattccatatggataaaagtcagtttctctggtcttcctggaatgtgtctagaaagcaaatasattatttacaagttcatagtagatcaatgtattggattaaaatatgacaaacataatttggt

SEQ ID NO: 434947 - DNA, 589 bp, Homo sapiens
aataatttataaataagtctggtgtaatatggaaaaagaattttagagggagggaggctgaggtagtgtcttcaacgagraggctgtaataatcaggcagtgttaagggtttttgagttaaagtagttgcccatgggatgggaatagaagggagataattgaaagacagaaaggagatagaatatataagaattggaaagggctgtttttagatacagtcccaggtttctagaaagtgagactcagagaagttgacttgctcacttatggcagctggttaattgtagagctatgaacctgttaatgttaatactaagctcaaacatttttggagcaagggtttcttatgtatttcttatctgtggcctgaattacgtagttgatccagagtcttaataggtaatcaagaaggaaatgatctgtctggggaaaaaagggggcaataagaataaggtagatgaagggagaaaggaaggtgaaaaaatcagtgaacaggttctgcttctgagaatatgttgggttcgattatttgaactaaccctttttactgaaaacaactaatggtgctagattaaaaacaaaaacaaaa

SEQ ID NO: 434948 - DNA, 582 bp, Homo sapiens
tgaattcagtaggaaatttaaaatatcatacaccatgatcaactgggacttactcctgggatgcaagaatggtttaacctatgcagataaaaaatgtgacataagacattaatattctgatattcacagatctgtaacataatgtcaaagatctaaattatattgggaaatataatatgctattgaaattgttaagtatgtagtaagtacctttaaaaagctatyatctgtgaatgaaactccaaattaggattaagttcttaaaagaatcatatggaaaaaggagtattttattgtaaatattaaactaggacatgtttgttattaaaaataaaatttatacagtaagtgctattgacttaaaatactatcaactttattctctgtagagaagaaagtataagttggcaatgttccaacatgtctgtattaatcttacaagatcttgtggttcagccaaaaactctcatgcttgtgtcagttaaactttttaagtataacttttgaaacacctgtcttaaaggcatccttatgctttcagtttttaaaacatatataaaactgatctgataatgtgaaata

SEQ ID NO: 434949 - DNA, 405 bp, Homo sapiens
gtagcagacataaacagtttgtggattctccatattaactggatctgacctcaggtatatatttktaatcattatctaagttaatgggtgttcatggaggttgtgagttgcatttgttttaactttgctatacagttacaccccaaatattcacatacatattataaattggaagatacaggagcaggaaaatgaaactatctggaaaagtatacagtgaaacatttcatctctaaagtttgaacacattcaggtctgaatttaggaatctgttggcattcgcttttttgatagttttcccttagcagggaatagggtaggaatagcagaaagctggctcagcgatgacttacagaataagagagatgtgaattggccttttaaaaatctgtggaagttactcat

SEQ ID NO: 434950 - DNA, 405 bp, Homo sapiens
gtagcagacataaacagtttgtggattctccatattaactggatctgacctcaggtatatatttgtaatcattatctaagttaatgggtgttcatggaggttgtgagttgcatttgttttaactttgctatacagttacaccccaaatattcacatacatattataaattggaagatacaggagcaggaaaatkaaactatctggaaaagtatacagtgaaacatttcatctctaaagtttgaacacattcaggtctgaatttaggaatctgttggcattcgcttttttgatagttttcccttagcagggaatagggtaggaatagcagaaagctggctcagcgatgacttacagaataagagagatgtgaattggccttttaaaaatctgtggaagttactcat

SEQ ID NO: 434951 - DNA, 608 bp, Homo sapiens
ttaactttgctatacagttacaccccaaatattcacatacatattataaattggaagatacaggagcaggaaaatgaaactatctggaaaagtatacagtgaaacatttcatctctaaagtttgaacacattcaggtctgaatttaggaatctgttggcattcgcttttttgatagttttcccttagcagggaatagggtaggaatagcagaaagctggctcagcgatgacttacagaatragagagatgtgaattggccttttaaaaatctgtggaagttactcatttggactgggtaacggctttctaggcagagggagcaacttcaggaaaggtatagagaaggtccccaacttacaacattgacttaagacttttcaactttacagtggtgtgaaagaaatatgtattcaatagaaaccacactccaaggacccatgtaatcgtttctcattttcaatatagtgttcaataaattatatgagattttaatactttattataaaatgggcttcatgttagatgattttgcccaattgtaggatactgtaattgtcctgagcattaaggtagactaggctgaactgtgttgttcagtaggaccggc

SEQ ID NO: 434952 - DNA, 594 bp, Homo sapiens
  misc_feature (1)...(594): n = A,T,C or G
ctgaggctgtgtcatggttgcatccttagccttaataaaataaactttctaaattgatcgagacctgttttagatgcttttggttcacaamgggcacagaattagagaagaaaaaaaaaaacttgcaatttcaaagatatactcttaagaatacttactgttttttaaaaccactttgtcttacatttcactgatttcatcagatgacttccatcagcatccataaactagtgttgagcccattccagattaatgtgaagagnaagtaaaatattttaccccaaaatatattctatgaaatatttgaagtagctgccacttggccatcntgacagaagtggccttgcaaagctgtcttaagtgagggaaatctgcatctgtagagaatctccattaatgcagccataccccctacctccctttctatgcctttccgaggatccaggagacactgacacttttaaagttcaaaaagaaatatttaccctatatgctctctcagggaagcttcaccaacatcataaggctacctttgctagccaagcttcttcctttctctctctcttaacctgtcttgccactaaacctgactta

SEQ ID NO: 434953 - DNA, 578 bp, Homo sapiens
gtcaagagcctaagaaccccataatgtgtctccactaaactatgttaaaccattcaaaataaataactgagtgaaaaaaagatatacacaaaatattttagactagttgtataagggggcaaaggaataaaattggaaattaaaacaaaaaaataaattcaatgagggagaatcagcacagccagtgatataatgtaccataaatcaaaaggaataagtaattggatccgtaaatttggtataaaatggacaaagactaggaattcagaaaatcaacttcatgagttatctctttttcttcaccctgccccaccctcccacagaatttttcattattaagcaaaaaactaatttttggaagatacaccctagaaaattagcccaaataatagggcaagaaataaaaggctggaaagagttcattaatcaaagaattacaagagaaaatgtttctgagagaacctgtcagaataaaagtttttattakttgataaaagagattaattcagaaatgaacacataaatattcttgcaaatgttatgacttctaacatcattttaaaaataataggagcagg

SEQ ID NO: 434954 - DNA, 510 bp, Homo sapiens
tgtaaaaaaaatacagaagaatatggaagaagttagataacttaggggtgaccaagaataacacttgacatgagaggtcccaaagaatttcaaacatttatcctgtccttcttttggtatataaaagctaattgtcaagacttctgaaattccaaaatgtcttaaaggtagctccacttacctggcaaccttactatttattttatttatttatttatttatttatttatttatttatttatttatttatggtttgtaagtactaargcagattatctttttcagtggaagggtatgtcaaaaatacagcttaaaaagtgaatcaaagaccactaagggaccggggtatgtctcttgttgaaagtagcacaacacaaatacaagttaggtctttgggtacatatgtttaggaaagaacgttaagagatttgttatattatatcctgtttcctctgtgactaaagatgccaagattatctggtgagagtgaggggaagtagtaggaaagga

SEQ ID NO: 434955 - DNA, 619 bp, Homo sapiens
atcacatttttacactctttctgattattgattagtgttcatatttgcaaacaacagaatccaactgggctaattaagcagaaacctgtctatgaaaacatatcaagtagctttcagaatctctgaaagggccagaaaattgaacttggatactaacagccataaatactgactagccttgtgtccaagcacaattcagaacaccactgttctacccctgctgctctggacatataacatttgggactgggtaacagaaatttaccaaagctttcccacaaaaatagaatgtcatggccatcatgcttccaaaaggtcacatttccacttatatgacacagtcatgttacttttcctcaatgcacactaagcaagtcaattcccagtatctgttacactatgtaggagaacaaactgattctttcttttggcattcatttacttacttctatgtgccaaatacagttgtaggcatcggtgaaaacatttgaatagcacaagatccaggcccatgataagcttccagcctgaaaaagacaatatgtggcaattaatggctaaaaaataactttacatgtgggtaaarcacaaaagatagaaaataccagaaaaatacaaa

SEQ ID NO: 434956 - DNA, 561 bp, Homo sapiens
tcaacacacatatagtatgattgatgattgtataaattatgaacatgtaagccttactaagtcaagtttccaagtagaggacaaagcaatgtctcaaagagtacagaataaaagaacctctccggcagagaaatctttctaaaacaataattcacttataattattgaatatgtatgtatttacttgacattattaaatggtgaacactgagaatgcaaagmccaaaggcacaatccatgaactcaaggaattcagtgtctcttgaaggagagagataagaaattcagtaattctactgaagtgtaataaatgctataaaagatgccatcacaagttattaaaatgatacagaaaagacatctttattactatgcatgtccttgcttacatattttccttgcctttcagcaatccaactgatactgaattacctgaacttgactttctctcatacaggcataatttcctatgataaccatttcctaccagtcactaaatctcacctagccttgctttcttgctttgacctacactgatccaattgtataaaacaatgacag

SEQ ID NO: 434957 - DNA, 595 bp, Homo sapiens
cgtcagcttcctgcagtatattttgagtggcaagagcatttctcactaattccacttgctaaaattcccactaaaattactatttaattggaaatgttatctgagaaataacacattatcaaataattatctttatttgtccagtcattaaatcacctcaaatgatcacagggaaatgatcacagggactggaggaaactgccagtacatggagacgatcctcaacagggatttgagagagagagagagaggagcaaaatgcataatggaagagttggagcttaagcacttgaagtttgaaagctctggagctatgcaaaaacagagaggagaaggatattttcagccacaaaataatttgagattcaattgctatgtaacacattactatcatttcataaataggttcagataagagccagctcataaagcattagcagaatgattttgcacatagtgagcacttttttaagaagtctaattcattaacatatcttctttccactgctcttttcttcctttgccctttccattgatggaaatgtattcaaaggaaatraacttctaataaccaatataattttcaagataaata

SEQ ID NO: 434958 - DNA, 595 bp, Homo sapiens
cgtcagcttcctgcagtatattttgagtggcaagagcatttctcactaattccacttgctaaaattcccactaaaattactatttaattggaaatgttatctgagaaataacacattatcaaataattatctttatttgtccagtcattaaatcacctcaaatgatcacagggaaatgatcacagggactggaggaaactgccagtacatggagacgatcctcaacagggatttgagagagagagagagaggagcaaaatgcataatggaagagttggagcttaagcacttgaagtttgaaagctctggagctatgcaaaaacagagaggagaaggatattttcagccacaaaataatttgagattcaattgctatgtaacacattactatcatttcataaataggttcagataagagccagctcataaagcattagcagaatgattttgcacatagtgagcacttttttaagaagtctaattcattaacatatcttctttccactgctcttttcttcctttgccctttccattgatggaaatgtattcaaaggaaataaacttctaatmaccaatataattttcaagataaata

SEQ ID NO: 434959 - DNA, 544 bp, Homo sapiens
aaaaatcaagatataaaatcatttatgggatatatctgacaaagataaacctttaggaccagaattctctgacaaaaaaaaaaaagcatgaatttcagtttgcaaaaagcccctgaggtgtgaaatgtgtctttctcccagaagcctctatttcactagtgcagagctcaatcagtattatatatcctgcatcmcctcacgtaaaacaataaaatgtgtgcgtgtttgctacttaaaaattatccagccatgactacattaattgtgaagctttggtgactctattttcactttgagtattttcttaaattatcagctcaggtgttttcatttggcagtttcttattagtcatatacttagccataaatcaatgggaaatactactttaggagggaaaatggcatcaatatctcacatatatactcagcagccagttgacagatgtggtaatttcatcactatttactgtaaattcttctgcaacagacaaaataaatttgttttctccattcggtataatttagttttataagaatgtagtct

SEQ ID NO: 434960 - DNA, 544 bp, Homo sapiens
aaaaatcaagatataaaatcatttatgggatatatctgacaaagataaacctttaggaccagaattctctgacaaaaaaaaaaaagcatgaatttcagtttgcaaaaagcccctgaggtgtgaaatgtgtctttctcccagaagcctctatttcactagtgcagagctcaatcagtattatatatcctgcatcccctcacgtaaaacaataaaatgtgtgcgtgtttgctacttaaaaattatccagccatgactacattaattgtgaagctttggtgactctattttcactttgagtattttcttaaattatcagctcaggtgttttmatttggcagtttcttattagtcatatacttagccataaatcaatgggaaatactactttaggagggaaaatggcatcaatatctcacatatatactcagcagccagttgacagatgtggtaatttcatcactatttactgtaaattcttctgcaacagacaaaataaatttgttttctccattcggtataatttagttttataagaatgtagtct

SEQ ID NO: 434961 - DNA, 594 bp, Homo sapiens
ggttaatggttaataccgttaggcagatataactgatgaaatcaccatacatcagatttatatttattacattgttgtctcttttgagaactatttaaaaattgttgcaagtctcagagaaatagagttatctaattatttttgaacacgtagatatttggttcctttgatttaaagacacacacatatacatatagagtgtttgcaatgwtcaaggcacctttgtacaatatttcaagtcaatataatctattatataatttaatctccacaacaaatggatgagataaacacattttatacttattttgctaaatcactagattcgggtaatcttcccacagctgtgtctgtggattttttaaaaataaatacaaaggtttaaggaggaacagtccactttgaattaattccttatatagcttctgaagacatgcctctgaattcttccttcttgatgtgacttagatacattttctaacctgcttaaataaatattttctttttaaaaaatgtttattttttattttgctttaagttccaggatacatgtgcagaatgtgcaggtttgttacataggtatacatgtgccat

SEQ ID NO: 434962 - DNA, 630 bp, Homo sapiens
cattaaaaataatcacagcaaaaggcttgagaaaaggaatgacatagtcagctttaaatatgtatattcctatcacatgctaatcatacttgcaaaaattgtagaattgcttatttggtatcattacttgcttgaactacttactacattcttgaaggtaattagtcctcagtaaccacacttccatgtattcttctttaaatagaatacctttgtatctaaagttagatatagagaagttaccttctttaaatagatgcctttatatctagagttagaacttaaagagaaatatctccataacagccaaaaaacccagatgtagcgtattactgtactctactatgttcatatttttttatttttcaacacgtaacctaacaggaaagaacatgtaaataaataatcactaaaacaaaatcatgttagattttcatggctcaaaaaatkgttaagagatttgaaacaacaacaggtctttgtcatttaagaatacttggtgtctctgaaggttcatagcaacagtttgtttgtctgcctatcagtatcagtttacatgctcaagtgatactgaattttctctatttatctagtcacgcttctccccacttagatgctattttcaatcat

SEQ ID NO: 434963 - DNA, 594 bp, Homo sapiens
ggttaatggttaataccgttaggcagatataactgatgaaatcaccatacatcagatttatatttattacattgttgtctcttttgagaactatttaaaaattgttgcaagtctcagagaaatagagttatctaattatttttgaacacgtagatatttggttcctttgatttaaagacacacacatatacatatagagtgtttgcaatgatcaaggcacctttgtacaatatttcaagtcaatataatctattatataatttaatctccacaacaaatggatgagataaacacattttatacttattttgctaaatcactagattcgggtaatcttcccacagctgtrtctgtggattttttaaaaataaatacaaaggtttaaggaggaacagtccactttgaattaattccttatatagcttctgaagacatgcctctgaattcttccttcttgatgtgacttagatacattttctaacctgcttaaataaatattttctttttaaaaaatgtttattttttattttgctttaagttccaggatacatgtgcagaatgtgcaggtttgttacataggtatacatgtgccat

SEQ ID NO: 434964 - DNA, 553 bp, Homo sapiens
gaatagaacctgccttttttctatccatattcatctctttagcaaatggtccctttgccacatccttagtattctcccccaaacacacttaaaaatttttttacttggccaggctgagagttttcaaaatatttccactctgtttccttttaataatcatgtctcatttttctgattttactataagtgtctagaagaagccatgcagcaccttgaatactttactgtttgtatatatcttctctcagatatcctagtacatcactcttaagttctgccttccataagtcctaggccttggacacaattctgccaagttcattgcaactctatgtaaagacatactttactccagtttccaacactttgtttctcatttccatctgagacctcattagaatggcgtttactgtctattatttctgccaccattctaatcacaatcattaagtaatatctaagttccaaaattttcctrcagctcttctttacttctgagccctcactagaattgtccttaatgcttcatttatagcaacctaggttttttcct

SEQ ID NO: 434965 - DNA, 596 bp, Homo sapiens
actaattgtgcataagcgcacagccttagtcagagagcttcagctgggatatgcacagagcactgctaatagacaaaataattttgtgtggtatgacaaacattctaattttaatagtatatttattttagtytggaaataatataacaggatatttatggtgaacatacagaaggatcattggtggagggatcattggtgggtgattgagagagagctcacagaaaatccacagatactgagatcttggagactgaattggagtgaaggctctaccagagtgtgtagaggtagctaccatgttatgctaggagaagaccactattttagtggagacaaggatgtctatggacagtagaactgaagaggcaacatcaaagactatggctataggttttagatacatgttaggcaacattttttcatttgtctgagggctgaattgagggacatacaatagcttaccactttttttttttttttttttgtaaaacaagtgttgagatcagatatattcttctaccatttttgaacccccaccaactctgttccacaggaaaaaggtattaaagaggtacactggagcaattctctat

SEQ ID NO: 434966 - DNA, 490 bp, Homo sapiens
agcgaggcagccaaatagaggccctgctcaggtggcatcttgtagtgtgtttgtatgacctggccagtgaaaggcattcccattagaagaagagagagtctcacttgaccatgaactcagacactcaagaggctctagtacagagttggaaagactttagtgatttgctaagtgggggcaataggagtatgagaaacaactgtgggaagatcagatttgtggctcaaatccagtaattctttaaggttagactgttggtttagatcaaaatttaaaaataaaataatcttaataatatggaactaacttccatatgtttagtaaaagtaagaatattcaaacaaatataaattcattgctggttatatcagttgcattcttcttattggaaawcttttcttttaagaaattgctttattacttgggtttcatttttatttttttgaaatgcaataacattactttcttttcagtatatttatattaatgg

SEQ ID NO: 434967 - DNA, 590 bp, Homo sapiens
aaccttaaaattgtctaaaagataattcatgtgtagacctgccctgtgtgatatggtggctagtaggcatatgtggtaatagaattgggactagtccaaattgagatttgctatgtgtgtatttcagaaactctgtatgaaaaaagaagcatataaaatatcctattaatatttttatactgactatatgccaaaatggtaatattgtacaaatattgggttaaataaaataaattcttaaaattaatttaacctgtttctttttacattttaatctagctaatggaaaatttaaaatgatgtgaatttctggcatggtatttttattagacagggctggtctaaagtagaattatgctcccacatgctttctgttctccaattttactgtacttctttcattgcctataaagtgctacacytgggcttttcatgtactttcttttgtctggagcacttctttttcttcaactctatgcaacgatcttcctatcaccctgtgtactactttttcttgagatctcagttaagtcatcacagactcaggaaagattctctttatatctctgagtaagttaaattcctggatt

SEQ ID NO: 434968 - DNA, 641 bp, Homo sapiens
cactgtttatcttctctgtaaagttttaattaatggaaaaaaggatttgtgaggctagtcataggctgtagcaaatctgctgtgctttgtgggtctttctgtattgttctgtcataataaggcatacctcagaacagaacatgggcttaggacacccctaaacctgcttttcaagatggcccagcaaactggtcagttataaactttgctgcaggtccctaaaaaaaaataaataaataaaaataaaaataactggatgaagtttccctcttgtctcttgtatgtccttgggagcttgaccttgtaaccaggtggcagtactttctcttggtctctgccatcacaatggcagcccggattcaaggtttaattcctggcttggaaaattggtcctttatcttctgtctatgtatttatatgtattatttgtgtgatatttatatatgaaagagctttgattgattggcttaaaaataagtkctaaatcaaatattttgtcagaaaagtaaaatgtgtaatgccttttagttcatgtgacttaagtaatctttgggaaataaagacagttttaaaataaggacaattttgttggtaaaattaaaatgttttcaaaaatgtaaacattaggtctaaattataca

SEQ ID NO: 434969 - DNA, 482 bp, Homo sapiens
attcaattttcaaggtgctattttagcttaccaaaagttaaagtatgctctcccctcccacattccatttgagaagtctatctgtcagattaagatactttcatcaaggtcactagactgcttgtcaaaagtcttttaacgtcagtcactccaagaattataaatagctttggcctcaaacacgattgtgttgagggaagggagggaagaaaaggagaagaagtgtgacagttgactttttaaaagccattgacatattaaagctttgaattgcttttaaaatttttctttcccatgagtttgaggtttattggacacgttgatctgaatgggcacgggcctctgctgagaaagttgtgggagatggtcggtgtttttcttggtttgkatgttcatattgtccttcctgaaatggttaggggcatttctcttgaagaactattaatagtctacatttttaaatcttgtaaacagttgtgcat

SEQ ID NO: 434970 - DNA, 438 bp, Homo sapiens
tgaaattcttaaagtgagtttttcacctctgttagttcagtttgattctttcttaaaatggccattttatctttcatctcctgtattgttttattacattctttagattccatggattaggattcaactttatcctgaatatcaatgatcttcatttctatccgtattctgaatgctagttctgacattttggtcattgcagccwggttaacaacctttgctggggaactagtgtggtcatttggaggtaagaagacatttttgccttttttgttgttgttgttgttgccagagttcctgcactgtttttgtctcatcaatgtgggctcatgtttcttcagcctttgaagttgcagtcctttggatgggctttttgcttttatcttttttggtgcccttgagggtttgattgtgattctcagtgggattagacaactg

SEQ ID NO: 434971 - DNA, 602 bp, Homo sapiens
actgactgctatcactgagtttcctagatttaattccatttcctccaccctatcataaaaagatcataaaaaagatcataccttcttttattatcttttccctcaaagtcactgtgctttgtaaaaagtaagttctccttaatatttgccgatatcatttaatatatttcccaaatattttccccaaataaacatcattaaacaatgcaaagtttttatgcagcacagagatgatctcagattcatttttatttgcctaggctcagcgcataggaggtaccaaataaacagttgctgggaacatgaagggagaaagtgactacttcagaagcagaagacccttttctttgttcatctgttggcaacaatttgtcctctggcaaacactgggagtgaaagcggttataatcaccyagttttaatagctagagtcactctatactttttcttccaatgcctagctatccttagaaataatgactttggaaggggtaatggaagttttttttaactcagaaattggagaaacattaactttttaatttactaccctgtcccccaaatggtgacagtactgccaggcattggaaataggtgaggca

SEQ ID NO: 434972 - DNA, 550 bp, Homo sapiens
caagtcatccgctttcattaatcatctttaaattttagccctacatttcaccatccatgctgtaagcatttgttgcatctgcttgaaatgtctctgctacccttaacatctttttttcttaccwtcatgatttttgcatagaatactacatatgacttgcctgtactctctccatcctgccatgtatcctgtacaacatttccagcttcttattcccaaagcacaagtttggcaagcctctaccctataaccacactttttaaaaaagtctttcaatctacagcatttttccctcaataccccattacacaagctcttcagttcaacctaactggtcttctacccagtcattcataagcatgcattatgattcgtgccactgtcaatcctcagacttgtaatactttttctcctcattctattcttttctaataaaagtttttgaggattggaagaaagtttattttgatgtttttcctcagttatgctgatttgggattaatactcctaagaaatgatgactgatatccagcaaaacaatcaaggatac

SEQ ID NO: 434973 - DNA, 550 bp, Homo sapiens
caagtcatccgctttcattaatcatctttaaattttagccctacatttcaccatccatgctgtaagcatttgttgcatctgcttgaaatgtctctgctacccttaacatctttttttcttaccatcatgwtttttgcatagaatactacatatgacttgcctgtactctctccatcctgccatgtatcctgtacaacatttccagcttcttattcccaaagcacaagtttggcaagcctctaccctataaccacactttttaaaaaagtctttcaatctacagcatttttccctcaataccccattacacaagctcttcagttcaacctaactggtcttctacccagtcattcataagcatgcattatgattcgtgccactgtcaatcctcagacttgtaatactttttctcctcattctattcttttctaataaaagtttttgaggattggaagaaagtttattttgatgtttttcctcagttatgctgatttgggattaatactcctaagaaatgatgactgatatccagcaaaacaatcaaggatac

SEQ ID NO: 434974 - DNA, 550 bp, Homo sapiens
caagtcatccgctttcattaatcatctttaaattttagccctacatttcaccatccatgctgtaagcatttgttgcatctgcttgaaatgtctctgctacccttaacatctttttttcttaccatcatgatttttgcatagaatactacatatgacttgcctgtactctctccatcctgccatgtatcctgtacaacatttccagcttcttattccyaaagcacaagtttggcaagcctctaccctataaccacactttttaaaaaagtctttcaatctacagcatttttccctcaataccccattacacaagctcttcagttcaacctaactggtcttctacccagtcattcataagcatgcattatgattcgtgccactgtcaatcctcagacttgtaatactttttctcctcattctattcttttctaataaaagtttttgaggattggaagaaagtttattttgatgtttttcctcagttatgctgatttgggattaatactcctaagaaatgatgactgatatccagcaaaacaatcaaggatac

SEQ ID NO: 434975 - DNA, 550 bp, Homo sapiens
caagtcatccgctttcattaatcatctttaaattttagccctacatttcaccatccatgctgtaagcatttgttgcatctgcttgaaatgtctctgctacccttaacatctttttttcttaccatcatgatttttgcatagaatactacatatgacttgcctgtactctctccatcctgccatgtatcctgtacaacatttccagcttcttattcccaaagcacaagtttggcaagcctctaccctataaccacactttttaaaaaagtctttcaatctacagcatttttccctcaataccccattacacaagctcttcagttcaacctaactggtcttctacccagtcattcataagcatgcattatgattcgtgccactgtcaatcctcagacttgtaatactttttctcctcattctattcttttctaataaaagtttttgaggattggaagaaagtttattttgatgtttttcctcagttatgctgatttgggattaatactcctaagaaatgatgactsatatccagcaaaacaatcaaggatac

SEQ ID NO: 434976 - DNA, 527 bp, Homo sapiens
cggtgtcctcacagtggctgctccagacaggccactgccactatcaatgctttrtacatttttttctggaagaaagaattaattctttgttgtcaggggctatgtttttttcttcttattccatggtcctctcagcagtttcctacagcagagcttcccaccaatgtggtgctgtagcctagtgagctacaagtgatctgcaagtttccagagatattgatccccagactctggcagccactcaggaactcttagcctctaaggaagttcttacagctaccgcagcctctttatgtttattccagtattacagtgttctctcacagaagagattgggaaacatgggctcatcctatctttgttcctaactggaatcctaacttgatatacatgtttctctcctataaagaagctctttgaaatgagacctgaatcagctatatgttgtctccacttccttcctcctagacaattgcagtgaatttttgggtgagtttgggtgacattctcaacaatcacttctatga

SEQ ID NO: 434977 - DNA, 527 bp, Homo sapiens
cggtgtcctcacagtggctgctccagacaggccactgccactatcaatgctttgtacatttttttctggaagaaagaattaattctwtgttgtcaggggctatgtttttttcttcttattccatggtcctctcagcagtttcctacagcagagcttcccaccaatgtggtgctgtagcctagtgagctacaagtgatctgcaagtttccagagatattgatccccagactctggcagccactcaggaactcttagcctctaaggaagttcttacagctaccgcagcctctttatgtttattccagtattacagtgttctctcacagaagagattgggaaacatgggctcatcctatctttgttcctaactggaatcctaacttgatatacatgtttctctcctataaagaagctctttgaaatgagacctgaatcagctatatgttgtctccacttccttcctcctagacaattgcagtgaatttttgggtgagtttgggtgacattctcaacaatcacttctatga

SEQ ID NO: 434978 - DNA, 586 bp, Homo sapiens
gcatgatatgaatatgttaaattttaagaacttgtgcatagcagcaataatgatgattttataagatttaagaaaatttataaatattgataacattggtatcagacttattttcaaggtttattatatgcctaactaactgcagagttagctgaatattactaatggagactatttrgaatgagcttcacaaattaacaaggtcactaggaactgcaggctgttaaagatctccttgggccaaggatgaaagaaaatcaaatgggacggaagaaagcaggtgggtactctgaggagaggtaatcaaagaactgtgttctgcagccatctggactacttggagcttcaccaatgtaaccatggaaactataaggaatatgctcagaagcaggaaagcataagtgcccagagattctgtgggcctgttacaatgcaagagaaccaggctatgtgtgctgaagtggtccgctaaaggacacagtggaaaaaagggggagatgtggactccctcagaacctgtggaaaagaaagccaactgggccaccacagacttgtttacacaccagatgcctgctggatcctttga

SEQ ID NO: 434979 - DNA, 544 bp, Homo sapiens
tttggctgtgccccacccaaaatctcatcttgaattataatccttaaaaaccccacaggtcaagggcagaaacaggtggaggcaattggatcctgggggtggttccccccatgctgttytcgtgatagtgagtctcatgagatctgatgattttataagcacctgacattttccctacttgctctcattctctcttctgcagccctgtgaagaggtgccttctgctatgattgtaagtttcctgaggcctccccagccataaggaactgtgagtcaattagaccacttttctttataaattacccagtcttgggtacttcttcatagcagtgtgggaatggactaatacaacaggtttctatacaataaggctagaccaaattacaaatatcacaaatacaagaattgattatatagcagagctctgacggtgacttaaatccttccttgttagaaactagtgaagtacctagggaggagtctcatgagtgataaggagttcaggccctagagtcaggcagagctgggtttgaataccatgtcc

SEQ ID NO: 434980 - DNA, 591 bp, Homo sapiens
atcagttaaacgggatcttcataagttaaatccttcctggattcaaaatatcttttctaatgaaagaaatgcggttggggtgggagacagggtttatatatcctttctacatatgaatttatatctctatagatgtttcctatgaattctgtatttatatgtccatctacatacttaacatattttcttcgatgtctcaggcatcacacactcatatattcaaaaccaaattcatgatttccacccaaaaccacttggttcctcctcttgtgcttagtacaaattgagaaatagaataaagaaaggatagatggaaaccaaatacggctgcttggcattctgaggaatccaagctgccagtcttccatatcttgttatggtgccgtctgtgtccttctcagctgcctagcagaaaacagcctgcagaatcttgtgtgtttggtgcttctactaagaggtaaaaagcatcacttctgctcacatgttattgtccaaagtgaagtcccatggccatgcctaatttcagggagccatatgcccagaaagaaggatgaatggggamtcttgatgatcacttccataagcagcaac

SEQ ID NO: 434981 - DNA, 534 bp, Homo sapiens
cagcaagaggagtcataatttaggttcactgacttacttccacttacatcctggaaattcagagctttgtgtctttacagtggcctaggcctgtacttgattgaggacaggattaaatgttttcatttcatcaataggttcagagrgttagatcaaatttaataatatgtcacatagttataggggagatatgaacaaattgcaaacctgttgaattcttaaagagcagggagtactgtttagagaatgtggtgccttcagttagtttcattatttgtaataataaaagccacagtttattcagctattagtatgttatgggcacaggataaatgatctagagtaattatttcccttacccacacaacattctcctcagataggtcttatcatctccattttataagtgaggattaatctgtcatccctgagtcatgcaattgtcaaaaacataactgaattttaaaccaagctctgatgctaaagcttatatcttaaccactatgttgtatttctcaccaattatgtttgtgc

SEQ ID NO: 434982 - DNA, 489 bp, Homo sapiens
tcactccaagttacaacttcttccccaaaatggcagacacattgaaggtttgctcacttgaaactcaaaacacatttgtccaaggagctagggaaaatgaaacagagtaaatatttttctgcctgaaataaatcacatttcatatcaattgatgggtccgacacaagacaggtgagccccagcattggggcttagcccagaagcgttcttggtttcactcagaaaagaattccagggaaaactggtgttgttatatagcaatcttttattaaagggtactgctccttgtgaagtagggctaactcataggcagtgcacccaggggctgcaatgtatgggttgttggcaactgtatggttactcacctctactcgctttcaattacatgcaaattaaggggcagrttaatgcaaattgagggacgggttatttagaactttctaggaaaggggcagtaatttccaggccattgctatggaataaagtcat

SEQ ID NO: 434983 - DNA, 606 bp, Homo sapiens
gcagccgctcaggtatacatggagactcaggagccttagacactcaggctttccagcaaagtagctgcagcccagccaagtgggctcccatacatacccctaggaaagatgctgaatccggggggctgagcagcgacagtctgcagaccccacttccatggcacctcacaggataagacccactggcttggaattccagccagccaccagtaggcagggttacwcctccctgagatggaactcccaggagaaggagtggactgccctctttgccatttgggtgacttagctctctagtttttgggctttggagagtctgagctgaccaggggcagaagtggtcctccagcacagcacaactgctctaccaaaatgtggccagactgctttgttaagcaggtccctgatcccattcctcctcactgggtgggccctctagtcacccctgcctgtgttctccagccaagagagatttgaaaactctctgggacagagctcccagaggaatgggcaggccgccatctttgctgtttgggtgacttagctgttctagcctttgagctttggagtgttcgaggtgaccagggattgaggcagactccagca

SEQ ID NO: 434984 - DNA, 615 bp, Homo sapiens
ctatcagaattttgtctaattcagagggcactgagacagataaataagaatcagggtgtcccacacaacagcattacacataagtgtctcagaattacttaggatggtaaaattactgaggatgatataattgtgttctgatccttttttgtttgtttgtttgttttgagatggagtcttgctctctcacccagactggagtgcagtggagtgatttccgctcactgcaaccttcacctcctccactcactgcaatcttcgcctcctgggttcaagtgattctcctgcctcagcctcccaagtagctggaattgcaggcatgcrccacaagcctggctaatttttgcatttttagtagagatgaggtttcaccatgtttgccaggctggtcttgaacacctgacctcaagtaacccacccaccttggcctcccaaagagctgggattacaggcatgagccaacgtgcctggccatgttctgatcgtttaatgatagcaacatttagtattatagagcatgaaaatgtcaaagtcgcaactctaaaatgtttttatttagaaatatgtgcctattagaattttagttactagaattatttaagaaaattggacgtt

SEQ ID NO: 434985 - DNA, 609 bp, Homo sapiens
gagacttttttaccatcatgagaatagcatgggaaaaacttgccccatgattcaattacctccccctgggcccctcccacaacacgtgggaattctgggagatacaattcaagttgatatttgagtggggacacagacaaaccatatcacctgggtattccttagttgtttgtcattttcttaacagtyatgttataggatcttgcatttgggtcttagattcatgtttctaactcatggtcacatgatcatctttaatttagtagtaactatcttgagcctatcctacaaaatgagcaggttaacaaaaatgtaaagataaatgattcagcatttccagaagggagcaagttatttgccagcaagatagttggaagaataaaattggttgcttcttgttttttcaatatacttgatagatacttgcaacagcatagggttattaattaaatgtctacttcaatgacagtgcatatctaatgcaatactcatatataaagagttgtcaagtctaaaaactcctctaacttgtaatgattttctgttttatgaatatctttctatagaatttgaaactctgaattttaaggggaaatttttgtgtttttt

SEQ ID NO: 434986 - DNA, 541 bp, Homo sapiens
tgcttgtgtgacctgcagaaccatggaccaactgaacctttttttaaaataaattacccagtctcaggtatttctttagagtaatgcaacaatggcctaatacagaaaattgatatttagaagtgaggcattgctataaagatagatacccaaaaatgtggaagcagctttggaactaggtgacaagaagatgttagaagagtttcgacatctcagaagaagacgacaggaagatgaggtaaacttcgcaaatttttagaaacccattaaatggttgtaaccaaaatgccgatagtgatatggacaatmaaatccaggctgaggagatttcagactgaaatgaggaattattgggacctggagcaaaggtcacccttgttattccttagcaaagaatttggctgtattgtatccatgccttaggaatctgtggaagtttgaacttgagagtgacaacctaaggtatctagattgaaggaagacatttctaagcagcaaattgttcaagatgtggtctgagttcttctaacagcctatgttc

SEQ ID NO: 434987 - DNA, 565 bp, Homo sapiens
tgtaaatacctaatattacaataaaattacagtgccaactacatatagtgccaactaaaattgtaaatcttgcaatatatgcaaatcttcatgaagttgataaacacagagctaaataattgtaaggaacacaggtgaagccattgacaaattgaaaaaaagaaaactaatgagaatatgacagactaggcaccataaagacactraatggaaaatgctgattaaatagatacatgactctaacatttttcacaaaactaaaatcatgtggcaaatctttaaaaaggatagttttgtattgttatgcaaatgctcaaaattaattatttaattcattctttgctctttctaaggaataatttatggaagtaatgagcaagaggatgaaattcagcatgagaataggagcatctcacagtgggcactgcagagaaagtgggggacagtgagaagcagcaaaggcagcccactcctcattctcaattctgacacaggccaactctggtgcttacccttagcagcaaaatgagaaagcagtggacaaaaacacaaggcggatcattga

SEQ ID NO: 434988 - DNA, 573 bp, Homo sapiens
tagaggttgctgcagccagtttagtcaacgccttacaaaccattacagctgaaagtgctgagaatgatctagtagacaattctcactcaaggtcagaaagataactgatggctggaccagaatggataccaagaatttctcacacgagaccaggaatctctccaaacaactcttaccttgaggataatgtaacttcgaaagaaatttgtacatatttttcttagttctgtggaatatttaaatggtcccacataatttcaaataaattctggttgaagtttcgtggatcttgktttttttcaatctacaagttatttacaagttttaaaactactgagttaggttttcttttctttgtttatttaagaaaagggaggacaaatagcccgaaacttcaagctgttcatgctgaggaattggacattatatattaaggacacaagaggtatgagaattcctcagctacagtcggcagcaaatgtgttcgacaagctgaaaggtttagcactaagtacaaggcaagagagatagaagataaggaaggaaagctaaggaaataaatttttcttacaa

SEQ ID NO: 434989 - DNA, 459 bp, Homo sapiens
atgaaaattattaggttggtgcaaaagtaattgtggtttttttccattacttttaatatgtgtggctgtgattgtggatatcgtgtgttcaattatccaggctttcttttggtgatcgagacagtttcatgttctaaatgttgcagctaccacatagtaaagcccctgttggcctgggtttctgagtgactctagagttgagtcccatgtcaaccaaaaatagttacacaatttgagtagaaaataaggttatattgtgttaagctgctgagattttcagttggttatcatagtacaacytaccctacacaatatatatgactcatgggataaaaaatatatatgtatatatttgcatatgtgtgtatatttgtatataagcatctatgtgtatgtgtatatatgtacatatatgtatatgcatgtgtatatgcatacatagtacatatatacacacat

SEQ ID NO: 434990 - DNA, 579 bp, Homo sapiens
gtcttgggcagctctgccctgtggctttgctgggtatasctccactcctggctgctttcatgggctgacattgagtgtctgtggcttttctaggtgcatggtgcaagccgtcagtggacctaccattctagggtctggaggatggtggtcctcttctcacagctccattaggcagtgccccagtagggactctgtgtgggggctccaaccccacattacccttttgcactgtcctagcagagatccatgagggccgtgccccagcagcaaactttgtctgggcatcaaggcatttccatacatctgatatctaggttcccaaacctcaattcttgacttctgtgcacctgcaggctcaatgtcacatgtaagcatccaaaactaagggtgtctaccctctgaagcaatagtccaagctgtaccttgcccccttttaatcatggctggagtggctgggacccagggcaccaagttcctagactgcacacagcacagggaccttgggcgcacgaaatcattttctcttaggtcaccacactcatgcctgtgctttgaaggggctgctgtgaaaacctctga

SEQ ID NO: 434991 - DNA, 543 bp, Homo sapiens
aatacctgttactcccaaaagggcttgaaagtctcaacattttctgttattcgcacttggagaaatgaatttctgttgcatgtagctagcatcgactgccacaagagaggtaatggccattggatatacattcacatctctgacagaccttctaggacaaggagttaccaattagaggtttctcaggaagcttttaccccaacagctaattgataaaagagaccgtggtttccctagtaatagctgtagacttttgaaattgaaccagacttacacctctgcagcagatataccagcttattaaataggtgatatagtttgaagaatcaaaaacttttttaaaaatctgaatatttacctttttcaagtgaaaatattgaaagtttttaacagcctctgagcaaacaaaagttatcataaaatctagcatgtaatgtgtccaatatattgaagtgtgtcatttattctggamtaagtcaaggtacacataaatgtatacatataccatgagaaaggcagataactgtggtacagcagaaacaa

SEQ ID NO: 434992 - DNA, 472 bp, Homo sapiens
aagcttgtttcagattgcctttacttttatctttatttttgtcttattttactaaatgatttaactttaatttattatcttaaagacgactgcccctatttctttgctgggtgactgcaaagcccccagctcctatcatgaccgtgtttcctactctgtcagtggtcaggttgttggagttggggggaaggggtgttcttactatgtatacaatagggctggaccttgaaggacagctgctttgtattctcattctgagtgtcagcctcttttacatgcaggaacaaatgattgagtgcttctggctctgagtgatgggaaatgtagattgaactcctagagactatttcagtatgcttttatatctcttttgttggcaattttatatcatagttatattaatatacaaatgatgaatttagagcrgaaagaggttgtaaacacagtgtgttgagcatttctttaaagatcc

SEQ ID NO: 434993 - DNA, 574 bp, Homo sapiens
ttgtcaattgatgttgtgccaactcccagaatagttatttgtattaactgatttatccacctttttggaataccaattatgtgccagatgctgcactggcaccatgattattgtgaagagcaaaggcagtacctaccttcaaagaatttacagtttaaggaatatgtgagtataactatttaatctaggagattctgagacaggtgttcgcttcaaaaggaaaagcttttgaaaaatcatgaaggcaactgtgtacctaccacatacagcattggtaatgtttagaaaatgagacaaaattcaatcttctgtttactttatcccaaacatagttttggattttaaacataagatggagtaaggatttcactacaaaaaggatacgggaaagtaaagagaaaaaccartttattaaacttcaaaaatatcagcctaaatcaaagctcagggcagagatttgaggagagaatagagactcaaacagcttctctgtaccttcgcctacctcaaccaagagttaagcaaagtaagatgatatccgaaatatcagttattactgacagtgaaggtatag

SEQ ID NO: 434994 - DNA, 600 bp, Homo sapiens
agcataaaagttcagaaaagttgcagcctgacaatacagtagaaaagaaaatcccattttctgaggagaaattcaagttggctgcagaaatttgtataagtagtgaggagtgaatgttaatccccaacatgatggggaaaatgtctccaaagcatctcagaggtcttcacagcagcccctctcatcacaggcctggaggcctaggaggaaaacatggtttcctgggttgggcctaaggtccctgtgctgtgtgcaacctagggacttggtgccctgtgtctcagctgctccagttgtggcttaaaagggctaacatrgagctcaggctgtggtttcagagggtacaagctccaagccttagcagcttccacatggtgttgagtctgggagtgcacagaggtcaagaattggggtttgtgaacctctgcctagatttcagaagatgtatggaaacacctggatgcccaggcagaagtttgctgcaggggtggggcattcatggacaaccttctgcagtgcagaagggaaacgtggggtcagagcacccacacagtgtccctactgggacactgcctagtggagctgtaagaagatgaccac

SEQ ID NO: 434995 - DNA, 564 bp, Homo sapiens
ttttttggtcaattttctgctcttttaaaatcatctacacaatcccattattgccagaacctgaggcagagatttcccagtgctctaatctggatgccactgctcttaggagcagctctcagccaatgactgacccaccaggacaggaggcggtgtactgatacctcasctccttctcccctggagcaggataactctgatgcttgcatctgtactggctcccagagtttcctcagtaggattgagctccaagtacactaagtgataactgactcaataatgcacccattattggctattttcccttcctgtttcactttcccattcccctgttggactttcctccaccatctaaataacctatttgtattcagatccttgtctcaagatctgcttcaatgtgaacccaattaagccaggggtctataagaatagtaaatgcacatgtcttttgccccaagatttccacttccaggaatttatcctgaagtcatactcacaaatgcccccaaaggcatgatctttgtaacaatagtagtaaaacatcattaagtccttactata

SEQ ID NO: 434996 - DNA, 648 bp, Homo sapiens
tattagcatcagctaagatttattgatagagtagcggggttgctattttaagagagtgacagcgttacaatattaaataccactcaggacttgcaaatccatcttgccctgtgagactaattgcatcatgtcttatcaccctgtttacctcatcgtcagccaaatttccaagactcytaaatcatacctcatacttgatttcaatactgtactatatgtgtaatccatcccaggttctttattctttccaactcttctaaaatcctatcattaccagcagttgtgcccctctaaacctcaatttccaacattatcactccagcctatctttccaacttgctttgtatagtagtctcaggctatttatactttttctctattcctgttaccttcttgtctgtccttccttccttacccattctagatgccagagttcaaaataatactctcttgccctttctcttcctgtcaaccttatccactaattcttagctgtcattctaccaattgaacagcacaggagaaaataatacaatcaggctttaaatgtatggccacgtacttcaaatgggcactcaacattgctcaacagtccttactctgctctctttaattggctttaccacatttccagagtattattgcata

SEQ ID NO: 434997 - DNA, 635 bp, Homo sapiens
acatacatgtatatgtacacgcatttgcatatatttataatttgaagagaaagtttatatacttaacagccaacagatttagaaaaaactatttgtcctactgaataacagtatatatgaattatcagaattcttcattactagtattcaataatgagctttttatgcaataaatttacaaatcatttgcccctattttcagaaaaaattattaaagcaaccatgaatatttaaatcataagttctgtttttaaggagttcaaaacatttttacaagcatgttagtaatttagtgagaggaaattaaatatcttctagaaacatctagtaacttttaagctaatgtaatagaggaaatactacattatatgactttgtaaaaagtatttctaaaaaaatttaaagggggctgggcatggtggctcatgcctgtaatcccagcactttgggaggccragatgagtggattgctttagtccaggagttcgacaccagcctgggcaacatagcgaaactccatctctacaaaacaaaaaattagctgggcatggtggtatgcgcctgtagtcccagctactagggaggctgaggtggcaggatcacttgagcccgggaggttaaggccatagtgagcc

SEQ ID NO: 434998 - DNA, 583 bp, Homo sapiens
tctatccctgcaaattcattttgccaggtctcccaaggaatagaaaagtcatttgttgataatgaagatacactttcagacactaaaaaatgaaaacaatctgctgaagttaaaatatgcattactctaaatttagccttgtaattaggctaagaacaaaatctatcttattttccgaatmtatgtgtaacctaaggattatgaaatcaaaggcagaagagttccttatgttttttttaatttaaaaatcagattattctgatttataaaacaaactttttggtatggctattacagcagaaatgactactttaagctggaacatttatggattatttttaactgctttttaactagttccacattattattaggtatttagtgaggtactagcacatcagtaaattcatactctagttaacctaaatgtgatagtaagtgacagaatgatgagggagatctatgggcatctaagacccttactacaacaattattcatataaatgtgaactttgcaataaagcatcatccatcttggacatatccaaagttgtctttacaaatttgttttgtaaatagactc

SEQ ID NO: 434999 - DNA, 499 bp, Homo sapiens
ttaggcttgtccccgacccccacccgcccctctattcactagaggttgtttaaggcccagcttggatcaaactggcagtgaggaggaggaggagaaggaaggagatggagcatttcttcctggagttgagcagcttcaagcttgctgtrctggcttatggttaaagcagctcatgtaggtctttcctggtcctttgtagtctcccactgatggggacctccctcctgggggcttctggaaatcctaaaaacccagggtttattccacctttcagtgcccctttagataggtcccaagggaaaccctacacatctgttaccctagtgattctgagagctcaggcttgtctgggtgcagccccttctaggctgccataggagggagctttagcttacccaggagtgagtcaggctccagttctccaggccacctaactacagtctctggcagtcccaggcccctggggaagcccctctcgctggcttgagatgaagggcat

SEQ ID NO: 435000 - DNA, 586 bp, Homo sapiens
aagaggaagacaaagtattataagtatctgacatttataaagcactttatggttcccaaattgcttttatttggaacacttcacttcttttgtctaatttggagtttacaataagcctggaaagtaggtatctcaatttgagatggaagaaaactgaggttcagggaggtgaagtgatcagcccacaggcacatagctagtaaaaggaccttsagatctgggattcttgatgcccaagttcagtacgccatgctgctattatacatgcattttgcccccagcatggaaaggtactttctaggctactgaaggtgtcaagctatgctctttatttcctcctctcacttatcccagagctgcatggggctatagggatcaagaggaactgaagaatctttacattcacttgaaaatggcttctgaatttctggattttgaattaaagcaagaattatataggcaggagattgggtaatgatacaatcttatgcagtctcagatgcaaaaattgtaacagaatgatgaactcatagatgctttttatccacagactctactagtagattttacagtttatatcatagtt

SEQ ID NO: 435001 - DNA, 510 bp, Homo sapiens
aacagggcctctgaagggttttcagcaagagggtggtgcaatctgatctttatttgcttcccgacctcttgtgctttatggaacacacagaaaatgatcatttttcatggtcccctgggataaagggataaggctgctgctcacagccatgtcgtgttgggagctcagcatcctcaggctccactggctgttcctctggctgagggcctcgcatccacccacctgcagaccatcacagcaccccagtgagcagacggtggtttaagagcagcaaaacaggatgaggcaagagggatggaggcagcatggcggtggtgagggagaatgcagactygagagctagtcaggaagcacgtgtagggcttggtgacggagagtgtgacagggatggctgaggaggtggtactgctctcaggcctcttgtctggcttgaataactggggaagcattcacagcagtgccacctccagccaaaaaccctgtgtgaacgcaaagcagttatactgctgg

SEQ ID NO: 435002 - DNA, 510 bp, Homo sapiens
aacagggcctctgaagggttttcagcaagagggtggtgcaatctgatctttatttgcttcccgacctcttgtgctttatggaacacacagaaaatgatcatttttcatggtcccctgggataaagggataaggctgctgctcacagccatgtcgtgttgggagctcagcatcctcaggctccactggctgttcctctggctgagggcctcgcatccacccacctgcagaccatcacagcaccccagtgagcagacggtggtttaagagcagcaaaacaggatgaggcaagagggatggaggcagcatggcggtggtgagggagaatgcagacttgagagctagtcaggaagcacgtgtagggcttggtgacggagagtgtgacagggatggctgaggaggtggtactgctctcaggcctcttgtctggcttgaataactggggaagcattcacagcagtgccacctccagccaaaaaccctgtgtgaaygcaaagcagttatactgctgg

SEQ ID NO: 435003 - DNA, 569 bp, Homo sapiens
ttccttaacactagtaatcatgcagtctttcactcaacaaatactaattgagtgccaagtaaagatgtcagctctacggagcttacattttagaaggagaagaaaacaaatatcaaggtgtatattatagtgtacagcaaggtgaaaagtgccatgaaaaaacagtagggcggggtaaggaggaggagaaggtgtgttgcaatttaaaatttttaacaaaagttcatgatactcwgagaattgaaacaggtgagatcattagacattcgcatgtttgagcacaagcgctgaaggacttagcaatgtggctgcagtggaataggagagatgcaaaataacagacaaacccagagaggtaagagagcagacctcttcatgagaggctgcctgataaactgatttgacactgaattgctgagaaggtaatgcaaatagtttttttctccaagaacaaagtagttcttggtcaagccgatttgatttgggctgtgggaatctgcacaaaccatttcactagctaagtctcaggttcctcaaatgaaaaagcagggactggaaatggcttttga

SEQ ID NO: 435004 - DNA, 569 bp, Homo sapiens
ttccttaacactagtaatcatgcagtctttcactcaacaaatactaattgagtgccaagtaaagatgtcagctctacggagcttacattttagaaggagaagaaaacaaatatcaaggtgtatattatagtgtacagcaaggtgaaaagtgccatgaaaaaacagtagggcggggtaaggaggaggagaaggtgtgttgcaatttaaaatttttaacaaaagttcatgatactcagagaattgaaacaggtgagatcattagacattcgcatgtttgagcacaagcgctgaaggacttagcaatgtggctgcagtggaataggagagatgcaaaataacagacaaacccagagaggtaagagagcagacctcttcatgagaggctgcctrataaactgatttgacactgaattgctgagaaggtaatgcaaatagtttttttctccaagaacaaagtagttcttggtcaagccgatttgatttgggctgtgggaatctgcacaaaccatttcactagctaagtctcaggttcctcaaatgaaaaagcagggactggaaatggcttttga

SEQ ID NO: 435005 - DNA, 555 bp, Homo sapiens
cttttgcagtggccataatataattgtgataatgtaataaaatcaggaaacattacctgaagcagatgyttttgaagtcaccagaaaatagtcttctccaattccaatttaaatatggaggtaatttaccccttattttattaaacgatcacaaagatgttggaagcatttttcttaatgaaaaccaacaaaactttgcatattgtcaagttacgtaacttctctaagcctttgttttctcattggtaaaatatgtatggtaacattgtctccctcacgggatggatgtgatgagtatctgaggtaatgcattaaaaaggtaagcacactgtgtgtcttgtagtaaatacttaatatgttagggattattcaataatgtgcattattattttaacaaatatatctttaaatattaaattcccttagtcatatgtgagaaattgtgttggcttttaaaaaaacaaacttaaccagatcagtatgagaaacttaaaacaggctcagcagctaactcattcttccatctcttccaacagacaaaaaagtttggttttt

SEQ ID NO: 435006 - DNA, 588 bp, Homo sapiens
ctttctcccataggatttgatcaactataacagacttggtcaaattccaatgagaattccaaattaggggaaacaaggcctctgaattggctaaaattcctggcagctgcacaaacaaaaacaaaaacatgtgcttggtttctgtgttcacttcctttcttaaaaaaaaaaaacaaaaaacaattattcttctgtttacttttgttccactctatttttccttcccccttcaccatctctggtaccaagaaaaatctacagaagggttctaatgtctcagaccccttaaagaactcagaacaaaggcaccactcccacccccttttggggtgttctgttttctttgtggrgtttcaagagtcatgggcagattcttcttagatttaaaactctgctttcctgtattgcattacctgaccctcttggcttttgcgggcaccagagattaccttgtactgtgagaagatgtgaccttggagtgtgtaatggcagacaagagctataaagttaggagtggctgaggacagtttacagctggtcttagctttttccaccccgctgcccccaccaatgaagttgttgtttagg

SEQ ID NO: 435007 - DNA, 588 bp, Homo sapiens
ctttctcccataggatttgatcaactataacagacttggtcaaattccaatgagaattccaaattaggggaaacaaggcctctgaattggctaaaattcctggcagctgcacaaacaaaaacaaaaacatgtgcttggtttctgtgttcacttcctttcttaaaaaaaaaaaacaaaaaacaattattcttctgtttacttttgttccactctatttttccttcccccttcaccatctctggtaccaagaaaaatctacagaagggttctaatgtctcagaccccttaaagaactcagaacaaaggcaccactcccacccccttttggggtgttctgttttctttgtggggtttcaagagtcatgggcagattcttcttagatttaaaactctgctttcctgtattgcattacctgaccctyttggcttttgcgggcaccagagattaccttgtactgtgagaagatgtgaccttggagtgtgtaatggcagacaagagctataaagttaggagtggctgaggacagtttacagctggtcttagctttttccaccccgctgcccccaccaatgaagttgttgtttagg

SEQ ID NO: 435008 - DNA, 525 bp, Homo sapiens
aacatggcgtcccataattattagatcttattattgacactaaaatggcattaaaattaccaaaaggaagacagcatctggtaagtaaactttatttatttatttatttatttttttgagatggactctcgctttatcgctgcccagactggagcgcagtggcgcgatctcggctcactgcaaacctcacctccttgactcaagcaattctcctgcctcagccccactgagtagctgggattacaggcacacaccgtcacgcctggctaatttttgtatttttagtacagacggggttgcaccatgttggccaggctggtctggaactccacacctcaaatgatccacccacctccgcctyccaaagtgctgagattacaggtgtgagccaccgtgtctggccacatcttgtagataaactttaaaaatcttttttctttgttatgaacaattttaagtacatacaaaagtagagtataataaacctgacacccaatttcaacagttatcagctcatggatggta

SEQ ID NO: 435009 - DNA, 486 bp, Homo sapiens
agaaatcaggctagcctccatcccctgcacttaacggcttactcagattcttccagcagagtccccactgtgctgagggatatttcctgcatgcccggcacccactgccagcccacccatctcttctgaagggaggtggcctgctggtcagcgattttatgtattctggctcaagttccagttctcgctttctctcatttagcaaactaagaatgatcaggggatgagagcctgcctaakaaaccaaagcaggacattagtgatggaaggcaaaaaaaaaatcaagcatgatagtttgaaagtgccagagtgggcctcttctgactcagaggattggagatggtcactgtcctctgctctggtgggtaacatgtacctttcctgtttccaaaggactcctgggattggcagctttcacatggccactttttcccaaacattgacattcacctccaacctcatgccactggcgacagtaacaagtct

SEQ ID NO: 435010 - DNA, 610 bp, Homo sapiens
taaaaacatatttccataaaaatcttgtaaatgaatgttcacagtagcattattcataatatcccaaagcaggaacaacctgtgttcatcaactgatgagtggataaaatatagtatattcataaatggaatatgattcatccacaaaaaggaatgaagtactgtatatgctataacgcagatggaccttgacttatatgctaaggaaagtaagccagacacaaagggacaaatattgtatgattccacttatctgagggaactagaataggtagtcatagatacagaaagtacaatagaggtgaccaggggctgcagggagcagggtcatggggagttattgtttgatggacacagagtttctttttggaaggaggaaaaagttctggaaatgtacagtggcaatggttgcacaacattatgaatatactcagtgmcactgaattgtatacttaaaaatggttaaaatggtaaattttgttatgtatattttaccatgataaaaaaggaatgaagtattgatatatgttacaacctggataaaccttgaaaaaattatgctaagagaaagaagccagacacaaaataccacgtagtgtatgaatccatt

SEQ ID NO: 435011 - DNA, 638 bp, Homo sapiens
gctagaagaaaaatgataatggactttagaatagataggatggctgagaacaatgacttaaaaagtgtttcagaaaagccttcgttggaatgcctagttcaagtctgccatttccctgcaaaaggagaggaaagagattctaatcagaatagcagtaaaagagcagtttgtattatttttctctcacaggtctcaaccagtgcaggaacaggggtaatatagaatatgatttaaaaattcattggtgtgtttcctaagcatatgatgttgaatgaaggattcatttcattgaatagaaaaggaaaaatgtcaaactgtttgatgtctgttccaagaaatgtatccaaaatctttgaacttgtcaatcaatwatgtgaacaaagaaaataacttctgtaatttccatggcacttagtccaaggcttgaaaaaatagctatttctatattaatgatttttatagggcctcaggcaatttgaaaagaaaagtttcaagatctagcacataatcaagatctgacctttggaccccttttccaccccccctccccctgtcacagctacctccattgaatttcttcctaagaacagagagaaacctatagagaaatagatccaccttgttttctccaaatcatt

SEQ ID NO: 435012 - DNA, 579 bp, Homo sapiens
ggaagcttggtcccaatgttgagcagcactttatgtttttctaggtgttttagcatttattatcctttttgatcatcacaatcctgtgagataagcaggataacttcttttcaactacgaaatagctaagagattaaggtgcttgaaaaaaaaagcattctcattcattcgactcataacctgagaaataaattagtactattctcattttacagttgatactaataattaccaattattgagcacctgttatgttgcctgcaatggtttaggcattttaatttatctctagtccttataaagtcttatcaaaggaagtatcattactatcattayataatgagaaaagttagcttgagagaggttacatgacttggccaaggccacaaagctaaaagtagtagagctaggatttgtgtgattttaaatcttatgctctttccttactccaaactgtctcagagagaaactaagggtcagaaacttgatatcaactgaattttttctttctttctttttctttttgagacaggtcatcactttgttgcccaagttcaagtgcagtggtgcagtcatagc

SEQ ID NO: 435013 - DNA, 652 bp, Homo sapiens
tatttggctggatttcgtagcctatctttttatcgtatgtacatcccacccctttcaaggaaagcagtgattctcagaaataataaagtcacattttaaaaagcaataatttctttcctgaattcagacccatgatggattttgggttttacatcattttgcaaagcagtttctgttctttctgtttctactggtggagagacctgaggcccatacaatgctttgtctaaaaacagatccattaaaccctagtgacacaaagaaactgcagcagaagctttgaaattcaagaacttttcgcaggctttttttgttgttttgtttttgttttttactttgggccaggtcaaatttttagctttggtgtattcccctctctgatctttgaagatagtcccccaaaagccaggtgaggagagtgcaggaaagaaaggatggtggggagtaacccttaagattccatagaataagcaatagaataagcaccacgagaatagacatcaaayattatcagagctttgttttttccccagtggagtaataggtgaatttaatttctgcagattatcagctgtgagcatatgttacattttattttacattgtatttcaacaaaaacaaatcagtataaacactcctaaatagtataaga

SEQ ID NO: 435014 - DNA, 558 bp, Homo sapiens
tatccctttaaaacagaaattataactcagatcattgcctggcactgctaccttgtgtacgggacattattgagaagacagtgcacataggctttaaacatttactttggctgaaagttatttagaagccatttaatatggatttccttggacatggtgaataggcacatgcttgaagaggtaaattgaattgttctcttaattttcaccctttaatggaattttcctccttccacaactctctctcactcactcattcactcacttttggttgttctttgattttgggcttagctaaaaggttaaggaaatactcctttgatgaagtttagctttgaaaggaatgtgtatattctttcatctaacactacatagggtatgtttstaagtacaaacgtctctgggcttttatatcatgaggtgttctgttaaagtaaggaaatcgagagaagggagtcaatcctctgaagttatcctcttgctccaggggtcattttgtacattctcttctctgggcccaactttgtgtaagtatgcaagtgtgagaagctcacttgc

SEQ ID NO: 435015 - DNA, 574 bp, Homo sapiens
tcagccttggcataagcattagctgggagcctactggaaatgcagattctcggaacccactccagcatgtggaatcagaatctgtactttcacaagatccccaagagactcctatgcacattaaagtatgacaagcactgatatgaggtatttgagacagcaaagcagcttgaggaaggagtccctttggtgagacaaagaccaaaagtggtggataaggatgatctggtatgttgggagtgggtacaaagattaagtcatagttgcctgcttttttgcattcctttatacttgtgmtttgatgacaaagtttctccacctcaaagaatagtgaaaccagcctggggaataagaagagtgaaaagtacttggctttcaaatctctgagcagtagaagcagtggaaagacaacatgaggccatgggaagagctcctttcaggagccctcatggtccagaatcagcgctatcattgcctccccttaatgttgagcaaatccctctccctctctaggcctcaaattctctgcctttaaaccaggtactctcaaaggatcttttcagctttgatattc

SEQ ID NO: 435016 - DNA, 533 bp, Homo sapiens
cagcagcacatcaaaggaagtggtagcaggagtgtaaggggggatctttaacagctgatggtattcctagatagtaccttgatgctggtgaccagtcacttaattagtctccttctatttaggtactgggggaaagggggagaaacagtttccccaaaggcccaacatgagaagtgtgcttcccattgatgttctcttggccattacagctaatacatggtgtctactacaggatagatgtgtttctaagtgcttttcmtgggtttactgaatttgttctattttagtaacattcctatgaggtaggtactggtattagccccattttataggtgaaaagacatgcactgttacgtcatttgtccaagtacttgtagtcaggaaatgtgaaatataggattcaaatccaggctattcccttacctaatcacctgggaaaatcttaatccaccaacctggggaaattctcctagaggacagattgaagccaggttgatttcatagttcctcatacctttaatcttccaagcttg

SEQ ID NO: 435017 - DNA, 629 bp, Homo sapiens
ttaccggtaagttttatacctttgtatgtctacatgataccaacctttggattccagggggctcccttatgcatttcttatagagctagtctagtgatgatgaatctttcagtttttgcttattgaggaagtcttaatttctctttcatttatggaggataactttgctggatgtagtattctcgcctgacaggtttttatatttttctttcagcactttgaatatatcattccattatctcctggactgtaaggtttctgctgagaaattcactgttagtctggttgggcttccctcatatacractagatacttttatcttgctgtttttagagttccttctttgtctttgacttttgacagtttgagtataatgtgtcagggagataacctttctgggttgtatctatttggggatctctgagcttcctgtatttagatgtctaaatttcttgctagactttggaaattgccagttattatgtcattaaataggtttcctatgccactaatctcctcttcatctctggaacacccaaaatttcaacatttggtcactttacagtgtcccatatattacaaaaaccttctcctgtctctctctttctttttgcccaactgggctatt

SEQ ID NO: 435018 - DNA, 629 bp, Homo sapiens
ttaccggtaagttttatacctttgtatgtctacatgataccaacctttggattccagggggctcccttatgcatttcttatagagctagtctagtgatgatgaatctttcagtttttgcttattgaggaagtcttaatttctctttcatttatggaggataactttgctggatgtagtattctcgcctgacaggtttttatatttttctttcagcactttgaatatatcattccattatctcctggactgtaaggtttctgctgagaaattcactgttagtctggttgggcttccctcatatacgactagatacttttatcttgctgtttttagagttccttctttgtctttgacttttgacagtttgagtataatgtgtcagggagataacctttctgggttgtatctatttggggatctctgagcttcctgtatttagatgtctaaatttcttgctagactttggaaattgccagttattatgtcattaaataggtttyctatgccactaatctcctcttcatctctggaacacccaaaatttcaacatttggtcactttacagtgtcccatatattacaaaaaccttctcctgtctctctctttctttttgcccaactgggctatt

SEQ ID NO: 435019 - DNA, 572 bp, Homo sapiens
cctgtgggaactgactttccactagtcttgtcagccttggatttattactgcagcttctgcttcctcagctactctcatacaggtcccatgatgctggcaggtgccatcctactgtagttcccagagccatcaggatgtgagtatggacracctcagtcctgactgtccctcacctctttcccacccctactatcatcctgtgggagtcagaattatgtctccttgtgggcttgagatccagaaggacttaatagagactgagtacctctattgctccctgtgtattactagccactgccaatcagaccttggcctctaacctctttggaaggaacttgagcagcattattatattcatttttgcctcagtccacaggttataacttctgctcttattcctcatattactgtggatttccatggtttaagaacaagggacctagagacagaatgtgtaaatttattacaattcccagcaggatattgcttctctcttctgtctcctgcaggaccaacccaccccctcactgagtgcctttgaaggaactcccatagcacagttgtaatgaca

SEQ ID NO: 435020 - DNA, 586 bp, Homo sapiens
gagtacctctattgctccctgtgtattactagccactgccaatcagaccttggcctctaacctctttggaaggaacttgagcagcattattatattcatttttgcctcagtccacaggttataacttctgctcttattcctcatattactgtggatttccatggtttaagaacaagggacctagagacagaatgtgtaaatttattacaattcccagcaggatattgcttctctcttctgtctcctgcaggaccaacccaccccctcactgagtgcctttgaaggaactcccatagcacagttgtaatgacagcaggagtacaaaatgtaggaggaaaggagggtaagggagtgtgggagagacagctgatattgatatacctgggagctatatcaatatgggcaaattacttcacccaaataaccatggttggcctttaataastactcaatactaaccagtagtggtggtagtagtagtagtagtaggtggcagcaacagcagccactgtggtagtgatagcaactgccttatctgctatccaggaatggaatcttctctttatccactcaggactggtggatt

SEQ ID NO: 435021 - DNA, 590 bp, Homo sapiens
attagcctgtacaagagagtcagcttgatctttgaagctaaacattgacttctcctctctagctacatagctacatggcatctcttccaatataagactatttcatctacattgaaaatttgttgtttagtgtagcccctttatcaattatcttagctagatcttctggataacttgtgcagcttctaaatcagcacttgctgcttcacctttcacttttatgtcatggagatggcttctttccttaaacattatgatccaacctctgctaacttcaaacttgtcttctatatctttctcayctctctcagcattcatagaactgaagagaggggctcactctggattaggctttggcttaagtgaatgttatggctggtttgatcctctatccagaccaccaaaagttttttcatatcagctataaagctgttttgctttcttatcatttgtgtgttcgctggagtagcattttaaatttcccttaagaactttttgctgcattcataacttagctgtttggtgcaagaggcctagctttcagcctttttcagcttttgatatgtcttccacactaaacttaattattt

SEQ ID NO: 435022 - DNA, 600 bp, Homo sapiens
cactctccaaatctcagagcaaagaaaaagtccacccgatctctcattgctcctcaattgattcctgttttctgaaattcctattggcctatcaccagactgctgaagctcagtctgctttaagtctagctgccaaagtacacctatctggccctctggcacactggccccagtcttactgtattatctagactctggtgttccaacctgagacctcaggccactcaaaggagaacagcaaaggaaaaaatatatgatacaagaaaatcgctggccattgaggggaatggacaatatgaccttggagatattttcgattctcaaaaatctctgattctatattcttccccacccacacacactcgaagcctccaaaaagaaaataaaaacagatatttgattttgatagtccatagaaacttaacctctgtagacckcagtttacctgtaagtaaatactacataaagttgtgagaaatcgaggagatgctttgtgtcaaatgtatagcaccatgtctgacacatagcaagctgtcaaaaaatgctatcatttttactgtgataattattattacagccccagctagagagagaaaaagg

SEQ ID NO: 435023 - DNA, 392 bp, Homo sapiens
gggggtggaatccacttacttacttacaatcttactactttcatttcattgcttcttatactgattttttgttatttctttcttcatttcttactgtttatctttgtgattaagtyagtttctctgatacgttttgagtcattgctttcttattttgtgtatctattgtaggtctttgcattgtgattatcaccaggcttacaaaatcatcttgtggatctaccaggttattttgaagagatgaaaactgattttagatcacaaagacaaaattgaaatgaaaaaaagccaaaaaccctttatactttaataatacctccctccggtttttacttttcgttgtgtccattttcataattttataatggccaaaattatattagatttctgta

SEQ ID NO: 435024 - DNA, 660 bp, Homo sapiens
atactttttaaattctttgtgttgggcagaggaggggtatgggcataattaatacgtaaatccaattattttattgtcatctcagagcttttcagttctctggatctctgggaactgtatcatactgctatttgtgttaggaggtattgctggtggtagtctcagtgatatacatatatatacacatctcatagttgcctcaaaatttttataattttgctgtaatcactcatgtgtaggtttttgtgaggacattaatattcagttcctctaggtaaatatcaaggagaatgatgggtraattgtatggtaagaacatatctagttttctaatgaagactccacctatattccactgtagctgtaccattttttattcccacctgcagtgaacgagagtgtctatatttcacactcctagccagcatttggtgttgtcagtatctgaattttggttgttctaatatgtgtggagtggtatctcattgttttaatttgaattcccctgatgacacataatgtggaacacatttgtatatgtttattttttactgtatattttctttagtaaggtgtctgttaaggttcctggctcacttttaagttaggttatatgttttcttatttttgtgctttaagtgtttctgtgtatttcagata

SEQ ID NO: 435025 - DNA, 551 bp, Homo sapiens
attttttctctgatgcttttacttttcttatgtagatttcagtttctgtcccacaaaatttcccttctctccaaataacttcttttaaagttttactggcaagtcaatgatactggcaacarattccattaattactatttgtctgaaaaaaagtcgttatttctccttcactttggaagaataattttgcagagtatacaactccaggtttatggttttatctctcaacacgttaaatttttcacttcactttcttctttattgcatgatttctgaatataaatcatatataattctgatttttgtccccatacaggcaaagtgtgtttttatgttttgtttttaaattcttttgattttttattttctgtactttgaatataatatttctaagtgtagttttggggcattcattctgcttactgttctttaagctttctgtatctttggtgtttcacattaacatggaagttttcagtcatgactgcttcaaatatttcttctgttcctttctttctcctgattctttttgtattgtcattacacaaat

SEQ ID NO: 435026 - DNA, 568 bp, Homo sapiens
tcaaaggagacaggaaatgagaaaatggggctgactcactaagtcaggacacccgtccaggacaaacccggaagactcatgagcaggcccgcaggcagttcctcattaccacatcccactgcttggagcagacaacagcaagggaagccatctggaggttaggtcratgcagctaggtctgccagaatgatccagatcaaaaagcctgcacattccagctcagcctttttccagggtctagccaagtctccagcccttcctgcattccattccctgtgcctggaacactcgacttcctttggtttggccagttcctacctgtactgcaggtctcttgtgtaacatgcacttccctgaatccttactggaatatccagtgtggatgagctacttggtcctgggctctcacagcatcctgcattctgcctgtcctacagacctactctctatctgactggctgccttctgtccgggctctaagctccaagaggagaaggactgtgtctgttttgctaccatacagtgttgttaatatcagtatccaatgatttcatcattaaaggagatg

SEQ ID NO: 435027 - DNA, 472 bp, Homo sapiens
gggtaagcacaaaacagaactgaggcactgtggcatgaatgactttcaagaaggtaacaccaaatgaagagctggaaagaagatctgccttcctttctatgagttaattatcttgtccgtttytttttctagtcatttaataaataatattttgcttatcgaccttttttaaaatcttggaacaataagagagatactttcatttcttcatccaatttcaaagtctggagaaaaaaagacatgcatgcacaactaagtaatcaacgttagattctgctgacatttattaagctcctacagtaggctaggaaacaggcacataaaactacatggccatgagtttctaatttaattctgtttcctaaccaaactgaatcaaaaggctattgtttttcccacatcttcaacaattcatttaattcctgtattaatctatgtttcgaaacacccaccctggtcatcccttatcctg

SEQ ID NO: 435028 - DNA, 572 bp, Homo sapiens
tccagcctgatctactgcccctgccaggcattatctgggctcagtgtcccatttcagctctctatccaaactccattgtttcttcttgactaggcccattacttggtgctgctgtctgtttgccttgtttcagctcttttctgggacattggctcaggtcatccttacctctccggactccaggctaaagctctgacttctttggtctggacaagtctatctggtgcaacccgggagggctctcccagctcagggaccctcagcatttttcttttctcactggtagggacactcagaatcatgaccatgggtcaagataacagaaagtctcccttttactggtacatgtgaataatagaaatttatttgatctctcatgcagctcagtgacagaccagcgatgtctttcctggccacagggcagagtacggtggactgtatgtttatactttatgccccttttgtacactyttctcatcagagacagagtaaaaattctgtctccttgctactgggctggagggatttggtgcttcatggatggagctagagaccattttcctaagtgaact

SEQ ID NO: 435029 - DNA, 623 bp, Homo sapiens
tggtattttaatttgtacaaagtaatgagagtttccaccaatttagtctaaattttgatcctgaaatttctacgttgcaggagtgatgggacaaatcactaatcagtatattagtgctttttgcaaatcttggtctggaatgaccaacctaagcggccacgagaaacttcgtctcctggaaatagatgttctggtaccttagttgaaattgctagatttcacatcttattaggaatctgcttgtaattctgtactgtctcaattttatcttcagaattgaattaattagctaagaaaacttttgcatcatgtgtaatttgtttttttcttcagatgtacygtgataacaagctattcttttacatcaagatggaaacatattatattttcatgcaaagaagaatctgttatttttgaagtgtttaatccccttgtctttaaaatattcagaaagtaagtgcttgtcaggcagtggatgccctgggtctttggaagtcaaactttcagctgatatggctgtggatggtttcatctgtaacacatggaagatgttccagacagaagaatttgcaggagttacagcttcgttaaggtgctcacagaaggccagtttcctaattaga

SEQ ID NO: 435030 - DNA, 572 bp, Homo sapiens
ctgcttgtaattctgtactgtctcaattttatcttcagaattgaattaattagctaagaaaacttttgcatcatgtgtaatttgtttttttcttcagatgtactgtgataacaagctattcttttacatcaagatggaaacatattatattttcatgcaaagaagaatctgttatttttgaagtgtttaatccccttgtctttaaaatattcagaaagtaagtgcttgtcaggcagtggatgccctgggtctttggaagtcaaactttcagctgatatggctgtggatggtttcatctgtaacacatggaagatgttccagacagaagaatttgcaggagttacagcttcgttaaggtgctcacagaaggccagtttcctaattagaaatggtgttgggtataagaattgaaggaaaaaaggctggaaattgtaactggcattggcctttatggtgccatttaaaaaccaaaattttatagtwgatttctgtctttcaaccttggaggcttgagaactcataaccatttttgaaaacgtatccaccttgcttaacctcattgtctataaatt

SEQ ID NO: 435031 - DNA, 538 bp, Homo sapiens
ccatgctgtcttccacaatagttgaactaatttgcactttcacaaagagtgtataagtgtttctcattctctgaagcctcatgatctgttttttttttttttaactttttaatagtagtcattctgaccggtgtgagatggtatctcataattttgattttcatttatctaatgactagtgatgttgtgcttctttatatgctataggccacatgcatgtctttttttttttttttgaaaagtgtttgttcatgttctttatccactctttaatgggtttttttcttgtaaatttgtttacgttccctatagatgttggcttttaraccattgtcagatgcatagtttgcaaaaattttctcctattctgtagtagattgtctgttcactctgttgctactttcctttgctgtgcagaatgtcttcagtttaattagatcccatttgtcaatttttgcttttgttgcaattgcttttggcatctttgtcatggaatattttttcattcccgcgaccataaggatattgcctaggttgt

SEQ ID NO: 435032 - DNA, 663 bp, Homo sapiens
gaattaaatccagaaagtctggtccagcagccatattcttcattactacaatataaggcctcttctgcctggcacacggcttcgaaccctgttttattctatttatttgcaggctacctgctgtggtctgaatattccccaaaattcataggttgaaagttaactaccaatgtgatgatattaagaaatgggacctttaggaggtgagttagtcataagggtagaacctcatgaatgggattagggcccttttacaaaaacttgaaagagtaggttcattcccttccatctcttctgacatatgaggacacggtgttggtgctctctggagggcactgcaacaagatgccatcttggaaacagagaccaggccctcaccagacactgaaactgcttggacttccagcttctagaaatgtgacaaatgaatttctgttgtttatacattactgagtctcaggtattttgtcataacatcacaaatggactaagacactactaactacccagagatatcccaagctgttatgctctttatggtctttttagatctttgkgactcatctggaattttgagattaaccatactttatgcaaggtataaagtctccttgcattctcctggcttgctgagccattaggaaaacattgttccttccacaa

SEQ ID NO: 435033 - DNA, 502 bp, Homo sapiens
tactctttttgtttcttttttatgtaggtgttttgtgtgggtcactccatggattcataggtgaatctattccctcaaaatgaatctattgggaacattctttaaaaaaaaamaaacaaacaaaagtaacagagcaatagcaagatctttctgaaaaagaaattgctggcacattttaccagcatttaccttgatccaaatcattgagtttagagagagatccagtcaatttagcaaatcagccaaaagcaacagtatatgacagatcaaattccattggaacaaataccacacagactgggcaattccaggggcagatataagacaaatgaggggaagttgaagggagataagattgttggctgatagaaaggaatttctaacaactaactcgagccccaaatagacaacaaaggagcaacaaagatgcaaagatggtcaggaggagtttggaggattcatgcaggagggtgtgggaggccttgtggtgagtagactggat

SEQ ID NO: 435034 - DNA, 502 bp, Homo sapiens
tactctttttgtttcttttttatgtaggtgttttgtgtgggtcactccatggattcataggtgaatctattccctcaaaatgaatctattgggaacattctttaaaaaaaaacaaacaaacaaaagtaacagagcaatagcaagatctttctgaaaaagaaattgctggcacattttaccagcatttaccttgatccaaatcattgagtttagagagagatccagtcaatttagcaaatcagccaaaagcaacagtatatgacagatcaaattccattggaacaaataccacacagactgggcaattccaggggcagatataagacaaatgaggggaagttgaagggagataagattgttggctgatagaaaggaatttctaacaactaactcragccccaaatagacaacaaaggagcaacaaagatgcaaagatggtcaggaggagtttggaggattcatgcaggagggtgtgggaggccttgtggtgagtagactggat

SEQ ID NO: 435035 - DNA, 444 bp, Homo sapiens
gctaaactaggtctgggcaaagttttaatagttggcaacatgacaagaaaaacgaaactgttaaaacaccatgaatttaaaaaaataaataaataaggataattaaagatgtcagcaggaagtattatacagtgatggggggtgagtgtattgggattctgtgaccttgaacaaattattcaagatcactaatcctttaccacatctgtaaaagggaacaataatggtgcattcctygtaggacagtcatgaggttcaaatgaggtgattatgtgaaatgcttaatggtgctggaagcacagagcacatattcagacttgattcatccattggcttctccacatgctctctgtccttctccaggctcccttgccctgggaggctagcctatatggcttctgcctgggtttgcttgcctgagaggcccagtaggagcatggggga

SEQ ID NO: 435036 - DNA, 444 bp, Homo sapiens
gctaaactaggtctgggcaaagttttaatagttggcaacatgacaagaaaaacgaaactgttaaaacaccatgaatttaaaaaaataaataaataaggataattaaagatgtcagcaggaagtattatacagtgatggggggtgagtgtattgggattctgtgaccttgaacaaattattcaagatcactaatcctttaccacatctgtaaaagggaacaataatggtgcattcctcgtaggacagtcatgaggttcaaatgaggtgattatgtgaaatgcttaatggtgctggaagcacagagcacatattcagacttgattcatccattggcttctccacatgctctctgtccttctccagrctcccttgccctgggaggctagcctatatggcttctgcctgggtttgcttgcctgagaggcccagtaggagcatggggga

SEQ ID NO: 435037 - DNA, 540 bp, Homo sapiens
tcattgatgtagcacgtatcagtgctttgttccttttttatggcagaaaaaaaaaaatcttccattgaatggatataccacattttatgcattcatcagttggtagacatttgggttgcttctacgttttgactcttgtgaataatgccattatgaatatttgcgtgcaagtttttgtgtgggtgtatgttttcatttctcttgtacatattcctaagagtagaattaccgtatcctatggtaactcccyggttaacattttgaggaactgccaggttgttttccacagcggctgtaccgttttacattcccaccagcagtgtatgagggttctagtggttctgcctcctcacccacacttttgttattgtatgtctttttattatagccatcctattggatatgaagtgatatttcacagtggttttgattttcacttccctaataaccagtgatgttgagcatcttttcatgtccttattggatatttgtgaggaaatatccgtttagctctcccactttttttttttttttttttca

SEQ ID NO: 435038 - DNA, 540 bp, Homo sapiens
tcattgatgtagcacgtatcagtgctttgttccttttttatggcagaaaaaaaaaaatcttccattgaatggatataccacattttatgcattcatcagttggtagacatttgggttgcttctacgttttgactcttgtgaataatgccattatgaatatttgcgtgcaagtttttgtgtgggtgtatgttttcatttctcttgtacatattcctaagagtagaattaccgtatcctatggtaactccccggttaacattttgaggaactgccaggttgttttccacagcggctgtaccgttttacattcccaccagcagtgtatgagggttctagtggttctgcctcctcacccacacttttgttattgtatgtctttttattatagcyatcctattggatatgaagtgatatttcacagtggttttgattttcacttccctaataaccagtgatgttgagcatcttttcatgtccttattggatatttgtgaggaaatatccgtttagctctcccactttttttttttttttttttca

SEQ ID NO: 435039 - DNA, 557 bp, Homo sapiens
aacatggtgtggtgtgatcctatcccatagctccttaatcttccctatatcctagtacccagattttaaaaaatagggctcaggctgggctctgaggtgagggaagaggaaagttggggctagccagggccctgaggcatgggcggggygtggtgtgacatggtaaggggtgggagtgggcaggagagactgcctgggtgaggcttgcctcagatggagaagcctgacctggatccacttgctgcctgtaggagctcagtcgccaaaacctgtctggcctaaagacaggcacagtttgatttaatagttggtactgacctcacttgaacattaaatcaataaatgccaacttaatggagctgttgctgggaaactaaggagtatcaaatatccaatatctgcacagaggagattgttttgatctgttttgtttttctaaagctgcaacttgctccttggtgcactttaggttattcctttttggtaggaaagtggctcccacactctcctctccacccaccctttgaagaggcttggaaatgcactcagcagctgcc

SEQ ID NO: 435040 - DNA, 457 bp, Homo sapiens
ctctgggggctatccatgacaatttgtcctactagataggacctcatgagaatctggggaaaaccaaagaaggaggaaacaagttactagactaacactatagctactacggtccactacatattccaaccagcttaaaggaaagggggaatttatcttaaggatacaggrgtatcttgtggaatacgagggaaggcatacagctgggcctttggagagaacttggaagctatcaggaccctggcagcttctttctgcccagatgcttcattctctctctctgcaatcctcctttttctgcttcttagtgtacccagtgggaagaaagtggtgtctctacaacctcccggttttgatcttcttcattcaagggaccagcctaatttaaatgtgcaaggaaagaaagctgattgatccagcttgagtcagatttccaccccctaatcaattgtgttca

SEQ ID NO: 435041 - DNA, 606 bp, Homo sapiens
ggccatgtgcctgtagtctcagctactcaggaggctaaggaggtggaggctgcagtgagccataatcatgtcctgcactccagcctgggccacagagttagacctcatcttttaaagaaaatgaagaaaaacaatttcaaccrcaaaagtctactctctgccatcttggagacttacagtgcacattaacatagtaaagtttccaggaagtcctgcaacaataaaataataaagtttgttgaactcggcaatctccaaacttatttggtcaagagttatctcccttcctccttccctccctccctctcttccttccctctctccttttcatgaaacatcattaccaactaatacactttgggaaatattgcattaaggttaacaaaattgaacatcaatctatagtaggccaacaattttcttgtaagattaagaactttctaattgttttagctgtgttctctactatagacattattactaaatgttaatattaaggtatatttagtcaatttgtatctttgggaaggctttgatttaacttagatcacccatatgaccttctttcatgggtgatctaagttaaatcaaagcagtgaaagcatc

SEQ ID NO: 435042 - DNA, 606 bp, Homo sapiens
ggccatgtgcctgtagtctcagctactcaggaggctaaggaggtggaggctgcagtgagccataatcatgtcctgcactccagcctgggccacagagttagacctcatcttttaaagaaaatgaagaaaaacaatttcaaccgcaaaagtctactctctgccatcttggagacttacagtgcacattaacatagtaaagtttccaggaagtcctgcaacaataaaataataaagtttgttgaactcggcaatctccaaacttatttggtcaagagttatctcccttcctccttccctccctccctctcttccttccctctctccttttcatgaaacatcattaccaactaatacactttgggaaatattgcattaaggttaacaaaattgaacatcaatctayagtaggccaacaattttcttgtaagattaagaactttctaattgttttagctgtgttctctactatagacattattactaaatgttaatattaaggtatatttagtcaatttgtatctttgggaaggctttgatttaacttagatcacccatatgaccttctttcatgggtgatctaagttaaatcaaagcagtgaaagcatc

SEQ ID NO: 435043 - DNA, 547 bp, Homo sapiens
ggttctgttagtaaggatgaaggggagaatggattctggaaagacaaccagcaatatccacctctgtgtattattttccaacggtagctgctgagaaattgccttgcttttttcttctagatacttgatactttgctttggtaactgagatcatatttgactctgcattgacagttgaaaaagataaatttgtggcccattcatagaaactgcacagaaccctgtggtaaatgtttttagattagcttcatttctgcctcctatttatactcctactcatttttcttttgcatctttttaaaaatttaatttttttctctataattcaatttaattactcaaaaawgtttttattattcagaagatttttaatagtacccagaatttcataacatagtattcaaagtgttgaggatacaatagaaaattacctaatgtattaaaaaaattaacaaccctcaaagaaatgttcatggtactttgtgtaaatgattttacttgactcagaacacacataattgaatactttaggactttgatatactaa

SEQ ID NO: 435044 - DNA, 545 bp, Homo sapiens
ggtttaccttctgaattatttatctcccccacccctgcacccaacccatataaattgctttgtatttgtaagagtagctttctgagcttgcttcctgcctgtagtgctccagagtccaaaggcccccttttatatagcaactgtccctttsattccaagctaatacaactcctttaaaaactttgtggacttcctgtgtgtaagtttataatctgtactgccatacccacaaatctcttttgagaggaactctttcctcccctaagctctgtgtgagtctgctgtgggacaacacccttaagatccttagataatatttcgtctgaaaggatctatgaggtactgatttagatcttaagaaaggatcttataatcacactctagattggatctttgctctgaggccctttttatttgacactttgctggctgaaaagattgttctgagtccattacatctccttgaaattctactcaaaaaatgaatagcttattctttagttcatctctctgttctctcaattataagggcagctagaagaagc

SEQ ID NO: 435045 - DNA, 613 bp, Homo sapiens
tcttttaagcttttgcctgtcatgtgtgtacttctgacgctggcccaaggtaaaatgattacatttgacttcggtagcccttaaatgtatggctgttcttaatcttttctaaagcctaaaagttgaattagtattcatcttagatttcttgtttcttaagtgaaagaatcrtgacattgtattaaaatatcttatttgcatgtattttatatactgttttaataggcagtagtagtatacaagctttgaccaaatgtctcttcatataaaaaattcaagtgaataaaaacagtcatttaaaaatgacattagtcaaaggggcaaaaaagattacaaatgcttattgtgattgacagaacttgcttaacatattagggttctctagaaggacagaactaataggatatatatatgagtttattaaatattaacttaaatgatcacaaggtcccacaataggctgtctgcaagcttgaggagcaaggagagccagttcaagtctcaaaactgaagaacttggagtctgatgttcaagggcaggaagcgtcttggctaatccacccatcttggcctcccaaagtgctaggattacaggcgtgagcccccgtgcctg

SEQ ID NO: 435046 - DNA, 614 bp, Homo sapiens
caccgtgcctggctgtaaatttcttgattgtgcttcttctccttaagaactttcaaggtacagtagtcccyaccttatccacagggcatatattccaagaaccacagtggatacctgaaaccttggatagtactgaatcccatatatactatgtttttcctatacatatgtacttatgataaagtttaatttataaattaggcacagtaagagattagcaataactaaaaataaaagagaacaattataacaatatgccagcatcactactcttgagctttggggctaatactaagtaaaacaaaggttacttgaacacacacactgtgatattgcaacgatctgataaccaaaacagctattaagagacttacaggcagttagcatgtacagcatggatatgctggacaaagggataattcacttcctgcacaggtcaaggcaggacagtagagatttcatcatgctactcaaaacagcacacaatttaaaacttaataattgtttatttctggaatttttcatttaatattttcagaccaaggtaactgaaatcatagaaagtgaaactgcagataaggggggactactgtatttctctaatctcttctgtt

SEQ ID NO: 435047 - DNA, 614 bp, Homo sapiens
caccgtgcctggctgtaaatttcttgattgtgcttcttctccttaagaactttcaaggtacagtagtccccaccttatccacagggcatatattccaagaaccacagtggatacctgaaaccttggwtagtactgaatcccatatatactatgtttttcctatacatatgtacttatgataaagtttaatttataaattaggcacagtaagagattagcaataactaaaaataaaagagaacaattataacaatatgccagcatcactactcttgagctttggggctaatactaagtaaaacaaaggttacttgaacacacacactgtgatattgcaacgatctgataaccaaaacagctattaagagacttacaggcagttagcatgtacagcatggatatgctggacaaagggataattcacttcctgcacaggtcaaggcaggacagtagagatttcatcatgctactcaaaacagcacacaatttaaaacttaataattgtttatttctggaatttttcatttaatattttcagaccaaggtaactgaaatcatagaaagtgaaactgcagataaggggggactactgtatttctctaatctcttctgtt

SEQ ID NO: 435048 - DNA, 399 bp, Homo sapiens
ggtctaatgtgcagctgagtttgagaaccactgctctacattaaaggttcctagtctatggttgtgtatgagaatcacttaaggaatttttaaaaatctcagcactttagccttacccctagggactgtgattcaactgatctggggaggagccaaagggttgttttataaaaagtttccgagttgattccagtgtgcagatatatttgaaacacacaaatctacatgatgctgacaaacccactatcaaatgaaggwgaaattcataagactggacttgaattgataaactatcttcatcatcccttgccctgtaaggtataggcatccagcaggcataaaaagacactcacgaacactcatatttaatctctggggccctgcataaatagaaatgtc

SEQ ID NO: 435049 - DNA, 479 bp, Homo sapiens
aattatcagaccaggaatgcaaaacaagtatgattaatacgccaagggctctaatggataaagtacacaatatgccagaacaagtgggcaatgtaaacagagagatggaaattctaagaaataataaaaaataaatgctagagatcaaaaattctgtaacagaaatgaagaatgctcattactagactggacatggctgaaaaaaaggcttgcytgaggatatgccgatagaaattttcaaaatggaaaaagcaaagagaaaaaagactgaaaaaaacagaacagaatatctatgacctctggaacaactacaaaaagtaaaatatatatataatgaaaatattaaataaagagagaaatgaacagaagaaatatttgaagcaataatgactgataatttccccaagttaatgtctaatattaaactacagatccaaaaaactcagagacaccaagcaaaatgaactttaaaaaaagta

SEQ ID NO: 435050 - DNA, 555 bp, Homo sapiens
gaaataaagactttctcagacaaacaaaaactaaggggacttgttgccagtagacctgccttgaagaaattttaraagttcttcaaaataaaggaaaattatataggtcagaaattcagatctacataaagaaaggaagagcatcagaaaaggaataagtcaaggtaaaatttaaaaatttatttttcaggctgggtgtggtggctcagtcctataatcccagcttgacctttaggaggtcaaaatagcaacgaagtatttaattatgtatgtttatatacatatagatatattctatgtatacttatgtaaaagtgaaatgaatgaccataataacacaaggtattggagggagaagttagaattattctgttgttaaacagtactggtactatccataaagcagtatagcattatttgagacttggattagctataaatgtatattgcaaatgctaggggaactaccaaaaaaaagcctttaaaaaagtagaatggtatgctaagaaaggagagaaaatggaatcatataaaatgttcaattaacaccacaaa

SEQ ID NO: 435051 - DNA, 555 bp, Homo sapiens
gaaataaagactttctcagacaaacaaaaactaaggggacttgttgccagtagacctgccttgaagaaattttaaaagttcttcaaaataaaggaaaattatataggtcagaaattcagatctacataaagaaaggaagagcatcagaaaaggaataagtcaaggtaaaatttaaaaatttatttttcaggctgggtgtggtggctcagtcctataatcccagcttgacctttaggaggtcaaaatagcaacgaagtatttaattatgtatgtttatatacatatagatatattctatgtayacttatgtaaaagtgaaatgaatgaccataataacacaaggtattggagggagaagttagaattattctgttgttaaacagtactggtactatccataaagcagtatagcattatttgagacttggattagctataaatgtatattgcaaatgctaggggaactaccaaaaaaaagcctttaaaaaagtagaatggtatgctaagaaaggagagaaaatggaatcatataaaatgttcaattaacaccacaaa

SEQ ID NO: 435052 - DNA, 606 bp, Homo sapiens
atcatacatttgttcatttaatcttcacaatgaccattattatccccactgtgctgatgacagatctctgctacaggaggtgttgaaactcaatgtcatggcatatggagactggttgaaggaatcagagatgtttgatctggagaatataaaattgagaagactcaagagttgatcataaattcctgaagatctcagggcaaggaaccagagttcttctgggtagccgcaaagggtggggctaagatcaacggaaagaagatggtgtctaggtctggtttcatgagaggaaataacatcctcctaagcaccattagcccttccccagagccccacaagagtctagtgaaggagaaatgtctgatagtatccccagtctacagacaaggaggctgagtccaggagagatcacatgattcgtcgyacactcagtgacagagccagggtgagatcttaatgctcctccccggtcactcagcctgtccccatttgaatggcatctgggaggcagtaaagttcaatgtggaaactctggagtcacacacagacctgggttagtgtctccaccaccaacaagctggggaactttggattagcaaaccattc

SEQ ID NO: 435053 - DNA, 518 bp, Homo sapiens
ggccttttgggaaatgattgcatcatgcrggctccaccttcatgaatggattagcactgctatacaatgactggagggagctagccaaggcccttttttccttctggctttcaccacatgaggacacagcaacaaggcaccatcttggaagcagagagcagaccctcactggacaccaaacctatcagcgccttgatcttgaacttcccagccttcagaactgcgagaaataaatgtcttatttataaattactcactctcaagtatttttgttacagcagcacaaatgaactaagaaagtagtattcaaaaaaaaacctcataagacacacatgttgcaaactggtacccataggttaatctaactataagtgtttcctttagctacatactgatttgttttaaaatcggaattgcagaggaaaactatgaactccaacctcaaatgcacatgttccaagaacaaaaaccctgtccatctatgcatgcctggttctgagcagtccagttcagacttg

SEQ ID NO: 435054 - DNA, 518 bp, Homo sapiens
ggccttttgggaaatgattgcatcatgcaggctccaccttcatgaatggattagcactgctatacaatgactggagggagctagccaaggcccttttttccttctggctttcaccacatgaggacacagcaacaaggcaccatcttggaagcagagagcagaccctcactggacaccaaacctatcagcgccttgatcttgaacttcccagccttcagaactgcgagaaataaatgtcttatttataaattactcactctcaastatttttgttacagcagcacaaatgaactaagaaagtagtattcaaaaaaaaacctcataagacacacatgttgcaaactggtacccataggttaatctaactataagtgtttcctttagctacatactgatttgttttaaaatcggaattgcagaggaaaactatgaactccaacctcaaatgcacatgttccaagaacaaaaaccctgtccatctatgcatgcctggttctgagcagtccagttcagacttg

SEQ ID NO: 435055 - DNA, 568 bp, Homo sapiens
gttttatacttttcagtgtagacatatttcacctccttggttaaatttgttcctaaggggttttttgtagctattgtaaatgggattgtttccttgattattttcaggtagtttactattagtatataaaaacactacagatttttgtttgttgattttaaatcctgcaactttactgaatttgtttgttctaacaattttttagtaaagttgtagggttttctatatatgagatcatgccatctgcaaacaaggacagtataactttttcctttccaatttgaatgccctttatatggttctcttaactaattggtttggctaagacttgcagtactatgttgaagaaaagtggtgaacatgsatattcttgtctggttccagatctaagaggaaaaaatttcagttattccccattcagtattatattagctgtggatttgtcatatatggcctttatattcctgaagccttctcaacctaatttgttatgagtttttatcatgaatggatgttgaattttgtcaacagctttttctacatctattgtctttcttataatagccat

SEQ ID NO: 435056 - DNA, 535 bp, Homo sapiens
agtcccagctactaggagactgaggggcaaggatcacttgagcccagaaattcgaggctgcactgagcgatgatcacaccattgcactccagccatggctacagaaggaaaccttgttttaaaaaaaaarttttttttaagtggcctgattcaagtcaagcatcagacaaggccctcaactccctctcattctcaagcccctgtccagtggtttccactaagctcaggaatcctttggcctcatttctcccattgtgggtgctcctgccccattacccagactggacttcccgtggatctagaagatggcagcattgtgtagagaagagcacctccaactcacagtctcagatgtttccagtcctattctggagaaaacctgaaggcagaatgaattagaatggttctgcttcacctagaccatctgggacctttactagcacaaaatcatgaagcaaaagggagcaataggaagaaaagtcaccaggtctgaggcaccgatgtgcaagcattgtgctggaacagtcaacattca

SEQ ID NO: 435057 - DNA, 408 bp, Homo sapiens
aagatttgttcattaaatgctaagtttcttgcaaaagaaaaaagaacaattattgaactgtacttaaggaaacaaatgctaaagtatttagaggaaaattttgcttgatctcttatttactttgaaattctttcttttttttttttggaggtgggggttctcgctctgtcagccaggctagagtgcagtggtgcaatsacggccagctaagtacagcctcaacctcccgggctcaggccatcctcctgcttcaacatttccagtagctgggaccacaggcatgtgccaccacgcctggctaattgttttttgttttattatactttaagttctgggatacatgtgcagaacgtgcaggtttgttacataggtatacatgtgccatggtggtttgctgtacctatcaac

SEQ ID NO: 435058 - DNA, 408 bp, Homo sapiens
aagatttgttcattaaatgctaagtttcttgcaaaagaaaaaagaacaattattgaactgtacttaaggaaacaaatgctaaagtatttagaggaaaattttgcttgatctcttatttactttgaaattctttcttttttttttttggaggtgggggttctcgctctgtcagccaggctagagtgcagtggtgcaatgacggccagctaagtacagcctcaacctcccgggctcaggccatcctcctgcttcaacatttccagtagctggsaccacaggcatgtgccaccacgcctggctaattgttttttgttttattatactttaagttctgggatacatgtgcagaacgtgcaggtttgttacataggtatacatgtgccatggtggtttgctgtacctatcaac

SEQ ID NO: 435059 - DNA, 474 bp, Homo sapiens
ctggggctgttgcctttctttcagagatgccctgcccagagaggaggaatctagagaggctgtctggctacagtggctttgccacactgttgggggttctaacccagttcaaacttcctggctttgtttacactgtaaggggaaaactacgtactcaagcctcagtaatagtggatgcccctcccccaaccaagctcgagtgtcccaggtcaacttcagactgctgtgctggcagcaagaatttcaagccagcggatcttagcttkttgggctccattgggggaggatccgctgagcaagaccattcggctccctggcttcagccccctttccacgggagtgaatgattctgtctcaccagcgttccgggcaccattggggtatgaaaaaaaaaactcctgcagctagctcggtgtctgcccaaacaactgcccagttttgttcttgaaacccagagccctggtggtataggca

SEQ ID NO: 435060 - DNA, 588 bp, Homo sapiens
ctaaaatcagaaatgaaaatggagacattactaccagtcttacagaaataaaaaggattggccaggcacggtggctcatacctgtaatcccaacactttgggagtctgaagcaggcagatcacttgaggtcaggagttcaagaccagcctggccaacatggcaaaaccccatctctactaaaaatacaaaaattagccaggtgtgttggtgggtgcctgtagtcccagctacttgggatgctgagggtcaggaattgcttgaacccaggaggtggaagttgcagtgagcagagatcacaccactgcattccaagattctgtctcaaaacaaaaacataaaaagaaaaagaaaaaagaaaccaagtattaatcaaaagtaaagtagactggaaaattcaatcatggtatgttcataaaataaagtgctatacatcaatgaaaatgaacttcagttatatacacaatacayagtaagaaaacaccaaatacaaaacaaacatgaaatatggttcatttatgtaaatttcaaaaacaggcataaactaaactgttttaaaagttaagtctcagtggttacatgtgcagatg

SEQ ID NO: 435061 - DNA, 555 bp, Homo sapiens
gaaaacaaaaaatataaaaagcaagtataagactccaaagggcatttctgaattaaggttttcttcacatttaatgaaagcagagaagagtgaatatcactgtagaatatcctgcctgtaacatggttaaaacaaaattaaatccacttaacttacagaaggttaagcttgggttatatgaatatgatctcatggggacccwacttccccaaggtgttcaatgaatgagtcttttcattgtattttgtagtcatgtgcatgaagttctgtattttattcccagctgataaaggcctattaaaacacaatgtacacaggacttcgacttctggaaagatggcatagttacacttttccctattcttactgctaagtaccactaaaggccctgtacattatatataaaacacacataaggagaataaaaagtaaagggaagaaagccaactgaccaaagaccttggaaatcaaactgtaaatttgttgggttttctttttgcctcataaatcacaaacttggagttcaagaagctggctactggtaaacaccaatga

SEQ ID NO: 435062 - DNA, 586 bp, Homo sapiens
cagtccctgggaccgaccctgagcatagggcatggggtcagcttccccagggattgtgagctggtggtggagttgagcatttcagtggggtgcatgggtgtatgcagagaggtgtatataagcatgacagggtatgccccaagggcttccaygatctccatcctggccctgagagagccaggtgctattggcccagtgctggaggaaatcagcctccagttcccctgcagtcagtctggctggtgcccacagggtctgactcatcaacaactctcaggggccaggctactaaacagaaaatgctgttaactctaaaggagcacagagtgcctcctgctcagccaaccagatctgcgcccatcacacctctgcttctcacccaacaaggaccagctgaccccctccctcccaaccccacaggcatcccctggaactgtccaggaccccccagccttggaatttgatactcacttcactccttcctcgtcatcccaataccatcatttgtattccagttgggaaggagtttatttttttcttcctctgaacccaaatcagaggtacttacccatgagaaaggtggcaa

SEQ ID NO: 435063 - DNA, 568 bp, Homo sapiens
catggcttctggtaagacctcaagaggcttttactcatggcagaaggcaacgtgggagcttacacatcacatggcagaaacggggaagacagagagtgtcatgggggaaaggtgccayatacactttttaaggagcagatcttgcaagaactcactatcgtgaagacagcaccaagccatgaaggacccacccctatgatccaaacacctctaactaggcaccccctccagcactggagattacaattcaacatgaggtttgggtggggagaaatatccaaaatgtattgcactataggattcaagcacacaaagaggcaccagggaatcacaggcccagggaacaagccgcgtgaggacacaggtagatggtggccatcttcaagccaaggagagaggcctcaggagaaatcaaacctgcccacaccttgatctcggactactagcccccatcactgtgagaaaatcaatttcggttgtttaagccaccgtgtttgtggtattttgttatggtagccctagcaaactaatacagagtaatgtgaatgagctatttctgaggaaaatg

SEQ ID NO: 435064 - DNA, 526 bp, Homo sapiens
gaccagcctggccaatatggtgaaaccccgtctctactaaaaaataaaaaagcacactgtataccaaaaaacaaagaagcaacaagcaaaattcacagtatcaatgactacataaacctagaaacagagactgtaattgacttctaggtattaagttgaaacacataaaactgagaatctttaatatttttgacctataagaacagactatctcttgggcaacagtggagttaaaattaggtgagaaaagaatatattcactgcaacctccacctccggagttcaagcaattctcctgcctcagcctcctgagtagctgggattacaggcattcgccgccaccacacctggctaattttgtatttttagtagagacggggtttctccatgttggtcaggcttgtctcgacctccctatctctggtgatccacccacctcggcctcccaaagtgctgggattaccggcgtgagccaccgygagatgtttcaaactagatagataatcttttttgaggatctatggag

SEQ ID NO: 435065 - DNA, 600 bp, Homo sapiens
gatatctgagggcagcacattccttttcaccttctcttttctaaacaaatacatctcgatttcaatcttttttcctagggaaatactgtttcctttttcttcccatactctgagctctttttttctctttgttttatgcatttagctgcttcaatttctgtcctgctgaytttaaaacaatatagtcaaaactgaggtgagaacaggttattactttatgtgagtttgttttaatcagaccactcttactttgaagtggaaatatcttacctcaaaaggtgacacagaggcagctgaagtccaggggtcagagattctccgatcttcatctattggggtgattgacacagtttttcactttcacagtccaatcccaaataagataaatccttaacccttaaaagcagcagtctctgaaaccctttaaagtggttaggcaagaagggtcccagggcagattgtattcttgtgttatgtatggtcataatatctcttccattataaagtataatatattgcatttgctagctgtgtgattttgaggaacctctatgtggctcagtttcctcatctacgaagtggggagaataaaaataacta

SEQ ID NO: 435066 - DNA, 571 bp, Homo sapiens
taatgaggaatggacagagcagtaaaagatctagagatgataattctgtaaaagaagtcttcttggctgggcatggtagctcacttctgtaatctcaacacttcgggaggccaaggagggaggattgcttgaggccaggagtttgagaccagcctgggcatcatagtgagaccatgtctctacaaaaaataaacaaaattagctgggcacagtggtgtgtgcctgtaatcccagctactcgagaggctgaggtgggaggatcacttgagcctgggaggtcaaagctgcagtgagctgagatagtgcccactgcactctgwaccgtgtctcaaaaaaagtcttcactacttggtgctgagagatttcctgtacaacttctctgctttggagataaagaaatgggaccaaagagaaaaaatgggttgtttacatcacatggttgagtcagtagcagagcaaaaactgcaactgaggctcagagcctcatcctggctttcataagttatgtctcacccccacggttgctgctgccccaatatggaagataaactttatctgtttatggattctg

SEQ ID NO: 435067 - DNA, 591 bp, Homo sapiens
tttgctgcaggggtggagccctcatggagaacacctgcttgggcagtatagaagggaaatgtggggtcggggcccccacacagagtctccacgggggcactgcccagtggagctgtgagaagaaggtcaccatcctccagaccccacaatggcagatccactgagagcttgcatcatgtgcctggaaaagctgcagacactcaacaccagcctgtgaaagcagccaggaggtgggttgtaycctgcaaagccacaggggtggagctgcccaaggctgggagcccaccttttgcatcagcataacctggatatgagacatgcagtcaaaggagatcattttggaactttaaggtttaataactaacctattggattttggacttgcatagggcctgtagcccctttggccaatctctcccatttggagtgggtatatttacccaatgtctgtacccccactgtatttaggaagtaactagcttgcctttgattttacaggctcataggcagaagggacttgccttgtctcagatgagactttggacctggacttttgggttaatgctggaatgagttaagactttggggtac

SEQ ID NO: 435068 - DNA, 591 bp, Homo sapiens
tttgctgcaggggtggagccctcatggagaacacctgcttgggcagtatagaagggaaatgtggggtcggggcccccacacagagtctccacgggggcactgcccagtggagctgtgagaagaaggtcaccatcctccagaccccacaatggcagatccactgagagcttgcatcatgtgcctggaaaagctgcagacactcaacaccagcctgtgaaagcagccaggaggtgggttgtatcctgcaaagccacaggggtggagctgcccaaggctgggagcccaccttttgcatcagcataacctggatatgagacatgcagtcaaaggagatcattttggaactttaaggtttaataactaacctattggattttggacttgcatagggcctgtagcccctttggccaatytctcccatttggagtgggtatatttacccaatgtctgtacccccactgtatttaggaagtaactagcttgcctttgattttacaggctcataggcagaagggacttgccttgtctcagatgagactttggacctggacttttgggttaatgctggaatgagttaagactttggggtac

SEQ ID NO: 435069 - DNA, 599 bp, Homo sapiens
tttttaaaacttttgccagcctgtaaatctgaggcaatctaggtcatggcatttaccgttgagagacagatacgcaaaagaatctctcctattgcctggcttactgtcatcattccatattttccttattttaccgatcaatctgtcagtaaaatatgtgtgatggctatagtgtcagcgaatcttaaggaaaagaattaaacatcagactccaccgagcccttaaagaaatccacgcaaacaggttgctttttgaaatcaacacttccgaccagtaactgaagggatggaatctgctgtaggggtattcggtgtgttccattcttaaagcggggagttccttttttttccccccagacgaaatctcactctgttgcctaggctggagtgcagcggyacgatctcagctcactgcaacctccgcctcccgggttcaagcgattctcctgcctcagcctcccgagtagttgcctgggattacgggcgcccaccaccacgcccggctaatttttgtacttttagtagagacagggtttcaccatgttggccaggctggtctcgaactcctgatctcgggcgatctgcccgcctcagccttc

SEQ ID NO: 435070 - DNA, 659 bp, Homo sapiens
tatttagcattcactattacgccatgtactgttttatacactttatacagattcattaattaatcctattgattaatttattcctattcattaattcacttattgcctaagattggtactaaattatccccacgtgatagctcggcacagagaggtcaaatgcatttcccaaggacatgcacagtccgacctcagagttcttattctcaacactacgtgacgtatgtcttcaattttcaaattctccaacactaaattataatttattttgcttctgctagcatgccataaaatccaatgatgcccaaagaagtattagtaacaataagcacagtttaaataaagtttgcttattcattcattctcacatcagttaacatctatccactgtctactatagagtggccagtctgtgccaggtatacaagagacaaaaatgagtaaaacagagtcctggtttcaaggaattcagttaagtagtagaacgctaagaagtctgaggtcgctaacccattgctttatgcttcttgctctcggcaacattttcctgcyttccaccttctctggcccttctgactttaacatcactctaggcaacttggtcatttcacattgttagccatgctgaaaaaccaaactttacataagaagaacacaat

SEQ ID NO: 435071 - DNA, 605 bp, Homo sapiens
tcatcatcagacccagccttgagaattattatgaagcaagaaaatgttgtctttgaagtttcctcactcgatgctgccctttagtttcctttactgtctggtaatgctcttcctgattgcagcccctctccaactctgggacacgatgccagggcttccagcctcagacagttcacaaccacatctgtccatccgtgtctctccagcccaacctccctgggccgtgattttctagctactttcaccgagcacctggttgtaaagtgggtttttgtgccttgtgattttggactttttaaagcattcsgtcttaagccaggggaatggttttcttgctaaaaatgaataaaagctctgtagctggattagggaatcatataagaccagaagaggcctatggatcgccaaatcataccatgctttgccaggtgcccgtcaccatgcctcgatagttttttgtatttttagtagagatgaggtttcactgtgttgtccaggctggtctccagcttctgaactcaagcaatctgcccacctcggcctcccaaagtgttgggattacaggcgtgagccaccatgcccagccaatgtggatttttatgaga

SEQ ID NO: 435072 - DNA, 605 bp, Homo sapiens
tcatcatcagacccagccttgagaattattatgaagcaagaaaatgttgtctttgaagtttcctcactcgatgctgccctttagtttcctttactgtctggtaatgctcttcctgattgcagcccctctccaactctgggacacgatgccagggcttccagcctcagacagttcacaaccacatctgtccatccgtgtctctccagcccaacctccctgggccgtgattttctagctactttcaccgagcacctggttgtaaagtgggtttttgtgccttgtgattttggactttttaaagcattcggtcttaagccaggggaatggttttcttgmtaaaaatgaataaaagctctgtagctggattagggaatcatataagaccagaagaggcctatggatcgccaaatcataccatgctttgccaggtgcccgtcaccatgcctcgatagttttttgtatttttagtagagatgaggtttcactgtgttgtccaggctggtctccagcttctgaactcaagcaatctgcccacctcggcctcccaaagtgttgggattacaggcgtgagccaccatgcccagccaatgtggatttttatgaga

SEQ ID NO: 435073 - DNA, 605 bp, Homo sapiens
tcatcatcagacccagccttgagaattattatgaagcaagaaaatgttgtctttgaagtttcctcactcgatgctgccctttagtttcctttactgtctggtaatgctcttcctgattgcagcccctctccaactctgggacacgatgccagggcttccagcctcagacagttcacaaccacatctgtccatccgtgtctctccagcccaacctccctgggccgtgattttctagctactttcaccgagcacctggttgtaaagtgggtttttgtgccttgtgattttggactttttaaagcattcggtcttaagccaggggaatggttttcttgctaaaaatgaataaaagctctgtagctggattagggaatcatataagaccagaagaggcctatggatcgccaaatcataccatgctttgccaggygcccgtcaccatgcctcgatagttttttgtatttttagtagagatgaggtttcactgtgttgtccaggctggtctccagcttctgaactcaagcaatctgcccacctcggcctcccaaagtgttgggattacaggcgtgagccaccatgcccagccaatgtggatttttatgaga

SEQ ID NO: 435074 - DNA, 566 bp, Homo sapiens
atagaaaaataaggtataaaagaatcaataaaatcaaactttggttctttgaaaagatcaacaaaattgataaacctttagctagatagactaagaaaaaaagagaaaaggctgtaactactaagatcagaggcaaagtgaagacattactagtgattctayagcaataaaaaggaccattaagacagtattatgaacaactgtgtgcctataaattggatgacccagacaaaatggacaatttcctagaaacacaaaacctaccaagactaaatcacaaaaaataaaaaatctgaatagtcttataactataactaggaaggagatagaattagtaaccaataatctccaataagtaaagccctggatctaatggctttactgatgaattgtaccaaatatttaaagaagaacaaacacaaattattctcaaaatgttcccaaaaaaatgaagagaatggaacacttcttgactcattctaccctgataccaaagcaaaaaacactacaaaaaagaaaactactgatgaatatcctttatgaatattgatgaaaaaatctttacc

SEQ ID NO: 435075 - DNA, 555 bp, Homo sapiens
ctatcattgactgggttcttttgaatgccaatggaattaggrgcctctatttgtacatgccctcaaatgaatggtttggggttggtttgctcttggttctctagttctttatttatgatgttaggttgttaatttgagatctttctaactttttaatatgggtatttactgctataaattttcctcttaacactaccttagctgtgtagagattttgttatgttgtatctttgttctcattagtttcaaagaatttcttgatttctgccttaatttcattatttacctaaaagtcattcaggagcaggctctctaatttctatttaattgtatggttttgagtgattttcttagtcttgagttctatttttattgtgctgtggtccaagagagtggttggtatgatttcagttattttccattttctgaggatttcttaatatctgattgtgtggttgatcttagtgtatgtgacatgtacagatgaaaagaatgcacactcttttgttttcaggtggagagttatgtagatatttattaggttcatttggtaca

SEQ ID NO: 435076 - DNA, 555 bp, Homo sapiens
ctatcattgactgggttcttttgaatgccaatggaattaggggcctctatttgtacatgccctcaaatgaatggtttggggttggtttgctcttggttctctagttctttatttatgatgttaggttgttaatttgagatctttctaactttttaatatgggtatttactgctataaattttcctcttaacactaccttagctgtgtagagattttgttatgttgtatctttgttctcattagtttcaaagaatttcttgatttctgccttaatttcwttatttacctaaaagtcattcaggagcaggctctctaatttctatttaattgtatggttttgagtgattttcttagtcttgagttctatttttattgtgctgtggtccaagagagtggttggtatgatttcagttattttccattttctgaggatttcttaatatctgattgtgtggttgatcttagtgtatgtgacatgtacagatgaaaagaatgcacactcttttgttttcaggtggagagttatgtagatatttattaggttcatttggtaca

SEQ ID NO: 435077 - DNA, 505 bp, Homo sapiens
gctgttaggcttgtctcatcatatgacttgatgcatctgacaggaccaaaaccatggtgggaagttctggtcacaaaatcatttcatgtcctaccatcatgctaccagggtagtagcacaccatggtctttggcataattttctggtgcagatggcattatctttgttccagaaacatatgtacctacactgtggtgcttttactgtggtttgccatatacttcatacaggatcttttccaccacagttatctctgttaycataccatatactctgtataataacatagggtctgccaggccttaagacccaagcagcagggccacttgcattgcggcctagaacggctacagagatttcctgctaggtcctactcaaagctgacagccttccaagtcatttaaacttgccagtgaagagcgagtttataaagaagatgaaactgcaatcccaccatcattcagtgagtcagaagccagtagcaacttactgttacccaaaccta

SEQ ID NO: 435078 - DNA, 622 bp, Homo sapiens
gaccttaaccaatagcttaaattatacatagtgatcattcaaaaatggacccttcatgggtgggggaagattttctgttttgtctatttaaaaaatcctcattacataataggagttcagagataccacattcaaaaagaataagatatacaataaataacaaaaattatgcagacaaagctctagcgccaacattcgtcataattatttaaccaaaatgaattggtcctatgaatcttttacacaattttttcctaaaactttgccatttgttatcctatattcttacattgttctgattaaattagaagggcaggctctggctttgatctttttgtctttgaatttcagacctttctttttcactcactcacattctcatatctatacttgcggcccacacttcttttctgagctcctgacytgtatgaacctaactgagtatgatcttgactctcattcttttatcaatttcttaatggctattttaaagctccatcccttattctgtgtcctcactgcttctgccttagcttaggcccccatcatctcttgtttggattattatgatccagttgttctgtctgcctaatattttattccctactcatctattctgtac

SEQ ID NO: 435079 - DNA, 622 bp, Homo sapiens
gaccttaaccaatagcttaaattatacatagtgatcattcaaaaatggacccttcatgggtgggggaagattttctgttttgtctatttaaaaaatcctcattacataataggagttcagagataccacattcaaaaagaataagatatacaataaataacaaaaattatgcagacaaagctctagcgccaacattcgtcataattatttaaccaaaatgaattggtcctatgaatcttttacacaattttttcctaaaactttgccatttgttatcctatattcttacattgttctgattaaattagaagggcaggctctggctttgatctttttgtctttgaatttcagacctttctttttcactcactcacattctcatatctatacttgcggcccacacttcttttctgagctcctgacttgtatgwacctaactgagtatgatcttgactctcattcttttatcaatttcttaatggctattttaaagctccatcccttattctgtgtcctcactgcttctgccttagcttaggcccccatcatctcttgtttggattattatgatccagttgttctgtctgcctaatattttattccctactcatctattctgtac

SEQ ID NO: 435080 - DNA, 523 bp, Homo sapiens
cagtactagtaagagccagaactctccataaccaagtggccgagggcctaggacagaaataaggccaaggaaatgggagaaggttcttccatctgatttggtgctcagtcagtgtttgtcaaatgaataatagcagaatggataaatataatgctagaagcaggccaacttagtaaatggatccacttaaaacctgaatggtttgaacatttcttgtctggaaagaaaccactcttgaatcttaccattttaaacatgcaatatgacttaccacttctggactttcartagaacggagtctattcattatctcccagctcagccctttatttcatttctggccacatgcaccaacagcctcatccacctttctggtacatctctgcccactcctcatcagttacaaagtcatttgctttggtctggtccatctttctgtatctcagcagatcaatcagcaactatttactgggtgtctagtgtggacaagcagcataggaggagtcattgactaagagttatg

SEQ ID NO: 435081 - DNA, 523 bp, Homo sapiens
cagtactagtaagagccagaactctccataaccaagtggccgagggcctaggacagaaataaggccaaggaaatgggagaaggttcttccatctgatttggtgctcagtcagtgtttgtcaaatgaataatagcagaatggataaatataatgctagaagcaggccaacttagtaaatggatccacttaaaacctgaatggtttgaacatttcttgtctggaaagaaaccactcttgaatcttaccattttaaacatgcaatatgacttaccacttctggactttcagtagaacggagtctattcattatctcccagctcagccctttatttcatttctggccacatgcaccaacagcctcatccacctttctggtacatctctgcycactcctcatcagttacaaagtcatttgctttggtctggtccatctttctgtatctcagcagatcaatcagcaactatttactgggtgtctagtgtggacaagcagcataggaggagtcattgactaagagttatg

SEQ ID NO: 435082 - DNA, 586 bp, Homo sapiens
cagaatcaaactgtattgattactcctccccttcctccctcaaccctcctcctttgtsacaactcagacatatacatccacacactccttactcctccaaattcctccagagtggttatagatatgcaagatgtagtaagcctatattgagggagaaagacactcttacttatcaattgtttcctgaatgaatactgatgaggacattgttgatgatatcccagtgtattctttgtatgaggaagacctttgtctctgttgggaaaacagttagttaggcttctcttaattttagcatctttgttatgccctaaattcaccaagtctctttcttacctgtttactctattttctctttaattagctttctttatacatgttttcatctctttggttatgctgtgttttatgtagttttataagctgtatcttctcctttatcttcatcatttaatagaggaattttagtttttaaaaaataagaatgagggggtgacatgcagggatgtggaagatcaggatttgccaggggggccagggggtggggtgaggatggtcctgatgccccacagtagtgtttcagcgt

SEQ ID NO: 435083 - DNA, 565 bp, Homo sapiens
agttcaaaatacacctctgattttgaagaggctgttgggattcttaaataacaacaaaaagtagtttggtgctcttctctgcacatgctacagtaagcctttaggggaatgttctgagagtgattactgtcgtggtaagcaatggtttttgtaggtgctggtttgtgrggtgattacttgggcttaatctctttctcatgggtaaatgtgaagcctctccagttcacatttgttattcaggcagaaatcaactgaaatttgtctataagaagatattgggctggcccctgttttgcctcttagcgcccttccttacctatcctacatgcaagctccccactgggaaagggcagcttcctccatgggatctgtcttgtatcttgtctccatattgttgctgggaaacctcttcttgaagtcaagtgataaagttgcacttctgtttccaatggcgcccgtccagcccgaagtgagactggctgctttgtgagagcttctcaactgggtcgccaagcacagtagtgcagctggaaagtgttttctcactgttgtgccccaagactgc

SEQ ID NO: 435084 - DNA, 565 bp, Homo sapiens
agttcaaaatacacctctgattttgaagaggctgttgggattcttaaataacaacaaaaagtagtttggtgctcttctctgcacatgctacagtaagcctttaggggaatgttctgagagtgattactgtcgtggtaagcaatggtttttgtaggtgctggtttgtggggtgattacttgggcttaatctctttctcatgggtaaatgtgaagcctctccagttcacatttgttattcaggcagaaatcaactgaaatttgtctataagaagatattgggctggcccctgttttgcctcttagcgcccttccttacctatcctacatgcaagctccccactgggaaarggcagcttcctccatgggatctgtcttgtatcttgtctccatattgttgctgggaaacctcttcttgaagtcaagtgataaagttgcacttctgtttccaatggcgcccgtccagcccgaagtgagactggctgctttgtgagagcttctcaactgggtcgccaagcacagtagtgcagctggaaagtgttttctcactgttgtgccccaagactgc

SEQ ID NO: 435085 - DNA, 592 bp, Homo sapiens
gactggagttagctcacctccaagagcgtaaataaaagaacatatggttcgttgataggaccagcagtgccaaggatagtggcctgcatgaagtagattcttattaaatatttgtcttaggggtgagggatgaatcccctgggatcaccaggagctagaaagggatattttttcacaagagtacaacccagtttaggtccatgaaaacatcaggtttgaaggtcctatccctgttaggtcatttagacccctgctyatgaggtagcccacaggcactataccagtcccataaccactaacacttaccagagaaataaggttgccaaagctcagtcctatatattaataccatctcagacagtggagaaagacatgcatttgttgtttcaatatatatctgttcctcactatcaatgttaatcttctcatgaaaactgtctccaaatggaaagctattaattcaaaagaaaaaaagtactaattgcaatggaaaaagatataaatggaataatacagtatgtgtccttctgtgagggcttatttctctcagcataataccctcaagattcatgatgttgtcaaatatcgcaga

SEQ ID NO: 435086 - DNA, 596 bp, Homo sapiens
gttgtataatattatacacacacacacacatacctcacatattttccttatccatttatctaacagtggacatttaagttgtttccacttcttgtctattgttaataccacaattaaaaaaaaaaagacattgttatggtttgatttgtgtccccacccaaatctcattttgaattgtaactcccacatttcccacatgtcatgggaggaatccagtgggaggtaactgaatcatgaggatgggtctttcccatggtgttctcaggagagtgaataagtctcacgtgatctgatggttttaaaaatgggagtttccctacagaagctctctgcctcctgccatccatgtaagaccrtgactcgtagggtccagcaagatggctgaataggaacagctccagtctgcagctcccagcgagatccacctagaaggcaggtgatttctgcacttccaactgaggtacgtggttcatctcactgggactggttggacagtgggcagagaccatggagggtgagctgaagcagggtggggcgttgcctcacccaggaagtgcaaggggtcgggggatttccctttcctagccaagggaagc

SEQ ID NO: 435087 - DNA, 534 bp, Homo sapiens
gctggcaaaatgtttctgtaaagggccaaataatattaatatcttggattttgcgggacatacaatctctcagccagagctgccacggtagtgtgaaagccactacagacaatctataaacaaatgagtgtgactatgccccagtaaaactttatttacagaacaaacatttaatcaaattttkcccgttggccatagtttgttgacttttgacctagacttttagaaatgatgaagataatgttaataatgcaaattaaatttaaaagtatgatgtgaaaatactcattacattgagaaaagcagaaaaaaaatgaggaatatttttccagaattagaaaatgcatttgatcctgcaattattgccaattaagtgaagtttcaacatacttcttcattttttcatgttagtctttcactgtaatgtatgtaaagaaaaatgtcaagtaacagtcacattagaatgttcgtttatcagttgcaaccataggttgactaaaggtacacaatttttgccaaaattaacaaaagctt

SEQ ID NO: 435088 - DNA, 468 bp, Homo sapiens
agataatgttaataatgcaaattaaatttaaaagtatgatgtgaaaatactcattacattgagaaaagcasaaaaaaaatgaggaatatttttccagaattagaaaatgcatttgatcctgcaattattgccaattaagtgaagtttcaacatacttcttcattttttcatgttagtctttcactgtaatgtatgtaaagaaaaatgtcaagtaacagtcacattagaatgttcgtttatcagttgcaaccataggttgactaaaggtacacaatttttgccaaaattaacaaaagctttctgtatgagtcaattggctctgtggaatttgcaaagacgaattttgagaatcactattgtagacaataagaaaacaaaaggaaatgagatattgctattggttggaagaatcaaaaaaatcattatttgtggatgcctgtatttcctgcatagaaaatccaagagtca

SEQ ID NO: 435089 - DNA, 468 bp, Homo sapiens
agataatgttaataatgcaaattaaatttaaaagtatgatgtgaaaatactcattacattgagaaaagcagaaaaaaaatgaggaatatttttccagaattagaaaatgcatttgatcctgcaattattgccaattaagtgaagtttcaacatacttcttcattttttcatgttagtctttcactgtaatgtatgtaaagaaaaatgtcaagtaacagtcacattagaatgttcgtttatcagttgcaaccayaggttgactaaaggtacacaatttttgccaaaattaacaaaagctttctgtatgagtcaattggctctgtggaatttgcaaagacgaattttgagaatcactattgtagacaataagaaaacaaaaggaaatgagatattgctattggttggaagaatcaaaaaaatcattatttgtggatgcctgtatttcctgcatagaaaatccaagagtca

SEQ ID NO: 435090 - DNA, 468 bp, Homo sapiens
agataatgttaataatgcaaattaaatttaaaagtatgatgtgaaaatactcattacattgagaaaagcagaaaaaaaatgaggaatatttttccagaattagaaaatgcatttgatcctgcaattattgccaattaagtgaagtttcaacatacttcttcattttttcatgttagtctttcactgtaatgtatgtaaagaaaaatgtcaagtaacagtcacattagaatgttcgtttatcagttgcaaccataggttgactaaaggtacacaatttttgccaaaattaacaaaagctttctgtatgagtcaattggctctgtggaatttgcaaagacgaattttgagaatcactattgtagacaataagaaaacaaaaggaaatgagatatkgctattggttggaagaatcaaaaaaatcattatttgtggatgcctgtatttcctgcatagaaaatccaagagtca

SEQ ID NO: 435091 - DNA, 481 bp, Homo sapiens
tgttagtctttgtaccatattgagaagaggagttacttcctaggatttgtactgacaaaaagtagaatagtkttggtggggtttttttccatgtccaataacataactgttccaatttcgaaacatctgctatcctgttgtgtgtgtgtgtgtatgttttttttttaactggttttaggtctgcaggtgcaattgcaagggataaaacatctgtggtttgccttagaaaatgaagagaaatatatgcaaaactggcagatgatatcagctgccactaagtaacaaccgtcacagtatttattctatagcctcacaaactcacaaatcgggaatccatactttaggatttttcccagctgcatgttccaagcttatgttctgtccacagatcaggagaaaactgtacatttacttttaacttctcagactcaattcactctccgcctatcaaataaactgtttgctcccctgtgccaaagag

SEQ ID NO: 435092 - DNA, 494 bp, Homo sapiens
tttgaatagttttggtgggctctaagctataatggtggtcttagttgtctggtacctggccctgggatgattaaggcagaaaaatattgcctcctggagtgtacaaactggacagaagagggatggctctatattagtttgcatattgaagtcatgctcagcagagtcctagcagtctttaaaaattggctagccccctacctccaccacagggcaggctattctsagcaagaaagtatttttaagatgtcgaaacatcgtaatataaaaactacacaaacacgcatatataatatttcaatgtaggtgcaataacaattgtggttgataagacaggtttgtctcacttactggtgaccagcaggaaaaaacagtgctgaggggagctagctggttagccataatgaggtcgtgccagtcccgaaggtccttactttataaacttgaggagtactaggaatgaagagaaaagttcccattagtcactaaaatgg

SEQ ID NO: 435093 - DNA, 454 bp, Homo sapiens
catccttagccatatagattcagtggaaggaacacagaatttgaaattagaatttggaacagactttcatctgaaccctagaacaaccacaggctgactacatgactttaggcaaattatttaatatgtccaamcctcaatttctttaaccatgatatagggcaaataattactatcttgagggtttaagatgataattaaatgagatatgttcaaaatattgtaattatcataattaccttgatcaccaataaaagagcataaacaactattctttatattctttaataatgagtttatgcagaaagggaaaatggcccatgaaaaacatttcccatgaagtttgatatttatgagcaaatggcatggttctatgaacaaacactgacaatgtgaatcgggcagtgtttgcttgttggagaggaagagagtccacctcatcacacttcccaaa

SEQ ID NO: 435094 - DNA, 622 bp, Homo sapiens
atgaagggaaattgataagatatttggttagctaaatataggttcttctaaaaatcattttaataacaaaaactgattatcattagtataattcttaataaaatagacaatgaaactattttgggggaaaaaatgaggaaaataatgttccaacatgtaaaaatgatacagttacaatctctcccactaagttgaagaatatattttggtggaagtttagagaytgatatagtatagatgtctgtcccctccaaatctcatgttgaaatgtgatttcattgttggaggtggggcctagttagagaattttcagtcctggggttaagtccctcatgaatgaccaggtagcctccctgtagtaatgaattcacatgagttctggttgttaaaaagaatctggcacctctcctctcactctcttgctccttttcttgtcatgtgtgtgccagttcccccttcacccttcagcacgattgtaagcttcctgaggcctcaccggatgcagatggtggtactatgcttcttgaacagcctgcagaactgggagcctaataaacctcttttatttataaattacccaatctcaggcattcctttaaagcaatgcaaaatggaccaacac

SEQ ID NO: 435095 - DNA, 547 bp, Homo sapiens
ctgtgtttcaacttgtttgtcagtaatagttatgctggaattaaattttccttgatggatctttgaaaatactattatactgttttctggtttctattgttgctactcaaaagtctgttttcagtcagttattcctttgtaggtaattcgtcttttcttcctaagttgtctcaaacatttctttatctctcgtattctgcagttgtatttatcctgcttggagttcttccaccttctaaatttaacgatttaaatctttcattaattctaaaaaccttcaaccattatccctttgaatattaccactcctggactctgtactcttttgttctaaattctcactgaatatatattagactttctcattcttttctccatctcttattctttctgtcatttttccatcattctgcctctgtctgygtatcattatcggtgatttattcagatctaatttgcagttcacaaattctctctttagctatgaccaatttactgcttaaactctccatcagacttttcatttttgtgatattttcctttactt

SEQ ID NO: 435096 - DNA, 547 bp, Homo sapiens
ctgtgtttcaacttgtttgtcagtaatagttatgctggaattaaattttccttgatggatctttgaaaatactattatactgttttctggtttctattgttgctactcaaaagtctgttttcagtcagttattcctttgtaggtaattcgtcttttcttcctaagttgtctcaaacatttctttatctctcgtattctgcagttgtatttatcctgcttggagttcttccaccttctaaatttaacgatttaaatctttcattaattctaaaaaccttcaaccattatccctttgaatattaccactcctggactctgtactcttttgttctaaattctcactgaatatatattagactttctcattcttttctccatctcttattctttctgtcatttttccatcattctgcctctgtctgtrtatcattatcggtgatttattcagatctaatttgcagttcacaaattctctctttagctatgaccaatttactgcttaaactctccatcagacttttcatttttgtgatattttcctttactt

SEQ ID NO: 435097 - DNA, 561 bp, Homo sapiens
  misc_feature (1)...(561): n = A,T,C or G
tgtgtagagtgaagaatcaaccacagctgttgtacctttcactcctcctggagacaccttagcacccaataatctattctattaacatgagcatcatcttgcaccataatgagaggtttctgggttttatttctgtatttttggacctactcaaggttcaagtatagcaagctgggtagtggcttaacaycaaagtcaaactattctgataaggacaaaatgtttgtggcaagtgtgtgtgtgtgtttgggtttaagagtgcttctggatatatctgatctgtcacacttcttttggatctcaatgtcacacacacacagtatattcattctatagttgatgtccacattggcttctgatatggtttggatttnnnnnnnnnnnnnnnnnnnnnnnnnnnnnnnnnnnnnnnnnnnnnnnnnnnnnnnnnnnnnnnnnnnnnnnnnnnnnnnnnnnnnnnnnnnnnnnnnnnngagttctcatgagatttggttgtttaagtgtgtagcccctgccccttctctctcttcctccttctccagttatgtaagatgggcctgc

SEQ ID NO: 435098 - DNA, 607 bp, Homo sapiens
ttgtatttatttacattctcactattggtatataagcgtccccttttctgtgaatccttgccatctsttatttcttgtctttttaataataaccatcctgactggctgcttctcattattttcaaattactcaatttctttctagttccatccaaacctacactttcggcccaggccgccttgaatggtggcttataagataattagggaaaaaaatgaacggtcctggcttaaggtcagagttaggagaaaatcatgagtaattaaatatgatcttttcaaagaaatgagtgttgctgctgctatgttggttgttgaggaagcataaaaaagtgattctgatgtaacttggctggaaaacttgagatattataaatgtgtccacctctttggatgtcccttacctggagaacccatgaagtacaaggatatgctgtaaaaatgtactgacaattttaataattgatttttaaaattccttgacaagcaaatattttcctcctgtgtatgcaaatggctcaaaatttatcaatattttctcttcgtaatagcttctgtttctatattaaactaatcatattgatctgaactcttcagtacagattcc

SEQ ID NO: 435099 - DNA, 607 bp, Homo sapiens
ttgtatttatttacattctcactattggtatataagcgtccccttttctgtgaatccttgccatctgttatttcttgtctttttaataataaccatcctgactggctgcttctcattattttcaaattactcaatttctttctagttccatccaaacctacactttcggcccaggccgccttgaatggtggcttataagataattagggaaaaaaatgaacggtcctggcttaaggtcagagttaggagaaaatcatgagtaattaaatatgatcttttcaaagaaatgagtgttgctgctgctatgttggttgttgaggaagcataaaaaagtgattctgatgtaacttggctggaaaacttgagatattataaatgtgtccacctctttggatgtcccttacctggagaacccatgaagtacaaggatatgctgtaaaaatgtactgacaattttaataattgatttttaaaattccttgacaagcaaatattttcctcctgtgtaygcaaatggctcaaaatttatcaatattttctcttcgtaatagcttctgtttctatattaaactaatcatattgatctgaactcttcagtacagattcc

SEQ ID NO: 435100 - DNA, 607 bp, Homo sapiens
ttgtatttatttacattctcactattggtatataagcgtccccttttctgtgaatccttgccatctgttatttcttgtctttttaataataaccatcctgactggctgcttctcattattttcaaattactcaatttctttctagttccatccaaacctacactttcggcccaggccgccttgaatggtggcttataagataattagggaaaaaaatgaacggtcctggcttaaggtcagagttaggagaaaatcatgagtaattaaatatgatcttttcaaagaaatgagtgttgctgctgctatgttggttgttgaggaagcataaaaaagtgattctgatgtaacttggctggaaaacttgagatattataaatgtgtccacctctttggatgtcccttacctggagaacccatgaagtacaaggatatgctgtaaaaatgtactgacaattttaataattgatttttaaaattccttgacaagcaaatattttcctcctgtgtatgcaaatggctcaaaatttatcaatattttctcttsgtaatagcttctgtttctatattaaactaatcatattgatctgaactcttcagtacagattcc

SEQ ID NO: 435101 - DNA, 513 bp, Homo sapiens
tgccaacttacactctcactgacaatgcataaaattttctatttcatcccacatttgctagcattagttattaacattaaaaataagtctctgctaatccgaaaagcaaaagagtttccactgttacttgaatttgtgtgctgtgtttgtgaggtggaatagtttctcacatacatacgaaaatgagtttattgcatttctctggtgggttgtctgtgttcttgagctttattaagtttttttttcccatttatatgatataggtagtataacatgattccttggtctgtcgtaagaaatttgacaacattttgattacgattttttgaatgacatccagaactctcaatttgcttatgctgtcaaatctgctcaccattcccactgtgattttactgtaacttctargttttttaatctttcaaatgtttgagaaaattaactctaaagacagtttttatggttttcatatcaatatttacttcacaatccaccttgaatttatttttatgt

SEQ ID NO: 435102 - DNA, 596 bp, Homo sapiens
ttccatatttattgctcttatcatgcatttcatattgtgtcattgtaaaataccatctgcctgtcaagtattgttttaaaacattamatttgctaaatattacctagtgttagatgtaggccaaaaaggcagcaacagtggagtaggaagttcatgagttttagagtaaatcaggcttggggttcatttggctttgccatttattttagatcagttatttgacttctcagcgtttcactttcctcatccataaaataaagttaataatacctatctcagtagaattgttgtgaagattcaaagacctaatctctttaaaacacctactgcagtgtgtagcatgtattattagttgttcaaaaactagtttgaaagctaaattatatgattgatttatagttcattttcttctttgttaggtttttgcatcagagtgacatttggtaaatatttggcaaatattactcaatgtttgtcatcttttccagcttgtgggatagtttatatagcatggtgaatggctccgccttcaaaaattcactacaagatatatctagtatgaaagattttaaaatttctttttaaaatttttgttt

SEQ ID NO: 435103 - DNA, 631 bp, Homo sapiens
gagctacacctctcagcttaatttgccattatttttcttggatgcctatatcaaacttttgcgtaaaaaatctagatcttgttttcctgattaatgtacagtattttaatacatgctaataattatcctttcctcaatcaagaaagaactcctatcgacagtttttaaatcatgcaaactctctctgggcttttctttatctgaaaaatgaagaggttgaaatataaaatctaatattataaaaaagtactaaatacttcttttttgagtcactgttttttctcttttatttcctctcttttggctctcattttcttaaattcagctctgctctcaggtaaaggtataatcttggcagcttctaaatatatttgtccatttcaaatttgctgtttagggttcagtttattttttctccttttgcagagatggcatatacttgagatgatgtgaggaaattcactggcattagacagattttkttgttgttgttaggttttactttaattgcttttttatatttgcaagttgactttgacattccaatcaaaataacaaatcaggaaatgaaaaataaaagttttcagttaactgaatttttcccactttaaaaaatgaatatggaaatacc

SEQ ID NO: 435104 - DNA, 585 bp, Homo sapiens
gcactatgctaagcactggggatataaagatgataaaaaaaaaatccttgccctcaagtggcgtataatctagtgggggaagggatagataatcaagcaattgaacagatgtcaaagtatagtgggccaaatgctgtatttgaggtctgcaagaggtgctaasaggatgttttttactaatcaatcaactaccatttgttactgttgtccatgataagaaaccatctctttgatgagttttgtaatatttttccatttcttttcctttaaacttttttttaacttttattttaggttcaagggtacatgtgcaggtttgttatataggtacacttgtgtcatgggagtttgttgtacagattatttcatcactcaggtactaagcctagttcccaatagttattttgttctgatcctctccttcctcccaccctctaccctcaagtaggctccagtgtctattgttcctacgtgtttacgtgttcccatcatttagctcccacttataagtgagaacatgtggtatttggttttttgttccttttataaggatgatggcctccagctccatccatattccacaaa

SEQ ID NO: 435105 - DNA, 585 bp, Homo sapiens
gcactatgctaagcactggggatataaagatgataaaaaaaaaatccttgccctcaagtggcgtataatctagtgggggaagggatagataatcaagcaattgaacagatgtcaaagtatagtgggccaaatgctgtatttgaggtctgcaagaggtgctaacaggatgtttkttactaatcaatcaactaccatttgttactgttgtccatgataagaaaccatctctttgatgagttttgtaatatttttccatttcttttcctttaaacttttttttaacttttattttaggttcaagggtacatgtgcaggtttgttatataggtacacttgtgtcatgggagtttgttgtacagattatttcatcactcaggtactaagcctagttcccaatagttattttgttctgatcctctccttcctcccaccctctaccctcaagtaggctccagtgtctattgttcctacgtgtttacgtgttcccatcatttagctcccacttataagtgagaacatgtggtatttggttttttgttccttttataaggatgatggcctccagctccatccatattccacaaa

SEQ ID NO: 435106 - DNA, 570 bp, Homo sapiens
ttgtgaattctgctatttaaattctattttatcactattaactgtaacttcccctcatctactgtttggttatctagtcaaacaggtagcactggaaagacaattcttcctcttgagttgtctgtttttaaaataatgagtttgttcataagcatcctttaagagattctaatttttttaaaagtatcattataagcctagtgtcatttatgacctatttgatgtgtttcagtccattgaagttattacccttgttaatgctaaaatggtctcatcttgacctgtgggagccttgtccagtggcttctgaatactttcgatgtgtagtctttgttaggttccctgctattttgtgtgacaagtttccaggcaatattttacatttcttgyccgagacctggagttggtaatttctccaagtaactgaacatcaatattttaaaaactttctcaagtgattctaacatgtataatagcttggagtgagagcaatcactattgcacctttctcaatttttcagttaacatatatttccacaaatttttaaattatctgcttcaaatttaatg

SEQ ID NO: 435107 - DNA, 559 bp, Homo sapiens
tgattccaatacaccaaaacaagcattccctattaaatcttcctascttcagtgccatgcttccatgttgttttgggtatgtagaaatccattctacatgcatttatacatagaccataaatttggcagaaataatacaatgattgaacagtaacatcattgcgtaagtgtcttcttatcctaccacgcatataattatttttgaaccagtcagtggctttgctgacttcttcagcaaatatggctttaattcattaaaagctcctgaaatgtcatctgctggaaggaatgtcagtgcaggcaaatgatgcattttttaactgaagtttttgtcgttgctatagaacatggccaatcaacacatctgaattttctgccaaatgcattgggctgaaaggaaaaaacaaactttactggtaataccttgacattctcttttagaagccttggtcattcctggctccaaatctgtcattagggttaggggatccaagtgaaatccattttcctctgtgttaggacgataacaaggtaatagctctgcctaacatgatgcaac

SEQ ID NO: 435108 - DNA, 559 bp, Homo sapiens
tgattccaatacaccaaaacaagcattccctattaaatcttcctaccttcagtgccatgcttccatgttgttttgggtatgtagaaatccattctacatgcatttatacatagaccataaatttggcagaaataatacaatgattgaacagtaacatcattgcrtaagtgtcttcttatcctaccacgcatataattatttttgaaccagtcagtggctttgctgacttcttcagcaaatatggctttaattcattaaaagctcctgaaatgtcatctgctggaaggaatgtcagtgcaggcaaatgatgcattttttaactgaagtttttgtcgttgctatagaacatggccaatcaacacatctgaattttctgccaaatgcattgggctgaaaggaaaaaacaaactttactggtaataccttgacattctcttttagaagccttggtcattcctggctccaaatctgtcattagggttaggggatccaagtgaaatccattttcctctgtgttaggacgataacaaggtaatagctctgcctaacatgatgcaac

SEQ ID NO: 435109 - DNA, 559 bp, Homo sapiens
tgattccaatacaccaaaacaagcattccctattaaatcttcctaccttcagtgccatgcttccatgttgttttgggtatgtagaaatccattctacatgcatttatacatagaccataaatttggcagaaataatacaatgattgaacagtaacatcattgcgtaagtgtcttcttatcctaccacgcatataattatttttgaaccagtcagtggctttgctgacttcttcagcaaatatggctttaattcattaaaagctcctgaaatgtcatctgctggaaggaatgtcartgcaggcaaatgatgcattttttaactgaagtttttgtcgttgctatagaacatggccaatcaacacatctgaattttctgccaaatgcattgggctgaaaggaaaaaacaaactttactggtaataccttgacattctcttttagaagccttggtcattcctggctccaaatctgtcattagggttaggggatccaagtgaaatccattttcctctgtgttaggacgataacaaggtaatagctctgcctaacatgatgcaac

SEQ ID NO: 435110 - DNA, 559 bp, Homo sapiens
tgattccaatacaccaaaacaagcattccctattaaatcttcctaccttcagtgccatgcttccatgttgttttgggtatgtagaaatccattctacatgcatttatacatagaccataaatttggcagaaataatacaatgattgaacagtaacatcattgcgtaagtgtcttcttatcctaccacgcatataattatttttgaaccagtcagtggctttgctgacttcttcagcaaatatggctttaattcattaaaagctcctgaaatgtcatctgctggaaggaatgtcagtgcaggcaaatgatgcattttttaactgaagtttttgtcgttgctatagaacatggccaatcaacacatctgaattttctgccaaatgcattgggctgaaaggaaaaaacaaactttactggtaataccttgacattctcttttagaagccttggtcattcctggctccaaatctgtcattagggttwggggatccaagtgaaatccattttcctctgtgttaggacgataacaaggtaatagctctgcctaacatgatgcaac

SEQ ID NO: 435111 - DNA, 616 bp, Homo sapiens
tattatgaatacctacgtggactcagatactagtaggaatacagcataattaatatgtattatgaatacctacgtggactcagatactagtaggaatacagcataattcatatgtattatgaatacctacatggactcagatactagtaggaatacagcataattcatatgtattatgaatacctactttgtgccaagtgctgctctaggtcctttacataagatatttcttttaatcctgattatttggcatgatcatggcctgaattcttcagttttttgccttatgtccccaatatttgcatgtgtmaatataatcacaaagttataatcataaagaaatttactatcctgatgtttaaaaaacagcttcacgattccggagcttttcaagctagctagaggatcttgctgtttgtttcacgaagctcaacagaatatgatagtcatgataattatattagaaacatgtctgaaaaaagtatcgatttatttttatactcagtggatttctacataattgtaggtagaataaagccaagtgttaaaagcaccagtgtttggagagcagttcagagatgatgttttcttcccaatcagcaaaatttttgatcga

SEQ ID NO: 435112 - DNA, 616 bp, Homo sapiens
tattatgaatacctacgtggactcagatactagtaggaatacagcataattaatatgtattatgaatacctacgtggactcagatactagtaggaatacagcataattcatatgtattatgaatacctacatggactcagatactagtaggaatacagcataattcatatgtattatgaatacctactttgtgccaagtgctgctctaggtcctttacataagatatttcttttaatcctgattatttggcatgatcatggcctgaattcttcagttttttgccttatgtccccaatatttgcatgtgtcaatataatcacaaagttataatcataaagaaatttactatcctgatgtttaaaaaacagcttcacgattccrgagcttttcaagctagctagaggatcttgctgtttgtttcacgaagctcaacagaatatgatagtcatgataattatattagaaacatgtctgaaaaaagtatcgatttatttttatactcagtggatttctacataattgtaggtagaataaagccaagtgttaaaagcaccagtgtttggagagcagttcagagatgatgttttcttcccaatcagcaaaatttttgatcga

SEQ ID NO: 435113 - DNA, 602 bp, Homo sapiens
agagctatatgcagccaccttacctaagttcacacatcatgctatggatggaagtggtctcaaaatgaatactcagacattcccaatagttgagtacagcccccagtyagggcctgctgcatttcgttgctttagataggctcagttctttgtatgaagatctgaacttagcttggaataatagcctatcaatatcacagtgatgctttagaagaacacatcttaggataaactggctggaacaaatttgcatttttctggaatcgtaacaaaaaatcctttgaaaatgggcagaataattttcagatgcaatttgcaatgatttgattgacacactgggtagaagcttactaatgagcatgtgcctggagagctttatgacagagctcccaaatgcattattagctcttctgtcttagcaaaaaagccttaaaagagcagcctactagatatttaaacggctgcaatttaataagaacaacaggaagcataaatcagcatcaataattatgttttcaatcataaagatttttgtctgaacatatctaataattgcatttagaagtttatatctgagaagaatcaaaaggaaaaatttaatt

SEQ ID NO: 435114 - DNA, 549 bp, Homo sapiens
tatttttttttcctttcagaaaaagactacacgtggtagtgatttgggactatgtgtacttcatattaatttgattagctagctcagatagcttccccatatattattgaaatgtcatcactttatatgctaataatgatacagaaaacaataaagccatatttacatcatacttcatatatataacacacttttataaaaatggtctcataccctttaacaattacataatttagatgggcagatctgattcaatcttttcaatgacagaaaaagtttccacagactatgatcttgcatagaacaaatgggcctgtaagagaatgtggcccaacaccttcatgtcttagctataaagtgggaataatacttcttctgccaaactccatctttgtagaaggaagtacatgagatgattcacatagaattcctstaaataaaaaatcctcttcaaatgaatagattttttaatcgttttcataattgtcttaattgattctttaaatcacttttagataaacgttaggcagacataaaactcatcttact

SEQ ID NO: 435115 - DNA, 578 bp, Homo sapiens
atgttgtagttattgaaagagccttagaggtcttcataaactttatttctaaattactatttatttatacattttcagagagatggccgtgcacagctagatcctgggactctaatgatagctacatcttctagtatttaccaagtccagtgctaggcactttagatacaatatcacaaatttgtctgacagttgtttaaacataggtggtgtcctcattttacagagaaggaaactaagcctcaaggtggttatggtacattgccactaataagaggcagacctggggctcaacctgcagttgtctgactctatagatggcaaaaacttactgaagatgctcttttgggagatggatcaagcactgtgttttatgaagttgaacagagagaagttgggaacgtgattctccaggcaccaacatcttcctcaaaagtattgtttaccttattgtccctacttggtccttgaagaaacagagtgtgtgacccttgcttccaatcttgtcctctttctagcataccacggtatcacctcyttgatattattttaattcctgtacctacttgaaggagcat

SEQ ID NO: 435116 - DNA, 570 bp, Homo sapiens
tctttacaaagcttaagcatgcattttgctttaaattattctttataactttttttttgcttgcatcctatttcatggagtagatgtatcagaatttacttagcctttttacttaaagacattgagattgctttcattttttaaaactagatatagtgctacaaatattattatatatgaaactgtttttttttccttgaggtatttctgtaccgaaagttcccaggaatggggtaattgtgtaaaacggaataagcattttgtgtctcctacatatgtttgcaaaatcgcctttcataaggtatggaaaattgccaatgcccccggccatgtaagaaagtgctagtttccaccaagtgcggtggcacatgcctgtaatcccattactttgggaggccaaggtggatggatcacttgaggccaggagtttgagaccagtctggccaacwtggtgaaaccccatctctactagaaatacaaaaattagctgggcatgttggttcttgcctgtaatcccagctactcgggaggctgaagtaggaaaatagcttgaacccaggaggcggaggt

SEQ ID NO: 435117 - DNA, 549 bp, Homo sapiens
agttttaaaaattcattactattagatttattcaggaaaaaaaattgtactttgatataaaaagtcttatkcatttgatctgttgattagtactttgcatatttatatcatagtgatagtttgaagcttataaagataaatcagacattcactgtaaaatattagaaagacttcagtgaaataagttagtcttcttgattctcaatgtggttttagtgatatacatatatatacttagaaagtattacaagtaaggtaagtatccccagataattattttatggtaacaactcacagtttttaatttctgtatattgcaacgtgaaggtatactatatagtaaaattttctgaaaatcagaatattaactagaaattaatggctgaatattaattatgagaatttgctatgtttatcttgtcattgaccctcaaaaccctgatatcagcacatttatgtgagattcctgcagaaatagcctcatgatgaatatacatgctttgtagaacatacaattgagatacaagatattttttatcctgtttgatt

SEQ ID NO: 435118 - DNA, 555 bp, Homo sapiens
agctggcctctctacctgaaatgttttcctcctcttgtctgctggataattctctcagctcatttaaggttgccaaaatctcactttctcaatgaatcccccattgaccactctaatattgaagaccccaccactttacatattgcagttctccggatcccccttgccttgtctacattttcttctttcaaaagcattttcacctcctacatattaaattttactaatttattttgtttactatttattttcactcccccactaaaatgaagctccagaatgacagagatgttcactgataayggctgtaacacctagaatagtgcctcagtagtagcttaataggtagtagttgaatgaattcatgtttttaaatttgtaatatgctcacttgtaattgaggctgttctgaaattttagtgaaggtattgtaattcatgtaataaaccagttaaaataaatgttaataacttagtattaaatactatgatttttgctttcttaaataagttctgatgtggtttgggaaacaaagcccaagaagaaggcaagatg

SEQ ID NO: 435119 - DNA, 469 bp, Homo sapiens
ggtcaaatgtgaacaattaactactttgatttatcattcatcctttctccctccatgtgtgtgcaaacacacacacacttcaaacccatgtgggccaacacacacagttacatttttcttgaaatgtttgagtaagttgcaggcacgatgccaccttatctctagagacttagtgtgacttcctaaaaacaaggacrtcatcgtgcataatcacagtataatgatcagcatcaggaaataggcgtggacacaacattattattcattattaaaaattactcatcttcaggcctcatccaaagtttgccagttgttccaggaatgtcctttatctggtctggagcccaatgtaggatcacctgttgcatatagtgattatattcctttagtctccatttatctggaaaagttcttggtcagagaagtcatttttgtccctctgaatgagaatggcccagcaagggtctgt

SEQ ID NO: 435120 - DNA, 469 bp, Homo sapiens
ggtcaaatgtgaacaattaactactttgatttatcattcatcctttctccctccatgtgtgtgcaaacacacacacacttcaaacccatgtgggccaacacacacagttacatttttcttgaaatgtttgagtaagttgcaggcacgatgccaccttatctctagagacttagtgtgacttcctaaaaacaaggacatcatcgtgcataatcacagtataatgatcagcatcaggaaataggcgtggacacaacattattattcattattaaaaattactcatcttcaggcctcatccaaagtttgccagttgttccaggaatgtcctttatctggtctggagcccaatgtaggatcacctgttgcatrtagtgattatattcctttagtctccatttatctggaaaagttcttggtcagagaagtcatttttgtccctctgaatgagaatggcccagcaagggtctgt

SEQ ID NO: 435121 - DNA, 514 bp, Homo sapiens
gcaatggggcatttgagtagctgtgacagggactctagcccacaaagcctaaaatatttactacttggccctttacagacttagtgtcccaccctttgttctagtccgtaaacaagtagcgtgacagatatttttacttatttgattgtgaaaatctttatggaataggcaatgtttgaacagttctgaaaaacattggtttaacacatttttagcctgtaatctacaatacaaatgaaatacagttgacccttgaacagtatagtggtttggggtggcaacacccccamccaagcacagtcagaagctagctataacttttgactccctcagaacttaactattaataggcttgccaataacataaacagttgattaacacatattttctatgttatctgtattatgtactgtattcttacagtaaattaagctagagagaagaaaatgctaccaagaaaatcgtaaggaagaaaaaatatatttactattcattcaatgggagtagataatc

SEQ ID NO: 435122 - DNA, 601 bp, Homo sapiens
gtgacctgctgtacagatttgtagcctaggagcaataggctataccatatagcactggtgtgtagtaggctataccatctaggtttttgtgagtatactctatgatgtttgcaccatgacrgagtcatctaacacacttttcagaatgtatccctgttaaacgatgcatgactatgcattagtttgtaattgtaaaaatactcaaatgctatgctttaaatatttacttacatgtaaatatttaaatacatatttacttacatgtaaatattatatcctaaagcatgacagcaattaaattttactttaccttttatgaaaatatcttatagaagttggaaggatacttaaatatgattttttaaattcagtcagccaacattcaacattcaggcaactagatatgtgcccaccaaatacaaaggggattttaacaaataacatatagggaaaaatattcctagttgaaactcttgtgctgaaaaagttctcccacttttttgagatgttcaagtttgagcgggaaaatcaagacttgtctctttagctacagctggaaactgaattattgaacattttagataatgagtttcaaattctc

SEQ ID NO: 435123 - DNA, 601 bp, Homo sapiens
gtgacctgctgtacagatttgtagcctaggagcaataggctataccatatagcactggtgtgtagtaggctataccatctaggtttttgtgagtatactctatgatgtttgcaccatgacagagtcatctaacacacttttcagaatgtatccctgttaaacgatgcatgactatgcattagtttgtaattgtaaaaatacycaaatgctatgctttaaatatttacttacatgtaaatatttaaatacatatttacttacatgtaaatattatatcctaaagcatgacagcaattaaattttactttaccttttatgaaaatatcttatagaagttggaaggatacttaaatatgattttttaaattcagtcagccaacattcaacattcaggcaactagatatgtgcccaccaaatacaaaggggattttaacaaataacatatagggaaaaatattcctagttgaaactcttgtgctgaaaaagttctcccacttttttgagatgttcaagtttgagcgggaaaatcaagacttgtctctttagctacagctggaaactgaattattgaacattttagataatgagtttcaaattctc

SEQ ID NO: 435124 - DNA, 601 bp, Homo sapiens
gtgacctgctgtacagatttgtagcctaggagcaataggctataccatatagcactggtgtgtagtaggctataccatctaggtttttgtgagtatactctatgatgtttgcaccatgacagagtcatctaacacacttttcagaatgtatccctgttaaacgatgcatgactatgcattagtttgtaattgtaaaaatactcaaatgctatgctttaaatatttacttacatgtaaatatttaaatacatatttacttacatgtaaatattatatcctaaagcatgacagcaattaaattttactttaccttttatgaaaatatcttatagaagttggaaggatacttaaatatgattttttwaattcagtcagccaacattcaacattcaggcaactagatatgtgcccaccaaatacaaaggggattttaacaaataacatatagggaaaaatattcctagttgaaactcttgtgctgaaaaagttctcccacttttttgagatgttcaagtttgagcgggaaaatcaagacttgtctctttagctacagctggaaactgaattattgaacattttagataatgagtttcaaattctc

SEQ ID NO: 435125 - DNA, 510 bp, Homo sapiens
tagaatgccctcttctcatccccttagtttttttcttttagtatgtttttccataattaaagatccatcttattttcacctcttcagttaaggatgatttctcctgcttctgagttcctagagttttcatccctttgatgaaaatgcttactaatagtaaatatattgctttttaaaatttccttcatatccatgttttttaaaggtctaatttttaaattatttaataaggtgaaatagtatggtttaatggctaaaaacatgggctttgaagtcaaacaaagctgagtgtaawtatctctgtatatttatgtacttaacttgcccaagcttcagtttcttaagctgtgaaatggggataataagagtatctaccttgtagagttgtagttaggattaaatgcaataatgcacataatgcattcagtacagtgccttgcaaatagtaaaatcaagtggtgactgctgtaattattttctccatcttactgtatatatttattatgggtg

SEQ ID NO: 435126 - DNA, 555 bp, Homo sapiens
gcacttttccccacatatggggcactggcttcaaacaattcagttcagtatcattacttttaatctcatctttcctttcttggtagttgttaatacagttatggaaaagaggcacattgcatagaagccattggggagttcagtggaagttctgtaagatgtgcatgtactatttgatgcgttttctttgcttcactgcttttaatacttagcagtattgttggtctaagtcaatttgattattgaggagtctcagagcaaggtgcgttctagatgtcatcctaaaaaacacttcatatataattaatcactattttgtataattacatattgctgcttgtgtgtttttttttttttccrtttagttgggcgttgtgttttacacaaaaccatttttgaattaaggctatgatattaagatagaaatttggactgttgttctgcttttcctggcactcaaattcatgactagttttgaggtcaaacctatgttcgtaatgagagattttataaggatcaactaagaaatggaaggcaggtgaagatataaaaccc

SEQ ID NO: 435127 - DNA, 476 bp, Homo sapiens
attacatttgtaggacatttgaatattatttactaaatacccacttaaaaaaaatactgtactgtaaacaattcttccaaaggaagccttaaaacaatttgagttcaacaagagtttgcttgtgcctgtgtgccttggcagttattttatagcttttctctactatatactattatgtgtccaagagcaaattttttaaaacaatttgtattactaccgttccatttgggccacaagttaaattgagtgttgttaagcacctacgtttcttttaaacctttaaaaacttgtyatgacaatgttggtaatcattttttacacttctttagttttagtttagtttgtttatttaaggatcagttgtgtattattttagacaaataagtgaatctcatgttccctttcctgattctttggtttctatgtaaatctaactttattttcagggaatatccagggcaagtgaatgagttata

SEQ ID NO: 435128 - DNA, 504 bp, Homo sapiens
caacaccaaaccacgatttgtgaaagacatcattggattttattaaaattaaatttttgtgttcttcagaagacactatcgagagaatgagaacaacagactgggagaaaatatttgctaaagacatacctgataaaggactcacccaaaatagacaaacagctcttaaaactcagcataagaaatggaacaacccaattaaaaaatgagcaaaagatctaaacagacacctcrccaagaagatatacagatagtaagtaggctcattaaaagatggtcagcatcctctattagttagggaattgcaaattaaaacaatgagatatcactgcacaaccattagaatagctaaaatccaaaacaccaacagcaccaatgctggcaagaatgtggaataactggaaatacaatttacttctggtgaaaatgtaaaatggtacagtcactttggaagacaatttggcaatatcttacaaaactaaacatactcttaccatatgatca

SEQ ID NO: 435129 - DNA, 504 bp, Homo sapiens
caacaccaaaccacgatttgtgaaagacatcattggattttattaaaattaaatttttgtgttcttcagaagacactatcgagagaatgagaacaacagactgggagaaaatatttgctaaagacatacctgataaaggactcacccaaaatagacaaacagctcttaaaactcagcataagaaatggaacaacccaattaaaaaatgagcaaaagatctaaacagacacctcgccaagaagatayacagatagtaagtaggctcattaaaagatggtcagcatcctctattagttagggaattgcaaattaaaacaatgagatatcactgcacaaccattagaatagctaaaatccaaaacaccaacagcaccaatgctggcaagaatgtggaataactggaaatacaatttacttctggtgaaaatgtaaaatggtacagtcactttggaagacaatttggcaatatcttacaaaactaaacatactcttaccatatgatca

SEQ ID NO: 435130 - DNA, 641 bp, Homo sapiens
gatgagtattaagtttttaatatccacaagtatgtggatattaaacagcacactcctgaaaaaaataggtcaacaaagaaatcaaagggaagttaaaaagtatcttgtgtaaaacaaaaatgaaaaaacaatatgtcaaaacttatgcaaggcagcaaaagcaattatagaattaaagtttaagaccaggtgcagtggcttacacctgtaaactcagcactttgagaggctgattgcttgaagccaggagttcaagaccagcttgaccaacatggtgaaaccctgtctctactaaaaacacaaaaattggctaggcatggtggcatgtgactataatctcagcttcttgggaggctaaggcatragaattgcctgaacccaggaggcagaagtggcagtgagctgacatcatgccactgcactccagcctgggcaacggagcaacactctgttgcaaaaaaataaataaaataaaatttaaaatgtaaagtttattgtgataaatgcctaaggaatatatcttaaataaaaaaactcattttatacatcaaggagctagaaaaagaataataaactaagtccaaggttagcagaaggaagtaaataataaatattggagcagaaataaatgacattaagat

SEQ ID NO: 435131 - DNA, 641 bp, Homo sapiens
gatgagtattaagtttttaatatccacaagtatgtggatattaaacagcacactcctgaaaaaaataggtcaacaaagaaatcaaagggaagttaaaaagtatcttgtgtaaaacaaaaatgaaaaaacaatatgtcaaaacttatgcaaggcagcaaaagcaattatagaattaaagtttaagaccaggtgcagtggcttacacctgtaaactcagcactttgagaggctgattgcttgaagccaggagttcaagaccagcttgaccaacatggtgaaaccctgtctctactaaaaacacaaaaattggctaggcatggtggcatgtgactataatctcagcttcttgggaggctaaggcataagaattgcytgaacccaggaggcagaagtggcagtgagctgacatcatgccactgcactccagcctgggcaacggagcaacactctgttgcaaaaaaataaataaaataaaatttaaaatgtaaagtttattgtgataaatgcctaaggaatatatcttaaataaaaaaactcattttatacatcaaggagctagaaaaagaataataaactaagtccaaggttagcagaaggaagtaaataataaatattggagcagaaataaatgacattaagat

SEQ ID NO: 435132 - DNA, 506 bp, Homo sapiens
atttgttagttctcttggccaaaaatatttttactggatgtgaaaaatttttagttaatagctaggtctggctggttagttaattcccttaagtaaagcatagtaattttgtcaaggtcaaaagctttattctctgactagttatatttcttatgagctattattgaactatatatatcagcaaatctcattaggtacaagtgctacaggatgagtttgkgggtcactagttcaaattcatcaccactgcagtaaacccatcagacagttcaagtatcagtctgaatttcagatacagtggctagtattatggattatgggaagtccttttagatttcaatgggaactttattaataacttatattttcattaatacagtttctttcttgacccacccattaccttcaaccttcattgttttttaattatatttgaaaaatataatattaaatatactggtgttcagatcttacatttggtcatatcatgtgtttcccgaacttga

SEQ ID NO: 435133 - DNA, 595 bp, Homo sapiens
aagttatgataatcttactaaatttgagatacagctattttcattaaacgcatatcaatgtctcacttattaaaaattacacaagcaaagatcattctgtttggggctgggtttacagttttgtaacccatgccaaattttgacacctcatagtatttggcaaggataagtatgaaactgcttgattaataaatgcaaacaaaaatgtgtgctggcaattcttaagacacttataatattactttaccaataattttaaagccagcttatttattaaagattttacttaagttatataacctttaaaagcatgtgactagtcttttttggtatttgatttaagcacttttttttaaagccaattaattagagctcttttgtgtatttttastagtgaaacattgtgtacacaacacctaaaaacatataaagacgtattaggcatgccgatggaggtacattttatagatttataaccccaccccctttttcctattatagactttcagattcttgataatgtgttttacaaccctaggtagttgtcagctaaatagccttaagtttgcacattaaaggaaacaactcagatgaa

SEQ ID NO: 435134 - DNA, 548 bp, Homo sapiens
ggcttggcgagggggctcacgcctgtaataccagcactttgggaggccaaggcaggtggatcacttgaggtcgggagttcaagactagtctggccaaaatggggaaaccccgcctccactaaaagtacaaaaaaaaatagcttggtgtggtggcacacatatgtactcccagctactcyggaggctgaggtgggaggatcgcttgaacccaggaggcagaggctgaagtgagtcgacatcgcgccactgaactccagcctgggcaacagagggagactctgtatccaagaagatagtgggagatagggctgggcacagtggctcacacctgtaatctcagcactttgggaccaatcccacatttcccttctgcactgtcctggcagagtttctctatgaaggctccaaccctgcagcagctttttgcctggacatccaggagtttccatatatcctctgaaatctaggtggagattcccaaacctcaattcctgacttctgtgcacccacaggctgaataccacataagagctgccaaggtttggggc

SEQ ID NO: 435135 - DNA, 577 bp, Homo sapiens
gctgtgctaatactgcctttcttagtgttagatacggctaggttcctctgcaaacagcatgcccagttctcctgttcgttattctctcattccaagtacccaccccctgcccccgcttttgctgcgccttaacctgtctaaacatacttagacatgccacagccccagtccacattcctttccttatgtgggaataggttagctttctagtgccctgtaggtgaccccttccttctccccctctctcctctatcacacacctaccttaactaagaaagtttaaatgtttacccaattgagaccagtttacattgtgcrgtccaagcccaggcaatggggggaaagacacagaggcagaatctgcattaggaagaaaacccccactcttctttgctccgcatgctctcgtgacagccaggtttatgagcagcacccttctgcggaagtaaatttaccttgctgagaaattctttgttttactgctcattttctttgtgaccctgagctcttacttctgacattagcaagataacaaaaaaaagataaagaatatttatttcctggtggccacgagagc

SEQ ID NO: 435136 - DNA, 481 bp, Homo sapiens
cccaacagtatagaagtgatttaagctgcctctgacagatctgatccatatagagtacaaagcctctttcttccatgcactgtgagtgaaatactaacaacagccttgtactaaaagttataaatttaggaaaagctaggccttgaggggatgggagtgagttaagtaaaattaaaagtagtctaaatttatcttctttctggtgtatgaataaaagcaatagggaaatagagtatctgaagtatataggaattctatcttgctttcatgtaatagtcaagaaacagtatttaattatgaagctaattgttcaaacaaagaaaaaaactaacacattttcaaaagaagaaattttaagagaccacattccttgatcataatctgatacagttargcaaaaaataaaactatgcctctattactcagaaaataataaatccacttctacttaaatctttgatagaagagaaaagtcaaaata

SEQ ID NO: 435137 - DNA, 534 bp, Homo sapiens
cccctccctgtgcctgctattaaccatttaatggctggatgctgagagggtagaaggagaatggaccctgggtgttaasagactactttgatattttaagagctagtatgacgatagtacgtgacaatgacaatgcacaggtgagtaccagctcttgcacacgaggactttttgagtagcaggttctgttgtgtgttctcactctggtgattaaatctgcagcaggtgatactaacaaacaagggatagtttaaaataaaattaaaagtgctgaggatgaatgggctgactgaagaaaaggaactgcagcaacggcagcagtgccaaggacagtgccctgcatccagtcctcccctgttgtggcaacagcagcaacgtcctatccagactattccagggcctgattctggctctgatcccagccagctcagcctcctggaattcctgccccagttctgagtgcagttctccaaccttccataaactccgtgaactacccaagatcttgccaataaatccctcttcagtttgagt

SEQ ID NO: 435138 - DNA, 534 bp, Homo sapiens
cccctccctgtgcctgctattaaccatttaatggctggatgctgagagggtagaaggagaatggaccctgggtgttaagagactactttgmtattttaagagctagtatgacgatagtacgtgacaatgacaatgcacaggtgagtaccagctcttgcacacgaggactttttgagtagcaggttctgttgtgtgttctcactctggtgattaaatctgcagcaggtgatactaacaaacaagggatagtttaaaataaaattaaaagtgctgaggatgaatgggctgactgaagaaaaggaactgcagcaacggcagcagtgccaaggacagtgccctgcatccagtcctcccctgttgtggcaacagcagcaacgtcctatccagactattccagggcctgattctggctctgatcccagccagctcagcctcctggaattcctgccccagttctgagtgcagttctccaaccttccataaactccgtgaactacccaagatcttgccaataaatccctcttcagtttgagt

SEQ ID NO: 435139 - DNA, 522 bp, Homo sapiens
cctgcaagttaacaagactctcaggatccgacgcacatagactgagaagccctaagcaaggggacccacgcacctcttttcatcctgagagttttctgattcaaagcctccctcccagacagatggtaagcratttgtcttcatacccatgtggtgtgaaaactcaggaaagaaggggaaagggctgtgttgttcacaaccatcagtaccaggccagaggctcagtgcccctctgtttctagtaggggtaagctggcttggagagacaggattattgccacactatgccctgggacagtctaggcaaaaaaaaaaaaaaaaaaaaaaggggggggggggcagggagggaggcattttttaggatgacaaaactagaattccagaagtggagtaaagttattccctcaggagactttgcaataattaagaaattatttttatgggtactgtttatgaagcaaagcagagctgccaggttaggcaaattccaaagcaatgccaaaaacacttgacctaaacccc

SEQ ID NO: 435140 - DNA, 522 bp, Homo sapiens
cctgcaagttaacaagactctcaggatccgacgcacatagactgagaagccctaagcaaggggacccacgcacctcttttcatcctgagagttttctgattcaaagcctccctcccagacagatggtaagcgatttgtcttcatacccatgtggtgtgaaaactcaggaaagaaggggaaagggctgtgttgttcacaaccatcagtaccaggccagaggctcagtgcccctctgtttctagtaggggtaagctggcttggagagacaggattattgccacactatgccctgggacagtctaggcaaaaaaaaaaaaaaaaaaaaaargggggggggggcagggagggaggcattttttaggatgacaaaactagaattccagaagtggagtaaagttattccctcaggagactttgcaataattaagaaattatttttatgggtactgtttatgaagcaaagcagagctgccaggttaggcaaattccaaagcaatgccaaaaacacttgacctaaacccc

SEQ ID NO: 435141 - DNA, 560 bp, Homo sapiens
gtgagatgggttgaccttaccacagtatcaaggcattggcatcaaactgcacaacttgtcactggggacatcaccaccccatacttggaggagtgtggatgatttgtctagtgctatctgtggagtgttgaagtcccccactattattatgttactgtctatctcttttcttaggtctaatggtaatatttttatgaatctgagagctcagattttattatatgtaaaaatgcatatatatttaggattgttatgtcttctgattgaattggtccttttatcattayataatgtcattccttgtctgtttttactgttgttgctttaaagcctgttttatctgatataagaatagctattcctgctcattttgttttccaattgcacaaaatatcctttcccacccctttaccttgagtctatatgaaccctcacatgttagttgtgtctcttgaagacagcagatatttggtttgtaattttttatccattctgccaatctgtatcttttaagtggagaatctaggtcatttatattcaacattaacattgtgatgtag

SEQ ID NO: 435142 - DNA, 580 bp, Homo sapiens
tgttccccgcccgccccttccatctttatgtgtcttcacgtctctacaacaacacagtacagtaggactctggattaacrttaaggatatttgctgccatttcagctgccctatgaggtggggaggtatgatccacattttacagatgacgaaggcaggtgcagaccctccccaaagacagagcatctgtggctaatttggtgatttctgaatagaaaacctgctatctctagcttgaacatcttcagtatatgaaaagttctgtgcatgtaccagaaactcataaaatactagttgaatgagtacatcaatatgctaaaccagccatttaacattagtgagcatctactatgtgctatttctgtgccaattgcttaggatttagagattaaaaaaaatacatggacagaacctcagcctccttaccctaaaagaagtccagaggacaggcttataaacagatcgttgaaatgcaggggtgagcagtgctaggtcgtggcaagcccaggggccatgaaagatggaagcagaacactaacctgtgtttggctaaagttaggtcatctttctcaagaagaaa

SEQ ID NO: 435143 - DNA, 635 bp, Homo sapiens
gtgactcgtggctattgagcccttgaaaagtggctagttgaccaaaaaatggaattttcacttttacttaattttaattaattcaagcacaatttaaatagctacctgtggctagtgactatcatattggactctgtaggccttggggatcctagcttttggttgtacacctgcagaaactgagacacggtgggggaaataaattccttaagacctcccaggagtcaataagaattgggtttcctctgtctggcagctgtgttcttctcatgacatagcaaatggctgacaaaaggcagatatctgccttgctgagccacaaagacaggttccaaataagggaatgtcttggttgtttcggggggggcttttagctgtggctggagaacacagactcaaggcctctggtctttttgagaagcagaggccagtggaaggctgaggtctggtagtgtggagcccccactgcagcctgctcatgagggccaggcctccctctgggacctgcagcactgtgacaaatacttctttccrgctgactttgctcagacacacgaatgaatactcagcatgggaatcgccctctctaacatgaagtgagagccttggaaagccctgtaagcaacatggctgca

SEQ ID NO: 435144 - DNA, 561 bp, Homo sapiens
ctccctgaaggctaagaggtagggttttcaagtatagcttggtgggcagaggggactagagaatgggtgctgctgattggttggggatgccatcataggggagtggaaaatggtcctcatgtgctgagtctgcctctgggtagggtccacaggactgagtcatgagtccaggtggagatagctggtcatcagaaatgtaaaagtctgaaagacatctcaaaagtccagtcttaggtgttacaacagtgatgttatctgtgggagtacttggggaagttacaaatcttgtgacctctggagaaatgactggttattgtttaactaagcctacatcttaacagaattcaggaccttcttgtaatcctaatcttgtgggctttcattagttttacaaaggcagcygagttttgggaaaggctactatcattcttgctttaaagttaaactataaaccaaatttctcccaaggccagcttggtctatacccaggaatgatcaaggacagcttggaggtttgaagcaaaatggagtaaactatgtcaggtttcttttactgtcata

SEQ ID NO: 435145 - DNA, 581 bp, Homo sapiens
tcaggagttcagttatttgacaagtgagcagtgaagacagcatccataccttaatccacctgaattagaaaccatcctgatacaacgctccttccacaaattgcctcaaacctttctgtgtgggaatgagcatgaattgcccagaaagaacgatctgcagaatggaggctggggaggccccctgccctgagctctggctgactgctcccaggacattggaggcagaactcgccagatggcctcaatggggaaggctttttgttgcgtagaccctggggctggaaggcagtgatctatttggattgctgtgtcttcactggacatcaggtttcacacggtggcccttgtacaagaggacttgtgaaagtcaccttcccctccccccaccaaacctaacagcaactgcctctcttcattgtcctgacttgtttactcragcctggagtgcagttgacttcagcattcagataactttccaacaacataggaaccaaattaccctgttgaattcatagatatgccacatttaaatgacatttgcatggcagcagtgccttcctgaacacacacaggatgtgagc

SEQ ID NO: 435146 - DNA, 584 bp, Homo sapiens
attttaaaacttggcaatagaaaccatctaaactaaaacacctacaagaaaaaaggcttaaaaatgttaaaagcctcagtaaccttgtgagacaatatttggagataccacatgcatccattggagtccaagaaggacaggaaggggaaaatatttttaacgaaataatggctgaaaatttcccaaatttgatgaaaactacaaatttataaaataagaaactcaagtaatcccaagaaaatagacacaaggaaaaccatatcaatggcaggtgcagtggtttatgtctataatctcagcactttgggaggccaaggtgggaggatagcttgagcctggggattcaggatcagcctgggcaattttgtctctacagaaaaaaaacattaaaaattagctggtcatggtggtgcatgcctgtagtcccagctactcaggaggctgaggcaggaggacttcttgagcccaggaattcaagattgcagtgacctatgatcacaccactgcactctagcccgggtaacagtaaaagamcccacctcaatgaataaatacataaaataaaataaaacaacaccgagaca

SEQ ID NO: 435147 - DNA, 553 bp, Homo sapiens
ggtgttgtctcagtgtattagtccrttcagacatacctgagactgggtaatttacaaaggaaagaggtttaatggactcacagttccatatggctgggaaggcctcacaatcatggaagaagacaaaggaggagcaaagacacatcttacacggcggcaggcaagagagcatgttccctttataaagagaactgccctttataaaaccatcggatctggtgagatttattcactatcatgagaacagtatgggaaaaacctgcccccgtgattcaattgcctcccacagggtccctcccacaacacatgaggactacgggaactacaattcaagataagacttgggtggggatgctgccaaaccatatcactcagtttttccttccttgccctgccccacagccaatcaatgatcaagacctgcttttttcctcctaaggttgaataactttatgagaatgtttctgtatgatgtttaaaagcaacttcttatttgctttccacacattgattttgcctttttttttttttttttttttttgcttattctcct

SEQ ID NO: 435148 - DNA, 553 bp, Homo sapiens
ggtgttgtctcagtgtattagtccgttcagacatacctgagactgggtaatttacaaaggaaagaggtttaatggactcacagttccatatggctgggaaggcctcacaatcatggaagaagacaaaggaggagcaaagacacatcttacacggcggcaggcaagagagcatgttccctttataaagagaactgccctttataaaaccatcggatctggtgagatttattcactatcatgagaacagtatgggaaaaacctgcccccgtgattcaattgcctcccayagggtccctcccacaacacatgaggactacgggaactacaattcaagataagacttgggtggggatgctgccaaaccatatcactcagtttttccttccttgccctgccccacagccaatcaatgatcaagacctgcttttttcctcctaaggttgaataactttatgagaatgtttctgtatgatgtttaaaagcaacttcttatttgctttccacacattgattttgcctttttttttttttttttttttttgcttattctcct

SEQ ID NO: 435149 - DNA, 450 bp, Homo sapiens
ctctcttgcctgcaccccatggtcatttgccagaggaagagaagaccaggacctgctttataggtggttctgcatgatatgtaggcaccaccaggaagtggacagctgcagcactatagcccctttctgggatgtccctgaatgacagtggtgaagggaaatcttctcaatgggcaaaacactgggcaatgtacctggytgtgcactttgcttggaaggagaaatggccagatgtgcaattatatactgattcatgggctatagccagtgatttggccagaaggtcagggacttggaaggaacatgattagaaaattggtgacaaagaaatttgaggaagaggtatgtggatagactgctctgagctggcaaaggaagtgatatttgtgttccatatcaatgcctaccaaagggtgacctcagcagaggaggactgaaataatcaggggt

SEQ ID NO: 435150 - DNA, 547 bp, Homo sapiens
atgacattagctgtaggtttttcatagctgtcctttatcaacttgaggaaatttccttctattccttgtttgttgagagttttcatcatgagtcagttttgaattttgtcacgtgcttttttttgcatctgttgatataatcttgtgattttcttctttagcctgttgatgtgatggattacattaattgattttcaaatttgaatcaaccttttatacatgggataaatcccacttggttatggtgaatacttatttttatacattttggatttgatttgctaatattttgttgaagattatgcagctaaattcatgagagatattggtcaatagtgttgttgttttttttcttggaatgcctttggttttggtattgagggtaatatgggcatcatacaatgagtgttccctatgcttctatcttttggaagagatcatagaaaattgatttaatttmtttcttaaatatttggtagaattcaccagtgactcatctgtgcctggtcctttctgttttagaagattattaattatttatttattt

SEQ ID NO: 435151 - DNA, 647 bp, Homo sapiens
cagaaagtccaaacatgttgtagatggtctgtgtatgctgtgaaaagatttataaaagaaaatttatgcaccaaaagtgacagtcgctaagaattaccattataacatgtaattgagactacttaaaaaataggcttacatgcaaggtgtgtgaggagaaggaaatgtgtttttggaaagagtttataagaaggcatgggaatgtaaatttttgcctagtttagagggttaaaggattgtttaaaattaaataaaataaagctaaaggtttaaacaagttatggaaggtttgtaaaaattaactttgtgaacataattctatgtgtgaaaatattgactaattaaagctctttcatatgtaaacataactcacataatacatttaaatacatagacagacagaagataaaaggactcattttccaagccaggaattgtaccctgaacctgggctgcattgtgaaaagaaaaagcatggcagcatggttacaagatcaagctcccaaggacatacaagacaagagggaaaactcayccagtttttttttagagacctgcagcaaagtttgtaactgaccagcttgctgggccatcttaaaaagcaggcttacaggtatcctaagcctgtgttctatcctaagttaccc

SEQ ID NO: 435152 - DNA, 564 bp, Homo sapiens
tgcatgtacatatttgagggttaaaaagttaatataataaaaattgccttaataggaattttataatcttgtgatctttctttttcatttctcttttttttccttgacatgttggttctcatgtaagttcaggcatatgaaattggcatttttgaagtcaygaatggttggttgtcatttcttgtagttcaacccaatacatgaaattgggttgaaattggttagcactttatgtaaatttattgcatgggtgacaagttagggtggttaaaattttctggaacgttaactggagtatataaatgagattcgttccccgtcccccgtccccgcaccactgcttttttttttttgagacagggtcttgttctgtcacctgctggagtgcagtggtgtgatcacggttcactgcagccttgacttgcctggctcaatcgatcctcccacctcagcctcctgagtagctgggactacagggacgaatcaccatgcctggctagggttttttatagagacaaggtgttgctgtgttgcctaggctgttcttgaactcttgagctcagt

SEQ ID NO: 435153 - DNA, 571 bp, Homo sapiens
agtgtttgacatgtattctgatctttacatatgtattcatattagttattaaggactgttaggagcaatgatacttaaatgccttttaaagataaaatttagatggcctgaaagtggttagtcacactaacttatgaaaatatatgagaagatagagataagtattttggtgtcatgtgtttagaccatagacaacaacgtaaaggaatgaaaagaccgcttggaatagttgaaaggtagctgagctgagtcagagctagataatagtcttggctttgccttgaattaggtgtaatcttgacttactaacttcatctgtaaattgggaggttttggggagagasaatacttttttttccctgagctttaaaatttaaatcataaaattttaaatttgatgatctgatgagagtatagtaaagatgatcctagcagtattattagggaaagcaaatagtttatcttaactgcctttatttgtttacatttattgtatgtctattttttcagactcatatatctgtaaaaatagcaaaaataattcttgtatatcctactaaattactccatc

SEQ ID NO: 435154 - DNA, 568 bp, Homo sapiens
caccaaccatgtcttgctttaactaaaatttggagttcaggcttgcaaataggtctgttccagattggtaaattatgcaacagtttccaaggtgacactcaggatcctgtggctgacttctccaaagatgacttattccttgtagacagttttatgaagcccccactaaagcaggtggatggacaaacaaccctactgccctttcatgttagagatatttgatgtcttcagtaagaaaaaggaagctgcctgccagctgctttccataagcaattcgctcagaggatgcagtttgtacttcttagtgcagaatgagatgaatacactttaggtttctttcttttcttttccctttttcttttctttctttttttttcttttcttttcttttttcttttttttttttttttgagacagggtctcactctgttgcctaggctggaatgcagtgatgtgatcatagctcattgcagtcttgacctccaggccccaagygatcctccctcctctgggtagctagaactataggcacacgcccggctattttgtaatttttttgtagagacag

SEQ ID NO: 435155 - DNA, 569 bp, Homo sapiens
aatctctcactctgttaccttacaaggcaaaaggaactttgcagatgtgaggaaggatctgagatcaggtaggggagattatccgggacaatgtgggtggaaccagtctaatctcatgagtctttaaaagcagagaatcttgcccagctgtggtcagagagagctccaatgatagaagaagaaagagagattcaaagtgtgagagggacttcacccatcattgctggctgtgaagatggagtaaggggccatgagtcaaggggtgtgagtggtccctagaagctgggaatggccctcaggtgacaacctgcaagcaacagggatctcagtccaacacccacaaggaactgaactctgccaaaactcaagtgagcaaggaaayggatcttcctgcagagtgtccagaaaggaaaacagacctgtcagcactttgacttcagccctgtgaatcccctggcactcttccagccatcggaactgtaaggaaattttgcagtgttcaagccacaatgtttgtggtaatttggtagggcagcaatagaaacccaatacccctctcctccctcttg

SEQ ID NO: 435156 - DNA, 564 bp, Homo sapiens
gttaatgaaggctcccccttccagggagatgagcacacaggctccttttccctccttcactcttctcccggggcctttctctcccctggccacctcctgcacccaattacatctgtggcccaggcaagggaagccacgccttcaggaagggtcggctcttcccctggggagtttccactatgaaccctaggggcctctcaacaggaaggayggaggcgccaccttctgtggctttcaacaccttttcctaaatatttgttgattttgagctttccacaattaaacagatcatgtagtctctgggttaggactcaggacagagattggttatttgagcttgtcactagtctttttaaatacacacaataggatagtggttacacagaaacatgtgggaaaccctcctggagggagaggatatttccttcattctcatctcaaggattcatctatacagtggccaccaggaggcagccgagtctcctcctcatggcccagagacgccctggttcatctttggaatctcccttgctacggacaggaagggcactagagcggaatgca

SEQ ID NO: 435157 - DNA, 564 bp, Homo sapiens
gttaatgaaggctcccccttccagggagatgagcacacaggctccttttccctccttcactcttctcccggggcctttctctcccctggccacctcctgcacccaattacatctgtggcccaggcaagggaagccacgccttcaggaagggtcggctcttcccctggggagtttccactatgaaccctaggggcctctcaacaggaaggatggaggcgccaccttctgtggctttcaacaccttttcctaaatatttrttgattttgagctttccacaattaaacagatcatgtagtctctgggttaggactcaggacagagattggttatttgagcttgtcactagtctttttaaatacacacaataggatagtggttacacagaaacatgtgggaaaccctcctggagggagaggatatttccttcattctcatctcaaggattcatctatacagtggccaccaggaggcagccgagtctcctcctcatggcccagagacgccctggttcatctttggaatctcccttgctacggacaggaagggcactagagcggaatgca

SEQ ID NO: 435158 - DNA, 569 bp, Homo sapiens
aatttgcaactatcattttagttttgtctatttctcctttcagtcttgtccatttttgaagctttgttattaggcacatattcatcgaggactgttatgtctttgtggtgaattgacccttttgtcactggagtccgtgtttctccttaactctggtactatttctcatccagaaatctaccttatctgatagcaatacagcccactctcactttctttggggaagtctttgcataatatgtttctttccatccttttacttttaacccatctgkgtctttatatttaaagtgaatttcttatagatagcatatagttatgtgttgcttttatatccattctggtaattactgcttttcagtaggagtgattaaaccataggtcagcaaatgtttgcctaaaaggccaaatggtaaatattttaggcttttcaggtcatatggttttgattgcaactactcaaccacgacagagtgtgaacgcagccatagaaagtatgtaaatgaatgggactggctgtgttccaataaggctttatttacagaaacaggaggttttcctgtgggaca

SEQ ID NO: 435159 - DNA, 572 bp, Homo sapiens
cataggtcagcaaatgtttgcctaaaaggccaaatggtaaatattttaggcttttcaggtcatatggttttgattgcaactactcaaccacgacagagtgtgaacgcagccatagaaagtatgtaaatgaatgggactggctgtgttccaataaggctttatttacagamacaggaggttttcctgtgggacatacatcgtggaaccttgattagatcatttacatttaatgtgattattgatatggttagttttaaatcccatcttgctattctgttttctgtttatgccatctattcttggttccattttttctgctttctttggaattaaaaaaaaaattattattctctttcatttcctccattggtttgttagctatatctctattttgtttttagtagttactctagggtttccaataggcatcattatcgtattacattctaccctcaaataacacaccacttcatatataacatatgagtttcttaacagtattctttaatttctcccatttcatcctttgtgccatgttgtcacgcatttttcttttatatttatatacctca

SEQ ID NO: 435160 - DNA, 603 bp, Homo sapiens
gagggaccggcgggagaggagctactctttcttccctcgagaagaaaggaaagggggattctgaatatttttcttgcyaccagaggtttgtgtgaggttcaaccccctccgtggggatttctcacctctttttgagtttcaacccccaccccccatggggatttctcacttctttttaacctctaagacatcccgactaaggagtacttcaccgccccccactgctttctttccctagtccagcctaaggaatgctttaccacctctgtggtttctctttccttggtatgtcctaatcaaggaatgctttactaccccgtggctttttccttagtcgcgaccaccaaggaaatactttaccggctcctgcagcttctccttccttggtctgtgcacagagtcgtggctgcagtatatgaggatcctttaagctaggttgctggccagtttctttccacgttgctgagagctcaggttattcctggcactgggtgggtcatgatttctcacccctgaggccatcacaagtgggcagggtgcgcctcctcacgagagagaaccagagaccggccctggaagggaacttaatcatgggcgagcccc

SEQ ID NO: 435161 - DNA, 592 bp, Homo sapiens
ttcctgctgccacctcttgaacttccttccacagttttcagagcacacgcctcagtctaaggttcctgctccagactgcggtcagactcacctgagagctttaaaaaaatattcctgcctgggacccaccttcagagacccttatttacttaatctgcaatggaaatgggcattttttatcatttatttatttattgagacagggtcttgctctgtcacccaggctggagggcagtgatgcgatcatagctcactgcagccttgaactccaggactcaagccatcctcccgmgtagacaggactacaggcatgccactgcatctggctaatttttttacattttttaaaggtatggggtctcatgttgttgcccaggctggtcttgaactcctaggctcaagcgatcctcccacctcagcctcccaaagtgctgggattacagatatgaaccactgcacgtggctgacattagcataatttaaagccacactgtgcctctcatgggcaggcagggtgagagcccctgtcagtcatgcggtgggagacacagagggctgctccgggacaaggacctgctgcacaggtaagctg

SEQ ID NO: 435162 - DNA, 592 bp, Homo sapiens
ttcctgctgccacctcttgaacttccttccacagttttcagagcacacgcctcagtctaaggttcctgctccagactgcggtcagactcacctgagagctttaaaaaaatattcctgcctgggacccaccttcagagacccttatttacttaatctgcaatggaaatgggcattttttatcatttatttatttattgagacagggtcttgctctgtcacccaggctggagggcagtgatgcgatcatagctcactgcagccttgaactccaggactcaagccatcctcccgcgtagacaggactacaggcatgccactgcatctggctaatttttttacattttttaaaggtatggggtctcatgttgttgcccaggctggtcttgaactcctaggctcaagcgatcctcccacctcagcctcccaaagtgctgggattacagatatgarccactgcacgtggctgacattagcataatttaaagccacactgtgcctctcatgggcaggcagggtgagagcccctgtcagtcatgcggtgggagacacagagggctgctccgggacaaggacctgctgcacaggtaagctg

SEQ ID NO: 435163 - DNA, 563 bp, Homo sapiens
tctaactcagccttccaaaaagactttcaaaaaagaaatattctagatgaggccaggagaagccatctagagtggcactgaagctccaaagagttccacaaagagtgaatcaattgcatttatgtgctttggaaaaaacaaaaagcccaaacttgggatttcctgttagcccagagcagcgyggctctatccctaggactcagtggctcccagtgcaaaagccggttccctatgtgagttatgtcctgcgtttgaccatctgatccgcattttcccgtggattaataatttgaccactctggaagtcttgctgtgtgtactgaaaccgtctgttaactctcctgtggactgctgggtttggtatttaatcttcaacaggaatttcagaaggtcaaagtccccatctgagaggagtgccatgcaagtaatgaaaccaggcagacaagttcaccctcaaggagatggaagtctttgagtgtggttgacaaaagacctttagaccatgggcatttggggcctggggtagagcgaacggagaagaaaattagcttagggagagattc

SEQ ID NO: 435164 - DNA, 564 bp, Homo sapiens
tatttgaaatagatattaagggcgctctgctttctaaattctccccaagtgaaacagagctctctatgaggcccctgagaacaacagagcattaacacaattcctgccctgaagacgttgtgtctcctcttaggtcaagagccaataagcacataattggcccttaattgtatgaactgtattcccggtgcttttcacagcacatggcattgcgtaagggtcaacatggcttgctgatttatgtgttgatctctctctctctctgtgtgtgtgtgtgtgtgcgygtgtgtgtgtgtgtgtgtgtgtgaagagagagaaggggatttggcagtgatgggaggccacagcaaggggggcaccaagaattagataactcctataatcagtgttgtttactattcattagcaagagaaaatacaattgcaagaaaatccatttatgattatagaggagaatggaactatgcattccagatttttttccaacaaaacattcagacacaacttacattcacacttttcccctagaagtaataattagcaaacagctgtcagaaggtttgt

SEQ ID NO: 435165 - DNA, 629 bp, Homo sapiens
ctcataatttaactttggttcatgttcactgctaattaaactttaagactaatggcatcatttttactttcaaacaagtctatggaaagtaatgacttgaatatcacctgagttttgaaaataaataatttctggctttaaagttagtcgtctgtatttggtaggtattggagaggagggaaagaaaaaaggcattatttcaattctagaaaactattaaatatcatctgtacagtttttaaggaacggcatggccagggtatgatggcttatgcctgtaaccccagagttttgggaggcagaggcaggaggatcactggaggccaggagtttgagaccagcctgggcaacatagcgaacccctgtctctaaaaataaaaaataaattaatttatttattaattaaaatcaaacaaacaataaggaaaagcatggtttgagaacatgaaattatgttcgagtaggaaaaacaagaaaggaaaggtttcattcaaaactagtctctctatacagaatacttggaaagatgcttcctgttcttgaagaggattattccytttggtttgccagttttgtgtgtgttggtggttggaaggcagattacgaacacagtacattgcatttaaaat

SEQ ID NO: 435166 - DNA, 603 bp, Homo sapiens
gtaactatatacttatttgtttgtcagattatttagtcagtgtgactccagatcccagctctggaacctcattaaaccgtaagctccttgaaggtaggacctgtgtttgtttcactccccagtgcctggtgtagtgcccagcatgtggtagacacacaataaaatttcatgaataagtcaagagctgcatatgatgatagcacttttagcagatgaccttgatagttggcactctaaggataaaaaatgccactcagatgctcaacagtgtttttttgcagacagatgtctaggtagccctggttttgcatcagtgctttgggacaccaaggtccaggcaggacaacattcattttggggatcaggggagtttatctcatatcatcctgtatctttttatgactaatgccaggctccccaagtagcccgtaagctttggagtgtgagaacttgagtgaaattcaactactagacttggtgctaagaggatctgggccytttaccctcaagtgcttccagcctaggaggaactgatatagataccattaactttaataccatccaacttccagctctactataacactaaataaatgttccagg

SEQ ID NO: 435167 - DNA, 633 bp, Homo sapiens
tactgtagaacctaagattggccttttgagatatcttttcaggcttttgtgtttctgacaaccagatggctccgcccaaaacagtgactcctctgtggcccccactcagaggaagactcagtgcacaaaaaccgttttccacacccctatgactacatccccaaccaatcagcagcacccattcccaagacccctgcccaccaaactatccttgaaaactccttgcctctggattttcagggaggctgaactgagtaataataaaactctgctctcccrtttagccaactctacctgtattaaactctttctctattgcaattcccctgtcttgataaatcaactctatctgagcagtgggaaagacgaacccattgcgtggttacaaagatgcttggcatcttttacgacaacttcctgtaagttctcttatgataacttgcatcttcagaaacatggagcacgtgtctgagaattagagcttgatacaaagtcagggtagtgatctaactcttctgtgcttatttatgtagctctgcttccaacaccaactgcagatgtcactgaatattctctggagtctcctttcaaaccaattttaatcccactaagattaagagcaaatatgggaat

SEQ ID NO: 435168 - DNA, 633 bp, Homo sapiens
tactgtagaacctaagattggccttttgagatatcttttcaggcttttgtgtttctgacaaccagatggctccgcccaaaacagtgactcctctgtggcccccactcagaggaagactcagtgcacaaaaaccgttttccacacccctatgactacatccccaaccaatcagcagcacccattcccaagacccctgcccaccaaactatccttgaaaactccttgcctctggattttcagggaggctgaactgagtaataataaaactctgctctcccgtttagccaactctacctgtattaaactctttctctattgcaattcccctgtcttgataaatcaactctatctgagcagtgggmaagacgaacccattgcgtggttacaaagatgcttggcatcttttacgacaacttcctgtaagttctcttatgataacttgcatcttcagaaacatggagcacgtgtctgagaattagagcttgatacaaagtcagggtagtgatctaactcttctgtgcttatttatgtagctctgcttccaacaccaactgcagatgtcactgaatattctctggagtctcctttcaaaccaattttaatcccactaagattaagagcaaatatgggaat

SEQ ID NO: 435169 - DNA, 633 bp, Homo sapiens
tactgtagaacctaagattggccttttgagatatcttttcaggcttttgtgtttctgacaaccagatggctccgcccaaaacagtgactcctctgtggcccccactcagaggaagactcagtgcacaaaaaccgttttccacacccctatgactacatccccaaccaatcagcagcacccattcccaagacccctgcccaccaaactatccttgaaaactccttgcctctggattttcagggaggctgaactgagtaataataaaactctgctctcccgtttagccaactctacctgtattaaactctttctctattgcaattcccctgtcttgataaatcaactctatctgagcagtgggaaagacgaacccattgcgtggttacaaagatgcttggcatcttttacgacaacttcctgtaagttctcttatgataacttgcatcttcagaaacayggagcacgtgtctgagaattagagcttgatacaaagtcagggtagtgatctaactcttctgtgcttatttatgtagctctgcttccaacaccaactgcagatgtcactgaatattctctggagtctcctttcaaaccaattttaatcccactaagattaagagcaaatatgggaat

SEQ ID NO: 435170 - DNA, 588 bp, Homo sapiens
tgtgccactattgttcctctctctgtctctgtctctgtctctctctcctctcacccttcctygctctctcaaccttcccagctctttgattctaccaggaaaagaaaagagcctttcacaccaaaacctagatgatggatcagttgaccctgaaaccaagttcagctatttcatgactgtgtgagagtgaccttgaataatagaaatagctgctggaaaaaaaatgcttttcatactgaagggtagaaaaacaagaatgacagtaggctctacatttcagtctctatggtctgaatgtgttcccccaaattcatatactgaaacatagtctgcagtgtggtattaagagatgaggcttaggggaggtgattaagtcatgagggcagagacttcataaatgagattagcacccttataaaagaagcctgagggagcttgttagctcctttgcctgtcctttgtgtgaggacacattgaaggtgaatctaggaggaatgaggcctcgccagacgccaaatctgctgatgctttgatcttgaaatcccagcctccagaactgtaagcaataaattctgttgcttataaaac

SEQ ID NO: 435171 - DNA, 606 bp, Homo sapiens
gtgcaatcgtagctcacagtagcctcaacctcctgggctcaagcaatcctcctgcctcagcttggctgtttttcttttcattttttgtagagatggagtctgactatgttacattttttaatgaatagactttattattttttagtagttttaggtttacaagaaaatctagcagaaagtagagagttcctacctacctgttctcctagttttcccctgttattaacgcctgatattagtgtgatacatttgaagtaattactgagtcaggacagatacattatkagaaactaaggtttattgtttacattggggtcactcttggtactgtacattcagtgggtttggacaaatgtctaactatatgtatctaccattatagtatcatacagaatactttcactgtcctgaaaatctcctgtgctctgttttattcttttctctctcctcccccctatatcccaggcaactgctatctttttactgtctccatagttttgcgcttttcagaatgtcgtatatttggaatcatatagtatatagtcttttcagattggcttatttcacttagcaatatgcatttaatgtttctccatgtcttttcac

SEQ ID NO: 435172 - DNA, 578 bp, Homo sapiens
agcagagcaaggtgactacagttaacaacaatgtattgcatatttcaaagtagctagaagagagaacttgaaatgttcccaatacatagaaatcataaatacttgcataatggatatcctaaatgccttgacttgatcatcacacattctatgcatgtaaaaaaaatcacaagtaccccatgaatatgtaaatattatgtatcaataaacatgtttttaaaaagaaatgtctttcttaattcataaaaactggtttcattaaattgccataattatcaacttagaagtgaattgatttcacctgtgttgggaacaaatgtttttccagagatcaaaaatcatctccaaatattcatcatcagagaccatttctaaaaatgtgtcctacttttaaaacccatrgaatagtattggcataagcaatttgggtaaataaggcctcagttcaattatctcaaatgtatgtgttgtaagaaattttaatgaaaattgcctccaaaattacatatttgaagtgggtatgaattaatagtataccaaagaatgtgtaaataacagaaaagccccatcacacagca

SEQ ID NO: 435173 - DNA, 609 bp, Homo sapiens
gcataatggatatcctaaatgccttgacttgatcatcacacattctatgcatgtaaaaaaaatcacaagtaccccatgaatatgtaaatattatgtatcaataaacatgtttttaaaaagaaatgtctttcttaattcataaaaactggtttcattaaattgccataattatcaacttagaagtgaattgatttcacctgtgttgggaacaaatgtttttccagagatcaaaaatcatctccaaatattcatcatcagagaccatttctaaaaatgtgtcctacttttaaaacccatagaatagtattggcataarcaatttgggtaaataaggcctcagttcaattatctcaaatgtatgtgttgtaagaaattttaatgaaaattgcctccaaaattacatatttgaagtgggtatgaattaatagtataccaaagaatgtgtaaataacagaaaagccccatcacacagcaaataaatgcagtaagtcatttcttgtttcacaaggcctgacagaacagtatataatgaaaacatgaggaattattttataatacagccacaggggaagtctcttgagaggccaaaataatccaaataaagtcatt

SEQ ID NO: 435174 - DNA, 526 bp, Homo sapiens
gacctcctgagcagtgatgtaacatggctgcacttctgcaaaactaattatgggcagagcttccaggaaatgctggtgctgtagaggtctccatgagttgtgagaaaagcgacaatacacaagctagcaaagagccactggctttggatacggcacatcttaagctgagaaaataacagaaatggatagtcattcagcttttagcaaaagagtaggaattaataaaatayagggcttggaatctgagttcttgcaaaactgatttaaaacactgaaaaaagtctaatcttagaaatacaaagttataaaatagatctcaaaaatttattagaagggtaatcaaggatccccaaaatgataaatgcaaaatgatagcataatttctcataaactgttaatgaaggagtaaggtttgagtaaaagaaagtaataagccaataaaagaaaggacttagaacttggacttagctaataataagcaacatttgagctaataatacgcaacatttgctgaacatttatttcc

SEQ ID NO: 435175 - DNA, 586 bp, Homo sapiens
gtttcaccatattggtcagcctagtctggaacttctgacctcaggcggtccacctgcctcggcctctcaaagttttgggattacaagcgtgagccactrtcccagccgaaagtggtcattttgaaatcagaagttgtatctttttgtggttgagggtgataaaaactgaaaaactgttttcaagtttggagcatgggagggaaaacccagcgatttgttctggtctccctcagctcagtgtgtttgaagccaaaagcctgcttgtgtgcctctcccaattcatttgctcctagttcatttgctactgcaatagaatttttcatgccgaatctcactcttcagcggatacctgagaacattgttgctacaatctctaaaatcagattttttcaagaaagaatttttattaataacctcaagtacttttcgcctacaccctcaggctcactttttgtataggtttttctccctggagaatcctacatgctgtattgatgtctcaattctgtgtgctgcttcttcagtgctaccttgccctggccaaaggaggcttatctgatgaccatgtcctcatcctgcctattgg

SEQ ID NO: 435176 - DNA, 496 bp, Homo sapiens
acactggtggagttttagagtaaccaaccttgcagagtggtcaactggagaggagggaggagagctgagaagtttgggtctgttctgcagataaatcgagggcttgtttccaacactattagtcyaattcttattgttaacctttcattcattaaaacaacaaaactgtaaaatcacctctgtgtcatgatattcatttccacccaatgggttatttttcatcaatgttaagaacttgacatatgtcagccaaagtgacatataacagaaatcagggagagaatttatctgggagctgggaatagtaaaaaaaataaaataaatcctagcttaggtgaaattggaattgccgctgtttgtctcattttcctcccaggcattattttccacttgtaaaagagaaaggaagaaaaatacgtctcagtagccaagccctctgggagagaggttctctctttaacagccacatccccctacaagctgaggagtctctcca

SEQ ID NO: 435177 - DNA, 380 bp, Homo sapiens
aacttgtcactgacttgatgctcaattacagtgatttttttttaaagtaaatttaccaaattttgcagctgtcaccataaatcagcttaaaaacatttccattaacagtccattaactgttaatctccattctgtccaccccaggaaaccaggaatctattttttatctccacaagtttgccttttctgaacattccatataaatggaattatgtaatatatagtcttgtgtctgactttttttacttgcyttgtatttttgaagcccgtgcatgttgtagcatgtatcagtacttcattcgttttgattaccgattagttttttcactgtatatatctttttgcatttgttctttgggttttggtgattgttcacttta

SEQ ID NO: 435178 - DNA, 581 bp, Homo sapiens
ttctctcttgtcacccaggctggagtacaatggcgcctctcagctcactgcaacctccgcctcccaggttcaagcgattctcctgcctcagcctcccaagtagctgggattasaggcatgcgccaccacgcccggctaattttgtatttttagtagagacggggttttgccatgttggtcaggctggtctcaaactcccgacctcaggtgatccgcccgcctcagcctcccaaagtggtgggattacaggcatgagccactgcacctggcccagtagggacctctcttatcctgggactcacttgaattggctgcttgaattctgggtcacccaataactaggttgaacgagattctcaagtgcagcatatcttgcctccaaaatccaaagaggccaaataaatgccttgcctttttcttagtgctaggaagtgcagggtgcaacatcttgtcctttatagcaagctctaggatggggcttttggaaagaatatggtgatcaagggaatccgaggagatctgtgtccaatatagcaagaataatatgcacggtggatcatacagatagagttattcacttt

SEQ ID NO: 435179 - DNA, 603 bp, Homo sapiens
attcccctctttccactccagtgctaatcagcttaaggagaaatatggttgctgagtcaacagagttggagttccacttccctttgtttagacctcagatctaaatgtcctcctgagcaagaggagaggtggggagggaggcagaggggcagggagggaggagcagatggctttgctgaaatcagagaggaggctcaaagtgccagaaaggtctcagattagacgcagggagtcagttacctcgtggctgattccttggggcaggggaggaggcagaaaagagtggcatatttattgtacagcaagagacagaaattagaaagtcagaaaatagatttctccagactttggggtgtaacagaatgggcaggtgtggggaagggaccagaaatgccyagtgacccacttgatgtttctggaggagaaagcctggagcagaacaggggcaggagcaaagccaggggcagagcaggacctagggaccctcttcttccttctgtggctccacagagcatggggtggacacaccaaaggggtggtggagctcagatgaagctatggcgtcaagagccctgggtctgttatgaccctgtgctaactagt

SEQ ID NO: 435180 - DNA, 277 bp, Homo sapiens
aatctgtcttttctttttaaattttatcatatttattgagggtgtacaacatgatacttgatatacatatagatagtgaaatggttttttaaaaatattctctacataccatacgtcccttctgccacccctatgctattagagaaaaatttggctagccaaaggcaagaagaagaaaagattgcttccatatttatgtagggttccagtgacccgtgaagcttatyaatagaagacagaatcaaagttggagttagtacttcttggcttagaccaa

SEQ ID NO: 435181 - DNA, 644 bp, Homo sapiens
ttttactgtatttttattctgattgttctcttttcctttatgcaaataaccaaccctgggcttttttttccccctacatttataatagcttctctagagaaacttatttctcctttttctaaatgtagataagctaaagaaactgatatttttctactgtatatttttctattcaacagtaccttggaaagcactcaagtaataaatggaatctaatatttgaatgagaggataaaaatatgcaataaacatagttatgtgattaactagttaactagttgggggttcaacaaaggctttattaacgycccctccttccagttaggtttatagaatctagaactagctgaacgccatttccccagttagggagtaagcttcccaaaagtaaaaagggaattctgttttctgtattcccagcacctaagcagtgtctagtccagagaagataacaaaaagcttttaaaaaatagcaagtagcaccaaatgtctaaggcatatgatacatgcaggagaatattgaaagtactaaaaagtatgtgggagagtattgatctagatgctaaggattctggaattattctctatataatggagagctctggaggggttttatacagaacataatataatataaattattt

SEQ ID NO: 435182 - DNA, 644 bp, Homo sapiens
ttttactgtatttttattctgattgttctcttttcctttatgcaaataaccaaccctgggcttttttttccccctacatttataatagcttctctagagaaacttatttctcctttttctaaatgtagataagctaaagaaactgatatttttctactgtatatttttctattcaacagtaccttggaaagcactcaagtaataaatggaatctaatatttgaatgagaggataaaaatatgcaataaacatagttatgtgattaactagttaactagttgggggttcaacaaaggctttattaacgccccctccttccagttaggtttatagaatctagaactakctgaacgccatttccccagttagggagtaagcttcccaaaagtaaaaagggaattctgttttctgtattcccagcacctaagcagtgtctagtccagagaagataacaaaaagcttttaaaaaatagcaagtagcaccaaatgtctaaggcatatgatacatgcaggagaatattgaaagtactaaaaagtatgtgggagagtattgatctagatgctaaggattctggaattattctctatataatggagagctctggaggggttttatacagaacataatataatataaattattt

SEQ ID NO: 435183 - DNA, 539 bp, Homo sapiens
atctagacagaaagaccactctgatgataygcatttaatcatgtctgttatttttaaaggtcagcattacagttcaattagtagttctatttgttagatgcatttttcttaatagaattattcatccaggcttttaaaacatgttcaagccccaattaaatatatctcttggaagaaattcccatcggatctcttggtctgatttcagggttctcattaaagttgtcacttaatatcatcaaatcctattatctctcaatcatctctaactctctgaataaacatatcgaacagataggatatttgcataaacagatagttaagaccagaaaagattatatttacagggataagtaacctgtgctccccagtttgttctgctccaaaagaataagtaacttgttggctctcaaaaagttaatccaagatgagtctaaggtgatattgaagaccatactctaaagattccctttctaaataaaataattttaataatattaaggcatatgaaatttagcttactactattactagaatga

SEQ ID NO: 435184 - DNA, 539 bp, Homo sapiens
atctagacagaaagaccactctgatgatatgcatttaatcatgtctgttatttttaaaggtcagcattacagttcaattagtagttctatttgttagatgcatttttcttaatagaattattcatccaggcttttaaaacatgttcaagccccaattaaatatatctcttggaagaaattcccatcggatctcttggtctgatttcagggttctcattaaagttgtcacttaatatcatcaaatcctattatctctcaatcatctctaactctctgaataaacatatcgaacagataggatatttgcataaacagatagttaagaccagaaaagattatatttacagrgataagtaacctgtgctccccagtttgttctgctccaaaagaataagtaacttgttggctctcaaaaagttaatccaagatgagtctaaggtgatattgaagaccatactctaaagattccctttctaaataaaataattttaataatattaaggcatatgaaatttagcttactactattactagaatga

SEQ ID NO: 435185 - DNA, 562 bp, Homo sapiens
tgaaatttagcttactactattactagaatgaactctgatagcctgtattgcaatagaagggcacatagtacaaagcaaggattaggtaagggacaacttaaaaaatagtaacagaataataagatttaagggaagyaacccaaataaagtggaaaagggatgacaaggggtgagtgatagcacctgtcatcattttaacttttcataatttataacaaacaaaatatgaaggaaccagtcatggaggtgtgcgcctataatcccagctacttgggaggctgaggcacaagatcgcttgaaccaaggaggcaaagtttatagtgaggtgatgccactgcactccagcctaggcaacagagcaagactctgtctcaaaaaaaaaaaaagattaattttcagatagtaaagcttgtttctttcaaattccatgtacataaactcaagatctaaattctatttgtatttggaaaatatccagtaaaatcaaaaactaatgtcaaagctataaaatattttacctattcaaatggtctcctgccatatataaatgctgaagaaatt

SEQ ID NO: 435186 - DNA, 562 bp, Homo sapiens
tgaaatttagcttactactattactagaatgaactctgatagcctgtattgcaatagaagggcacatagtacaaagcaaggattaggtaagggacaacttaaaaaatagtaacagaataataagatttaagggaagcaacccaaataaagtggaaaagggatgacaaggggtgagtgatagcacctgtcatcattttaacttttcataatttataacaaacaaaatatgaaggaaccagtcatggaggtgtgcgcctataatcccagctacttgggaggctgaggcacaagatcgcttgaaccaaggaggcaaagtttatagtgaggtgatgccactgcamtccagcctaggcaacagagcaagactctgtctcaaaaaaaaaaaaagattaattttcagatagtaaagcttgtttctttcaaattccatgtacataaactcaagatctaaattctatttgtatttggaaaatatccagtaaaatcaaaaactaatgtcaaagctataaaatattttacctattcaaatggtctcctgccatatataaatgctgaagaaatt

SEQ ID NO: 435187 - DNA, 562 bp, Homo sapiens
tgaaatttagcttactactattactagaatgaactctgatagcctgtattgcaatagaagggcacatagtacaaagcaaggattaggtaagggacaacttaaaaaatagtaacagaataataagatttaagggaagcaacccaaataaagtggaaaagggatgacaaggggtgagtgatagcacctgtcatcattttaacttttcataatttataacaaacaaaatatgaaggaaccagtcatggaggtgtgcgcctataatcccagctacttgggaggctgaggcacaagatcgcttgaaccaaggaggcaaagtttatagtgaggtgatgccactgcactccagcctaggcaacagagcaagactctgtctcaaaaaaaaaaaaagattaattttcagayagtaaagcttgtttctttcaaattccatgtacataaactcaagatctaaattctatttgtatttggaaaatatccagtaaaatcaaaaactaatgtcaaagctataaaatattttacctattcaaatggtctcctgccatatataaatgctgaagaaatt

SEQ ID NO: 435188 - DNA, 526 bp, Homo sapiens
ccactgccctccagcctgggtgacagagcaagatcctgtctgtaaraataaattaattaaataaaaaattaaaatagactacagacacacacacacacacactcacatacacaattacaaaactatgatgagtactatggtagaactaagtacagcatactatgaaatctgggaatacataagaaggcatctaatttagaagtgcagagtatgatactgcttcttaaagacagtgatatttcattaaaaaaaacgccaatgtaatatagatcaatgtctttccatttcctacaaggaaaatacaaatattatagaaaaaaaaaagacaaatatttaggcccttcccagtctgactgccttccatctatctaacattatctcccactattccctctctggcaccctgtgaccatatacaactattctattctccttcccaagcaggccatgttttatgaaaacccataacctggtcttattctctgtctcttcctcctccttattcatgagaaatgcatctactcat

SEQ ID NO: 435189 - DNA, 526 bp, Homo sapiens
ccactgccctccagcctgggtgacagagcaagatcctgtctgtaagaataaattaattaaataaaaaattaaaatagactacagacacacacacacacacactcacatacacaattacaaaactatgatgagtactatrgtagaactaagtacagcatactatgaaatctgggaatacataagaaggcatctaatttagaagtgcagagtatgatactgcttcttaaagacagtgatatttcattaaaaaaaacgccaatgtaatatagatcaatgtctttccatttcctacaaggaaaatacaaatattatagaaaaaaaaaagacaaatatttaggcccttcccagtctgactgccttccatctatctaacattatctcccactattccctctctggcaccctgtgaccatatacaactattctattctccttcccaagcaggccatgttttatgaaaacccataacctggtcttattctctgtctcttcctcctccttattcatgagaaatgcatctactcat

SEQ ID NO: 435190 - DNA, 526 bp, Homo sapiens
ccactgccctccagcctgggtgacagagcaagatcctgtctgtaagaataaattaattaaataaaaaattaaaatagactacagacacacacacacacacactcacatacacaattacaaaactatgatgagtactatggtagaactaagtacagcatactatgaaatctgggaatacataagaaggcatctaatttagaagtgcagagtatgatactgcttcttaaagacagtgatatttcattaaaaaaaacgccaatgtaatatagatcaatgtctttccatttcctacaaggaaaatacaaatattatagaaaaaaaaaagacaaatatttaggcccttcccagtctgactgccttccatctatctaacattatctcccactattccctctctggcaccctgtgaccatatacaactattctattctcyttcccaagcaggccatgttttatgaaaacccataacctggtcttattctctgtctcttcctcctccttattcatgagaaatgcatctactcat

SEQ ID NO: 435191 - DNA, 483 bp, Homo sapiens
tttctcctttaactagtggatcttcaacaggagtatatttttccaagattgtaatcatttaactactttgaaaatgcatatcattcatacttgaatcatatrtacagtatcttttattacagctcctgcacatttactaaccactgtaaatttattagcttgatatatatattaagtgataaatattataattcataatataaattctaattttttaaggttgaaagaattaaagagcaagagattgctatgtcaatagtaagagttaaaagtttaaagaacagagtttcaatctattccttacaggataaaggccaaattaaaatgcagaatattcacagtttccacttctgcaaactattcacatcttccattttcatctacttcctggtcccaaggaagcatggcatgtaaaacctggaaatgatttttcaaaagggaatatataaatgtgatttttgctttataaaattaaaggctact

SEQ ID NO: 435192 - DNA, 483 bp, Homo sapiens
tttctcctttaactagtggatcttcaacaggagtatatttttccaagattgtaatcatttaactactttgaaaatgcatatcattcatacttgaatcatatgtacagtatcttttattacagctcctgcacatttactaaccactgtaaatttattagcttgatatatatattaagtgataaatattataattcataatataaattctaattttttaaggttgaaagaattaaagarcaagagattgctatgtcaatagtaagagttaaaagtttaaagaacagagtttcaatctattccttacaggataaaggccaaattaaaatgcagaatattcacagtttccacttctgcaaactattcacatcttccattttcatctacttcctggtcccaaggaagcatggcatgtaaaacctggaaatgatttttcaaaagggaatatataaatgtgatttttgctttataaaattaaaggctact

SEQ ID NO: 435193 - DNA, 593 bp, Homo sapiens
ttttttctcttattttcatttttatctcttttgctttattttggagataactctttttatcttgcaatctattttttaatataattatatttttgttttctaatagttcttttgtgttttccttttacaatacwcagtatatattatacaaatctcttagaaggtactaggatcttgtctatcctctgagttatctcttctgtggggagccctggtttttctgaacatttacatcagtcattcttacaaactttttgaaaatatctggccatcctcggttatacatatatttttaaagttttgaacaataaatgtgcttggaaactcctgttattaagatagggcttggcagttctttctgtggtgagtaggcagggaaaccaccaacgtcattgtgtaggaggctttcttctggccctccaatgtctgtattaatcaccctaggtatactcagatcaccaacacagtttcatattttttttcctttgccttctgcagtcccgcatctacagatgaagatgtaatcaattgctcttaaggcatggtttaagtggtgtgcctgatttcagagtcccatctcactcctagcattc

SEQ ID NO: 435194 - DNA, 593 bp, Homo sapiens
ttttttctcttattttcatttttatctcttttgctttattttggagataactctttttatcttgcaatctattttttaatataattatatttttgttttctaatagttcttttgtgttttccttttacaatactcagtatatattatacaaatctcttagaaggtactaggatcttgtctatcctctgagttatctcttctgtggggagccctggtttttctgaacatttacatcagtcattcttacaaactttttgaaaatatctggccatcctcggttatacatatatttttaaagttttgaacaataaatgtgcttggaaactcctgttattaagatagggcttggcarttctttctgtggtgagtaggcagggaaaccaccaacgtcattgtgtaggaggctttcttctggccctccaatgtctgtattaatcaccctaggtatactcagatcaccaacacagtttcatattttttttcctttgccttctgcagtcccgcatctacagatgaagatgtaatcaattgctcttaaggcatggtttaagtggtgtgcctgatttcagagtcccatctcactcctagcattc

SEQ ID NO: 435195 - DNA, 593 bp, Homo sapiens
ttttttctcttattttcatttttatctcttttgctttattttggagataactctttttatcttgcaatctattttttaatataattatatttttgttttctaatagttcttttgtgttttccttttacaatactcagtatatattatacaaatctcttagaaggtactaggatcttgtctatcctctgagttatctcttctgtggggagccctggtttttctgaacatttacatcagtcattcttacaaactttttgaaaatatctggccatcctcggttatacatatatttttaaagttttgaacaataaatgtgcttggaaactcctgttattaagatagggcttggcagttctttctgtggtgagtaggcagggaaaccaccaacgtcattgtgtaggaggctttcttctggccctccaatgtctgtattaatcaccctaggtatactcagatcaccaacacagtttcatattttttttcctttgccttctgcagtccygcatctacagatgaagatgtaatcaattgctcttaaggcatggtttaagtggtgtgcctgatttcagagtcccatctcactcctagcattc

SEQ ID NO: 435196 - DNA, 521 bp, Homo sapiens
ttctaaatgaggttagttattaagttagtaaaatggtttctttaaaatgtagttgtacttacaggctagcccaataaacaagtgtttctagaagattctatggtacttatttcaattgaatacgaaaaactagactatacatttttttcagagcaagrgatagaataaatgtaatttgctgaaggttgtatttgctgtagttttcactgatggcattatttatcaggtgtaatttgcattgacatatgattggttcactcagtgatatgcaccaaatggtcaggaatttaaaaaacaaagagagaaaaagcaaaaaagcaaattaatgtcaaggtagtaaattcagttatttcttttccacatggacagaccatagcaatatttttacaaagcctgaaatacattgcggcaggtcagcagtaagatagtgtggcttccagagcctgagaattataataagtgttgactctcactgtctttcttttggggttatcagaaaagtacagaatttagtcactcca

SEQ ID NO: 435197 - DNA, 521 bp, Homo sapiens
ttctaaatgaggttagttattaagttagtaaaatggtttctttaaaatgtagttgtacttacaggctagcccaataaacaagtgtttctagaagattctatggtacttatttcaattgaatacgaaaaactagactatacatttttttcagagcaagggatagaataaatgtaatttgctgaaggttrtatttgctgtagttttcactgatggcattatttatcaggtgtaatttgcattgacatatgattggttcactcagtgatatgcaccaaatggtcaggaatttaaaaaacaaagagagaaaaagcaaaaaagcaaattaatgtcaaggtagtaaattcagttatttcttttccacatggacagaccatagcaatatttttacaaagcctgaaatacattgcggcaggtcagcagtaagatagtgtggcttccagagcctgagaattataataagtgttgactctcactgtctttcttttggggttatcagaaaagtacagaatttagtcactcca

SEQ ID NO: 435198 - DNA, 521 bp, Homo sapiens
ttctaaatgaggttagttattaagttagtaaaatggtttctttaaaatgtagttgtacttacaggctagcccaataaacaagtgtttctagaagattctatggtacttatttcaattgaatacgaaaaactagactatacatttttttcagagcaagggatagaataaatgtaatttgctgaaggttgtatttgctgtagttttcactgatggcattatttatcaggtgtaatttgcattgacatatgwttggttcactcagtgatatgcaccaaatggtcaggaatttaaaaaacaaagagagaaaaagcaaaaaagcaaattaatgtcaaggtagtaaattcagttatttcttttccacatggacagaccatagcaatatttttacaaagcctgaaatacattgcggcaggtcagcagtaagatagtgtggcttccagagcctgagaattataataagtgttgactctcactgtctttcttttggggttatcagaaaagtacagaatttagtcactcca

SEQ ID NO: 435199 - DNA, 521 bp, Homo sapiens
ttctaaatgaggttagttattaagttagtaaaatggtttctttaaaatgtagttgtacttacaggctagcccaataaacaagtgtttctagaagattctatggtacttatttcaattgaatacgaaaaactagactatacatttttttcagagcaagggatagaataaatgtaatttgctgaaggttgtatttgctgtagttttcactgatggcattatttatcaggtgtaatttgcattgacatatgattggttcactcagtgatatgcaccaaatggtcaggaatttaaaaaacaaagagagaaaaagcaaaaaagcaaattaatgtcaaggtagtaaattcagttatttcttttccacatggacagaccatagsaatatttttacaaagcctgaaatacattgcggcaggtcagcagtaagatagtgtggcttccagagcctgagaattataataagtgttgactctcactgtctttcttttggggttatcagaaaagtacagaatttagtcactcca

SEQ ID NO: 435200 - DNA, 543 bp, Homo sapiens
cataatatttctatagcatccttatgcttaggacttgatccttaatatctgtaacatcacagatctttttaattaattttatccagtgggccacaatgttagaaagaatttgattgtcaaataaactgcattagttaatcaatatttatttttattttagctaatctaaaacaaaacttggcaactagtataatacaaatatcaaatagcaataaaatcggtattcaactttcttatttaatgagatggttgctatataagttaatcgagatgactttataaaatactgaaaatagttcccacatttcataaatgctttcatagattattagcagccttcagtttcttatttacttagtagaggggccattgtcacaaacaatgaatgtaactctttcatgctttttatctcaataactggttagtttttactatcccaacatgtttaggtcaattaaccacttattgagcatctcctgagcaaagaggatattttatccgctggaccacarcccttaattacaatgtagaaaacgtccaggc

SEQ ID NO: 435201 - DNA, 581 bp, Homo sapiens
atgacagtttacagatgccatggcaacatcaggaacttaccctatgtggtctaaaaaggggaggcatgaataagccaccccttgtttaacatatcatcaagaaataaccataaaaatgggcaaccagcagccctcgggctgctttgcctatggagtagccattcttttmttcctttattttttttaataaacttgctttcactttactctatggactcatcctgaattccttcttgcgtgagatcccagaagcctctcttaggtccagatccggacccctttcttgtaacaaaaccacaagcccaaggtcacacagctgggaagtagcccagctgaaagaaatagcaggagctttcctatcaatccctattcattcattcattcattcaacagaaatgtcctatgcccccagtattgttctagatgctgggaatgttgtggtccttcctgtgtccaaggcattcatattccagtcaattgttggggtgagagaagtgaattgctgaatgctgattaagaaaaccatcagaaagtgtaaagcagagaattaaaacagggcagggagactgggagtaaccaag

SEQ ID NO: 435202 - DNA, 626 bp, Homo sapiens
aaagcatctttatgtttacatcattaaatttttcaagctctgactttatatttaatataccaaatattatatttgcaataaaatagaaaacatactctccacctttaaagaacatagacattacacytttaataaaatcactgtcatttctgtttcatgctttcctgatttctgtattttatgttatgaatatggtcaataacagtatcaaattataaaaatacacctgtacagctgaataagtaaatagtttagtttattgattgatattagtcagtgaagccaagattacattttacatcaattgttacacttctaagagtaatatttataactctgcattttgataatattactcccctttgttattccataaaaaggaagtgaagtctaaagtcaggctgtgccatttagaagctgtgagaccttaaacaagttatttaattccctaagcctcatgtttatctgtaaaatgggggcaatactgacatctactaatagcaatcttacatggttgtatcatagacaaatgaaatgatattttaaaagaattcagcctataggcacataaagtagttgaataaatggtgactattactaatacactactagttgcaaaagtaacc

SEQ ID NO: 435203 - DNA, 589 bp, Homo sapiens
tcagtgaagccaagattacattttacatcaattgttacacttctaagagtaatatttataactctgcattttgataatattactcccctttgttattccataaaaaggaagtgaagtctaaagtcaggctgtgccatttagaagctgtgagaccttaaacaagttatttaattccctaagcctcatgtttatctgtaaaatgggggcaatactgacatctactaatagcaatcttacatggttgtatcatagacaaatgaaatgatattttaaaagaattcagcctataggcacataaagtagttgaataaatggtgactattactaatacactactagttgcaaaagtaaccatgatagtaataatagcagtkatgggacggcatgaatccagggtttctttagtaatctggaaaatatacctaataatatttctataacttaaaattaaatttattttggaaaaatgttttataaaaagagatcctgttttatgtttttttcttactggagtcataaaattcagcattgctgatgcttaagagcaaactcacctctcttaatgactcctttcttcaactactttaat

SEQ ID NO: 435204 - DNA, 610 bp, Homo sapiens
atgtgctcacaagagtagcagttttaatttccttcaaaaacatttcctttgcattcccaagttggctaactggtgcaagaggcctatggctcaacatgtctgagcttttaacatgcctttctcactaagcttcatcatttctagcttttgatttaaagttagaggcaacccttcctttcacgtagaggccattgtatggttattaattggcttaatttcaatattgttgtgacttagaaaataaggaggcctggttgagggcagagggagagagaccagtggatgagcaactggagaataccctgtcaatagagcagtcggaacccacacatttatcaattaaattcacggtcttacatggatgtggctcatggtgttcctgaagaactataatagtcacatcaaagatcactgatcacagatcaytgtcacagatataataaaaatgaaaaagcgtgaaatattgtgagaattaccaaaatgtgacacaaagatatgaagtgattacatgctgttgaaaaaaaaaaatgatgccaatagacttgctggaccaaagtttgccacaaaccttcagtttgtaaaaaaacacagtagctgcaaagcgcaataa

SEQ ID NO: 435205 - DNA, 470 bp, Homo sapiens
tgtctttactaaaaatacaaaaattagctggactctgtggtgccagcttgtaattccagctaccggggaggctaaggcccaagaatctcttaaacccgggaggcagaagttgcagtgagccaagatggcgccactgcactccagcctgggcgacagagcaagactgtgactcaaaaaacaaaacaaaacaaaacacaaaacaaaacaaaaaactactcttaatatacaggcagttaacattttcttggtatctagtctggctcaggcactaggatattractgataccacaaggatcaatgattacatggtgtctaactttgagatcacagtaatagaaattaagtgagttaactaaaaaagaacaaagaaaatacggatccaagaaggtcttttacaatggcagaagttactttgtgctaactttatcataaacttggaaatttaataacaattgttaataattgcata

SEQ ID NO: 435206 - DNA, 364 bp, Homo sapiens
tcatatgttccttcctctgtagttcttacctacgtttctttggtagcatatcttgtgaattgcatcatattacaattawgtttacctgtatctcttgaccttaagagattctcaaaaagagctgtgctatattcattttggtatcctagtttctggaagagtatatcacaggaagtgtgctcagaaaattctttaataaatgaatgaatgagaaatctgaagaatatgtttttaatcatactatatttgcaagagggtgctttttattgggaagctatgtgttaacattctgtcattttataatgaaagtaatttaaagatagcataaacaaacagtatgttatctctacttcaaatatagatt

SEQ ID NO: 435207 - DNA, 533 bp, Homo sapiens
tattagaagtaaaaatatatttttttgaaaggccatggaactattttagttcctggaataaatatagcagcaaagatagtttaaaagagaaaggcctctagatttatttaaagacatgtcatctctgtggcctcttcaaaaagggcagacaaaacaaaaatgattyatcagtagggctatttacctttcagaaaactgtgatttttttttttgtttttttatgtaggcctatttttatacttttattttattgcctggtacttaagcacttaagaatgtttttcttcaaacatcagatttctcaacctagtaagcatgtatattagccttataaaagcaagctcttttcaaatttgaagtaacagtttactatttatttcattctgatttttaagcattttaatggaagtgatacttaacgttactctcatgtgaccatacaaccagatggttctacctttctataaaaacatgtttgtagagctcattgggagttacatatatttgtgtatctatgatgtacctgcctgcta

SEQ ID NO: 435208 - DNA, 584 bp, Homo sapiens
tgactgtacctggagatagagactttagtgagtaattaacattaattaaggtgataaaagtggagccctaattcagtaagactgtgactttataagtagagaaagagatctctcactttctctccccactccctacccctccatatgatggcacaatgagaagatagccatctataaagacaagatgagagcttatactcagacaaagatcagaaactgaagcaactagcaccttgatcttggacttcccagcctctagaactatgagaaataaatttctattgtttgagcagagcagtctatggcattttgttatggcagtcttaagtgactaagattttgataccaagaagtggggtgctgttgtaacaaatacctaaaaatgtgaaagtggctttggaacttggtgttgggtagaggctaaaagagttttgaggtgcatgcaagaaaaagcctagatttccctgaagctacattagatatacagacrttaacacaattctattgagggctcaaaggaaataaggagagctgaagagaaagtgttcatcttcttattgaagatatagtcacaaatagaatgt

SEQ ID NO: 435209 - DNA, 599 bp, Homo sapiens
caatttgccatatcagatcagaccacatatttatctatttctgtactttgcctctgggagtgaccagttggtaatgtttcattaggaaggcgggagggaaaaaaaatcaaacaacaacaaaaaaatacattctacaaacctgctttagacactcattccccagtcaagaaagcactttacaatcttctattctcatgctcttttatcattttttttcccctgtgcaccttcccaacccatatcaaacttaaaataattaccgcaaatgtcatttgagtgttccatgaaatattttggcaaccttacaatttattgttcacctttctttattcctcttggcttgagatttacctgtgtttaagagttgattgtgattttaggratgaatttttagggaataaaacaaaaaatacactatatgataaataactagctttgagttcataagtgcatagctataactttgcctaatataactctatcataggatgcattgtattaaatgatacagtgattcactctacctgagaatgttcagacaataattcatctgcttactgttgtgagaaatctgctcataacactgtagagtgaggttt

SEQ ID NO: 435210 - DNA, 544 bp, Homo sapiens
tgagtgttccatgaaatattttggcaaccttacaatttattgttcacctttctttattcctcttggcttgagatttacctgtgtttaagagttgattgtgattttagggatgaatttttagggaataaaacaaaaaatacactatatgataaataactagctttgagttcataagtgcatagctataactttgcctaatataactctatcataggatgcattgtattaaatgatacagtgattcactctacctgagaatgttcagacaataattcatctgcttactgttgtgagaaatctgctcataacactgtagagtgaggtttatgattgacacaatgaacatttgtaaaagagttgtgttctgtaagctaagattaaattagatcttcaaggattttagtaaaaattttccaaaatcattttggaggcaattwgaaaagaattgctaagatttgaatctgaagaataattggtgaacaaaccaatgtaatgacaactgatactgaagagaaaccagatgaaaagatttaaagagggaatt

SEQ ID NO: 435211 - DNA, 463 bp, Homo sapiens
aggcttaattttcactgaaatgttctgtgtgaaattagaccttctgaatccaacttttcccagccacctttttttttttaagcagtaagtaatcagtgtttaattacttgacttttacatggtacaacctttgagaccttgctgacttactgaggcwtcgaggtgtattgttcagaatgttcaaagaccctgtatgtcttgttagcattaacaatggtaaggttagaaatggagaaagtggactgtaacatgctctttgggtacaccattgcacacatgataaaagcctcaaattatttaacttctgatgttaccaggcacaaggtagaaaaggaaacataattctgtgctttttttttttttttacttacgattgcaattttgttactaactactggagcttgaggccctcagaggaaagatatgtctttgtgactgtaaaacagaaaatgaaggcaagagt

SEQ ID NO: 435212 - DNA, 637 bp, Homo sapiens
catggtacaacctttgagaccttgctgacttactgaggcatcgaggtgtattgttcagaatgttcaaagaccctgtatgtcttgttagcattaacaatggtaaggttagaaatggagaaagtggactgtaacatgctctttgggtacaccattgcacacatgataaaagcctcaaattatttaacttctgatgttaccaggcacaaggtagaaaaggaaacataattctgtgctttttttttttttttacttacgattgcaattttgttactaactactggagcttgaggccctcagaggaaagatatgtctttgtgactgtaaaacagaaaatgaaggcaagagttggcagaaatttttattctataagaacaaacaaatatataattcagaaccataatatgtgctttagtgattatttataagctatatatatgtgaagtgtattccctcttttaaggttttgcggatggagtccataartgagagacttcacactaacccaaattaaaactcatactactttaaaattgttttacagactcgatctatgtaaaaattatcatattaataaggtttatttattaatttttagtcaaatgtcaagacaccaaatacattaatataaggaagagaa

SEQ ID NO: 435213 - DNA, 488 bp, Homo sapiens
ataggtgctacactctatcatgttgatgtagtttaatttctatggtagttcttatatggtggaatttgtagcggtgttagaaaaatatgatcagacaaatttcctgtataatagtctgagaaatggctagaacatagagaaaaackacttaacatatgacctgaagaagctggcgtttcttagaaggttaagaatgatcctcttcagcctgaagagataagtagggatcccaaaggaagagagacacagggttaacccaaactttgacttttgaagattgcaaaagagagtaattagttccaagtagacacagcacctctctcagcagggcacatgggccaacaagcagagtggaggctggatgtcatccctccagccaccaggagcactgtgccagcacccccatgtggagccatttcatgccactcctgcctaggtctcaagaagctcagtaggaagggcaggtatagaaagtgagacccatactc

SEQ ID NO: 435214 - DNA, 571 bp, Homo sapiens
catatgtcaatactgactgagactacatctatattatatcagtaaaacaggaaatctgtttactaggaatttttatcattgcctcctctacctacacatacatcctaaaggaaactgcctttccacaactcctgctatgtgaactgtggaccacttgattccaaatttcctcttackttcccccaggtgtaactctttctgccagggatggatacctgatgaaaaggcagtcactccatggacatggtagtggcttaggacttgtggtgtaacccccaaaaacatccttctttgggaatttggaattgagcaactaaattactgagttagttagctatagagaactaagcctaaaagttatataattttcatggctgggtaagccattatagaccaaacatgagtggcataaaagaaaaaacaacaatggctaacatatggtgaatacttactcaacgtcaaactatccactatgtattttaaatgtcatgtcattaacagtgttggtagatactgttattattcagataaaattgatgaaaaaaatctgaaatttggaaagataaattaa

SEQ ID NO: 435215 - DNA, 608 bp, Homo sapiens
gtcaaactatccactatgtattttaaatgtcatgtcattaacagtgttggtagatactgttattattcagataaaattgatgaaaaaaatctgaaatttggaaagataaattaaattcccyccatcatatagatgtgaaatgaagacagaactgaagctcaattctgctggactcctcttgactacttagctataaaactgggaatctattgcgggaattggaggagagagaaaaagacagagaagcagatagaaatagagatgaccttgcctcatcatgtatgcagccctaagcacatagccttctctccttaaagcttctgagctacagttcccataggtctaaatattcaataatctctgtcctcggggtctcatgagctcccacagtgtctccaggttggtgtagagtacacaatactgtctgtggttagagctattgagataactaaagcaaaggtaatatttatcttcatttcttcatgcatttctttaaatgttctataattcactttgatttcagagatttgatgttagtattgcgtttttctgggtatgggatatataaacatctagtaactatgagtaaatatgaaattcattttttt

SEQ ID NO: 435216 - DNA, 608 bp, Homo sapiens
gtcaaactatccactatgtattttaaatgtcatgtcattaacagtgttggtagatactgttattattcagataaaattgatgaaaaaaatctgaaatttggaaagataaattaaattccccccatcatatagatgtgaaatgaagacagaactgaagctcaattctgctggactcctcttgactacttagctataaaactgggaatctattgcgggaattggaggagagagaaaaagacagagaagcagatagaaatagagatgaccttgcctcatcatgtatgcagccctaagcacatagccttctctccttaaagcttctgagctacagttcccataggtctaaatattcaataatctctgtcctcggggtctcatgagctcccacagtgtctccaggttggtgtagagtacacaatactgtctgtggttagagctattgagataactaaagcaaaggtamtatttatcttcatttcttcatgcatttctttaaatgttctataattcactttgatttcagagatttgatgttagtattgcgtttttctgggtatgggatatataaacatctagtaactatgagtaaatatgaaattcattttttt

SEQ ID NO: 435217 - DNA, 542 bp, Homo sapiens
actatgctggctccattgtctgataccaggcctgcttcactcttgcactttgctttcttggcttctgatggcacttgaatttacaaatttttattccaggctcttacagtttctgtctcttgccacacaacaggaaaaccctcttaaaatataagctcaagctgccaccttcacatttccttttttcttttgatgcacaggtcttcctggacattgccttgttcacgttctgaattatgaagcagttctaaaacttccagttttttggggcttactatacctttcaaaataggttagacctaagaaactagatgctgcagagttcttgagcttgttgccaactaaagaccacattggttgtgaagatctttttaatttctcctgaagaagagccaggctgtactggaagagtactcatggctaggccagatcaaccctagagaatgaggagcccagccacaacatgtcataaaatgtactctttggctccaaagygtattgttatagaaatagaatcagttgaaaattcacttccaagacag

SEQ ID NO: 435218 - DNA, 512 bp, Homo sapiens
tttccccactctcactagtgcctcggtccaggccatcctccacaatagctgagagcaatctaaaaacggaaacgcgacaaagttgtggcaccctacamctgccccatcctggagcaatatgcaaacccctctacagtctttatattctatttagaacaaaggtcagaatctttactgtgcctctggatgcttgagtgctcccacagtcttgcctctccaactacacttcctgccatttccttcctccctctctaagttccaacctcaaccctctttttgttcctaagtatgccaaatattttcccataccaaggatcacacatgatgtttccccttcctgcaatgttctcttcctcatacctcatacggtgactttttcttactcttctgttttctgcttaaatcttaaatcttccttggccactctctgtatgctctccagcccccaactcatttatatcagagtactcaagttgaattcatcataaaacatattgcagactataattaaa

SEQ ID NO: 435219 - DNA, 442 bp, Homo sapiens
tttagagcccatctgtataatacaagatgatctcatattaagatccttaattacatcttcaaagatttttttttttttcaaataaggtcacattcacagattccaggggttagaatatgaacataccttctggggtggtagggacaattcawctcactacagagggttttcagcagaggaatgacaacatctaacttgtggtttagctgactttttctagtttctgtggtggatgtagaatacagggaagcaggaagtctttcctatctcagagaccataggacataaggagctaattcaggtgagtatgtgttctgtatctgaagaatagtagtggggatggtgaaaaatggctggatcctagatatatttgtaggtaaaaatgacagaatttgcagaggattttatgtgagaagtaaaagtagaatcaagggcaatttca

SEQ ID NO: 435220 - DNA, 442 bp, Homo sapiens
tttagagcccatctgtataatacaagatgatctcatattaagatccttaattacatcttcaaagatttttttttttttcaaataaggtcacattcacagattccaggggttagaatatgaacataccttctggggtggtagggacaattcatctcactacagagggttttcagcagaggartgacaacatctaacttgtggtttagctgactttttctagtttctgtggtggatgtagaatacagggaagcaggaagtctttcctatctcagagaccataggacataaggagctaattcaggtgagtatgtgttctgtatctgaagaatagtagtggggatggtgaaaaatggctggatcctagatatatttgtaggtaaaaatgacagaatttgcagaggattttatgtgagaagtaaaagtagaatcaagggcaatttca

SEQ ID NO: 435221 - DNA, 708 bp, Homo sapiens
gtaaaaattgttaattgttaggaacttgtgtctgctgggaaacaaacactgagagggaacagggatgtaagagtcttaagagtttgatcagggacccaaacctctgaaaatcaaaagaggaaaawgtcggggttgagcaggtaagcctcagaccacagtgaaaatctgacagtcttgaccaacccaaagggaactaggaataaaagctgcccatgagaggaatcctgcactgggcggaaagagacaggcctaaagaaacccactaagcttggtcattctctaagaactacctgataaggtgaattctgaaggtggagtctgttagctaacttcattccttgccgcagaaccacaaggtttttattgaagggaaactcaaatagcatacctccctggctactatggaacattaaatagtttttaaatctttgggaaaagagtggaatgttgaatgaaaccactctttcaacctccattgtagccagtgggggtgaggagggagggctacaatcgaaagataatttaaaataatcctaatatagtcagtcattctgttaatcagcataattttttaatcatttgtggtttaggtgccctttctggaggttttacttgtcattgtgtttatgggaaattgacagttattaattgtttttaagcttgaaccagtccttattagaattcaaatgtatttcccactactgggtc

SEQ ID NO: 435222 - DNA, 596 bp, Homo sapiens
catgtgggagttgctcagcaatgagtaactcacagaataatgcagagtaaagatttttgtatatcaacttaaggatggttttggccaggcccagtggctcatgcctgtaatctcagcactttgggaggccaaggtgggtggatcacctgaggtcaggagtttgagaccagcctgtccaacatggtgaaaccctgtctctactaaaaatacaaaaacattagctgggcatggtggcgggctctgtaatcccagcgactcaggaggctgaggcaggagaatcacttgaaccaaggaggcagaagttgcagtcagccgagatcacgccattgcactccagcctgggtgacaagagtgaaactccatctcaaaaaaaawaataataataataataaaataatctttataccaactgtgagagtctgagtgaattcccccactaatagagtcatttgttaggtggggaacaaggatagcgcagatacattgcatttaaactaaattcaaattagcttcaaataatctgcaccagtaattagttcctagttactgtgcttgaaagtcatttttagatcaaacattctctgtctacaagcaat

SEQ ID NO: 435223 - DNA, 618 bp, Homo sapiens
attgtgttgacaggttttttccccaaaggcatatttacccttcactttcgcaggcctctgtcaaggccctgggaggcacccagcaatgtgttgacrtatttttatgaaatttctgaattgtaaaatataaaatatttttaatgcaatgaagaaagactgctgtcatctttccactgcaactctgcaatgtcatagtgccctcttgatagattatgttggagtggccacaggcattttgagggatatgtccaaggtagtggttctcaatggggggatatttccccccaggagacatgtggcaatgtctggagacctttttctttgtcaccaccaagggcatgttattgacatctagggattagagaccagggatattgttaaacaccttacagtgcagaaaacaggctcccactacaaagaattacccagttcaaaatgtcaatagtgtcacacttgagaccctgcactcaggggaggttgaacaggggaggatatatttagtttggatttggcgggtacatttacttggtttgcagccgttactctccttgtgtagaaagaatgcccctaacatccactgtgctactcatcattccatgtcatgccacaaaggagcaa

SEQ ID NO: 435224 - DNA, 556 bp, Homo sapiens
tctcttttctgctatgcctaatctgagtttcagctctgacacttgacaaacttattactggaaaggattatattcaaatgctaaccatgccaactgtgaggtctgtgttttctgctttatctgtattttctttttttttttacaatgattatcttttacagtcaagtgctgcataatgacgatacaatcaccaagaaacacatatacgatggtgtttccacaagattaaaatggagctgaaaaagttctaccacccagtgatgtagccatcttaacatcgtggtacaacacattactcacatgtttgtgatgatgctgatgtgaacaagcctactgtgctgccagtcatataaaagaatagcacaggcaattatgtacagcatataatacttcatagtgataacaaaggactatgttatcggtttatgtattcactataccatacttcttatcattattttagagtgtgttcctcctayttataaaaaaaaatagttacctataaaatagccttgggcaggcccttcaggaggtattccagaagaagacattgtca

SEQ ID NO: 435225 - DNA, 437 bp, Homo sapiens
tgtcctcagggaggctggagaacagctgggctccatccctttgtttgtcctgggtaatctctctcttcctcactttttatttgctcttttcgtggtttctwaaggttgtcaacattttgagacatatggaagacaccgtgtgagatgggaacacatcctatctgatagcagaatgttcatagcctcagtgactaaatgtcgcatacactgtttggggatgagtgtggctactgaacgctggccagctgccccacctgttccagaactttcctttctcactcttgccaaatgtgtgtcccatctgctatgttaaaactgaaatcaaagatcaaaacaagtattaaacagtgtatttgggggctcactgcctgaaagttaaataacatccctcctctccctctatcttctgtcattccctgacctcatgggagtgcaac

SEQ ID NO: 435226 - DNA, 437 bp, Homo sapiens
tgtcctcagggaggctggagaacagctgggctccatccctttgtttgtcctgggtaatctctctcttcctcactttttatttgctcttttcgtggtttcttaaggttgtcaacattttgagacatatggaagacmccgtgtgagatgggaacacatcctatctgatagcagaatgttcatagcctcagtgactaaatgtcgcatacactgtttggggatgagtgtggctactgaacgctggccagctgccccacctgttccagaactttcctttctcactcttgccaaatgtgtgtcccatctgctatgttaaaactgaaatcaaagatcaaaacaagtattaaacagtgtatttgggggctcactgcctgaaagttaaataacatccctcctctccctctatcttctgtcattccctgacctcatgggagtgcaac

SEQ ID NO: 435227 - DNA, 441 bp, Homo sapiens
ctcactccattctgcctctcccatttccccttctcccttatgttcatagctcctttgaccttctaacgtacccatagtctatttataatttacacattaagtttgcatttttttgttttgttttgttttgagacaggctcttgctctgtcacccaggctggagtgccgtggtgctatcacagctcactgcaaccttaaactcctggggtcaagcgatcctcctgcctcagcatcctgaatagctgggrctgcaggtatgcacaaccacgcctgctaattaattttttttttggtagagatggcggggggcgggtcttgctatgttgcccaggctggtcttgaactcctggactcaagcaatcctcccatctcagtctctcaaagtgcttggattataggtgtgaactacttcacctggccttaagtttgcagtttttaaag

SEQ ID NO: 435228 - DNA, 441 bp, Homo sapiens
ctcactccattctgcctctcccatttccccttctcccttatgttcatagctcctttgaccttctaacgtacccatagtctatttataatttacacattaagtttgcatttttttgttttgttttgttttgagacaggctcttgctctgtcacccaggctggagtgccgtggtgctatcacagctcactgcaaccttaaactcctggggtcaagcgatcctcctgcctcagcatcctgaatagctgggactgcaggtatgcacaaccacgcctgctaattaattttttttttggtagagatggcggggggcgggtcttgctatgttgcccaggctggtcttgaactcctggactcaagcaatcctcccrtctcagtctctcaaagtgcttggattataggtgtgaactacttcacctggccttaagtttgcagtttttaaag

SEQ ID NO: 435229 - DNA, 597 bp, Homo sapiens
ccaaagttgctttcctatttcctttgcaactctgtaaactgggtttctgtctttaaaaccmgtaagttcttcccttcttcttcctccactaggatctgataatcagtaggaaaaggaggagagagaggagtgggggacgaggtgggggaaacaaactgtgcctgaaaaacaaagttgttactcttgaggcagaaggcttgcttccaaaagcagtgactcactgcactgagggacattgtcttgcctaataagtaaaggcatgtggccaaatacacacctgcccacaggtaaggaatttaattcttcccaggactgcagataccatgagctttacatgcaaacatacagctttgcttctgcatatttgcatggcaatgatttctagatttccattccactccacctctcggctgtcatttcacaaaacaagtgaggaaatggccatgtgcttaggaaactcagaagctgatggttaaaaaaatcaactgcgccacagcctcctctctgaaaacttataatttttattgggaaattctgatcaacttcgttatgttgtatctttagtttctcttatttaaaaaatgcctgaaatatgtg

SEQ ID NO: 435230 - DNA, 597 bp, Homo sapiens
ccaaagttgctttcctatttcctttgcaactctgtaaactgggtttctgtctttaaaacccgtaagttcttcccttcttcttcctccactaggatctgataatcagtaggaaaaggaggagagasaggagtgggggacgaggtgggggaaacaaactgtgcctgaaaaacaaagttgttactcttgaggcagaaggcttgcttccaaaagcagtgactcactgcactgagggacattgtcttgcctaataagtaaaggcatgtggccaaatacacacctgcccacaggtaaggaatttaattcttcccaggactgcagataccatgagctttacatgcaaacatacagctttgcttctgcatatttgcatggcaatgatttctagatttccattccactccacctctcggctgtcatttcacaaaacaagtgaggaaatggccatgtgcttaggaaactcagaagctgatggttaaaaaaatcaactgcgccacagcctcctctctgaaaacttataatttttattgggaaattctgatcaacttcgttatgttgtatctttagtttctcttatttaaaaaatgcctgaaatatgtg

SEQ ID NO: 435231 - DNA, 597 bp, Homo sapiens
ccaaagttgctttcctatttcctttgcaactctgtaaactgggtttctgtctttaaaacccgtaagttcttcccttcttcttcctccactaggatctgataatcagtaggaaaaggaggagagagaggagtgggggacgaggtgggggaaacaaactgtgcctgaaaaacaaagttgttactcttgagkcagaaggcttgcttccaaaagcagtgactcactgcactgagggacattgtcttgcctaataagtaaaggcatgtggccaaatacacacctgcccacaggtaaggaatttaattcttcccaggactgcagataccatgagctttacatgcaaacatacagctttgcttctgcatatttgcatggcaatgatttctagatttccattccactccacctctcggctgtcatttcacaaaacaagtgaggaaatggccatgtgcttaggaaactcagaagctgatggttaaaaaaatcaactgcgccacagcctcctctctgaaaacttataatttttattgggaaattctgatcaacttcgttatgttgtatctttagtttctcttatttaaaaaatgcctgaaatatgtg

SEQ ID NO: 435232 - DNA, 633 bp, Homo sapiens
cacttcctggagtaacagtaagaagggtgggaagacagagtgctagtgggaagtgtgtgagcttgaccaggaagaggaagtacaggccagagaaatgtcccgcccttccactcagctccacaccccatgccacaaaactactgtgattagaaaagacagatgcccgattacaccacagcctgactacagcctggccttttagtctatsctgacggggtagacatagagttgacagtaatctatgaagccaaaaatgtttgtttggcctggaaaaaaatttgaggtaagcctcatgaaacctccctctaggacactctcccagcaccagagatgaacaggtatagttgtactgagggccactccaccctagacactcccacgaaataagactccatcttagaacatagaaagtgcccatgtcatctgtgacatcgctcatctcttgaaagaagaaaatcttccagaggtggtaccatttgttgttgagttattggaagatttcaaattcctcatacaaggcgcgttgaggatacctgacacccaacttgaatgtagtgcccaatgcttataccatctcttcctgtaactttgaaattgaacttattccactttttacttttggtgggaaagatt

SEQ ID NO: 435233 - DNA, 624 bp, Homo sapiens
aacagttgaactttttaaaaattgtgacaaaaaaagtaacataaatttaccctcataaaaaattttaagtgtacagtacagtattgttataactatatgcacattgttttacaacagatctctagaactttttcatcttgcattactgaaactctatactcaytgaacaacttcccatttcctgttttccccagcccctgacaatcaccattctactttctgtttttatgtgtttggttactttagatacctcatataagcagaaccatgcagtgtttgtctttttgcgatttgtttatttcacttactgtaatgtcctcaagattcaactatgctgtagcatatgtcaggatttccttcttttttaaaggtaagtaatattccattgtatgcatatgactatttgctttatccattcatctgttgatgaatatttaggtttcttccacatttttcctattgtgaataatgctgcaataaacatgggtgtgcaaatatctcttcaagatactatttttaattctttcagatgtatacccagaagtatatattgctggaccatgtggtagttctatttttaattttttgaggaattgtcatactgttttctataggggctacact

SEQ ID NO: 435234 - DNA, 601 bp, Homo sapiens
agatctgcagactttagaaaattgcttggctgcctcattgcccctgcaggaaaagctcactaacaggatcacatgaaatgacttatttttaggcaagaggaagagaatgtaagtaggctgtgctactctgacatcaagttgctattctctatttaaagttttctcttccattggcggcagcagcccagattcgaatcctagcatgaccacttattaactgcgtcaccttaagaaggacatcaaactttcctggttcctggtgtccttatctgtaagatgctaacaataccttccccacctggtggtgcagattgaatataagtggctgatgggaaagatasagcacccggtgtcatttatccctcttcccctcttgtgttatttactcttgattgtattaactgctagtcaattaaacacttatattatcagtgtggattatgtgatggtcatgaaacaacacaaatgggagcactttaaaatacaaatcaggtggtttatttttatcataagcaagttctgattcttcttcccatccttcaacaatataacaggcaataattctaactgggttggttaatatggtaaataaacaaaacag

SEQ ID NO: 435235 - DNA, 601 bp, Homo sapiens
agatctgcagactttagaaaattgcttggctgcctcattgcccctgcaggaaaagctcactaacaggatcacatgaaatgacttatttttaggcaagaggaagagaatgtaagtaggctgtgctactctgacatcaagttgctattctctatttaaagttttctcttccattggcggcagcagcccagattcgaatcctagcatgaccacttattaactgcgtcaccttaagaaggacatcaaactttcctggttcctggtgtccttatctgtaagatgctaacaataccttccccacctggtggtgcagattgaatataagtggctgatgggaaagatagagcacccggtgtcatttatccctcttcccctcttgtgttrtttactcttgattgtattaactgctagtcaattaaacacttatattatcagtgtggattatgtgatggtcatgaaacaacacaaatgggagcactttaaaatacaaatcaggtggtttatttttatcataagcaagttctgattcttcttcccatccttcaacaatataacaggcaataattctaactgggttggttaatatggtaaataaacaaaacag

SEQ ID NO: 435236 - DNA, 589 bp, Homo sapiens
ctggaaccaacctaaatgtctattagtggttgactggataaagaaaatgtgatatatatatatatatatatccatcccatggaatatacacagccataaaaaaaagagtgaaaaacagaaaaccaaataacacaagttctcacttaaaagggggagctaaacaatgggtacacatggacacaaagatggaaataatagacacaggggacyccaaaagcggggagggtggcaggggcacaaaggttgaaaaagcgtctattggatacaatgttcactatttcagtaatgggtacactagaagtccatccccaccagcatgaaatatatccatgtaacaaacatgcacatgtacccattgaatctaaaataaagtaaaataagtataatagaaaaaaattatcatatttggtcaacatatatcttgaaaatattcatatctgaatttgagtaccactaataatagtaataatatttgccagtcacttttctaagcacttttgttatctcctttaatccttacagcaatcctgcaaggattagtaatttgcccaagaccataattagtaaatgccagggtcagatttgaacc

SEQ ID NO: 435237 - DNA, 561 bp, Homo sapiens
aatttttaaacatccactagtactagggcaccgtttcaggcctttcagataggagagtaaataagacaaacagctcacaccgtgatgggaaagacagataagtaaaatatggagtgatgttaaaataggaaggaacaacacgagaggcagtaagtgcacataagagaggcaattaactcagactgggttgctagggaagaaaaacactacttgtgtctaggccttgaaggagtaattgaagttatccaggtgcaggaatggagaagaaacagaatgcacaaaaattaagcactcctagtcataaaagtgagagagactgtgatacattcaaagaactacaaggactgtagcacagtaggactgtgttcttgtgtgtataygcagcaaagatgagagaggttggagcacaagggaattggaagcactgaatgtctttacgctggaatggacttgatcaaagttgcattttagaaaggtcattctggcagtgaggtagagaccaggttggaagcaggcaagtctagaggcagaaaaaacagtcagaagctgccatgaatggtg

SEQ ID NO: 435238 - DNA, 481 bp, Homo sapiens
atgtctccattttcataatttatattcaatgttttgcttactatatatcttgtgtttactatggaaagtgcagtggagtgtgccttaagcacctgcttactatgtgccaggcactacgatagttctgggaaytgcattttgaatattggcagccctgtgtagcctaggcttcatctctggtaagtgagtatctctcccattcttaaataatgatggaaagatattctatctgcatcattttgtaggatagaatggcaatttttctcttttataacgtgtattccattagttttgttagaatagtttgaaccctgtggatgttatattaaataggaccttctgtgttgcaggttataccaacctaacccaaatttatttcagccagaggggaattattggctaacccagtcacaccaccggaaggttggggagaggtggtttcaggaatgactggaactggagatttggggtctttcttccc

SEQ ID NO: 435239 - DNA, 407 bp, Homo sapiens
tcgaatttatttgcagcatctggaaaccatgtcatatgagaattaattgaaagaatgtgtaatatttaatatggagatgagaaaaataaggtgagacataaaagcttccttcaaatagtaaaaggaatgagatrtggaaggtgagggaggcttgttctgtattgctccaaaggatagaactaggataagaactgatgggatttcaactcagagtaagaaagaacttaataaaatttataactgtctaaaaagagcatgaactctgtgatgctcactctcagtaaaaacttgaggaatgtctgggtaactactgatgttgtaaaaggaatttcttcttggggaaagggttagcctggatggccttttattttaagtttcgttagttctaatgtaagctgagtgtgggg

SEQ ID NO: 435240 - DNA, 685 bp, Homo sapiens
cctgtgtattaggtcgtctgcttcttaataataagtataaaaagataagatgagaaaatataacacaacttgccacaaaaaccagaaccactttgaaacattgtctggttattgcttttcctttagacagcaggctgaaatatataaggaggttacagagctctgtttcaaagactagactattatggcctgtactgctttctaaagcataagctgtttgatgtctcttctaattagaattgttgaactaccaagaaggttaatttttaccataaggtttttgtagtgtaaaactaaagagcagtgtaaaactaaagagatatgagattgttctgtctgtaggccatatctactgatttgttcattaccgagtctcctaaaatactgcttctgcttcaaaccaacaatatttgctataaatcagaaagaggttaaattaaaccctgtcagttttttgagtagtgaagacatgaattggaagtggtaaatggtaatagatgatttatgcttctgccttcttcctgatggttaccttggaattttgattgggttgattttagagaaattgaaatgttttcataatagaagtgaggcaaatttagctgccaacaatgtggatttgcttagtcttagactcttatattawtattccccaaagctaattattatcatctcattttgacta

SEQ ID NO: 435241 - DNA, 616 bp, Homo sapiens
tatgttggggggaaaatgatgctttcactgttactagttcaagatttgtctgctagtttcaaggattttcttttttaaaatgtcaaaactaaaacgggaaacaaaaatagcattaacagacccacataggaaattatattatttgaggatgtcaaattggaagatggaacatgtttttttgcagacttccctgcttcctgaaagtagcaatgaataacagagaaaatctttaatgccatctttgagcttttgcttgataaaaggaactactgtatagcttcgacggtttttaaaaaaacactctttgcagaaatattttatcctttccagagcatcttctcatctctgtgcataagtgcggtcccagtggcatgcttaatccttcttcacagccctacatatcttcaagtgtgtgcataaattctgtcaggaargaattacaacctcgtcgtgaataactgcaaacaacagctatgtgtgggactctattgcttgatgtaaacatggccctgggtgatcactctgcactttgtcttttagggttataaggatgggagtgagctcttcagcttggtagccgacaccatgcactcagtagcaagcatttgctgtagag

SEQ ID NO: 435242 - DNA, 616 bp, Homo sapiens
tatgttggggggaaaatgatgctttcactgttactagttcaagatttgtctgctagtttcaaggattttcttttttaaaatgtcaaaactaaaacgggaaacaaaaatagcattaacagacccacataggaaattatattatttgaggatgtcaaattggaagatggaacatgtttttttgcagacttccctgcttcctgaaagtagcaatgaataacagagaaaatctttaatgccatctttgagcttttgcttgataaaaggaactactgtatagcttcgacggtttttaaaaaaacactctttgcagaaatattttatcctttccagagcatcttctcatctctgtgcataagtgcggtcccagtggcatgcttaatccttcttcacagccctacatatcttcaagtgtgtgcataaattctgtcaggaaagaaytacaacctcgtcgtgaataactgcaaacaacagctatgtgtgggactctattgcttgatgtaaacatggccctgggtgatcactctgcactttgtcttttagggttataaggatgggagtgagctcttcagcttggtagccgacaccatgcactcagtagcaagcatttgctgtagag

SEQ ID NO: 435243 - DNA, 641 bp, Homo sapiens
tgagacgcattgcttggctatttccgtcaattatcatctactctcattcactccaagtgttcacagatggcagaaagtaattcagagccctttgtgccttagttcccttgtttgccaaaccgggatattcttatatctctcacataaagttattatgtgagtaaatgaaataaagcacccagagcatcttgaacagtacctggcatgtagtaaaatatgcgctcgataaatgttagtttaaaacattttttttctgctcttaagagtaggcttgagttcataaatcccaggaaccaaacratttctttctattttagatctgcttttacttgtgtgctttttcctcaagtgtaaggcatcattttgtactcttacagtatgttcctgagagcacagatgtgagtgaaagtgaagagtgatttagtatgaaatgtcacactgggtccgcacatcaactgctttctctctgccaccggctgaggcagccaccgctggtagcccgtaggattcctggcgtccaccttctaccctcctactcaaatctatcttcttatctggtctctgccatccttgttgcttcagtttcgtagctggtctgatcctcttggcctcgcctacttggattgtaacccatgtgtata

SEQ ID NO: 435244 - DNA, 641 bp, Homo sapiens
tgagacgcattgcttggctatttccgtcaattatcatctactctcattcactccaagtgttcacagatggcagaaagtaattcagagccctttgtgccttagttcccttgtttgccaaaccgggatattcttatatctctcacataaagttattatgtgagtaaatgaaataaagcacccagagcatcttgaacagtacctggcatgtagtaaaatatgcgctcgataaatgttagtttaaaacattttttttctgctcttaagagtaggcttgagttcataaatcccaggaaccaaacaatttctttctattttagatctgcttttacttgtgtgctttttcctcaagtgtaaggcatcattttgtactcttacagtatgttcctgagagcacagatgtgagtgaaagtgaagagtgatttagtatgaaatgtcacactgggtccgcacatcaactgctttctctctgccaccggctgaggcagccaccgctggtagcccgtaggattcctggcgtccaccttctaccctcctactcaaatctmtcttcttatctggtctctgccatccttgttgcttcagtttcgtagctggtctgatcctcttggcctcgcctacttggattgtaacccatgtgtata

SEQ ID NO: 435245 - DNA, 563 bp, Homo sapiens
cccttgtttgccaaaccgggatattcttatatctctcacataaagttattatgtgagtaaatgaaataaagcacccagagcatcttgaacagtacctggcatgtagtaaaatatgcgctcgataaatgttagtttaaaacattttttttctgctcttaagagtaggcttgagttcataaatcccaggaaccaaacaatttctttctattttagatctgcttttacttgtgtgctttttcctcaagtgtaaggcatcattttgtactcttacagtatgttcctgagagcacagatgtgagtgaaagtgaagagtgatttagtatgaaatgtcacactgggtccgcacatcaactgctttctctctgccaccggctgaggcagccaccgctggtagcccgtaggattcctggcgtccaccttctaccctcctactcaaatctatcttcttatctggtctctgccatccttgttgcttcagtttcgtagctggtctgaycctcttggcctcgcctacttggattgtaacccatgtgtatagtctgttgggattttgacgggcatct

SEQ ID NO: 435246 - DNA, 603 bp, Homo sapiens
tttaatatttattaggtactaagagtagcacagtttcattacatttttcaatataaaatagatttccatctatatagtcattgaacttgttagtgttgcaagtgtagaaaatacttgtttgtatcctgtatgtgtgtgtatatatgaaatggattatttgtggcaaatactggttgcttgtttcaaaggaactgggcccttaaaattaagaatttgcatatygtgaaataaaatgaaacatttagtcaaaattaaaattgtgatgagtttgaatatccaaaccatcttaatatagatctgttttaaaataagcactccaagattaacacctgcatattgctgactactttgatacattgcagtggctataaaaaattattctatcccctaaatcctccttttaatgtcttttaaaaaatgaattgatctgacaccaatgaaactttttgtaatgaatcacaccagataactgcattttaatgccttgatgccctgtgaaatgattagagggggtaaaggggaaatgtatttttcttattcaggtactcctcacatccagttgaaatttctgatcaaaggttttaatgctttctagctactatc

SEQ ID NO: 435247 - DNA, 498 bp, Homo sapiens
ttaaaagggtacgaggtgaaagagaatttttgttttatgtttaccatcatttattttgggaatagttgttaatacttcagataacaaggcagatttttcccatgtataaatatcttcttggaaatatggaatattggggaaaattagcaggcacttttttgggaagagaaatactgtttttaacattactgcttcactgagcccattaactgcatgagtttgtgcacactccaaagttatgtaacagataatttcggattttgartttggcttgggatacagaactaccatagacttgtcaattgtaaataagttttgaatgcggatttgactagtaggagatacagagtgtagacatcaatatagtaatatagatggaaagatggattgtctatgtaattccttgatcttacaagggagagaattgagaaaatgagccattgagcaacttacagaagttgtgggttagcggtagcggggatcatattagaacaaggt

SEQ ID NO: 435248 - DNA, 403 bp, Homo sapiens
ggtcagtctctattatggataaaactgtattccccaaaaagatatgctgaagttctaagctcttgtacctggtatcgtatcgaacttatttggaaatagggcctttgcagatgtaatcaaattaaaatgaggtcattaggataggctcttacctgatatgactggtgcccataattataagaagggagaagaacattgtatgagtctgttttcatgctgctgataaagacatacctgagactgggcaatttacaaaagaaagaggtttaattacacttacagttccacatggctgtggaggcctcacaatcatggcrgaaggcaaggaggagcaagtcacatcttacgtggtggcggtgggcaaaaagagagcttgtttgggaaaactccccgttataatgac

SEQ ID NO: 435249 - DNA, 403 bp, Homo sapiens
ggtcagtctctattatggataaaactgtattccccaaaaagatatgctgaagttctaagctcttgtacctggtatcgtatcgaacttatttggaaatagggcctttgcagatgtaatcaaattaaaatgaggtcattaggataggctcttacctgatatgactggtgcccataattataagaagggagaagaacattgtatgagtctgttttcatgctgctgataaagacatacctgagactgggcaatttacaaaagaaagaggtttaattacacttacagttccacatggctgtggaggcctcacaatcatggcagaaggcaaggaggagcaagtcacatcttamgtggtggcggtgggcaaaaagagagcttgtttgggaaaactccccgttataatgac

SEQ ID NO: 435250 - DNA, 618 bp, Homo sapiens
ctcaacaggataggattatacaagggtaagggtcattgggactcatcttggaattctgcctacctcagatcaatacagatatcaataatcaatagtgcttccccacaaagagctcacagactttcataagagtcagccatttaaacataatttaaataaacagtatggtaatagagcyacataattgtagtaaggttgaataaatggaggcaataattaactttacctggaatagacggattatggaaatctctatacagaagagaagctatttcagttgagtggaagggcaagctgaatcaggcggagaggatggagaagagtttcctcatggaaggccgccaggaatagaaacagtgtgtgtgtgtttgtgtgtgtgtctgtgtgtgtgtgtgtgtgtgtgtgtttggcatgcggtgggaaggtaaggtggcaggtagggtctttgccattggagcatagtagagtgagaagagggagctgataatccagacagataacattcagagataaagtggtagagcaggagctggtaaaatagacccagggaagagcagtagtcaaagacctggtagtgcttgttttcattctccgcaagcaaacactcctccatgggtg

SEQ ID NO: 435251 - DNA, 618 bp, Homo sapiens
ctcaacaggataggattatacaagggtaagggtcattgggactcatcttggaattctgcctacctcagatcaatacagatatcaataatcaatagtgcttccccacaaagagctcacagactttcataagagtcagccatttaaacataatttaaataaacagtatggtaatagagccacataattgtagtaaggttgaataaatggaggcaataattaactttacctggaatagacggattatggaaatctctatacagaagagaagctatttcagttgagtggaagggcaagctgaatcaggcggagaggatggagaagagtttcctcatggaaggccgccaggaatagaaacagtgtgtgtgtgtttgtgtgtgtgtctgtgtgtgtgtgtgtgtgtgtgtgtttggcatgcggtgggaaggtaaggtggcaggtagggtctttgccattggagcatagtagagtgagaagagggagctgataatcyagacagataacattcagagataaagtggtagagcaggagctggtaaaatagacccagggaagagcagtagtcaaagacctggtagtgcttgttttcattctccgcaagcaaacactcctccatgggtg

SEQ ID NO: 435252 - DNA, 564 bp, Homo sapiens
gatggggttaaacatcactggtttccatgctaacaggcccttgagaaagggcsacagaagagctgaggtggcagacagaagtgggctcgcagttcagtggaggaagatgtagagcatgtggacatgacagcttagattctaacaaggcagcagaagacccagcagaaatccaggcttgcacctgcgatcaggtaggaataactgcacatggagggggtgagggggagcagcaggaaaaggaaactcccctgcagaccacaattcccttagccagtacgaaagggcttagctcactgcaggaaaaagcaaagaagaaggggaggggagaaacatgaatttgactatttattccaaagatacagaggttaactcagaagtgactgaattaacgtaagttgaatgcttctcatttccctctgtatcaggcaatagaatcttaaaggcaaagtctcattttgttatttgaaaatgaagaagtgaaatctttccatactaggcccgtggacttgtgtctgtaaattattttccccaccattgccagcctatcccaagtccccaccatct

SEQ ID NO: 435253 - DNA, 564 bp, Homo sapiens
gatggggttaaacatcactggtttccatgctaacaggcccttgagaaagggccacagaagagctgaggtggcagacagaagtgggctcgcagttcagtggaggaagatgtagagcatgtggacatgacagcttagattctaacaaggcagcagaagacccagcagaaatccaggcttgcacctgcgatcaggtaggaataactgcacatggagggggtgagggggagcagcaggaaaaggaaactcccctgcagaccacaattcccttagccagtacgaaagggcttagctcactgcaggaaaaagcaaagaagaaggggaggggagaaacatgaatttgactatttattccaaagatacagaggttaactcagaagtgactgaattaacgtaagttgaatgcttctcatttccctctgtatcaggcaatagaatcttaaaggcaaagtctcattttgttatttgaaaatgaagaagtgaaatctttccatacyaggcccgtggacttgtgtctgtaaattattttccccaccattgccagcctatcccaagtccccaccatct

SEQ ID NO: 435254 - DNA, 590 bp, Homo sapiens
ggaaggacccatgaaaattagattatttcttaaagcaacaatagttataaggatggcaagaggatgaagagaacaggatgaaacccaggtagctacacagagctgcacattggaaatgtccaagagtaaagattcggaattagagtaagcattaaaccagaaataaggcatatcaatgatggcatgaaaagataaaaccaggaaacatatggtgactgcaaggtgaaatacactaagggacaaaatagtctttatgtatgagaggaaaacaagactgagaaaacacatcctgtttattagatgcaaaggaaaagaggattggttccaaaacaaaattcagttgtctttaaagaaaatttttgccttcgtagtaaaatatagcgtctcatttagaaaatggaataggaaacaatgtggttgaaggacagggaaacaaactagacttggcagggaattgatcaaagatcatttaaataaacaggtcttgrtaactttcacattagaacgccaattattgatgattcgggctccaggtgctaaaaataacacctatatgatcccgtagaaaactattcttggtgatttttcaa

SEQ ID NO: 435255 - DNA, 581 bp, Homo sapiens
aatttattgtctcacagctctagtggtcagaagtcctaaaccaaggtgtcggcagggccatgtgcctctgaaacgtgtatgaaagcatcctgccttgcctcttgtagctgctggtgttggccggcaatcttggatgctccttggtgttcagctgcagcacctcagtaagcctccaccatccatggtagtcttccctctgcatgtctgtgtctccacatggcacccctctttcctgcatgtstctctcttcttatgaggatacttctcgtagtggattaagggcctgccctaattcagtataaccttgctttaactaattacatctgcaaaaccaccttatttccaagtaaggttacattctgagatactaggggttaggacttcaatgtatcttttttgggtggggggacacagttcacctcatagcaatccccatattccaaatttatccaataatctatgttgaaaataatctgctcttgaatactttcttttctgtctctcaagatataaagttacatcgactcttccttttcccctgtatccatggagtcccacattattgagattttctgggatac

SEQ ID NO: 435256 - DNA, 581 bp, Homo sapiens
aatttattgtctcacagctctagtggtcagaagtcctaaaccaaggtgtcggcagggccatgtgcctctgaaacgtgtatgaaagcatcctgccttgcctcttgtagctgctggtgttggccggcaatcttggatgctccttggtgttcagctgcagcacctcagtaagcctccaccatccatggtagtcttccctctgcatgtctgtgtctccacatggcacccctctttcctgcatgtctctctcttcttatgaggatacttctcrtagtggattaagggcctgccctaattcagtataaccttgctttaactaattacatctgcaaaaccaccttatttccaagtaaggttacattctgagatactaggggttaggacttcaatgtatcttttttgggtggggggacacagttcacctcatagcaatccccatattccaaatttatccaataatctatgttgaaaataatctgctcttgaatactttcttttctgtctctcaagatataaagttacatcgactcttccttttcccctgtatccatggagtcccacattattgagattttctgggatac

SEQ ID NO: 435257 - DNA, 581 bp, Homo sapiens
aatttattgtctcacagctctagtggtcagaagtcctaaaccaaggtgtcggcagggccatgtgcctctgaaacgtgtatgaaagcatcctgccttgcctcttgtagctgctggtgttggccggcaatcttggatgctccttggtgttcagctgcagcacctcagtaagcctccaccatccatggtagtcttccctctgcatgtctgtgtctccacatggcacccctctttcctgcatgtctctctcttcttatgaggatacttctcgtagtggattaagggcctgccctaattcagtataaccttgctttaactaattacatctgcaaaaccaccttatttccaagtaaggttacattctgagatactaggggttaggamttcaatgtatcttttttgggtggggggacacagttcacctcatagcaatccccatattccaaatttatccaataatctatgttgaaaataatctgctcttgaatactttcttttctgtctctcaagatataaagttacatcgactcttccttttcccctgtatccatggagtcccacattattgagattttctgggatac

SEQ ID NO: 435258 - DNA, 517 bp, Homo sapiens
ttgcaagtgaggttcagggcatccctttgtgtctcttgttctaggacctgcagcaacacagggcaagctcttcatggttaatagaagaaggkcaagaggccacaccgaagcacacagcccattccaagtcactggcaagacaaagcctaaaaagtgtctttgtgtatccatcagccacaggacaccaaatggcatagcccaaagacagtgacagagggaattaaactctgacccagggaagccatggcaaggatgaattgtgagcaaataacgctttctgtcttaagaatcaaggatggctcctgagtttctggcttgcacagctagatagtggtgtccttcactgagaaagggagcaccagaaatggagccggtttgggagagatcatcagctcaaccttagacatttgggttcagaatcctttggataccaaagtggcagaagctatagagaagtctggcctggaggtatagatttgggagttgtggcgaaggctactagttgtcccctaccatt

SEQ ID NO: 435259 - DNA, 627 bp, Homo sapiens
gatagtctttttagtttccagttgcccatattgacaggaaactctgagaaaccccatctgaggagcctcctttgcacatggacttgatatagataacaagatcctagccttccaatctgattctgattatgcttttggagtgttgaggaaggaggtgaattactgtgctcatagggcagattgtggcaaattgttatttttttatttttatttttttgmgacagaatctcactctgtcacccaggctggagtgcgtggtgcgatcttggcccactgcaacctttgccaggcaaccttcgcctcccgggctcaagtgattcttcggcctcagcctcctgagcagctgggattacaggtgcccaccaccatgcctggctaatttttgtatttttagtagagacagggtttcaccatgctggccaggctggtctcgaactcctgacctcaactggtccacctgtcttggcctcccaaagtgctgggattacaggcatgagccaccactcctggacagcagattttattttccaaagatggtcacaatagtatttccatcccactaactcttctgcattgtgaaacttgacactctctcatcaagaggtgaagatacattctctttgcctc

SEQ ID NO: 435260 - DNA, 627 bp, Homo sapiens
gatagtctttttagtttccagttgcccatattgacaggaaactctgagaaaccccatctgaggagcctcctttgcacatggacttgatatagataacaagatcctagccttccaatctgattctgattatgcttttggagtgttgaggaaggaggtgaattactgtgctcatagggcagattgtggcaaattgttatttttttatttttatttttttgcgacagaatctcactctgtcacccaggctggagtgcgtggtgcgatcttggcccactgcaacctttgccaggcaaccttcgcctcccgggctcaagtgattcttcggcctcagcctcctgagcagctgggattacaggtgcccaccaccatgcctggctaatttttgtatttttagtagagacagggtttcaccatgytggccaggctggtctcgaactcctgacctcaactggtccacctgtcttggcctcccaaagtgctgggattacaggcatgagccaccactcctggacagcagattttattttccaaagatggtcacaatagtatttccatcccactaactcttctgcattgtgaaacttgacactctctcatcaagaggtgaagatacattctctttgcctc

SEQ ID NO: 435261 - DNA, 463 bp, Homo sapiens
taattatgaaagtaaaagtatttcttttaccttaagttacaatactgcccaaataaatttcagagtgattaccctttttctgccttgtgttatgttttctataatatccatatatcaaaagctattacttactatgaccgctccccccaaaaaaaatctcataaaggtaatctttttgtatcacacttagaacaacatcattcttgggtatttaaaaatgcttttcatactgatagttatctattcctgcctggctataaagaatagccaatattcttagatcccaaatwtctttagcttttctgaaattctttcttagctataacctttatagcttcagtatctccctgacttagaaactagccgcttggttactaatgtgaagaaagatccagtagttgaaagtatttgtataaatcagtatttcttaaatttaggcctatgaatccaccaagacatgtcc

SEQ ID NO: 435262 - DNA, 537 bp, Homo sapiens
tgtggaactggaaaccaaccgaggtgatgaagacaggaagcaggtgcccmgctaccttggttcaagtcaccagacccagttaaagttatatttccgagttctaaaggacctcatgcactctgagtaacctgttcctctcccagtttcattgtcagaagtggagggcaagccccaggcactctgtcgcaacctcaccattatcatctgctctgagaccacaaggaaccgcagacagccacgtcacctctcagcgtcctcactggagtctctctgtgggcccaggacatccccttttctattcccattttctgtcacacaccatcccccattccagaaacccttcactggcctctggaggtcaggctccattggaaacttgccatatgccctcgacctcctctctgaaagttaccttcactttcttgctctgacccctgactcccctgagggcactgcctcctttgccatcctgggagtgttctgtattttaaggctgtcatttattgactgtttacttagtgacaagcactgttctgt

SEQ ID NO: 435263 - DNA, 509 bp, Homo sapiens
tggctattgttactatccccattttacagatgaggaaagtaaaccagagaggttaatgaatttgcctgaaatcatttcactatgcagtgatagcactaggactcaattctaagtctgtctagctccaaagactacatcctcactactacacttcattccactgctcccttatgtgtctgcagtaagctggtaggccagagactggctggtctgggttggcctcagctgagatgacttgtttctgttctgtgtggtctctcatcctccagcaggctagcccaggcttgttcttatggtagggttccaaaagrcaaggtggatgtacccaaggccccttaaggcctaggcttagaaatgacccccacccccatcacttccattgcattctgttagctaaggcgaaccacaggccagccacatccaaaaaggtaaagaacagattctcaactggaggggcaacaaaatcacactgcaaaggtaagaatatagggaggcctttaactggggcc

SEQ ID NO: 435264 - DNA, 571 bp, Homo sapiens
ttgcaacaacattgactaatgggggtagatgatgagccaaaaataggtgaccttaatcaggcattcaaaaacctaggttagccaacaagcgcagatatctcatctggaatatttctctttgaagacatacttactactctttggaaattcataacacaggcccatcagaattgmattttctgaaacactgtttcccaaaatgtgttctgggaaacacaaaattcacgagatacttaaccgggggcaaggagaaagcagtctgtgagtaaatcagtttgcaaagttgtgttttctgacaatgagaataaaaatagtaattataacagctagaagagacttaggccctagcaacatcgttattcacaactaaaataagaacagcaatagcaagcactttgctcagtccaattgtacaacctaagaggaaaggccaagctggtatcaacacttaatgagaaggattcactccacaatctttaccacagaacattatttccatccttagctgcaacacagaaagatcaagagtctgacaaatgttctctagcatgttattccttcatagcttgta

SEQ ID NO: 435265 - DNA, 578 bp, Homo sapiens
acacgaggtgcagtctgagaactgaccactgggtttagatttgcattgagtaagtgtagtgggatcaagagtgaatgggaggagagaaagtaaagattatttttttaagagaagttttgctgcartaaggtggtacaaatcagaagcaaagttgagagagctcttttacttttaagaagggagaaatcatgtgatgtttgtatgctgatgagaataatccaggggagagggaaaaattgatacaggagtgagaggagagaattgatgaaggttagagaggagggatctgatgcatgagaagagagattggccttaaatacaagcacggccagtgtatccatgaggagggcaaatcaatgggcatggacgctggtagatgggtaagtatagagatgggaccatgtggactcttctaattgctggtaggtgggtaaatatagagataggggcatgtggactcttctaaagctttcttagcacaacaaggaataagagcatcatctgggagcaggaatgagagaggactttgaggagagaggagaagtaattgtgagagaagggaaatgaatggggcaagg

SEQ ID NO: 435266 - DNA, 602 bp, Homo sapiens
tttacatttccaaagttaattttcttctaaatgagtagtaccagtgaaatgctcattctacattactcctatctctgcttctcttgtcacactgccttctccccgtatgaccttcctgcattcctcttacaagtactttgtgatgacattgggccccctggataatctaggataatggccctatttcaatatccttaacttaataacatctgcaaaattccttttaccttgtaaggtaacayattcatgggttctggggattaggacctggacagctttgagggggccattagtcctcctaccacaggagaagagaggctagaggtgggaagggaggtgggacataaaatggtaaatcaagatgacctggcctcctcaatagcaataggcaagatttctccctgagacctctaccagctagctattctccctgtataacaggagttaatgctcctcacaggcacatttccgtgaagaatgctagacattccctccatgtcttaaaggtagggccaaaagcttcaccaaaactccagcaggcagctaaacttttttttctaacgtggatattagaaacaaaagtcacaaagcagagaagtgta

SEQ ID NO: 435267 - DNA, 602 bp, Homo sapiens
tttacatttccaaagttaattttcttctaaatgagtagtaccagtgaaatgctcattctacattactcctatctctgcttctcttgtcacactgccttctccccgtatgaccttcctgcattcctcttacaagtactttgtgatgacattgggccccctggataatctaggataatggccctatttcaatatccttaacttaataacatctgcaaaattccttttaccttgtaaggtaacacattcatgggttctggggattaggacctggacagctttgagggggccattagtcctcctaccacaggagaagagaggctagaggtgggaagggaggtgggacataaaatggtaaatcaagatgacctggcctcctcaayagcaataggcaagatttctccctgagacctctaccagctagctattctccctgtataacaggagttaatgctcctcacaggcacatttccgtgaagaatgctagacattccctccatgtcttaaaggtagggccaaaagcttcaccaaaactccagcaggcagctaaacttttttttctaacgtggatattagaaacaaaagtcacaaagcagagaagtgta

SEQ ID NO: 435268 - DNA, 522 bp, Homo sapiens
cttccctctgtctctatttctgttatgagcatgaagtttacatgcagtgtttctatttctgtatctcaaaacccttgtatgaaaaaaaattatcctcaaaatagccttgcaaaataggcagtcagcagggttagtgtccttatttcagaagtgggaataatgaggctaagagaaaaaaagagttagagaaagactaaataaaatagaagccctaatctggggttatgggctttaaatccctgaaaacgaatgcaaaaaaaatttttggtgcattttgattgcaagaagrtctatagcgttcatcagattctcagaggtctcgggatccctccaaaaaggttaagaagcactgtggataaagaccttctagactagagagctatctgaagggagttcatggtttctgctttcctgtaggcagaatagtagtagtgcactttgctggtgtatcatttccatcagtatcgcctctgggccactttgaaaatgtagatccctaggccccagcccagacctacagaa

SEQ ID NO: 435269 - DNA, 522 bp, Homo sapiens
cttccctctgtctctatttctgttatgagcatgaagtttacatgcagtgtttctatttctgtatctcaaaacccttgtatgaaaaaaaattatcctcaaaatagccttgcaaaataggcagtcagcagggttagtgtccttatttcagaagtgggaataatgaggctaagagaaaaaaagagttagagaaagactaaataaaatagaagccctaatctggggttatgggctttaaatccctgaaaacgaatgcaaaaaaaatttttggtgcattttgattgcaagaaggtctatagcgttcatcagattctcagaggtctcgggatccctccaaaaaggttaagaagcactgtggataaagaccttctagactagagagctatctgaagggagttcatggtttctgckttcctgtaggcagaatagtagtagtgcactttgctggtgtatcatttccatcagtatcgcctctgggccactttgaaaatgtagatccctaggccccagcccagacctacagaa

SEQ ID NO: 435270 - DNA, 498 bp, Homo sapiens
agacaaggtttggttggcacctgtgtttatggacctcttgtaataaatcaagggaacatggggatgaggcccaggctgtactggagcagggaytgcaattgccagacagtccaggtaaggacttatttattcatttgggctggcacagggctttaaagcattggaatctgaatgtctttaagtgggaatgcacccttcattgtgacagcaaccaccacacgtctttattctacatcctggatttgcacatccacatgcatggtccctaaggcatttgagtttccaacacctgctgtccaaccccatcacttccatttctgatcaggaagtcaaacgtcaggatatcagtgagtgagaaaggagaaaactgtgttggaaagtaaatgaaacaaattaacagaataacaaaattgataagcaccattctagcagtatatcagtttgttggggctgcccttaacaaagtatcacaactgggtgacttaaacaacagaaatg

SEQ ID NO: 435271 - DNA, 546 bp, Homo sapiens
aacttccctcaagtctactcacactttaggaaattgcactatgttctgcttgtggctttgtgttctttttgacaaaccatatctaggcctaggggtaaccactaagccccattcccctctctgcagcaggggtggagagaggggatctcctgttgtcttcctgcctcagagccacacctgtcctgggccattaraaatttctcctgcagatctcctgccattgcacttggtatttctgttattgttgttgttttcatgagaatttcaatggcaagatggaaaagggcaaatctctccattttagattatcacgtaatttatgagaggactatgagtttaatgttaatatgagtttttttgggaaccaacagtgaaggtgtgaggtatctgataagggggctaggcaggtgaccagagagaacacaagctctgcaacttcaatctcatcatcttggccaatatatacaggctgttcctttccccagccagcatccaggaccagaggcattacctggttttataaaatagtaaacgcataaattttat

SEQ ID NO: 435272 - DNA, 572 bp, Homo sapiens
gggagtatctttgtttgcctggggactttggcaatcagagagtctaattacgtgatttgtgatggaggctttaggccatgttgtatcagttcacacttgcagaggaactgaggatgaaagatgctagccaaaacttctgggaaggtctggagactgaagatcagccatgcagatagtatgtgattaggactcaataaaaattctggacaccaaaagctcaatgagcttccctgcccagcaatgccctgcatactgccacaaacagtggtcgggaggaggtaatactctctatgatgccagcgagagaggatgaatgggagctccacatttcracccctcctgggctttgtccaaggcatctcttccttggctaatgttaactagtatcctgttcctgtaatgaatcataagtatggctttcagtgaattctgtggctctttctggtaaattatcaaactggagggttgtttggcaaaccctctgaacttgtagctggtatcagagtaagggtagcctcagccctctgaaaagtcagcttcacacaataatctcataccagcagtactctggg

SEQ ID NO: 435273 - DNA, 190 bp, Homo sapiens
ggcaatgccaaaacaagaacggcctccagaggtragagcgaccatggaaaccaagtgaccgcagaggcacagcgtaggtccccaatcctgcatccccacaaaatacacttcttggaaataggggctccgatctttttgttgtgcactagagaacaacttgcctttttcacatgaccgctgtgtcaaacaa

SEQ ID NO: 435274 - DNA, 598 bp, Homo sapiens
gcataagttttcttttgggggtgacagaaatattctggaattagatcatggtgacatttgcacaactctgtgaatatacttaaaagccactgaattgtaccctttaaacggacgactagtgtatgtcagttatatctcaattaaaaacaaagtctagaacttgacatatcattccaaatactcaaattagatgagtctgcttctaaggtaaataagtggaaagtggtcacaagataagaacagaggctattaggagatgaggaaaatcaggaatgagaagtaggaagccaactcttcataattttttaggtgagcagcagagggagcccttgatagcaaagaaaattacaaaactaatgtttatacttctgatcataaagttaatacagcctttttacagaaaatttgaaaaagtgccacataaaggtaataaaaacccactaatcattccaccatcctaagaaccactattaacatttcatcgacacaaatccttccagtcttttttctgtatgtgtacatatatrcatgtacgtacatatatagccaagcccacccacagctctcctgtacatgcaactttgcctgttacattttt

SEQ ID NO: 435275 - DNA, 611 bp, Homo sapiens
tttggtgttagggctgtctctgcagacagggagtttggtttccaacacgctgggagcatccctggagaatgctgaaaagcagaataggctgccagagtccaagagacgatatcagtaaagttagcacaagatttaatagactagaatatacccgcccaatccatttctccagcctgataatccagagcaattaacagaaattgccctggtatttttagcatttttaaagtttcatctgggcaaacgcagaaatggataactatgttatccagaccttaccactgtttgtttttgagactctaagattaaactaaagactggcctagcaaagcagatatgtttgcccttgcctgaaaggagacagaaacttgggaagaaacaagggtctttggagttactgggcttccacgaggatcctcaaggtttgcaaacaccaaatggacaggacttcatccctgaagtgcaggccagtcctacctccttcacaatgacgtgctgacatcatggygcaaatttgcaaacattttttgccttattaagaaaattattcaaacctagaaaaatgcaagggttaaagccttgctttcataaacatagcctgtgtgtgtcgc

SEQ ID NO: 435276 - DNA, 310 bp, Homo sapiens
agttatagaaatattaatagaacaatatcacccctcagattatgttgaatactaaaatatagagttggatgtagaagcaaccaagtatccctcaaggaatgaatgaacaacatgtggcctatccatacaatggaatattgtccaggctttcaaaggaaggaaattctgacacatgctacaacatggatgaatcttgatgacattatgcaaagtgaaayaaaccagttacaaaaagaaaaatactgtataattccacttaaaagttatctagagtggtcaaattcacagaaacagaacataaaaaggtagt

SEQ ID NO: 435277 - DNA, 457 bp, Homo sapiens
aactaagtcacataattaatatttaaataaagctgtaggatccaaaagataaatacatatgtaaatgatatgaacatatagtcctcaagagacaatacaagtggttagcaaatattgaaaactgagttgggcaaggtggttaaggcctgtaatcccaacaatttggggggctgaagaggaaagatggcttgagctcaggagcttgagaccagccagggaaacatagggagacctcatctctgaaaatatgtttaaaaattagccaggcataatggcacacacttgtggtcccagctactcagcaggctgtgtgggaggattgcttgagcccaaraggtcaaggctacagtgagccatgactgctctattgcattccagcctgggcaacagtgagaccctgtatcaaaaaaaaaaaaaaggatttggactttgctaaggaaataagaaataagaaatc

SEQ ID NO: 435278 - DNA, 582 bp, Homo sapiens
ttaagggcattattttagaacttaaattattggcaaacatgtctcccaaaaactgtagcaaggagaccaggttaacaaataagcaatcctaatttcttactggcttaacagaataagaaagaattttaaagaatgtatccccccatcccttcccgttccccaaggagctaaatagggctttagatccctggggtttccctcccttggaaagggacaatcaaaatgtgacttcttcttcttatcattcttgaaaatgcaggatatagargtaaacaattgaattctccaagcaaagagtagagagaccgatgtgacaccaatccaagaaagccaatataacacaaaacaaattaatactaattttgtatcattgaacaccctttaaatattcaaaatttccaggtaatcttgaaaatgcctttgtactatttgtttcaatcaggatctaaacaatactcattatctgatttggttatatgtctcttaaacctaaaagcagaatattcaaaatgacacaaatgcccaataataggaaaatacttaaagaaattatgtcatcaccatggaaagaagaaatacaca

SEQ ID NO: 435279 - DNA, 582 bp, Homo sapiens
ttaagggcattattttagaacttaaattattggcaaacatgtctcccaaaaactgtagcaaggagaccaggttaacaaataagcaatcctaatttcttactggcttaacagaataagaaagaattttaaagaatgtatccccccatcccttcccgttccccaaggagctaaatagggctttagatccctggggtttccctcccttggaaagggacaatcaaaatgtgacttcttcttcttatcattcttgaaaatgcaggatatagaagtaaacaattgaattctccaagcaaagagtagagagaycgatgtgacaccaatccaagaaagccaatataacacaaaacaaattaatactaattttgtatcattgaacaccctttaaatattcaaaatttccaggtaatcttgaaaatgcctttgtactatttgtttcaatcaggatctaaacaatactcattatctgatttggttatatgtctcttaaacctaaaagcagaatattcaaaatgacacaaatgcccaataataggaaaatacttaaagaaattatgtcatcaccatggaaagaagaaatacaca

SEQ ID NO: 435280 - DNA, 575 bp, Homo sapiens
ttgattgtggtagtagataccttagtccaaactatacactacatacttatacataatggagtactattcagttataaaaaaggatgagatcctgtcatttgcaataacatggatggaactggaggtcactatgttaaatgaaataagccaagcacagaaagacaaacatcacaygtactcacttatttctagggggtaaaaatcaaaataattgaacttatgtagaaggatggttaccagaggctgggaagggtactgggatgctgggaggaggtgggaatggttaatgggtacaaaaaacagaaagaatgaataatatcttgtgtttgatagcacaacagggtgactatagtcaaaataatttaattgtacatttttaaataactaacagagtataactggatggtctgtaacacaaaggataaatgcttgtggggatgaacaccccactttccacaatgtgattattatgcattatatgcctgtatcaaactatctaatgcaccccatcaatatatacacttactatgtacccacaaaaattaaacattaaaaaaaactacataccacaatga

SEQ ID NO: 435281 - DNA, 479 bp, Homo sapiens
cacgaggtcaggagctcgagaccagcctgaacaacacggtgaaaccctgtctctactaaaaatacaaaaattagccaggcgtggtggtgggtgcctgtaatcccagctactcaggaggctgaggcaggagaattgcttgaaaccrgaaggcagaggttgcagtgagccgagatcacgccattgcactccagcctgggcaaaagagcaaaactctgtctcaaaaataataataataataataattgcctcttctttataccatcccaattttgacaatgtttactttaagtaacttatattaagaaaatgaaagttgttatttattttcaaatataaataatataatattaaaaatactttttgaaagacacactatcctcatataggtattctcatataaactaggtatcctcatataatgttatgactttttggaggatgctaaatttccttttcattatttctaccaatgcacataa

SEQ ID NO: 435282 - DNA, 616 bp, Homo sapiens
ttgtgtagcaagaaattagcttttatygtattaaatcatggaacgtgggcatttatcttattagtgttaagtgaggtatattagctgtatattgtacactatacattgactctaatacattgatcttcttcttcctcctatttccctgctggctataatcatgtatcaggacttttgattatcataatctaattttattaggaagaaagtgatttaaaggatttctaaatttactagtaatcaataggaccattgatttcaggcaaatagaagaaaatttttaaaatattgttcttatacacggatagtaatacttctagggataattaatctctaactcttgttaatattattttattaaccaacccataaaaaccttccaaaaattaacacatcatgttcaaaatttcaatatacttattcaacaatcacagtttaagcactggccatagacaaaaatgaatgaacttattagcactgttttgaactgaactgaatgaacttattagcactagtaagttctgatttgaacttagtcaaaacagaaagaacagtcaaggacagagaaaaacatggggtagaattttgcttaactgaattacagagtgcagaagta

SEQ ID NO: 435283 - DNA, 600 bp, Homo sapiens
aggacaaaggatacaaaatagcagatatgaaggatgaacaaatctaaagatggaatgtacaacatgagaactatatttaataatttttgctaaaaaagtagattttaggtactcttgccacacacacaaaaaaagtataactgagatgatggataggttaatttgctaactatactaaccttttcactctctatatgtatatcaagacattatgtaaaccttaaatatatacaataaaaasttatatgcttattatttatgtacaattacaatttaataagtatgtaacaattttacattaatacttattcaagattcatcattaacaaagctagtctttattcttctgtggtgttaaagatgaatcccaatcggtcctctggttcttcctttggtacgctctttgagcaaatttagggaactacaaccaacttattgctgaggaaaagtgccatctctgaagcataatcagaaacaatgaactaaagtaatatgaaaattgaaaggtgtctttgagattgcttggtgcaaccctttcattttaaagataaggcagcagaggcccagacaactttgagcttaatgacatgttacctatat

SEQ ID NO: 435284 - DNA, 524 bp, Homo sapiens
accctaagtgagctatgtgggagggtagataggatagaaagaattcaaaggcctgagattactttctcccagggcctgttcctaaactgtaccacccagaggtaatatttttaaactataaggcttaaaaggcagcgattctcagatgtaacttccagtcatccatgaatgacaatctaccttttaaagactttttatttctttatttttttaacagaaatagagatcatagctcatatcaccgttttaaatgtcataaataacttggttcatcagaaacaccaggcagtttttcttatagcttggggaaagcttgaggtggttgttgacctcttagtctttgttttctgactagctcattactctttttaaatgttctttattaaagccccattatttacatttttatatgaagaaatgttatattttaataaataaatttttattcattacctcaccaasattatattatatgttttaacgctcctttgtttactcatagtaccctccaaaataacaggttt

SEQ ID NO: 435285 - DNA, 458 bp, Homo sapiens
gctgagcttggtgctcacttctgataattgggttcttcgcttttttccccaagtcctgacttatggcttgagcctctgcttgcggtctctgctttccttgaagcttttggactgttcccttccatggcaggctctgaggacgtttaacaggaaaccttaaccatgtgcagaccttcagtttgtccctgagaagacagactcagacccaccaatcagcagtgcaggagtgggccttgctgtctgtagctggggatcctgtggtaggcccaggctctctcacccccttaggagtaggttctctcagcatcccaccacgttgctggtgtggcagtgtgaccgagcttgcttcatttytgctccatttccctagctctgtcgcaggcttgtgctgggcttcagcctgcttgtttaaagccttaataccctgcttaatttttgcctatttcttgtccctgaaa

SEQ ID NO: 435286 - DNA, 555 bp, Homo sapiens
ttttttttttgagacggagtctcgctcagccgcccaggctggagtgcagtggcgcaatctcagctcattgcaaccaccatctcccgggttcaagcaattctcctgtctcagcctcctgagtagctgggattacagacacctgccatcatgcccrgctgtattttagtagagacggggtttcatcatgttggccaggctggtcttgaactcctgacctcatgatccacccgccttggcctcccaaagtgctaggattacaggggtgagccaccacgcccagcctccaaaaagtatttttaaaaaaccattttttctctattacttttattcttttatttttacacttaaaactctgcatcatctgggttttgtcctgttttttttcccatgagactatggttgccttaatattatatgttgtaatattcatattttcctccactgttctgaaattctattttttagacttgaacttatagaagagaaagctgttaagtattggtaactgggctttatacaaatgagaaatttccctgtctttggtgagtggcagca

SEQ ID NO: 435287 - DNA, 555 bp, Homo sapiens
ttttttttttgagacggagtctcgctcagccgcccaggctggagtgcagtggcgcaatctcagctcattgcaaccaccatctcccgggttcaagcaattctcctgtctcagcctcctgagtagctgggattacagacacctgccatcatgcccagctgtattttagtagagacggggtttcatcatgttggccaggctggtcttgaactcctgacctcatgatccacccgccttggcctcccaaagtgctaggattacaggggtgagccaccacgcccagcctccaaaaagtatttttaaaaaaccattttttctctattacttttattcttttatttttacacttaaaactctgcatcatctgggttttgtcctgttttttttcccatgagactatggttgcctyaatattatatgttgtaatattcatattttcctccactgttctgaaattctattttttagacttgaacttatagaagagaaagctgttaagtattggtaactgggctttatacaaatgagaaatttccctgtctttggtgagtggcagca

SEQ ID NO: 435288 - DNA, 605 bp, Homo sapiens
agaatatggcaagaaggcagacacgggctagccaaggagagaggccttggaagaaaccagtcctgttgacacctatatcttggacttttggcttccagaattgtgagaaaataaattcttgttgcttaaaccactcagtctgtggcattttgttatgatagccctagcagactaataaagaggggttgcakgtcaatgggcatctggagatgtctaatcattgccttgcacatacctttgactttcttgcccccatcttgatttgtttcattcccttggcaaggccacgcactgagctacatgcagctgtgcctactacatgcctataccaatgcagctgaatatggatggagaaaaacacaaaagccagtcagtttgttgtaactgaaattcatgactttaacccccaaatcttcagtgggtccttagtgcttctgggtaatgagactatgcatccctattctgacccctctccactgtccttcatacaatttcacaccattgcctctctccacccctcaacatctcctttcccttcctctttctcaatttaggatcttgcctcacttgattcactgaggaaaacaaaaaccaaaaacaaaaaa

SEQ ID NO: 435289 - DNA, 289 bp, Homo sapiens
cggagccggtcgcggcgcaccgccgcggtggaaatgcgcccggcggcggccggtcgccggtsgggggacggtcccccgccgaccccacccccggccccgcccgcccacccccgcacccgccggagcccgccccctccggggaggaggaggaggggcggcgggggaagggagggcgggtggaggggtcgggaggaacggggggcgggaaagatccgccgggccgccgacacggccggacccgccgccgggttgaatcctccgggcggactgcgcggaccccacccgttta

SEQ ID NO: 435290 - DNA, 432 bp, Homo sapiens
cgggcccggcgcgccgggggccgctaccggcctcacaccgtccacgggctgggcctcgatcagaaggacttgggccccccacgagcggcgccggggagcgggtcttccgtacgccacatgtcccgcgccccgccgcggggcggggattcggcgctgggctcttccctgttcactcgccgttactgagggaatcctggttagtttcttctcctccgctgactaatatgcttaaattcagcgggtcgccacgtctgatctgaggtcgcgtctcggagggggacgggccgcycggcggacggacggacggaatcgcgccggcccgaccgcccgcccgacgctccgtcgggagacgggcccggcgagggggagaggcgacgggagagagagcgcgcggccgacggcacccccgcgccgccccgccggagcgggacg

SEQ ID NO: 435291 - DNA, 381 bp, Homo sapiens
ccgccgcggggcggggattcggcgctgggctcttccctgttcactcgccgttactgagggaatcctggttagtttcttctcctccgctgactaatatgcttaaattcagcgggtcgccacgtctgatctgaggtcgcgtctcggagggggacgggccgctcggcggacggacggacggaatcgcgccggcccgaccgcccgcccgacgctccgtcgggagacgggcccggcgagggggagaggcgacgggagagagagcgcgcggccgacggcrcccccgcgccgccccgccggagcgggacgaccggagggaggggcacgggccgggggcgggacgggcgccgcacgccccgacccgtctcccccgcggaggtcgggggg

SEQ ID NO: 435292 - DNA, 381 bp, Homo sapiens
ccgccgcggggcggggattcggcgctgggctcttccctgttcactcgccgttactgagggaatcctggttagtttcttctcctccgctgactaatatgcttaaattcagcgggtcgccacgtctgatctgaggtcgcgtctcggagggggacgggccgctcggcggacggacggacggaatcgcgccggcccgaccgcccgcccgacgctccgtcgggagacgggcccggcgagggggagaggcgacgggagagagagcgcgcggccgacggcacccccgsgccgccccgccggagcgggacgaccggagggaggggcacgggccgggggcgggacgggcgccgcacgccccgacccgtctcccccgcggaggtcgggggg

SEQ ID NO: 435293 - DNA, 348 bp, Homo sapiens
acacaaagtaaacttctgaaacactccattttttaaaagacaggcggaaaggaaagaaacacgaaaaagagagaaagaatgaggaaagaaacgaaggaaagaagggaaaaagaaacagagaggaaagaaaaaagaaggaaagacagggaacgaaagagaaataaagcacgaaggaaaaaaggacagaaagagagaaagaaggaaaggaagagaggaagaaaaacctaaagaaggagagaaaggaagaaaggaaggaagaaaaacacgaaggagaggaagaaagraaacagagataactacgtacgctcgttcatttacacacataaatacgacgcttttcatacgtaa

SEQ ID NO: 435294 - DNA, 330 bp, Homo sapiens
cggctctctctttccctctccgtcttcgcgggcggcggcggcgccgccctccccgtctctctcagccgggcgcgcccccctctcccccccgccacccgacgcgtgaccacgcagggcccgcggggggagggggaaggggcgggcgcggcggcaaggggagggcggacgccgccgggtctgcgcttagggggacggagggcccccggcgggccctgcgagggaacccccagccgcgcaccccgaggagcccggaggcacccccgggrgcgattgatcggcaagcgacgctcagacaggcgtagccccgggaggaacccggggccgcaagtg

SEQ ID NO: 435295 - DNA, 351 bp, Homo sapiens
tcacattaattctcgcagctagctgcgttcttcatcgacgcacgagccgagtgatccaccgctaagagtcgtacgargtcgatttggcgagggcgctcccgacgacgcaccgggaggaggcccttcctggcgcggcacgtccccccccccccgcccaagaggagagggggttgcctcaggccggccagacgagacagcgaacgggaccggactccggagaggggtcggaaggtttcacaccacggggaggcgcgcgccgcccacgcgggggcgagcgcggacaccaccccacaggcgcccgggggttcccgcccccacggcgcggggcgcacgccacacgcgcggcaggcg

SEQ ID NO: 435296 - DNA, 368 bp, Homo sapiens
gagtgatccaccgctaagagtcgtacgaggtcgatttggcgagggcgctcccgacgacgcaccgggagsaggcccttcctggcgcggcacgtccccccccccccgcccaagaggagagggggttgcctcaggccggccagacgagacagcgaacgggaccggactccggagaggggtcggaaggtttcacaccacggggaggcgcgcgccgcccacgcgggggcgagcgcggacaccaccccacaggcgcccgggggttcccgcccccacggcgcggggcgcacgccacacgcgcggcaggcgcgcgacggccgccgggtaaagcccccacccgacggccgccgcggcgtcggcggcggcgcggcccc

SEQ ID NO: 435297 - DNA, 511 bp, Homo sapiens
acccccgggggcgattgatcggcaagcgacgctcagacaggcgtagccccgggaggaacccggggccgcaagtgcgttcgaagtgtcgatgatcaatgtgtcctgcaattcacattaattctcgcagctagctgcgttcttcatcgacgcacgagccgagtgatccaccgctaagagtcgtacgaggtcgatttggcgagggcgctcccgacgacgcaccgggaggaggcccttcctggcgcggcacgtccccccccccccgcccaagaggagagggggttgcctcaggccggccagacgagacagcraacgggaccggactccggagaggggtcggaaggtttcacaccacggggaggcgcgcgccgcccacgcgggggcgagcgcggacaccaccccacaggcgcccgggggttcccgcccccacggcgcggggcgcacgccacacgcgcggcaggcgcgcgacggccgccgggtaaagcccccacccgacggccgccgcggcgtcggc

SEQ ID NO: 435298 - DNA, 273 bp, Homo sapiens
tcatcgacgcacgagccgagtgatccaccgctaagagtcgtacgaggtcgatttggcgagggcgctcccgacgacgcaccgggaggaggcccttcctggcgcggcacgtccccccccccccgcccaagaggagagggggttgcctcaggccggccagacgagacagcgaacgggaccggactccggagaggggtcggaaggtttcacascacggggaggcgcgcgccgcccacgcgggggcgagcgcggacaccaccccacaggcgcccgggg

SEQ ID NO: 435299 - DNA, 295 bp, Homo sapiens
cgcgcgccgcccacgcgggggcgagcgcggacaccaccccacaggcgcccgggggttcccgcccccacggcgcggggcgcacgccacacgcgcggcaggcgcgcgacggccgccgggtaaagcccccacccgacggccgccgcggcgtcggcggcggcgcggccccggccggggagcggagtccgcggtggaggcgcgggaggggccgggcccctcccgacgggactcccccgcgggcccaccaccgcccccgacccacgggcggwcgggcgatccccccaaggggtctttaaac

SEQ ID NO: 435300 - DNA, 468 bp, Homo sapiens
tctctcccccccgtctccctcccgagttctccggctctcgcggccggcggggccgggcggcgaacgaacgagcgagcgaacgaacgggcacgcgggccccgcccgcgcacgcgccgcgtcgcggtgggggggygggtgtgcggagggaagcgcgcggcggcggcggcgccgccgcgggcctcgccctccgggctccgttaatgatccttccgcaggttcacctacggaaaccttgttacgacttttacttcctctagatagtcaagttcgaccgtcttctcagcgctccgccagggccgtgggccgaccccggcggggccgatccgagggcctcactaaaccatccaatcggtagtagcgacgggcggtgtgtacaaagggcagggacttaatcaacgcaagcttatgacccgcacttactgggaattcctcgttcatggggaataattgcaatccccgatccccatc

SEQ ID NO: 435301 - DNA, 396 bp, Homo sapiens
gcggaccgcggtgcccggcccggggacagtcgcgccgtgcggccgcagcgcccgcgcaccggtccggtcgagggcccggggcccggccgaagcccggctccgagccccgccggcgggcgcgggcgcaggggtggcacacgccacacgacggccaagggagggccgaccgaggccggccggcgcgcccgcccccgcccgggacgggggaccgcgaccggggccgaggccccggcccgggccccaccccccgacccggggaragggcgagcgaccggcaaggcggaggtcgacccacgccacacgtcgcacgaacgcctgtccgggagggaccaccgggccgcgctcgggcgcacgcgcgcgccgaacggggcgacgccacgcggggaggacgggctc

SEQ ID NO: 435302 - DNA, 359 bp, Homo sapiens
ccggggcgacggggaaggcgcgagaaaggcggccggcggggaaggggacgccacggggacccckcgagcgcggccgaccgcagccgggacacacgcgcggggcctcaccgccgccggcggcaccgcgcggcacccggggcggccgaccggccctcggcgatccccgcggctccccccaccaccgccgccgcagtcgcggccggtcccccggaaccgtctcctcccccgcacgcgccgcaggccgacccccggaaccctccgggaagcccaccgggccccacgcggggcgccaccgacccggtccccaaggcgcgcgccgggggacgcggacgccgggccgatcagtggccggcggcggc

SEQ ID NO: 435303 - DNA, 340 bp, Homo sapiens
ggacgccacggggaccccgcgagcgcggccgaccgcrgccgggacacacgcgcggggcctcaccgccgccggcggcaccgcgcggcacccggggcggccgaccggccctcggcgatccccgcggctccccccaccaccgccgccgcagtcgcggccggtcccccggaaccgtctcctcccccgcacgcgccgcaggccgacccccggaaccctccgggaagcccaccgggccccacgcggggcgccaccgacccggtccccaaggcgcgcgccgggggacgcggacgccgggccgatcagtggccggcggcggcgccccacgaggcggtgccgggttcgg

SEQ ID NO: 435304 - DNA, 554 bp, Homo sapiens
ggcggggccaccaacggacgtgaagccggtgagccgctcggggggaagaagaggatcggcgggcggcgggcggggaagagggcacagacgggcgagggccggggaccgcgagggcaagggcacccgggagcccgcagaggcggcggctcggggagaaacctcaggcacggccgggccaccaggaaaacacggccgcgggatcccaccgccacagacacgagggcggtcccgcggcgccccgcctgggacgccggacggccctcggcccccaccgagaaccgcctcgcgagccccggggccccgccaccgggggccccggagcgaccgcagccacgaacccgacacgccmgcaccaccgtcgctcgtgattctcgtccatcctccgacccggtcccgctccgggagaccggcgcgcccccaccgtgggacgctttcccagggccaggcgggcccgaccccgtgccacgcaaacgcggtcgtcggcaccggtcacgactcggcacgggagcgggcggagagccgactcgcggcggagggggtcacgcgccggacag

SEQ ID NO: 435305 - DNA, 520 bp, Homo sapiens
ctctctctttctgtctttctctctctgtgtatcgttgtctctctctgtctgtctctgtctctgtctctctgtctctctctctctctctctctctgtctgtctgtccgtctgtctgtctcggtctctggctctcgctatctcccgccctctctttttttgcaaaagaagctcaagtacatctaatckcatcccttaccaaggcctgaattcttcacttctgacatcccagatttgatctccctacagaatgctgtacagaactggcgagttgatttctggacttggatacctcatagaaactacatatgaataaagatccaatcctaaaatctggggtggcttctccctcgactgtctcgaaaaatcgtacctctgttcccctaggatgccggaagagttttctcaatgtgcatctgcccgtgtcctaagtgatctgtgaccgagccctgtccgttctgtctcaaatatgtacgtgcaaacacttctctccatttccacaactacccacggccccttgtgg

SEQ ID NO: 435306 - DNA, 520 bp, Homo sapiens
ctctctctttctgtctttctctctctgtgtatcgttgtctctctctgtctgtctctgtctctgtctctctgtctctctctctctctctctctctgtctgtctgtccgtctgtctgtctcggtctctggctctcgctatctcccgccctctctttttttgcaaaagaagctcaagtacatctaatctmatcccttaccaaggcctgaattcttcacttctgacatcccagatttgatctccctacagaatgctgtacagaactggcgagttgatttctggacttggatacctcatagaaactacatatgaataaagatccaatcctaaaatctggggtggcttctccctcgactgtctcgaaaaatcgtacctctgttcccctaggatgccggaagagttttctcaatgtgcatctgcccgtgtcctaagtgatctgtgaccgagccctgtccgttctgtctcaaatatgtacgtgcaaacacttctctccatttccacaactacccacggccccttgtgg

SEQ ID NO: 435307 - DNA, 520 bp, Homo sapiens
ctctctctttctgtctttctctctctgtgtatcgttgtctctctctgtctgtctctgtctctgtctctctgtctctctctctctctctctctctgtctgtctgtccgtctgtctgtctcggtctctggctctcgctatctcccgccctctctttttttgcaaaagaagctcaagtacatctaatctcatcccttaccaaggcctgaattcttcacttctgacatcccagatttgatctccctacagaatgctgtacagaactggcgagttgatttctggacttggatacctcatagaaactacatatgaataaagatccaatcctaaaatctggggtggcttctccctcgactgtctcgaaaaatcgtacctctgttcccctaggatgccggaagagttttctcaatgtgcatctgcccgtgtcctaagtgatctgtgaccgagccctgtccgtyctgtctcaaatatgtacgtgcaaacacttctctccatttccacaactacccacggccccttgtgg

SEQ ID NO: 435308 - DNA, 430 bp, Homo sapiens
tttcccccgggtgctggatgtatcctgtcaagagacctgagcctgacaccgtcgaattaaacaccttgactggctttgtgtgtttgtttgtttctgagatggagtcttgctctgtcccccaggctggagtgcagtggcgtgatctcagctcactggaacctctgcctcctgggttcaagtgattytcctgtctcagcgccaccatggccggctcattttttttttttttttttttttttttttttttggtagacacggggtttcaccctctttcattggttttcactggagattctagattcgagccacacctcattccgtgccacagagagacttctttttttttttttttttaagcgcaacgcaacatgtctgccttatttgagtggcttcctatatcattataattgtgttatagatgaagaaacgg

SEQ ID NO: 435309 - DNA, 527 bp, Homo sapiens
actgtgctaatgatagtgaaagtgaagacaaaagaaaggctatctattttgtggttagaataaagttgctcagtatttagagctacctaaatacgtcagcatttacactcttcctagtaaaagctggccratctgaataatcctcctttaaacaaacacaatttttgatagggttaagatttttttaagaatgcgactcctgcaaaatagctgaacagacgatacacatttaaaaaaataacaacacaaggatcaaccagacttgggaaaaaatcgaaaaccacacaagtcttatgaagaactgagttcttaaaataggacggagaacgtagctatcggaagagaaggcagtattggcaagttgattgttacgttggtcagcagtagctggcactatctttttggccatctttcgggcaatgtaactactacagcaaaatgagatacgatccattaaacaacatattcgcaaatcaaaaagtgtttcagtaatataatgcttcagatttagaagcaaatcaaatgat

SEQ ID NO: 435310 - DNA, 527 bp, Homo sapiens
actgtgctaatgatagtgaaagtgaagacaaaagaaaggctatctattttgtggttagaataaagttgctcagtatttagagctacctaaatacgtcagcatttacactcttcctagtaaaagctggccaatctgaataatcctcctttaaacaaacacaatttttgatagggttaagatttttttaagaatgcgactcctgcaaaatagctgaacagacgatacacatttaaaaaaataacaacacaaggatcaaccagacttgggaaaaaatcgaaaaccacacaagtcttatgaagaactgagttcttaaaataggacggagaacgtagctatcggaagagaaggcagtattggcaagttgattgttacgttggtcagcagtagctggcactatctttttggccatctttcgggcaatgtaactactacagcaaaatgagataygatccattaaacaacatattcgcaaatcaaaaagtgtttcagtaatataatgcttcagatttagaagcaaatcaaatgat

SEQ ID NO: 435311 - DNA, 527 bp, Homo sapiens
atgccccgagtgactgtggctcgcacctctccggaaacattggaaatctctcctctacgcgcggccacctgaaaccacaggagctcgggacacacgtgctttcgggagagaatgctgagagtctcttgccgactctctcttgacttgagttcttcgtgggtgcgtggttaagacgtagtgagaccagatgtattaactcaggccgggtgctggtggctcacgcctgtaaccccaacactttgggaggccgaggccgtaggatccctcgaggaatcrcctaaccctggggaggttgaggttgcagtgagtgagccatagttgtgtcactgtgctccagtctgggcgaaagacagaatgaggccctgccacaggcaggcaggcaggcaggcaggcagaaagacaacagctgtattatgttcttctcagggtaggaagcaaaaataacagaatacagcacttaattaatttttttttttcccttcggacggagtttcactcttggtgcccacgctggagtgcagtggcac

SEQ ID NO: 435312 - DNA, 188 bp, Homo sapiens
cgggccgtacccatatccgcagcaggtctccaaggtgaacagcctctggcatgttggaacaatgtaggtaagggaagtcggcaagccggatccgtaacttcgggataaggattggctctaagggctgggtcggtcgggctggggcgcgaagcggggctgggcgcgygccgcggctggacgaggcgccg

SEQ ID NO: 435313 - DNA, 596 bp, Homo sapiens
tgcggggggcccggcggggcgtgcgcgtccggcgccgtccgtccttccgttcgtcttcctccctcccggcctctcccgccgaccgcgggcgtggtggtgggggtgggggggggagggcgcgcgaccccggtcggcgcgccccgcttcttcggttcccgcctcctccccgttcaccgccggggcggctcgtccgctccgggccgggacggggtccggggagcgtggtttgggagccgcggaggcggccgygccgagccgggcccgtggcccgccggtccccgtcccgggggttggccgcgcgggccccggtggggcggccacccggggtcccggccctcgcgcgtccttcctcctcgctcctccgcacgggtcgaccagcagaccgcgggtggcgggcggcgggcggcgaggccccacggggcgtccccgcacccggccgacctccgctcgcgacctctcctcggtcgggcctccggggtcgaccgcctgccgcccgcgggcgtgagactcagccggcgtctcgccgtgtcccgggtcgaccggcgggccttctccaccgagcggcgtgtaggagtgcccgtcgggacgaaccgcaa

SEQ ID NO: 435314 - DNA, 596 bp, Homo sapiens
tgcggggggcccggcggggcgtgcgcgtccggcgccgtccgtccttccgttcgtcttcctccctcccggcctctcccgccgaccgcgggcgtggtggtgggggtgggggggggagggcgcgcgaccccggtcggcgcgccccgcttcttcggttcccgcctcctccccgttcaccgccggggcggctcgtccgctccgggccgggacggggtccggggagcgtggtttgggagccgcggaggcggccgcgccgagccgggcccgtggcccgccggtccccgtcccgggggttggccgcgcgggccccggtggggcggccacccggggtcccggccctcgcgcgtccttcctcctcgctcctccgcacgggtcgaccagcagaccgcgggtggygggcggcgggcggcgaggccccacggggcgtccccgcacccggccgacctccgctcgcgacctctcctcggtcgggcctccggggtcgaccgcctgccgcccgcgggcgtgagactcagccggcgtctcgccgtgtcccgggtcgaccggcgggccttctccaccgagcggcgtgtaggagtgcccgtcgggacgaaccgcaa

SEQ ID NO: 435315 - DNA, 596 bp, Homo sapiens
tgcggggggcccggcggggcgtgcgcgtccggcgccgtccgtccttccgttcgtcttcctccctcccggcctctcccgccgaccgcgggcgtggtggtgggggtgggggggggagggcgcgcgaccccggtcggcgcgccccgcttcttcggttcccgcctcctccccgttcaccgccggggcggctcgtccgctccgggccgggacggggtccggggagcgtggtttgggagccgcggaggcggccgcgccgagccgggcccgtggcccgccggtccccgtcccgggggttggccgcgcgggccccggtggggcggccacccggggtcccggccctcgcgcgtccttcctcctcgctcctccgcacgggtcgaccagcagaccgcgggtggcgggcggcgggcggcgaggccccacggggcgtccccgcacccggccgacctccgctcgygacctctcctcggtcgggcctccggggtcgaccgcctgccgcccgcgggcgtgagactcagccggcgtctcgccgtgtcccgggtcgaccggcgggccttctccaccgagcggcgtgtaggagtgcccgtcgggacgaaccgcaa

SEQ ID NO: 435316 - DNA, 502 bp, Homo sapiens
gggccccggtggggcggccacccggggtcccggccctcgcgcgtccttcctcctcgctcctccgcacgggtcgaccagcagaccgcgggtggcgggcggcgggcggcgaggccccacggggcgtccccgcacccggccgacctccgctcgcgacctctcctcggtcgggcctccggggtcgaccgcctgccgcccgcgggcgtgrgactcagccggcgtctcgccgtgtcccgggtcgaccggcgggccttctccaccgagcggcgtgtaggagtgcccgtcgggacgaaccgcaaccggagcgtccccgtctcggtcggcacctccggggtcgaccagctgccgcccgcgagctccggacttagccggcgcctgcacgtgtcccgggtcgaccagcaggcggccgccggacgctgcggcgcaccgacgcgagggcgtcgattcccgttcgcgcgcccgcgacctccaccggcctcggcccgcggtggagctgggaccacgc

SEQ ID NO: 435317 - DNA, 279 bp, Homo sapiens
tcgaccggcgggccttctccaccgagcggcgtgtargagtgcccgtcgggacgaaccgcaaccggagcgtccccgtctcggtcggcacctccggggtcgaccagctgccgcccgcgagctctggacttagccggcgcctgcacgtgtcccgggtcgaccagcaggcggccgccggacgctgcggcgcaccgacgcgagggcgtcgactccggttcacgcgccggcgacctccaccggcctcggcccgcggtggagctgggaccacgcggaactccctct

SEQ ID NO: 435318 - DNA, 279 bp, Homo sapiens
tcgaccggcgggccttctccaccgagcggcgtgtaagagtgcccgtcgggacgaaccgcaaccggagcgtccccgtctcggtcggcacctccggggtcgaccagctgccgcccgcgagctctggacttagccggcgcctgcacgtgtcccgggtcgaccagcaggcggccgccggacgctgcggcgcaccgacgcgagggcgtcgaytccggttcacgcgccggcgacctccaccggcctcggcccgcggtggagctgggaccacgcggaactccctct

SEQ ID NO: 435319 - DNA, 279 bp, Homo sapiens
tcgaccggcgggccttctccaccgagcggcgtgtaagagtgcccgtcgggacgaaccgcaaccggagcgtccccgtctcggtcggcacctccggggtcgaccagctgccgcccgcgagctctggacttagccggcgcctgcacgtgtcccgggtcgaccagcaggcggccgccggacgctgcggcgcaccgacgcgagggcgtcgactccggttcrcgcgccggcgacctccaccggcctcggcccgcggtggagctgggaccacgcggaactccctct

SEQ ID NO: 435320 - DNA, 279 bp, Homo sapiens
tcgaccggcgggccttctccaccgagcggcgtgtaagagtgcccgtcgggacgaaccgcaaccggagcgtccccgtctcggtcggcacctccggggtcgaccagctgccgcccgcgagctctggacttagccggcgcctgcacgtgtcccgggtcgaccagcaggcggccgccggacgctgcggcgcaccgacgcgagggcgtcgactccggttcacgcgccsgcgacctccaccggcctcggcccgcggtggagctgggaccacgcggaactccctct

SEQ ID NO: 435321 - DNA, 559 bp, Homo sapiens
gccttccagtgatctcattgactgatttagagacggcatctcgctccgtcaccccggcagtggtgccgtcgtaactcactccctgcagcgtggacgctcctggactcgagcgatccttccacctcagcctscagagtacagagcctgggaccgcgggcacgcgccactgtgcccacaccgtttttaattgtttttttttcccccgagacagagtttcactctcgtggcctagactgcagtgcggtggcgcgatcttggctcaccgcaacctctgcctcccggtttcaagcgattctcctgcatcggcctcctgagtagccgggattgcgggcatgcgctgccacgtctggctgatttcgtatttttagtggagacggggcttctccatgtcgatcgggctggtttcgaactcccgacctcaggtgatccgccctccccggcctccggaagtgctgggatgacaggcgtgagccaccgcgcccggccttcatttttaaatgttttcccacagacggggtctcatcatttctttgcaaccctcctgcccggcgtctcaaag

SEQ ID NO: 435322 - DNA, 295 bp, Homo sapiens
aggactcggtcgcgggtcgctgcagacacacggagaggcagaatgcgtaggctcttccggaatccacgcagagacagacggggggaggggagtggggaaaagagacagatggcgaaagggaaggagggagggaagggagcagggagggagggagggagggagggaggaagaaaatggagaaaagagagacaatttagaaaacgtagatacacaaagtaaacttctgaaacactccattttttaaaagacaggcggraaggaaagaaacacgaaaaagagagaaagaatgaggaaa

SEQ ID NO: 435323 - DNA, 571 bp, Homo sapiens
ggagtttgtgcttgcattttttcttgtttagttttaagaaattatttattttctttctggctctttccttagttctatgaccacattctaagtttttaaaaattctgatttgtgttattttttcaactttttgtacaattttcttattgccttttagctyattgtgaaagagaagattacaattttgatcttctctatggacatggctttctgccatgctttcattgtctgtagggatattatcttgctctttgttatcttttttctaatagctttgtgtaggaattggttgctatcaatttcccacactcattttatgtgaaattggtttgctgaacttttagaaggaggcatggttcagggtagctttttaacttcatacgaccctcacttctgttacctgaaaacaataaaatgtaatgaatacagtgttcaaaaatcaagtggcttgctttctgagatttcttgggtgtgtcctctctcacatgtatttagatcttctctttattattctctcttactaccagcactttttcttcaaagtggagtgctctcttggaaaaaggccctg

SEQ ID NO: 435324 - DNA, 620 bp, Homo sapiens
tgtgtctagctcagggattgtaaatgcaccaatcagcaccctgtcaaaacagaccacttggcgmtctgtaaagtggaccaatcagcaggatgtgggtggggccagataatagaataaaagcaggctgccctagccagccctggcaaccggccctgatcctcttctgcactgtggaagctttgttgtttcactctttgcagcaaatcttgctgctactaactttctgagtccacactgtgtttatgaggtgttgtactcaccatgaaggtctgcagcttcactgttagaaccagcaagatcacgaacccagcaggaggaacgaactcgagacgggccgccttaacagctgtaatactcaccgcgaatgtctgtagtttcactcctgagcttctgagaccacaaaccttaccagaagaaagaaactcaaaacacatccaaacatcagaaggaataaactcaggacatgctgcctttaagaactgtgacactcactgtgaggatccacagcttccttcttgaaaatcagtgaaaccaagaatctactaattctggacacactttaacataaccatcatccttttaggttagggccagctgcaactaaatctcctatctccaag

SEQ ID NO: 435325 - DNA, 620 bp, Homo sapiens
tgtgtctagctcagggattgtaaatgcaccaatcagcaccctgtcaaaacagaccacttggcgctctgtaaagtggaccaatcagcaggatgtgggtggggccagataatagaataaaagcaggctgccctagccagccctggcaaccggccctgatccycttctgcactgtggaagctttgttgtttcactctttgcagcaaatcttgctgctactaactttctgagtccacactgtgtttatgaggtgttgtactcaccatgaaggtctgcagcttcactgttagaaccagcaagatcacgaacccagcaggaggaacgaactcgagacgggccgccttaacagctgtaatactcaccgcgaatgtctgtagtttcactcctgagcttctgagaccacaaaccttaccagaagaaagaaactcaaaacacatccaaacatcagaaggaataaactcaggacatgctgcctttaagaactgtgacactcactgtgaggatccacagcttccttcttgaaaatcagtgaaaccaagaatctactaattctggacacactttaacataaccatcatccttttaggttagggccagctgcaactaaatctcctatctccaag

SEQ ID NO: 435326 - DNA, 620 bp, Homo sapiens
tgtgtctagctcagggattgtaaatgcaccaatcagcaccctgtcaaaacagaccacttggcgctctgtaaagtggaccaatcagcaggatgtgggtggggccagataatagaataaaagcaggctgccctagccagccctggcaaccggccctgatcctcttctgcactgtggaagctttgttgtttcactctttgcagcaaatcttgctgctactaactttctgagtccacactgtgtttatgaggtgttgtactcacyatgaaggtctgcagcttcactgttagaaccagcaagatcacgaacccagcaggaggaacgaactcgagacgggccgccttaacagctgtaatactcaccgcgaatgtctgtagtttcactcctgagcttctgagaccacaaaccttaccagaagaaagaaactcaaaacacatccaaacatcagaaggaataaactcaggacatgctgcctttaagaactgtgacactcactgtgaggatccacagcttccttcttgaaaatcagtgaaaccaagaatctactaattctggacacactttaacataaccatcatccttttaggttagggccagctgcaactaaatctcctatctccaag

SEQ ID NO: 435327 - DNA, 620 bp, Homo sapiens
tgtgtctagctcagggattgtaaatgcaccaatcagcaccctgtcaaaacagaccacttggcgctctgtaaagtggaccaatcagcaggatgtgggtggggccagataatagaataaaagcaggctgccctagccagccctggcaaccggccctgatcctcttctgcactgtggaagctttgttgtttcactctttgcagcaaatcttgctgctactaactttctgagtccacactgtgtttatgaggtgttgtactcaccrtgaaggtctgcagcttcactgttagaaccagcaagatcacgaacccagcaggaggaacgaactcgagacgggccgccttaacagctgtaatactcaccgcgaatgtctgtagtttcactcctgagcttctgagaccacaaaccttaccagaagaaagaaactcaaaacacatccaaacatcagaaggaataaactcaggacatgctgcctttaagaactgtgacactcactgtgaggatccacagcttccttcttgaaaatcagtgaaaccaagaatctactaattctggacacactttaacataaccatcatccttttaggttagggccagctgcaactaaatctcctatctccaag

SEQ ID NO: 435328 - DNA, 621 bp, Homo sapiens
tagtactggtacaaatacagaaatatagaccaatggaacagaatagagaacagaaataaagccacatacctacaaccgtctgatcttcaacaaaactgacaaaaataagcaatgcgaaaagactgtctattcaataaatggtgctgggataactggtgagccatatgcaaaggaatgaaattggacccctaccactcactacacaaaaattaactcaaagtgggttaaagatttaaatgtaagacctgaaactataaaaatcctggaggaaaacctaggaaatacccttctcgacactggccttggcaaataatttatggttaagtcctcaaaagcaattgcaacaaaaacagaaattggcaagtgggacctaattaaactaaagagcttccacacaatgaaagaaactataataaacagagtaaacaaccaaccgaatgggagratatatttgctaactgtgcatccaataaaggtccaatattcagaatctataacgatcttaaataaatcaacaagaaaaaaacaaccccatttaaaagtgggcaaaggacatgaacagacacttaccaaaagaagacatacaagcagccaacaaacatatgaaaaatgctcatcact

SEQ ID NO: 435329 - DNA, 621 bp, Homo sapiens
tagtactggtacaaatacagaaatatagaccaatggaacagaatagagaacagaaataaagccacatacctacaaccgtctgatcttcaacaaaactgacaaaaataagcaatgcgaaaagactgtctattcaataaatggtgctgggataactggtgagccatatgcaaaggaatgaaattggacccctaccactcactacacaaaaattaactcaaagtgggttaaagatttaaatgtaagacctgaaactataaaaatcctggaggaaaacctaggaaatacccttctcgacactggccttggcaaataatttatggttaagtcctcaaaagcaattgcaacaaaaacagaaattggcaagtgggacctaattaaactaaagagcttccacacaatgaaagaaactataataaacagagtaaacaaccaaccgaatgggagaatatatttgctaactgtgcatccaataaaggtccaatattcagaatctataasgatcttaaataaatcaacaagaaaaaaacaaccccatttaaaagtgggcaaaggacatgaacagacacttaccaaaagaagacatacaagcagccaacaaacatatgaaaaatgctcatcact

SEQ ID NO: 435330 - DNA, 580 bp, Homo sapiens
ataaaacattgttgaaaaaagttaaagaagatgtaaataaatgaaagtatatctgacgttcatgaattggaagacttagcattgttaagatggcaatattccccaaattgatgtacagattcaatgcaatttctatcagaatcccagaaccgacttctttgtagaaattgacaagctgattccaaaactggtatgggattacaaatgatccagaatagccaaaacaatcttaaagaagaacaacaaagttgtcggactcacatttcctgatttcaaaacttttacaaagcaacagtagtcaagacagtgtggtactagcataaggatakacatacagatttgtggaatcgaattgagagtctagaaataaaactgtgtgtctatggccacatgatttttgaaaaacgtaaaacaccattcaatggggaaaacatagtctttccaacaaatgacactgggaccactgggtaaacatatatgcaaaagaatgaaactgaactcttatctcacaccatacacaaaaattaactcaaaatgaatgacagtcataaatattataagagttttacagctaagaaaa

SEQ ID NO: 435331 - DNA, 580 bp, Homo sapiens
ataaaacattgttgaaaaaagttaaagaagatgtaaataaatgaaagtatatctgacgttcatgaattggaagacttagcattgttaagatggcaatattccccaaattgatgtacagattcaatgcaatttctatcagaatcccagaaccgacttctttgtagaaattgacaagctgattccaaaactggtatgggattacaaatgatccagaatagccaaaacaatcttaaagaagaacaacaaagttgtcggactcacatttcctgatttcaaaacttttacaaagcaacagtagtcaagacagtgtggtactagcataaggatatacatacagatttgtggaatcgaatygagagtctagaaataaaactgtgtgtctatggccacatgatttttgaaaaacgtaaaacaccattcaatggggaaaacatagtctttccaacaaatgacactgggaccactgggtaaacatatatgcaaaagaatgaaactgaactcttatctcacaccatacacaaaaattaactcaaaatgaatgacagtcataaatattataagagttttacagctaagaaaa

SEQ ID NO: 435332 - DNA, 451 bp, Homo sapiens
ttgttttcctgcaactagatggtcccatctgggagtgatggsagacagtgacagatcatcaggaattagattctcataaggattctcacaacctagatccctcacatgcgcagttcttaataggattcatgctcttatgagactctaatgccactgctgatgtgacaggaagcagtgctcacatggtaatgtgagtgatggggagtggctataaatacacatgctttgctcactcacctttggctcacctcctactgcgcagccctattcctaacaggccactgatgggtaccagtccatggccccatggttggggatgcctgatttaaagcacatggcaaaatatgtagtctcagaatatgctcagtaaatgttaattagcatggtttacttattcacaaatatttattgagcacctaggatgtgcggagtattctgggtgcttgcaact

SEQ ID NO: 435333 - DNA, 451 bp, Homo sapiens
ttgttttcctgcaactagatggtcccatctgggagtgatgggagacagtgacagatcatcaggaattagattctcataaggattctcacaacctagatccctcacatgcgcagttcttaataggattcatgctcttatgagactctaatgccactgctgatgtgacaggaagcagtgctcacatggtaatgtgagtgatggggagtggctataaatacacatgctttgctcactcacctttggctcacctcctactgcgcagccctattcctaacaggccactgatgggtaccagtccatggccccatggttggggatgcctgatttaaagcacatggcaaaatatgtagtctcagaatatgctcagtaaatgttaattagcatggtttacttattcacaaatatttaytgagcacctaggatgtgcggagtattctgggtgcttgcaact

SEQ ID NO: 435334 - DNA, 509 bp, Homo sapiens
gtggcatgcttaactttttaagaaaatgtcaaaaaaaaaaaaaaaaaaaagaaaatgtcaaactattttctaaggtggctgtaaacatctgatgttcccaccagcaataaatgacagttagagctgttctgcatcctcaccagcactaggtattatccattttttctttttttttctacacctcattattgatcacagtattgtcagtttttaaaatttttattatttcaycaattaaaatagaaatatttattgcgggttttaaaattttaagcatattttaattaagctaatatatgcaaaaaactactgtttccatctataaacaatattcaaaattattcatgagatttttttattgatacataattgtacacatgttgggggtacatttggtattttgacacatgcatacaatatgtaatgattgaaccagagcaattgagacatccatcactctaaacattcaccccgtttatgctgggaacattctaattccactcctccag

SEQ ID NO: 435335 - DNA, 529 bp, Homo sapiens
caaaggtattctctgttctgtgctccctgcacagagttgttgcacatgttgtcctgcctggagtggtcttggagtgtctgctcagcagcatcagtaattgggtggccaaatcagtgtcattcaaggataaagtaggaaatctgccaggcgtgatgctataatcccagcactttgggaggccgaggcgggaggatggtttgagctcaagagttcaagaccagcctgggcaasagagtaagacctcatctccatgaaaaatttaaaaaattacccaagcatgatgacttgcacctgtagtcctagctacttgagaggctgaggtaggaggatcacttaagccgagcagatcaaggctgcagtgagctgtgatagtgtcactgcactccagcctgggtgacagagtgagaccctgtcacgaatgaatgaaagaaaagaaaaaaagaaaagaaaagggaaaaggaaaaagaaaagaaaagaaaagaaacccattgtggtcaatcagctttatcattaatgaagataatgattt

SEQ ID NO: 435336 - DNA, 529 bp, Homo sapiens
caaaggtattctctgttctgtgctccctgcacagagttgttgcacatgttgtcctgcctggagtggtcttggagtgtctgctcagcagcatcagtaattgggtggccaaatcagtgtcattcaaggataaagtaggaaatctgccaggcgtgatgctataatcccagcactttgggaggccgaggcgggaggatggtttgagctcaagagttcaagaccagcctgggcaagagagtaagacctcatctccatgaaaaatttaaaaaattacccaagcatgatgacttgcacctgtagtcctagctacttgagaggctgaggtrggaggatcacttaagccgagcagatcaaggctgcagtgagctgtgatagtgtcactgcactccagcctgggtgacagagtgagaccctgtcacgaatgaatgaaagaaaagaaaaaaagaaaagaaaagggaaaaggaaaaagaaaagaaaagaaaagaaacccattgtggtcaatcagctttatcattaatgaagataatgattt

SEQ ID NO: 435337 - DNA, 555 bp, Homo sapiens
atgaagtaactccactttcccctccagctgccccctacttctgatctcagcatctcaacatcctttgttgattcccttaaacttgcccatacccctctaagtaattcattaaagtctgttcatttcagccaatggggttggttcccgtttcctgcaaggaccctgatacaagaaccttcctaatgtcgggcatttcacatmatataaaatttctcaacctcaaaaggtaggtcttattgtcatctcccattttacatgaggatgctgagtctccaagagggtagagtaccagctggcagtcacaaagggaagtttgctggcagaactggaattgcacccaggtcagtctgacatctaagcctttaaaaagccttaaaaatgtgaaagggaaaaaacacacaaagcttccaaactcgcaagccacaacgtagcctcaaacgaccttatttatggtttggggattttccttgggcctaaaataagctacctggggcactgccttttaagtgcttcttccaccaagggtcatccacactcactcctgctggagggtgg

SEQ ID NO: 435338 - DNA, 584 bp, Homo sapiens
gccttatttgtctgttaagtagattaaaaacaactctaccctcccttcaggaccctctacaagctggtagcttttcactgccattctatcatatgtggagaataaattttatacctaccttattcttggtataaagataaggcaccactttttggaacacctttggcacttgctccattgtgtcattattaacaatgtgtaggatacagattggaagtgtagtatatactttgggaaccaaaatcatgtcttgatgaaccaaaaatgtttctctgtaattacaaaagcatgaactttcccttgatrtgaattcttaaaggaagtttgaaatttgcattaatgccaagaaatttttttaaaaatccaaagttccaaataactaaaaggcacacatattattttcttttaaaaattactattaatatgttattttgtcaagtaaacgcaaactctattaaaaaatcaattttataagtaatttgtgacttttaccaaatatgctattgcttagaaattaaaggatctttttctatactaaaagcatattaatttgttatagtatttttatcatgaacataaaagct

SEQ ID NO: 435339 - DNA, 579 bp, Homo sapiens
atgtaacattgccatgcaatcaagagttattcaataaatatatgttgagtgaaaaaaatgcaaacaccatttaaaaaacattttgaatagttgaacacaaactctatgaagtacattactaaattgcccatattttcagtctctaaaaagggaagtaaaatcattatatgtaaatttttacaacatatatggacaataaaagcatattttaccatatgcatggtttgaatatatttccctaactttatgtgttagaaacttaattcccaaagtaacagcattgagaagtggaacctttaagaggtgattagctcatgagggctatgcccttatgaatgaattaatgtgattatcgaaagagtgtgttagttatctcagaagtggcttcctgataaaaagatgagttctggctctctctatccctcctttatctctctctctctctttcatgaatgtgctctctcgccctrccaccttcctcatgggataaaggctctgtccagatgcaaaccccttgattttggattttccagccttcagaactgtaagaaatacatctctgttctttataaataaccc

SEQ ID NO: 435340 - DNA, 553 bp, Homo sapiens
ctctttgcttcaccccctcaaggctgcctgtgaagctrgaatgctgctcagcctggcagaggcacacgttgtaagtgtgaggaagtcaaagcccttgagagcaaccacctaacagtggggaaaagagttggtggagaagcaccaccatcttgccctccttgagtgggaacttttaaagggatgtcccacatagttcctcaggacaccctgcatagctgatttccagtaagccacagcagtagttgtcatgtcctttaatcaatttctttctctttctcatttcattctttttactccctcatttctgctttctgaaatcacttcccaaatatattatctccatccaaaatattttctctggctctgatttgggaggtcacctaatggaagatataccattttgaaaagaaagtttcctcttctgaacattgtatcccaaacaagcttaccctgaagtgctgtgcagttagttctttatcatggaaggggacagggtagtgagctgtttgcagatccttcaaagctgcagagagtttacccttatctttgaaat

SEQ ID NO: 435341 - DNA, 553 bp, Homo sapiens
ctctttgcttcaccccctcaaggctgcctgtgaagctagaatgctgctcagcctggcagaggcacacgttgtaagtgtgaggaagtcaaagcccttgagagcaaccacctaacagtggggaaaagagttggtggagaagcaccaccatcttgccctccttgagtgggaacttttaaagggatgtcccacatagttcctcaggacaccctgcatagctgatttccagtaagccacagcagtagttgtcatgtcctttaatcaatttctttctctttctcatttcattctttttactccctcatttctgctttctgaaatcacttcccaaatatattatctccatccaaaatattttctctggctctgatttgggaggtcacctaatggaagatataccattttgaaaagaaagtttcctcttctgaacrttgtatcccaaacaagcttaccctgaagtgctgtgcagttagttctttatcatggaaggggacagggtagtgagctgtttgcagatccttcaaagctgcagagagtttacccttatctttgaaat

SEQ ID NO: 435342 - DNA, 634 bp, Homo sapiens
ggttggtgtacggtgggtggtcctggagttgcctggaagcagcatgaaaaaagtaaaattggaaaaaacaaaacaaaacaaaacaacttttttccccttagagggcaccatggtgcaatcatgattcccgattctctcctgaaattttgaggaatggcccagcaagtgcacctgaagcacagatgccttgctagggtgagaaactgatggaagcagatgcaactgactcgttactggaacacactgacttagaatcctcacaaagcctacagaaagtttcatctcagtggtgtttctccctaaggtgaaaccatgcccagaaaagttctctggtcaaatattagataggatcaattatggttctaagtagcattagtctctctgcccttgggtcagtctattctcttttgcttcttggacttgagctccaacaatcttttcaacatcaggaagtratatctccagggaaatgtgagctcacagaccaaaataaataaacacctggggagataaattatctaaaggaagacaacaaactgacaatgtataccatataaagcagaattattttcttaaaaagacaacttgaaataagcaagataaacatagttagggaaataagtgacatctgtgt

SEQ ID NO: 435343 - DNA, 660 bp, Homo sapiens
ctttacttattatgtaggacaaaaatagttaggctaaataccaaacttctctgcagtacatgctggagtgacctcccacacactgcagtcatggtgtgaagactagtcttgatttctccctaacaacaagaaaaactcaagcaggtatagggctgtgtagacttcctagtctttttctcacaaatgcatcatttcatgtatgttaatcgtgtctcctctaccaggttgtcgtatcgtgagagcagggatattcatggtcctccagttattgagcatttagagcagccatccccattctttttggcaccaaggactggtttcacaaaagacaatatttccatggacttggtttggggatggtttcaggatgaaactgttccacctcagatcatcaggcattagattcttataaggagtgtccaacctggatcccttgcatrtgcagttcacaataggattcccgctcctatgagactctaatgctgctgctgatctgacaggaggcagagctcaggcaccgctaacctcctgctgcatggcccagttcctaacaggcctcggaccaggaccagtccatggctctggagttggggactgcagatttagagcatgttcaaaacatacatgttgatggtttaggttctgtggggggaaaagcgg

SEQ ID NO: 435344 - DNA, 660 bp, Homo sapiens
ctttacttattatgtaggacaaaaatagttaggctaaataccaaacttctctgcagtacatgctggagtgacctcccacacactgcagtcatggtgtgaagactagtcttgatttctccctaacaacaagaaaaactcaagcaggtatagggctgtgtagacttcctagtctttttctcacaaatgcatcatttcatgtatgttaatcgtgtctcctctaccaggttgtcgtatcgtgagagcagggatattcatggtcctccagttattgagcatttagagcagccatccccattctttttggcaccaaggactggtttcacaaaagacaatatttccatggacttggtttggggatggtttcaggatgaaactgttccacctcagatcatcaggcattagattcttataaggagtgtccaacctggatcccttgcatatgcagttcacaataggattcccgctcctatragactctaatgctgctgctgatctgacaggaggcagagctcaggcaccgctaacctcctgctgcatggcccagttcctaacaggcctcggaccaggaccagtccatggctctggagttggggactgcagatttagagcatgttcaaaacatacatgttgatggtttaggttctgtggggggaaaagcgg

SEQ ID NO: 435345 - DNA, 484 bp, Homo sapiens
aagaacaagactttcctgtatttgccccctgcaaaaacatcaatttgaaaaataatccacataagaaaatatcttcataagagctaaagaaacttggtgaaaggttatagcaactgaatgtagcacagaaataagacacattgaagaaggtagtaaggacagttttgcatcacacacatcactcccaatcccaggaaaagagagataccctctacttgggagaaggaaaaggaagtaagaactggagtttgccttggwcctaaacacaggctggaccagtaaagcagtaaagtagatccctaccaggcctagggtccaggccacccaatagaccctggtggcgggctggcccccataaactgaggccccaggcccacccttgcagaagctggtactctaggtctatgccagtatcagtctagcctctgtggaaccagatttcaggctggtttccaaggacatacattctagacccaatcctgca

SEQ ID NO: 435346 - DNA, 631 bp, Homo sapiens
  misc_feature (1)...(631): n = A,T,C or G
tgaacattacaatgaatgaaatgaaattaaaaatgcaagagaaggtcaacagcagaatcaatcaagcagacaagcaaaagaaagaaactgtgaaattgaagacaggctattggaaaatatgcactcaaagtrgaaaaaagaaaaggaatgaaaaaggactacacagtttatggggcaatatcaaaagagcaaatatttgagtgataggagttcacaaaagacaaaagagagacaaaggagtagaaacttacttaaagaaataatagcagaaaacttctcaaatctggggaaagttatatatatccaggtagaggaaggtagaaggtcttcaaaatcagatttaatccaaataatactgtgcaccaagacatactgtaatcaaactgtcaaaaatcaaagacaaagagaggattctgaaagcagctagagaaatgaagcanataaggagttataatttctcagcaaatttcttagtaagaacctcacaggccttgagagaatgggataatatagtcaaggttctgaataaaaattatacttaggacagtttactgtacttaaaaaagatgttcttcaaacctgaagtggagataaaaacttttccccaccaaaaaaagtgnagggaattcat

SEQ ID NO: 435347 - DNA, 571 bp, Homo sapiens
caatgtaatctatcaacattctgatgagatttttcacatactagccaaagcaatgtacagattcaatgtaatctaccaacattctgatgagattttaracagatatattaaaaacatcctaaaatccatgtgaaaccacaaaagaccctaaatagctaaagcaaaagaacaaagcaggaggcatcacactacctgacttcaaaatacactacaaagctatagtaacccaaacagcatatatcaccataaaaatagaccaatggaacagagtagagagtcaaaaataaattcaaactattatggtcgaaaaagattgacaagaacacacaatggaagaaaggagagtctcttcagtaaatgattttgggatatccatttacaaaagaggaatgtcacctcataccatatacaaaaattaactcaaaatgcattaagaacttaactttaagacctgaatgtatgctgaatgtatgaaactattagaagaaaacataagggataagctccaagaacttggcctgggcaacaagttttaagaaataatccctaaagcacaggcaacaattgcaaa

SEQ ID NO: 435348 - DNA, 373 bp, Homo sapiens
tttattttcctttagagttgtaatcatcaaaatatggcctgatttcccatttctctgtctgtcagagaaaattctgctttatgacagattttgagttttttgcctctaagcctctgtttcctagatttctgtggaccttggttttcaagacagagttctatctttagatattttttctcatgcrgtaatctgaatccgtgaccctttggtctcagcattctttctcccctttcgccagcatttttctcagtttgcttacttcttcaaacggtgttctcctactttaaggcaagttcttctggatatttcttagagtttcaagtggaatttcatggatattagggtccgttggtggtttttgtgttttcacctg

SEQ ID NO: 435349 - DNA, 632 bp, Homo sapiens
tatataacaaacaaccctactatgcatatgtatattttcataactttaaacaattctaaattcaaataaaccaagcatttttaatttattttgctaattatgaaaattcacttatctaatctgtaaataccttttccatctggtatataacataatgatactctttactgtcactgttaatcaagctgttgatttcagaatcatcaattcagatagcatctgggcatctttcattccattgtaggtgattgatatattcagacagatacaaagaaacctcataaaaagctgtttgacttcatggaaacactctaaataaatatgtcacataacaaagactaatcagttaatatttaaatgactaaataatttaagtcatgactatggctcattggtgacaacgggctaactttgttaacatcactataacattttaaagagcttggaaaaacrtgctattttcaccagaaagtttaaacttgtgcaaatgtccaaaaccatattagataaaacctgatcaataaccattaccttaataatacaaaatggttgctatgaatttattctaaaggaactctgaaatatttgtatatttctctatgaatttagctaatttttagctcagttactcc

SEQ ID NO: 435350 - DNA, 571 bp, Homo sapiens
agtatggcaaaataaaaacatttgtagaaaaaatagtcaaaacatacttttttttccccaaaggtattctgtttaaatgatttcaaatacaatttatgagwtattaataagcccaatgtctcttgcaaagtaactgtgctcaagaaattactagttccccacatgtatgctatccttgacaaaatatatctgagctgtacttgatgatgaagctccaaatagtatggccaaatctgttggttactttgctcttgtcagcttgactttcattctcaccactttagcaaaactactcatccaggataccaaggccttatatgtagctataaatcctggatcatttgttgttcttattcttgcttaactgcactctctcctcctggatcaactgatttcacttagctcttagattgtcttctgtctcaccagctgctcctattcagtcacctttgctgatttctccttttctccttcgtctcttaaaagggaagtggccaaattaattgcttactgtttcaaagataatatgatcaaagactaaggattaaagcacagatgctagtctgaaaag

SEQ ID NO: 435351 - DNA, 527 bp, Homo sapiens
ttatttttctttcagtttctggcatatttcacttagcataatgccctacakgttcatctgtgttgttgcaaatggcaggatttccttctattttatggttcaattatattccattatatatatatatataccacattttctttattcattcatccattgatggacacttaggctgtttccatatcactattgtaaataatgctgccatgaacagagggttgcagacctctcatagacatactgatttcatttcctttaatatatacccaggaatgggattgctggatcatatggtagctctagttttaatttttttagaaacttccatactgttttctgtaacggctattccaatttacattctcaccacagtgtgtacagggttccctttctccacaccctccccaacacttatctcttgtctttatgataaaagccatcttaacaggtgtgaggtgagatgtcattgttttgatttgcatttctctaatgattaatgatgctgagtacctttgcatatacctgtt

SEQ ID NO: 435352 - DNA, 527 bp, Homo sapiens
ttatttttctttcagtttctggcatatttcacttagcataatgccctacaggttcatctgtgttgttgcaaatggcaggatttccttctattttatggttcaattatattccattatatatatatatataccacattttctttattcattcatccattgatggacacttaggctgtttccatatcactattgtaaataatgctgccatgaacagagggttgcagacctctcatagacatactgatttcatttcctttaatatatacccaggaatgggattgctggatcatatggtagctctagttttaattttttkagaaacttccatactgttttctgtaacggctattccaatttacattctcaccacagtgtgtacagggttccctttctccacaccctccccaacacttatctcttgtctttatgataaaagccatcttaacaggtgtgaggtgagatgtcattgttttgatttgcatttctctaatgattaatgatgctgagtacctttgcatatacctgtt

SEQ ID NO: 435353 - DNA, 527 bp, Homo sapiens
ttatttttctttcagtttctggcatatttcacttagcataatgccctacaggttcatctgtgttgttgcaaatggcaggatttccttctattttatggttcaattatattccattatatatatatatataccacattttctttattcattcatccattgatggacacttaggctgtttccatatcactattgtaaataatgctgccatgaacagagggttgcagacctctcatagacatactgatttcatttcctttaatatatacccaggaatgggattgctggatcatatggtagctctagttttaatttttttagaaacttycatactgttttctgtaacggctattccaatttacattctcaccacagtgtgtacagggttccctttctccacaccctccccaacacttatctcttgtctttatgataaaagccatcttaacaggtgtgaggtgagatgtcattgttttgatttgcatttctctaatgattaatgatgctgagtacctttgcatatacctgtt

SEQ ID NO: 435354 - DNA, 527 bp, Homo sapiens
ttatttttctttcagtttctggcatatttcacttagcataatgccctacaggttcatctgtgttgttgcaaatggcaggatttccttctattttatggttcaattatattccattatatatatatatataccacattttctttattcattcatccattgatggacacttaggctgtttccatatcactattgtaaataatgctgccatgaacagagggttgcagacctctcatagacatactgatttcatttcctttaatatatacccaggaatgggattgctggatcatatggtagctctagttttaatttttttagaaacttccatactgttttctgtaacggctattscaatttacattctcaccacagtgtgtacagggttccctttctccacaccctccccaacacttatctcttgtctttatgataaaagccatcttaacaggtgtgaggtgagatgtcattgttttgatttgcatttctctaatgattaatgatgctgagtacctttgcatatacctgtt

SEQ ID NO: 435355 - DNA, 538 bp, Homo sapiens
tctgggttctctattctgttccattgtctacgtgtctgtttccatgaaagtaccatgctgttttggtaactatagccttgtagtatagtttgaagttgggcaatgtgatgcctccagatttctttttgcttagtcttgctttggctatgcagattggtcgtgctttcactatgtaggctcttttttggttccaaatgaatttttggattgttttttctagttctgtgaagaatgatgatggcattttgatgggaattgcattgaatttgtagattgcttttggcagtatggtcattttgacaatattgattctacccatccatgagcatgggatgtgttttcatttgtytgtgtcatctatgatttcttccagcagtgttttatagttttccttttagagctctttcacctccttggttaggtaaattcctaagttttttttctttgcagctattatgaaagagattgagttcttgatttttttctcagtttggttgctactggtgtataacagtgctacttatttgtgtacattgat

SEQ ID NO: 435356 - DNA, 577 bp, Homo sapiens
gtttagtggggggattgaaaggtgaagccagattgacttcctgggtcaagtggggacttggagaacttttctgtcttacaagaggattgtaaaatgcacsaatcagcactctgtaaaacacaacaatcagtgctctgtaaaactcaccaatcagtgctctgtaaaatgcaccaatcagcgctctgtaaaatgcgccaatcatcaggagtctaaaagtagccaatcgtggggaggattgaaaaaagggcaatctgataggacagaaacagaacatgggatgggacaaataatggaataaaagctggccaccacagccagaagcagcaacctgcttgggtccccttccatgttgtggaagctttgttcttttgctcttcacaataaaccttgctaccactcactccttgggtccatgccatctttaagagctgtaacactcactgcgaaggtccgtggcttcattcttgaagtcagcgagaccaggaacccactggaaggaaccaactccagacacaacggggtgcaaacattaaaatgataataaatgttttcaagtgtttgagaaatgtcttgaaga

SEQ ID NO: 435357 - DNA, 577 bp, Homo sapiens
gtttagtggggggattgaaaggtgaagccagattgacttcctgggtcaagtggggacttggagaacttttctgtcttacaagaggattgtaaaatgcacgaatcagcactctgtaaaacacaacaatcagtgctctgtaaaackcaccaatcagtgctctgtaaaatgcaccaatcagcgctctgtaaaatgcgccaatcatcaggagtctaaaagtagccaatcgtggggaggattgaaaaaagggcaatctgataggacagaaacagaacatgggatgggacaaataatggaataaaagctggccaccacagccagaagcagcaacctgcttgggtccccttccatgttgtggaagctttgttcttttgctcttcacaataaaccttgctaccactcactccttgggtccatgccatctttaagagctgtaacactcactgcgaaggtccgtggcttcattcttgaagtcagcgagaccaggaacccactggaaggaaccaactccagacacaacggggtgcaaacattaaaatgataataaatgttttcaagtgtttgagaaatgtcttgaaga

SEQ ID NO: 435358 - DNA, 572 bp, Homo sapiens
cctcatcacgtctttgcttattaactcggttcagaactcagttcctcctggaaggggctgtattagaacctatcctttctaccactgcacatatagcattcaacattataattctcagtttaccttcagtctcctccattattagactgtgaattcttttagggttagtactgagtcatatttatcttagaaacccaagtgccatgaatagtgttytacatactaaaggtttaattgatagtttttgatactgaactagaaaagggagcttgaggaaggtgtccaaggaatgtcctcaaagtatctagatggtttctggaatcagggagaaagaatgtttcacagttttgtcctcagacgagataggcaaataggaatccactgaacctaaaatcattaagtcactcaaataaaaaaaattccacacccacctgaggctcaaagcgaggtgcttgtttttctttggctgtcttttctttctcagaagacttttctttgcctttccttgttgttttggaagttactgaagatttttgtccctcactaatagtgtgggagtctgggcttcctaa

SEQ ID NO: 435359 - DNA, 497 bp, Homo sapiens
cactggcttctggtctccctagatgttgatgtaaaaatttgctattaatattaccgagaatcacttgtatgtgatgagccacttctccctttctgcttttaagattccttgctttagagagtttaattatgaggtgtctagctctgggtctctttgaatttttcccatgtggagtttaacttcttgaatgtgccagttaatgtttctcatcaaatctggacattttcagccattattagttcaaatagcctttctgccactttctctttttcttctccctctggagttcccattatgtacatgctrgtatgtgtgatggtgtcccacaagtctctgaagatctcttcctttttcttcattctatatcctcagactgcataatctcagactaccattttgtggagaaagctctgcacaatcagtagttttgattcagcttttaagtggagtcttccaggaaatcatcaaacaagtcaaataatgataagtctttggga

SEQ ID NO: 435360 - DNA, 615 bp, Homo sapiens
tgctacagttttcccttttgtcagagaagtgctgcaaagggatgggctgaagggaagaatgccaatgacttaggattcaaagaagctgaaggtaccctcacaagagtggttctcaaactttagcctgtgtcagaatcacctgaagggcttaccatagaacagatttctgggcaccaaccctaaagtttctgatttgctaggtctgtgatagggcctcaaaatgtacatttttcacaagtttccagatggtgctraggcagctgatccaaggatcacactttgagaaccactggtttacttttagaagagtataattacctttccccaacatgaaggacatgagccttatgcttttttaacctcttctaacaattaaatatggaagtggtgaggggaaaatatttaaataatttatttattatttaaaataatatttattgaatctttactgtgtttccttctcttttaagtctccagcatcccagcagggtatattcaaagaagttatataatttactcaagtctcccaactgataagagttgaatctgtattctcaaatacaagttcaaagaacctgttagtccctttcaaaactggagtctcatgtaaatcac

SEQ ID NO: 435361 - DNA, 615 bp, Homo sapiens
tgctacagttttcccttttgtcagagaagtgctgcaaagggatgggctgaagggaagaatgccaatgacttaggattcaaagaagctgaaggtaccctcacaagagtggttctcaaactttagcctgtgtcagaatcacctgaagggcttaccatagaacagatttctgggcaccaaccctaaagtttctgatttgctaggtctgtgatagggcctcaaaatgtacatttttcacaagtttccagatggtgctgaggcagctgatccaaggatcacactttgagaaccactggtttacttttagaagagtataattacctttccccaacatgaaggacatgagccttatgcttttttaacctcttctaacaattaaatatggaagtggtgaggggaaaatatttaaataatttatttattatttaaaataatatttattgaatctttactgtgtttccttctcttttaagtctccagcatcccagcagggtatattcaragaagttatataatttactcaagtctcccaactgataagagttgaatctgtattctcaaatacaagttcaaagaacctgttagtccctttcaaaactggagtctcatgtaaatcac

SEQ ID NO: 435362 - DNA, 645 bp, Homo sapiens
attcaaagaagttatataatttactcaagtctcccaactgataagagttgaatctgtattctcaaatacaagttcaaagaacctgttagtccctttcaaaactggagtctcatgtaaatcaccccattagcaatgtaaaatagtaattgtaaataacccatatttataaattacttggtgcccatttattagctactttcaaattgggggacaaaccaccctaccagactgcaaagggactgtgagcgctctataggagtggaaactgtcccttctgccaacaatctcagctgctcagaagtcttgctgtggggaaaatcctttggtccaatagtcaaatgacctagaggtgaattctggctcagctgctaaataggttaacttttgtaggtttattacatcctttgagtctaagtttccttctctgtgtaatggagatactagcaccatgcccagagagcttaaaataatcaatatagagcatttaaaataggatcatatctggtatcayacacccactgggttttttaaatgcttaacaaatgtcagctgaaattgaatctcaagctgccccatgaagcatttctggggctttcttgtcttactacacatagtttttagtgtttgagtaatacatttaggtgt

SEQ ID NO: 435363 - DNA, 598 bp, Homo sapiens
aattacatattgtatttttcatataaattaaatgttgagtttaaataagtggggcaacattgacttcaggatgaatatcaaatttaacttaggtcaccagtgtactaataaaaaacaacaacagaaaacccttaaccaatttcttcttgatataaaattttatattttaaaagtaagctggctgagcatggtggctcatgcctgtaatcccagcaacttgggaaggccgagatgagtggattgcttgaggctaggaatttgagatcagcctcaccaaaatggttaaaccccatctctactgaaaatacaaaaattagccaggcatggtggcgcaygtctgtaatcccagctacttgggagggtgaggcacgagaatcccttcagcccaggaggaggaggttgcaaaaaaaccaaagtaagctaagtggataaattaaagacattagtaactgaatttttctatatatgtaatttttctatgtatggagtaactgatgtgtgaaatacatcatgcacttcaaatcagagcaggtagattttaagttgtatatataattgatacatagcagctgacatatagacatgctttaatcaaatt

SEQ ID NO: 435364 - DNA, 575 bp, Homo sapiens
ggatctgggtttataatttataattgctataaacaacagtagcatgactattttgagcttaytgagacaggtataacacgctattataatacagaaatcagaattataaagagttacaggcaactcatgaaaaagcccacactgtccaaaacagaaagcaaaacaaaacaaatcagaactggctgtcattctctgatccattgaaattcttaatcctcagaaatgtaatgtaaaatctaccagtcctataacttgaagaacaaagtggaaatgagaatagctttggtgaacacacaagctcatacaaaactgtgctgtttctttattctttgatttctataattgtgaatattttatttgcacttaaatctttagcataaaatatttaattccactggtattaggcatatactctatctacttctttgcagtaggggaacacaaaattaccacatgatttgtaccatccattatttcaaacaggtttctgttaattgatagagaaaaagaagacagagaatggtgggggccaggggccaggggcgggggcacggtatgagcaaagagattttgct

SEQ ID NO: 435365 - DNA, 591 bp, Homo sapiens
gcctggcaataacagttttctcttaacttctgtacacacaaacctttttaagctctttcttgatcaggtccaggcagataatagaagcaagcaaacgcctgaacagagttgttggcaattaataaataagggtaataataataggaatagcttacatgtatccttccatttactcattcagctaatattgtggggtgcttactgttcatatgggatctaactagggataatgcaagggacgaaacaggtgaaaatggacaaaactcctcattcttcaggggcttgcattctaatagaggaatataaataatagataaaatttactstttcttagaggacgaaaaggactaagagtttacgtcttatcataagcgtgttgtatgtatactaaaaattctgaatgatgacaaagcccacttcggtggtggctaccatcaagtgtttgaactcaggttaatgggacccaggaagaaatggaggcttttacattttatgttatacccttttgtattgcatgggtttattttattttaaaaataacatgcatatattattttatgattaggcaatctagcttaaatttgaaagaga

SEQ ID NO: 435366 - DNA, 590 bp, Homo sapiens
cctagtttgctaagagcacattttagaaatccataaataggtgttaaactttgtcaaatgtttcaggattatatgattgttctcatctagtgtattactgtagtgactaatactgatagattttccaatggtaaaagatttctgaatttctgagaagaattctgtctgattgcttaatacactgctagaattggatatctattatgttatttgcaatttatcacctatgtttataaatacattttattcctttttgtgttacctttatctggttttgaaatcaggattacattaatttcttaaaaaggattgaaaagttatattgtttgttttccgtaagaaattactttttaaaagtctattggacctatcctataaagccaaaagggggcctatggttttttggaaagggaagacttagaggactttgaattatcrtttcaattttattattctttactgttttattcagattttctattttcttgtgaatcaactctgcgatttctcctctcccccaccctcaggaagttatgtgtttccccctcacccccaggtttaatttagtttaatttaatttaatttaattt

SEQ ID NO: 435367 - DNA, 638 bp, Homo sapiens
aaagtgtgggtagctggaggtgaggttgttgcaataagttggggctatatcatgaagtccatgaatgccatgctcaggaatacaaactctgcctttgagtcacagaagacaatgattttggggggcagagggctgkgggtggggagaagtggcattatcaaatatgcatttttaaacatccctttgggttcattacgaaaagtaatgaaaaataggctcgttccaatgaaaagtagcttggaccagaaagactggtggcagaaagacaagctaggggaccgctgttgagaaggatccaaactagagctgcgtcagaaaagagaggcagattcaagagaggttaaagaagtggaataatcagggcttagttatggaggtgtgatggagtccatgacgagggtgaaaggagtcactgacatactatatacaaaagggatatcaaatttcagagtgagataatgagatgctactggtgagcaggattggttccttctcagaacagtgttcagacaggttataggaagtgtgatattatagtaaataaataagctttaggataagatagatgagtgcaaattgttctgtcatttagtagctgtgttagttgggaaaactactcatcatctttgagcttccag

SEQ ID NO: 435368 - DNA, 556 bp, Homo sapiens
gtatacatgtgtatatgtatacagatatacatatgtacatatatatacctgtacatacatatacacacatatacacacacacacacayatatatacacacatatatatccaacaatttgattgctggattatatggtaactcaattttgagattttttgtggaacctccaagttgttatctatggtggttgtactaatttacattcctaccaagagtgtacaaaggtttcctttttctccacatccttgccagcatttgttacttcctgtcttttacataaaagccattttaatgagataagatgatatctccttgtagttttgatttgcgtttatatgatgatcagtgacattaagcaccttttcatatacccatttgtcttcttttgagaaatgtctgttcattattagactttttttctacacagtagtttgagctccttatataccctgactattaatcccttgtcaaatgcatagtttgcagatattttctcccattctgtaggttgtctctttgctttgttgattgtttcctttgctgtgcagaagcttt

SEQ ID NO: 435369 - DNA, 631 bp, Homo sapiens
aggatgattccaaagttcttgaccttagcaactggatgactgctgctgccaattacttagatggaggagaccagagtaggagcaggttaagaaagagtcaggcatcaagttatgttttgcacagtgtaaactgagatgcccatgagtcatccaaggagaactgttgagcaggaaatttgatatgacaaaagaggcaagatatcaatcttagataaatttggaaatcatctttagcatttaaatgatatgtaaaaccatgaaatttaatgagatcacacaggaaaagaacatgatcagagaacaggactaagaaaaaagctctgggaccttctaacatgtaaagttgggaagagaaggaaaaccaggagagaagactgagatggattatctggtgagattaaaggaaaatctggtatcctgagagccaggtgaataaagtgtttcaagaaggaggagttagtcaactgtgtcagatgctactcacaaactgagtatgatgagaacaatgttgtagctatttggtttggcctcatggagattattggcaaacctgacaaaaatggtcttagtggartaggagggcagaggcacatttagaatgggtgtagtctccacactagcaattattcca

SEQ ID NO: 435370 - DNA, 556 bp, Homo sapiens
gtatacatgtgtatatgtatacagatatacatatgtacatatatatacctgtacatacatatacacacatatacacacacacacacacatatatacacacatatatatccaacaatttgattgctggattatatggtaactcaattttgagattttttgtggaacctccaagttgttatctatggtggttgtactaatttacattcctaccaagagtgtacaaaggtttcctttttctccacatccttgccagcatttgttacttcctgtcttttacataaaagccattttaatgagataagatgatatctccttgtagttttgatttgcgtttatatgatgatcagtgacattaagcrccttttcatatacccatttgtcttcttttgagaaatgtctgttcattattagactttttttctacacagtagtttgagctccttatataccctgactattaatcccttgtcaaatgcatagtttgcagatattttctcccattctgtaggttgtctctttgctttgttgattgtttcctttgctgtgcagaagcttt

SEQ ID NO: 435371 - DNA, 563 bp, Homo sapiens
ggttactggcaacaatacgtactttcagagccacctcaattgggatcatccatttttaacaaagaaatgatataaattcacaaatcgaaattgtgagggtcaaataataatctctcaattttgaaataakgaaacaagctaagtcctttattccccaatttttttaaaaatgccctcatcatttagtctgattgttatgatcccagtcactgctagttttgttcacatgatattgtaattcacccttcaagttcctttctagcaatctgatcattttgcaaaattctattctattactaagtatctaacatctagaaataaaaggttgagataaaatctagaaacagatttattctgtttattttggtacaaccacccaactataaagcatgtctttctccacaataatgccaaatgcattcatttgaaattttaatggttaaaattctcctctgataaaactgctcaggttcaagtaaaaaaagagggcactggggagaaacaaacacaacgaagtccaaaatgtgcaagccttagctgtaagatctgaaaggtgataatca

SEQ ID NO: 435372 - DNA, 618 bp, Homo sapiens
ccataaacagtgattcctctaatggatatgggcagagtatattgaaaacctggaaagggttcaccattgtagatgccattaagaacatttgtgattcatgggaacatgagcagttcaatgaattctattacactatgagtgcttttggctagattatctagctttttgaccttggacacattatttaatgtagagcctgatctccatctataaaatgggaatcacagtagtacccacctcatatgaccrttgtgaggattagatgacattttatatggaaaatgtctgcagtaaaccgtccataaatggaaggagttttttaaaaaatgttgttggtataatcaccattatgatctttatgattctatgttttaatttcattttataatttatcctgtgattttttttacctcagcatcaccctttataggatataaccacatttcttctcaatacctataccaacagcactaatcattaaagaaatgcaagccaaaaccacaatgagatacacgtcacacttatttgaatggctgttattaaatagacaaaagataacaagtgtttttgagagtgtggagaaacaggaaaccttctatacagttggtaggaaggtag

SEQ ID NO: 435373 - DNA, 586 bp, Homo sapiens
tatgatctaatggtaataaacttagggggatcttagcaaggcttgtttgttcagattcttcttggtgtttctgtgtcttcgaggatagggatgttcttttccttcagttatagggagggtacctctggaatgacctacttcagaggaaggtcagagaattcttttatggcctgctccaggggagaaggtagagaaaccttcttgcttctgctgtttccacaaacgccaaagtgccatattttgggatagcaggtcytgaactccatcaaaactaaaaagaaatcaatgcttacacttattcgaaccccatctcattccaaaagtatatatggtagcatattttatattgcacataaaatataaggcatcatacattataatcaggtcaagtacaaaaggtaaaacaaaggtagagtcagaaaatgatgcccagaatgaggttaagacaaatatttattgacaaattcttgtacacttgcaacagatggccctgcacactggggtataagcttcatagcagctagtgccatcctagggaaaagcataattcaataaagaagcacagggaggcaaaagcagcaggact

SEQ ID NO: 435374 - DNA, 543 bp, Homo sapiens
ggtacatgtgatattttgacatattcatataatgtataataatcaaatcaaggtawttgggatatctatcacctaaaacatttctcttttctctatgctgggttgtccccactctttatccatttccacctggtggatgtaatattggtgatgaggctttaaggaatgacagagtcataatgtggaaggaatctaaattctggaatcaccatgtagaagagaactgccactaaccagcaacatttgcctaagactgttgggtggtgagaataaacttctattgtttttgagttatatgcattgggtctatttattacaatatctttacctatattctattatatttaaactttgttgtggattggtgtggccgtatgatacagttgtgaaccatgatatgtacgtataatttattggaagaagtttctacaaaatctcttgaaacagagataaactagataggaaaagtaccccattccctaatattttaaaaagtatttcctacctttttgaatgttgatgcaatttctagaccatggcagt

SEQ ID NO: 435375 - DNA, 542 bp, Homo sapiens
tataagaagctcaaacaactctattgcaaaaaatctattaataataatacaattaaaaaatgggcaaaatatctgaatagacatttctgaaaagaagacatacaaatggtaaacaggtatgtgaaaaaatgctcaacattattgatcctcagagaaacacaaatcaaaattacaatgggataccatctcatccccagttaaaatggcttttatccaaatgacaggcaataacaaatgctgatggggatgtggagaaaggggaaccgttgaacatttttggtgggaatgtaaattaatacaaccgctacagagaagagtttggagcttcctcaaaaaactaaaaatagakctacaggctactatatgatcaagcaatcctactcgtagctatattcccaaaagaaaggaaatcattgtatcaagagatgtctgcactctcatgtttcttacagcactattcactatagccaagatttggaagcaacctaagtgtccatcaacatatgaacagataaatatatcatagtacatatacacaatag

SEQ ID NO: 435376 - DNA, 612 bp, Homo sapiens
caacatttatagcttctattttccagatttgtgcgtcaaatggcacctgggcccacttgggccatgcctggggtgactgaggarcactggaccagaatgtgtggtgcagaaactgcaggcacccctaggcagcaagcttcaaggttctgagtgtgcccgaggcctctcttttgacatatttacttccccttggccttggcactctcggtttgtaatggcaggggtggcactggtaatctccaaaatacccttcagattattctaccattgtcctgataaatagcctctggcttcattctcttcataataacctttctatcaaacagttgcttagccaaacacttagcttccttttttgaaaatgttcttttattgtctaccacacatccaggctgagaacctttaaatccccaagttcgatttctcttttaattataagttgtctttaaatcatttctttctcctcacctcttactatgtgcagttacaagaagccacatagcaagcacattgaaggctttgctgcttacatatttcctctgccagataccctagtttatcattttgtctgccactttataacaagggtaacctttactccagtttcgaata

SEQ ID NO: 435377 - DNA, 484 bp, Homo sapiens
tttgtgggaagaactttcagacacagaggtagcattaagcaaagtagcaaagtcaagcaccatcatagtgaatacaagtaagtaaaggggaataggaaatgttggagcataaagtataagtgaggaaatgagactgaaaaggtaggcaattatttgatttcttgtttgggccaaagattttatccctgacacatcataagaaagaaactttggtattattaatcctgttgtaagaatggatttgcagtgattattaattaatcctgttgtaagaatggatttactgtacttcrttactaacaagttttgtgacaatagcacctctggggtagacaagctgtgcaaaatttagagcatcagagtcagtcagattgctatgcttggagttcagattaccacagttcaaatcaattgaaaaaaataaaattaagcctaaaagaatgtaaagatggtttatgtgctatttgaaattaatgtcttgtac

SEQ ID NO: 435378 - DNA, 659 bp, Homo sapiens
tgttactattattattgtttgatggtgacacaaatttgatttctgtaccactccaagcatgtatattggttgtgaaggctgtttttaccaatatgtatctacaataaaatgttctaaattaaatcgttggaatataattttggcaattttaaaaaaatactgtaaataaaaatgtgcatrtgctgcattttacaatggaaataaaatatgttttttcagtataatatctactaatctctaatgacctaaaattgtactcactactgatttgttataaaattgaggacaggaatagttccatatacatgcctgtttctatgaaataaagtcctacaaatgcatttaatgctaaataatagcaaaatagctacacatagggtattagagctttggggttcatttaaatgaatacatagatttgaatgaaagtcatgtttgctgtttacttgggaaataaatgaacaggtggctctcatgtcttccatacatccatatatgtcttagcactgagctaattattctaaaatatacatctttatggttgaattccaggtgatttctaaatttgacatttacgtgtttaattatttatcatcaccttaagattaaagtttttttccactttgttcagtaaagaacattgctgatatagatgtaca

SEQ ID NO: 435379 - DNA, 659 bp, Homo sapiens
tgttactattattattgtttgatggtgacacaaatttgatttctgtaccactccaagcatgtatattggttgtgaaggctgtttttaccaatatgtatctacaataaaatgttctaaattaaatcgttggaatataattttggcaattttaaaaaaatactgtaaataaaaatgtgcatatgctgcattttacaatggaaataaaatatgttttttcagtataatatctactaatctctaatgacctaaaattgtactcactactgatttgttataaaattgaggacaggaatagttccatatacatgcctgtttctatgaaataaagtcctacaaatgcatttaatgctaaataatagcaaaatagctacacatagggtattagagctttggggttcatttaaatgaatacatrgatttgaatgaaagtcatgtttgctgtttacttgggaaataaatgaacaggtggctctcatgtcttccatacatccatatatgtcttagcactgagctaattattctaaaatatacatctttatggttgaattccaggtgatttctaaatttgacatttacgtgtttaattatttatcatcaccttaagattaaagtttttttccactttgttcagtaaagaacattgctgatatagatgtaca

SEQ ID NO: 435380 - DNA, 414 bp, Homo sapiens
gtacttgagaaaatacttctatagctatgagataactgataaactcagaaaattttttttttaaatggaggatattttcaatggtgtttttgtttttcttttattattttgaaatgtataaatattttggctcaaatattttcacaggcactttctcaaaaaatcagtcataccttttctcaatctcattgtatttcacttcattagagagatgccatacctgcaaatgttttcaagataagcctttctctactgtggtactctacttactcaaattgaagttcaactttattttggtgctataacaattgaaaaccttaatttaagattcttaaatgatttttaacaaagtgaaarcaatatttaatgaactaattgacaataagaaaatctatagaactgtgtaacacttag

SEQ ID NO: 435381 - DNA, 569 bp, Homo sapiens
ctgttattttgactgagcgcagtggctcacgcctgtaatcccagcactctgggatgccaaggcgggtggatccctgaggtcaggagtttgagaccaccctggctaacatggtgaaaccctgtctctactaaaaatacaaaaattagccaggtatggtggtgcatgcctgtaatttcagctactcagaagactgaagcctgggcaacagaacaagactccatagaaaaaaaaaaaaaaagctgtattttgaaaactcaaactttcctcaaatgtatttactttttacttttgattcaaggggtatatgtgcaagttcattacgtwaatatattgtgtgattctgaggtctggaattctattgaagccaccacccaaatagtgaacatagtacacaataggtagtttttcaacattggcacccctctctccgtcccttcttttgaagttttccagtgtctattgttatcatctttatgttcatgtgtacccagtctttagctcttacttacaggtgagaacatatgttatttagttttctaaatactagcttaatcacctccagtatagtg

SEQ ID NO: 435382 - DNA, 572 bp, Homo sapiens
tgtcactctttttatttctttcaaatatttttttttaatttctgcattacttttgttgtttactcaaaggtcattctgtagcaaattgtttagtttccatgtattttttggttttgagagctcacctaggtattaattttcattattattccactattttgagaagatgcttggtttgattttgatattcttaaatttattgagacttgctgtatgacccagcatgtggtcaacattagattatgatccrtgtgcagatgagaagaatgtatattctgtggttaagtggattattctgtagatgtattagtttcaatgggtcaggtggtaaatttaagtccagaacttcttttttagtattttgcctcaataatctgtctaatgccttcattgtggtgttgaagtcccccactgtttgtgtgtggctaagtattttcttaggtttagcagtaattgttttataaatctgggtgctccaatgtttgtctcatttatatttaaatagttaaatcttctttttgaattgaaccctgtatcattttgtcttgcctttgtcctttttaactgttgtt

SEQ ID NO: 435383 - DNA, 535 bp, Homo sapiens
gtagtgatgcaatataaaacaaatctgattaaatgagatcaccaatattggastgttatatgaacaatatatattttattgtaaaaagccactgataatttcaggtttgtttgttaaagcatattgtgtaaaaagtaaaatcgatccatacctagtatcattcatgaaatgtaatttcagatggattaaggagataaaggcaaataataaaactataaaatatttagaaataaatataaaagaataatcctgtatgacatcaagtaagaaatgtattttttaaacaagatatttaaagtgcagatcagaaaggaaaataaacacacaaagtaaaaaaaatgtcttcccaatcaaaaacactataggcacttccagtctagataaaatggccatgtatctatttttacctgctcctttatgctaaacacaacagaaaactctagaaatagcataagagacagccaaaagaaaattctgcaaaacgttaaataaaaatattatttagaatctcatgactggaagaacagtacagctg

SEQ ID NO: 435384 - DNA, 535 bp, Homo sapiens
gtagtgatgcaatataaaacaaatctgattaaatgagatcaccaatattggactgttatatgaacaatatatattttattgtaaaaagccactgataatttcaggtttgtttgttaaagcatattgtgtaaaaagtaaaatcgatccatacctagtatcattcatgaaatgtaatttcagatggattaaggagataaaggcaaatartaaaactataaaatatttagaaataaatataaaagaataatcctgtatgacatcaagtaagaaatgtattttttaaacaagatatttaaagtgcagatcagaaaggaaaataaacacacaaagtaaaaaaaatgtcttcccaatcaaaaacactataggcacttccagtctagataaaatggccatgtatctatttttacctgctcctttatgctaaacacaacagaaaactctagaaatagcataagagacagccaaaagaaaattctgcaaaacgttaaataaaaatattatttagaatctcatgactggaagaacagtacagctg

SEQ ID NO: 435385 - DNA, 564 bp, Homo sapiens
aatataaaacaaatctgattaaatgagatcaccaatattggactgttatatgaacaatatatattttattgtaaaaagccactgataatttcaggtttgtttgttaaagcatattgtgtaaaaagtaaaatcgatccatacctagtatcattcatgaaatgtaatttcagatggattaaggagataaaggcaaataataaaactataaaatatttagaaataaatataaaagaataatcctgtatgacatcaagtaagaaatgtattttttaaacaagatatttaaagtgcagatcagaaaggaaaataaacacacaaagtaaaaaaaatgtcttcccaatcaaaaacactatargcacttccagtctagataaaatggccatgtatctatttttacctgctcctttatgctaaacacaacagaaaactctagaaatagcataagagacagccaaaagaaaattctgcaaaacgttaaataaaaatattatttagaatctcatgactggaagaacagtacagctgcagggtgtaatgcatctcttcactcaacaaaggaagaca

SEQ ID NO: 435386 - DNA, 602 bp, Homo sapiens
agaagagaaatttaaatccaagtcttccaactcttgctttgattccataattcattttgatatttcttcattttggttcaaaactctagatcctcaaatgactactgaatataatcaaaatggggaaaggagactaattgccaaaatgactaattaattcatcctttaaggttagctgtgtccccagttactcaataggcagcagtaactaaggatgttctgaccttttaaggaagacacctaaaacatgaactacagatgaaaggaaagcacagtccctaatatgctgttccaatgctcaaagagaatgtcaaaaggcctgtgaaaactaaatgccttcttctataatgcagttaattcaacacttctgagtagacagacacacatttgaaaagcgtgttttatctgtgcttwtgttacgaatctctgaagaataatttatttaacagaactattttagtccaaatctcacctgtgactgttggaaagaattacagttgttgcaaacactgattgatattgagaatgaatgatttgaattgataacagagaaaagatgaaatatcctcggaataccagctacctgtatgggtacttgtaaa

SEQ ID NO: 435387 - DNA, 574 bp, Homo sapiens
tatagctcatcttttattctactctaagacctaggagattgttttccaatcaatttaatgtgtgtgttatactttgaggatctcccatttattgggtctacttccttgggtcactaaaattggtcagttctcttgaacaggatatgagtgaccttccaactgatgtattctcttgcccacacacatagctaaaagtaatactaaacatactgttaagaaatgatgaaaaacacagtttaataccaatatttgaatactagtaaattaaattttcttcaatatttccttcactattttcatacctttttaatcttatgattttattctatacaatatttggattaatgtgccacaccaacactatcttccccctcccctgactggaaagtcacttcagggttaggaccatttaattttgtttaccagagacaggaggaagagcaagatggcagaataaatggcttcacygattgttaaccccacaaagacaccaagttaacaactatctacccagaaaaaaacaccttaataagaaccaaaaatcagagcagaaaggaaaaccaaaccaaactca

SEQ ID NO: 435388 - DNA, 383 bp, Homo sapiens
tttgtgatgatataaattagtagagccactatggaaaatagtatggatgttcctcaagaaaactaaaaataaaactactacatgtcccagcattcccagtactgagtatatatccaaaagaaaggaaattaatatatcaaagaaatatcagcacttcagtgtttattgcactattcacartagcctagatatggaaataatcttagtgttcatcaacattcaagtggatgaaggaaatgtggtctataattgcagcaacatggatggaatttgaagacattatgtaaagtgaaatgagtcaggcacagataaacgaacattgcatgttctcactcatatgtgggacctaaaaagggtgatcttatgaaggtagagagtaaaat

SEQ ID NO: 435389 - DNA, 586 bp, Homo sapiens
aaggaaacaaaactagaaaataatagagaaggcagatttttcactcaggtctaactccaaatgttgaggttttcgtctactttcccacattggctacaaggaagggagaagaaagtagttgactttgagaaagaaaaattagtgccagacccctaagttcaactgtgaccttcaggctaatgagggacatgaaaggtgtgaaaagaaggtggatggtttcttaatgcctcatgtttgcagtctcctggaagtccccactaacagccaggaagatgatgaattcccatcatgcagtgccctccaccatgaattctgatggcatgaaggatgggaggggcaatgctttcaggttatactttgatagctttcaatgactgcagtgcccaagtcacagtcctctgtctacactagtggaagtatggccctgagtgatagtcaagccrtggtaaataatcttttcaagctatgtacattcttatatactcaggctcaaaagaaagaccacattctgcgagccaagagccctgggccctagtccccactctactacctccctgggcattagtttctcctttaatcaacagag

SEQ ID NO: 435390 - DNA, 493 bp, Homo sapiens
cccaaaacacaggacactctctcttacagctcttaataagagggttttctttctgggagaagcaggatgtcagcatttctcatccttaatctcaagtgagtgcagtcaagaagtaggggctcccttcttccacccagctccctctcatgggattgaggctctagctttcagttaacattctgataatattagggccctgattgcctttgtcctagctcatgaagtgagattttcatacccaagagacaatccgagaagaccttaggctgctgccacccaccaccattaagagctcagctactgaagaagaaatcagtgaatagctttccattgtctccaagcccagttccagatccctaaatcaaaggtttttcctggggagagatttaagctrtaaaataaatagctcttaatctcttttcaaaggaactgacataatttgcaaaaggttgtgaataaattcaagcttttgatcacttttaagaacagtgga

SEQ ID NO: 435391 - DNA, 619 bp, Homo sapiens
cgtacaagagcccttttgtatgttgttatgcttacataccagcacagcccacacttatcaataataatgattaataatgatgattaaactagtttattgttgggtccttaaaagrtctcagtttagataggatgcctgtgttaactgtctacatacactttgaaacaggtccatttttaatgttcagtgtgaatagagaggtatgtaagtgtgtgttttgtatatatgtgtgttgtgtgtatgtattgtgtatgtgtgtgtgttgtatgtggcttttcttagtctctctgcactccatcataggtgtgagggctggcttgggtgtgagaattgggaaaaaaactattatttgccggtgtcatcatggaacagcaatcaccacttcaccagtctatggagggcccccatcatggggcaagatagtgtagaccctgggcaaggagctccactgtgaccctcttatcctctgatttggaattttcaagtgatttttttttcacctgatttatctcttccctaccccttttaatttccagtaggcttgaaaatccataaaacctccatttttccctttgtaacctccagatgcttgtgtttcactctcaggcagtgtttttag

SEQ ID NO: 435392 - DNA, 619 bp, Homo sapiens
cgtacaagagcccttttgtatgttgttatgcttacataccagcacagcccacacttatcaataataatgattaataatgatgattaaactagtttattgttgggtccttaaaaggtctcagtttagataggatgcctgtgttaactgtctacatacactttgaaacaggtccatttttaatgttcagtgtgaatagagaggtatgtaagtgtgtgttttgtatatatgtgtgttgtgtgtatgtattgtgtatgtgtgtgtgttgtatgtggcttttcttagtctctctgcactccatcataggtgtgagggctggcttgggtgtgagaattgggaaaaaaactattatttgccrgtgtcatcatggaacagcaatcaccacttcaccagtctatggagggcccccatcatggggcaagatagtgtagaccctgggcaaggagctccactgtgaccctcttatcctctgatttggaattttcaagtgatttttttttcacctgatttatctcttccctaccccttttaatttccagtaggcttgaaaatccataaaacctccatttttccctttgtaacctccagatgcttgtgtttcactctcaggcagtgtttttag

SEQ ID NO: 435393 - DNA, 442 bp, Homo sapiens
aaccctatccctactaagaatacaaaattagctgcgcatggtggygcatgcctataatcccagctactcgggaggctgaggcaagaaaatcacttgaacccagaggcagaggttgcgatgagccgaaatcacgccattgcactccggcctgggcaacaagagcaaaactccatctcaaaaaaaaaaaaaaaagaaaaattatgttcctgtatccctactcccttttgggtcattccgggatagtcccccatgagtctaggcttttacactagtagccttgagggtgtcatcttttgggctagcctcccaaaaatgagcctcccttggttcccatgtagcatgggtgctgagttgggagacagagattttgccatcagatcagctgtggcctggcaaagtggctaccagcagaagctagaagcaggccaggagtccaggtgga

SEQ ID NO: 435394 - DNA, 524 bp, Homo sapiens
ttaccacatgacctttccagacaggagcagggctggagctttggggacaccacagaaagtctgttttgttgttgtcgggggtgcagggtggtgagcagagaacatctttgttttagagatgagggaacgtaggcgcagaaaagttagccggttcaccccagacactgagcaagtgccaaacttgagtcagtggacactaaatctttataaggggagaaaaatgctctggaaccctggtcctgacaaaaatcatttttattagaatgtcacttaaatatgtaaaaacctaaacytaagtgtgacctctgtagttgcaaagcttatgcaactgtaaactcaaaacatattcgcacatcaaatacaaatgaaactacaaagctaattaaattcaaattaacaaaaatactgtaatagagggcattttgctcaaactaaatcaagttgatttaattaatttggatttatttaatgtttaatttaattgtataaatatactttcatggtttgttctatattaaatattt

SEQ ID NO: 435395 - DNA, 617 bp, Homo sapiens
tgtttccgttgtttagtttggtttctattgttttgttttttagaacactcaaaaatatttttcacatttggaattggtatttgaagcatattttccatagaagtacacttcccaaatacggaaacgtacttcccaaatgcagaagtatccataaaatgttaaaatctgcattttgagggtatttggtcagtgttgtggggaagaacttcattttcctaaaatgtttatgcctgtgcatgatgtgtgtgtttgtgtgtatgtatgtatgcatgcatgagtgtgtgcccactggtacacctgtatattacagtcaggaggagggagactaagtcaagaagatataagaagaaacagtgaggatgatgcccagatccacgcctctccagctgacccctatgagatcaggccaagttttgtagaagttgtcaatcctgagtgatttgcgtttatctataaggaaaagacacacacaaggcaacaaataattggttccagttgcacaaaatgtagactaattgtagataagaaaacaataygcacaaaatgtgtttaacagccatgcttgtaacagagaaaaataacacatctaccaagagggaactggttaaagttcatcc

SEQ ID NO: 435396 - DNA, 595 bp, Homo sapiens
  misc_feature (1)...(595): n = A,T,C or G
ccctctggcttcctcccacatcccactgcctgacagaacgtacaacatggaatagatctgtcaccaagggcacatacctgtggtcacataaacacataaacactttcactagcagccacgttctcaagcgctggctctgacaggcagccaccaggcagccaggggagacaccaatgaaaatccactgtggcgctgcctccactgtccactccagcaganaaggggttccagatgtgtcctctgctgaacctgtaaacaaagtcagactgtcataaatcggaccccaagcacaggtcgcctgccttcacaatctctctggacactgtaaaaaggctctgcrtggctatgtacagtttcagcacaaaggtgacaatttattttgagtttacaggtcctgttttcgttttgttgcttggaaataacgttgcctctgtgtgtgtgtgtgtgcatgcacatgcatgtgcatgcatacataaagggacagggtaacaaaagacataagggaatagaacaggtaattttgtttttgttacagaaaggtttctggtattttggacaaactataatgataatggcatcctacatcaacccagga

SEQ ID NO: 435397 - DNA, 551 bp, Homo sapiens
atcaggaacctccaacagattaccttttaaagcattagcaaaggagttaatgtgtgggcaagctcctatctcagggtgtcaaccttgctactcccctctgcctggaatctgctgtacttgagtatcacacggtgtatgggcgaggcactcactgatcacctttccccaggcactccctgtcctctttcttgatttacttttctgtagaacgctcttaccagttaatgcattccatattaatttttttgtttatggctagcaattgatccagaaaaactgtttataaatttcgaggttatccaaatttaaaagcaccaatttcctatttgtttttttgctaggtgagaaaacactttttaccaggagaaagagagagacaaagagaaaaaartggagagacagaaaaatatagagacacaaagaaataaagaaacataattggagaaaatacatttttgtaagccttgttcagatccttctaaattacataccagaggccaccctaggcccaagattaaatcatgaatattcttagaaggtaggctgaaaac

SEQ ID NO: 435398 - DNA, 481 bp, Homo sapiens
ttactgtatatgactttttcccagtcccattctcctcctattttctacagagagaagtcacgataataaattcagtgctcatcattttcaaagtacttatataaatttacatttctgctaacagggcattagaattgcgatttctccatatacttccaatatttgggatttgtcagagattttaaatcttgtgaattgatgaatgtgaaatattattggaatgttaatttgcrttttccaaataacaaatgatgcttaacttcttgtgtttgctaaccacttaggtttcctattaagtgatcaaacactatttctccatcagctatgtggttacaaatatctttttcaagagtgtaacttttccgtctttgtttctgatactttttgttatacagaattttaatgtatttattatttcctttatggtaagtagttctaaaattacctaagaaaaccttccttacccccaagatgataatga

SEQ ID NO: 435399 - DNA, 461 bp, Homo sapiens
acagtcaccagacacctataatccttaagctcaaatcagccaatttactttaaatattgctttagaggaaaggctgtcataataaaaaaatatataaaaaccaaagacatttctccatgaaataggcttcaattgcatggagagtgatcagcacttaaacaaaatccctctaactattaaatctttgtgcatgttaccattaccttcagaaagtcataaaaggraatgtccttaattaaaagagtaacttttgtggctctagggacatttaaatgtcttcagtataaataaaccacatttgcagttggatttaaaggtgtgtccttcattcgttctgttttcagagccccaggttgtaccgatgctggattaggcaagaatccgggctgtgctgcagaatgcctgctggtgcatttttgctggcagctgcgtccccacactgctttctgtgattaatcttc

SEQ ID NO: 435400 - DNA, 461 bp, Homo sapiens
acagtcaccagacacctataatccttaagctcaaatcagccaatttactttaaatattgctttagaggaaaggctgtcataataaaaaaatatataaaaaccaaagacatttctccatgaaataggcttcaattgcatggagagtgatcagcacttaaacaaaatccctctaactattaaatctttgtgcatgttaccattaccttcagaaagtcataaaaggaaatgtccttaattaaaagagtaacttttgtggctctagggacatttaaatgtcttcagtataaataaaccacatttgcagttggatttaaaggtgtgtccttcattcgttctgttttcagagccccaggttgtaccgatgctggattaggcaagawtccgggctgtgctgcagaatgcctgctggtgcatttttgctggcagctgcgtccccacactgctttctgtgattaatcttc

SEQ ID NO: 435401 - DNA, 567 bp, Homo sapiens
ggtgcatttttgctggcagctgcgtccccacactgctttctgtgattaatcttccttgaaacgtctgtggatgtaaaagcccatgtaaaaaggagtaaatgggagtaagaggagattggtaactacyaggcactcacaggctgcattaactggaggaaatacagttggagctttactagaggaacccttagcctgggcttcagactagacagcctgaggtgagctgagtgacaccaaatgaaagctgacatgtttcccatgacaaaaaccagatggtttggtgaagaatgctgctccagctttctgcctctctcctggtttctgcaaatcaattctgtaagatttagaccaaaagcctaaactaaaagaggcatcaaatgctgattttataaatcttgcatttgatatctcttagttttatgcaaataactatatgtttaggtttgtaaatgcattataatccagaaaagtgaaggcacaagaaccacagggacagcctgtcaatcagagatgatgctggttcaacacagagacagcatccaatactccagtgaggtagagatgttt

SEQ ID NO: 435402 - DNA, 585 bp, Homo sapiens
atataggtcagatgctgaggctctttcccctccagcggcatttcccagcaggttgggtttcctcatcaatcacgcgttgcccatattgagtttcctggttcagctgctcatgtggccatgctaaggctgagggaactggagtcagcattaatcatgagactcgtcactcttggggctggattggcttggaggatgcctatagttaggctttttccctggagaaatgtcagcttagacaaaaaaaaaagytcaacttctgcttgatgtttaatagcttggtcattatgagggatcctataaaacccccaccccctgctgttatgtgggtgttttgtaaccgtaaaatcagtcatttcttccacagcatatttactggctccatagaggacaatctacaaggattctaacttacctctcacctgtctccttacctagttcccacacaattatccctggagacgactgaaccctggcttgtttgtttaagtgtgttatcattcagctgtgcactgtttttaagtgatgccgcgttctgtaattagtgctgttagcaaaggtggcatctacagagttgctggccgttgc

SEQ ID NO: 435403 - DNA, 550 bp, Homo sapiens
tgatgccgcgttctgtaattagtgctgttagcaraggtggcatctacagagttgctggccgttgctgtcaggtactgtggcaagtttcaatcacactgtttcctttagtgctagacgttgcctcggctttgaggtgtgggagctgttaattagtatctgaaatgcgcatctgtattcccgctgctgtatttcccctgatggcccctgtcactgtgacttctaagtcttctgtctgggagctatttgttgaatttaattccacattggagaataaatgtgggtgtcctaggacttagcccatggaaggaatctgctgagaatctaactaacttttagggtttttcttgaagatgaccctgtggcaaggatttgagtgcaagtcatttatttgggaggtgatgggtggccccggaaacactaggaggggagtgggaaaggtagacaggaagagacaccagccagtagtcatcaggccacttactgctgtggacagctggagcttgcttgacctccctgggaaacaatggcggccagggtagcatgatcccac

SEQ ID NO: 435404 - DNA, 436 bp, Homo sapiens
actatgcattagatcagaactatgcattagctagttaaatttgctgaaagtacaatttccctaaaaacaagagcgaatgtaaattaaagaagcactatctatatccttcatgtttttcctctcatcttagtcttatgcatgggttytgcactgagcatctttcccagtttcaccattagttgacccctgcaacttacaatccttgtacttaaattcacatctctataaattagtaacaatgccttatgttctgatacgtatgaggattaaatgagatagtacctatattctcatttatatcttcttcttactactgctattatctatagattcatagatttctatatacatatgttccagaaaaatttcctgggcattttgatatattatataggacactgaactcatctacttacccagtgaaaaatttatgtcc

SEQ ID NO: 435405 - DNA, 436 bp, Homo sapiens
actatgcattagatcagaactatgcattagctagttaaatttgctgaaagtacaatttccctaaaaacaagagcgaatgtaaattaaagaagcactatctatatccttcatgtttttcctctcatcttagtcttatgcatgggttttgcactgagcatctttcccagtttcaccattagttgacccctgcaacttacaatccttgtacttaaattcacatctctataaattagtaacaatgccttatgttctgatacgtatgaggattaaatgagatagtacctatattctcatttatatcttcttcttactactgctattatctatagattcatagatttctatatacrtatgttccagaaaaatttcctgggcattttgatatattatataggacactgaactcatctacttacccagtgaaaaatttatgtcc

SEQ ID NO: 435406 - DNA, 584 bp, Homo sapiens
gctgccaggtatcactgataaagccagaatggagttcatgaagttttatttgatctgatttttatttggctaaattttatctggtctgaaaagtacaaaacacaaacaaaagtaacaacaatctctcatattccaacccagaattattgctattaatgtttgccatatttacttctaatttttctatgtatacatatgattataaaaagtgtataagctatatggtagtaaaattttcttttaaaggaataaataggtcttttctaataaggctgagtatcttttgccctctacacctgttatggactaaatgtgtttctctaaaattcatatgttggagctatatttgaaagatatatatgattatataagtttagtgagaagggctttgtaagaagtggtggytctttgaagatgttctcatcattaaacaaatcacagcatctttagtcttgaagacactgtttttcttctgcttgaaaacatttccttttacaagctttttatggtacgtagaatcgagaaaaaagaaattattctgaacttgatgaggaaagagacttaaagcgtacaaagcatacact

SEQ ID NO: 435407 - DNA, 528 bp, Homo sapiens
  misc_feature (1)...(528): n = A,T,C or G
aggggagctatgaaacattgaatgattgtgaaaggactcattccttcatttttcaaagcaaagtatcaacagatactttcctaaaacctgaatatgagtttaccaaaaacaaaacaaacaaacaaaaaaaccccctcatgtcataaggagtgcaatcttgtaatatttctgaaaacttctcttaattttaaaatcatctttaggtaatagtaatagctgttcttgggatggtatttatttaaaaattaagaatttgttcagtatttttcttctatttagttaaatctaaaaagccaaatttaaaaataacatctrgcatatcattccatttttataaatgtattaaagacataattatctatttattcttccccttctttctgaataaatatatagaaaaagtgctgaaataacagcctaacaattgtgataacaatttctgggtacctggcttggatgcttatttttagtttatctttatgcttntacattcgttgatttctttacaatttgtaaacatcattcatt

SEQ ID NO: 435408 - DNA, 591 bp, Homo sapiens
gattggattggcagaggagtagaaagggaattccaggctgaggattggttttagcaaaagtgcagcatgggaatgcatgtggcatgttcaagaattaattaggcaatgagtttaggatagagaatatttatggaaatagagggagataaatttaaagaaatagactgggactatactacgaaggatgataaagaccagaaaaaggagtctgaatgtttattctataacccataaggtcttattggctatttggtgactcaaactatcaataagccttgaagcttgcagaccagaactaacaaaatatcccagataatatagatgaacacaaggaagactgcagtgtgctcttgaaccacacaactgctactcacaattcttttgaataataaaaggtgaaggtgagaactttaagaaatgcttaaaagaaggggaaataaaataaaaattgggatgtcagagagctatatgcactcccatgttccctatagcaatattcacaatagccaagatatggaatamcttctgtccatcaagggataaatgacaaagaaaatgtggtataagtaaagccttaaagaaaagaaaaat

SEQ ID NO: 435409 - DNA, 591 bp, Homo sapiens
gattggattggcagaggagtagaaagggaattccaggctgaggattggttttagcaaaagtgcagcatgggaatgcatgtggcatgttcaagaattaattaggcaatgagtttaggatagagaatatttatggaaatagagggagataaatttaaagaaatagactgggactatactacgaaggatgataaagaccagaaaaaggagtctgaatgtttattctataacccataaggtcttattggctatttggtgactcaaactatcaataagccttgaagcttgcagaccagaactaacaaaatatcccagataatatagatgaacacaaggaagactgcagtgtgctcttgaaccacacaactgctactcacaattcttttgaataataaaaggtgaaggtgagaactttaagaaatgcttaaaagaaggggaaataaaataaaaattgggatgtcagagagctatatgcactcccatgttccctatagcaatattcacaatagccaagatatggaataccytctgtccatcaagggataaatgacaaagaaaatgtggtataagtaaagccttaaagaaaagaaaaat

SEQ ID NO: 435410 - DNA, 303 bp, Homo sapiens
gcatgcatacaggcaggtgcaggagctggggygagctctttgggctttgaccttgtggtagtatctaggggtgggtgcctgcgactccagtgttataaagctcttttagctctgccatccacagatagcttaagtgttaaccagctcagtgccctctctgcctttctgcaagggcagagggccagtgtgacagctttctgtatcctgagctcttgtccagtcttctgggagaatcaggtcacatatggactcagaggatgaatgtggggttttattgagtggtagaggtggctgtcagtgaga

SEQ ID NO: 435411 - DNA, 476 bp, Homo sapiens
tgtttaatgttctgagtgctgggccttgtgctaagtacttctgtggcatacacgatactgggccttgtgaagaggttaataggcaaaaggcttgagagtttcaagggaagatcttggcacccacgtttgttccaaatgaagaatccactttcaatccacatcttattaaggatgttatttgtctcacatacagttctagaattggccctttccatggccgcagtacagaagccaactcaatgattaagataatrtgaccaaaaataaatcaagatttgtgcttggatcacctgggtctaagtccagccctgccttgcacctgccactctgttctctctctctctcatcgaccccatctgcaggtgcggatgataatagcagggctatttcatcaagagtgttgcaggacttaaatgagaatccaagtaagctcttgttacataaatatgcacagaatggccatggcctatttttag

SEQ ID NO: 435412 - DNA, 542 bp, Homo sapiens
ccaaatagataacatctgctgtgtttcttctgaccatccgtgtattgtgttgtgtgtgtgtgtatagacgtgctcatttcttttcaagaagcaagcctttaagcctgcctggcatcattggtacctaacaaacccacccacgtggctgtcagtcccagatttcattactctctggtttggtgctaattagtttgcatagattaggatttttcttccctcttataatttgtcttatactataaacaattgttttagctttaacagtgaagttgagcttatggaactayatttcacaaggtccttcattctaggacctcggggattcactctctgctcccagctgcttctaatcaaagctaattccctcccacaacattcccccggctccaagtgctgacaccaatctccccgttaaacaagatgactcagggtgcttgggaagcagattctcatttcctgtattttcccacagcttgctgccgcctccctatggtacgtttcccggttcgacatgcagctcagaattccccctgcccatctca

SEQ ID NO: 435413 - DNA, 567 bp, Homo sapiens
tctgtagcaactggctgataaactcaaaaatcttgtgtttatcatctgccagattttttgttgtgaggtttcaatttctttccctttacaagctgttcaaatgttctagctatagagaccagatggtttttctattcccttgatgtttcctttatgcggatgattgttcagagatgttctaaggctgtatcaggataggatagtttctatagttactctagttagcatcactgtgtgtatgcctttgccagcacgggcgaatattcaatccatcaaagtccggaaaccacttcaaataaatggccctgtgtgttttgaaatcgggtgwggaaagcccaggtttcaagtaaccattaataaataattacccttttgttaatgtatcctgccaattccctgataagaaagagctgatggatgatgtagctggttcatagcttcctgtttattagaatgtgttcgtcttgtactttctgcagatggaagctttcgggaccacatgagaagtgtactatgtccacaccacatttagtacttggtgggtaatcaaaattatataggggcaag

SEQ ID NO: 435414 - DNA, 583 bp, Homo sapiens
gtctacattcctgttgactcttcttatgtagtgggaattgaagaataatagaattttttagtttgaatttgctggagagacctctagttcattttacatttaaaagtgaaatccaaaagaatttaaggtacctttcaaatgtatcatataactagtcagagggcatttttgaacccataatttacctctttaattccaaggtcacctgaccttttaattatatgtcttatatttgtttctttaaaaaattgtctataagactcactaaattaaatatttttaaatcatgcatttttaaaaggcagattttctgaaatattactagctactaaaatgcttcacaaaacatgaatatgaagaaggatggattatttaatgattttataatttaaaaaaaaagaaataaaatgttttccagcatagttcctattaggaaaacttgtaagtttttgaaagcagcttgtaaaattgacttggtttgagggaagttcacrgaacagacaataatttaacagtaaattaaattacatttaaattttaattaaaacagtaaacaaataggaaaacaatttggtgaaactta

SEQ ID NO: 435415 - DNA, 633 bp, Homo sapiens
ataataaaaggtgaaccaattgctatgatttaaaaataaaaactcattagagaatgtactattcatctaattcagaaaaggacaaaacagataatagataaaaattaaagatytgtcacaaaagtcatagaagtcattcatttaaagtatttttataatgcaagtgtttctttagaaaataatggaggctaggaggaagccacatggtttaacgtgtctctgctttcgtttctaacacttgtgtctgatgtcatgcaatgcaaagtttaggaaaaaaagcctgaagaaacctaactgctctgtttctgcatgcataatacatgataatgaataatgcaaatatgaacttttatttctctgaattttgatggacacagggcctaaaatgttcttcaatttatagctacaactgaaaacagcaatgaattgagggtagaataagctataatacatttaactagaaaatagttaaagaacttgaaacattttaattaagtaagaatgttaattttatcaactgtattatttcattttaagtccttggggttaatcccttttggtaatgtcagtgtattttatgtttttaatgttgaaactaagtgttgagcttacaggaatagggtgagaataaac

SEQ ID NO: 435416 - DNA, 581 bp, Homo sapiens
aaaacaacacatgctaagctgttcatctgcaactgttaagactccaagtggtggcagtgccagctcagagccctccacctgctggagatgtttctamattgtcttcacacatgggcattcatcccgcagtggggctctctctgcctgagccctgaggtaaggttacaagtcctgaaaccccatttgtggagacgacccctctagggagctggagcctggggcaacctcgctccttcctccacagtgaaatagactgaacctccagcacactgaccagcacaggtcttgaatggtgactcctggtctagggctggtcccttcttagaaaacccgcctttcgatgatggagggctctgcctgggtatccattggagggggcagccctgaggaaggaattacccctctgaaaagagctaatgtcattcttgtcactttaaattaactctagccaagagggactgacagaaacatggatctgggtgaactatatttgactgatattctgtcaaatattgcatggggttgtgatccgcaacttttcccatctgctgctccagtctgagtcgctgaatgcacaatgg

SEQ ID NO: 435417 - DNA, 397 bp, Homo sapiens
tatggattgactgggcttcatttcagacagtagggtaggycgaggttttctccctgtgtctcttaacttcctttaatggtttcttagggcatgctcttttcatggcatatggcagaaagaaaagacagcaagccaaatgcacaaacccatttctgtcctaaaaaaaaaaattacagtacctgtcttacccaattctctgacagctgagcgaaagtttgctcaatgtcataatcacagtaatgctgctggaaaccctaaactgttcatggctcaccattgcccacagaataaagccagcgtcattcatcacagcatgcatatttccatgtctatgtctgttcctgctagcccacaactcctgtcatgtctgcatggccacatcagcggccaagcccaa

SEQ ID NO: 435418 - DNA, 541 bp, Homo sapiens
aggcagttctggagtagtagatgaggatggcatttgggggctaaggcagttatagaaaggacctctaaaagactgcatggctgaactgagtcttgaamaatagaagacttggataatcagggaagaaagagggagaaccttctaggtaggaggcacaatacaggcaaaggatcggaggtgcttaggaatggagagagtaaagcagagttagctatgtaatctcagcactttgggaggccaaggtgggtggatcacttgaggtcaggagtttgagatcagcctggccaacatggtgaaaccccgtctctactaaaattacaaaaaaattagccgggtgtggtggtgcacacctgttgtcccagctacttggaaggctgaggtgggagaatcacttgaacccaagagacagaggttgcagtgagctgagatcatgccactgtactccagcctgggtgacagagcaagactctgtctcaaaaaaaaaaggagtagaagactgaaacactgaggggggtgtttcttggcctgagtctttctcagg

SEQ ID NO: 435419 - DNA, 606 bp, Homo sapiens
tagacctgccagtccagctcacttgccagtagaattcagccacatgagtgacctcagctgatgccaagagagtagaatggcctggctgatcctactaaagccacagtattatgacaaatgagaaatcactgttcatttaaactactaagctttgggttgatttgttatgcagcaatggataacygaagtgctcacagacatactttcttcctgttactcaactttttatacttaccctcacacatttcaactttctttaaatgtaatatatcaaaataaaaggcaaagtatgcctcatttatgtaaagtagtggtagaatatttcagacaggtattaattcaggaattggaaatcaaattatattacttatctgctcctattgctttgctggcttcatacatcactcagaataaaagccacgtcatcaatgtgacctacaaggccccatatgagctgtcctctactccttgccttcctgacctcaatttctactactcatttcctttgatcttccttgaatgtgatgggtgcagtccaccccaggacctttgcatttgctgttcctcatgcctggaatattcttatcacagacatattcatggact

SEQ ID NO: 435420 - DNA, 687 bp, Homo sapiens
tgatttttgtgtatggtaagagatagggggtctagtttcattcttctgcatagggttgtctgcctgacatcttttgacaacctctttccctgggtctggtcaagttggttaatagcacatttctcctgcttgggagaaaatatcattagcttaggcatttctggacagcaatcgtggaaaacatacatcgttcagagctttgatacatggagccctctaatcagaagttgtggccctttgaggtattggagcaacttayagaagcaatggccagcctggctctaagtatgagagattatagggtgtcacttgttgggatgggtgtcatcagacagagggtttggatgacacaagaggcagtctaaagtaggttgtgtgtgaaagagaaaatcttcttctcccattttccatgtcttattttcctctgcaagtatcagctcacttcaaacactgtaacaacctgcattgcttgacagagcacagtgagagtggagcagggtgggaggagttgatctgagactgagacctttcatttcacataaaactgttggttttgggagatttcctcccagcttctcccagtgagttcctgctttctggggatatgctgcttgacatcttggcatttgagtccctctcacaggaaatcttcaaagtcacacagatcccacattaccaaccaaggga

SEQ ID NO: 435421 - DNA, 687 bp, Homo sapiens
tgatttttgtgtatggtaagagatagggggtctagtttcattcttctgcatagggttgtctgcctgacatcttttgacaacctctttccctgggtctggtcaagttggttaatagcacatttctcctgcttgggagaaaatatcattagcttaggcatttctggacagcaatcgtggaaaacatacatcgttcagagctttgatacatggagccctctaatcagaagttgtggccctttgaggtattggagcaacttacagaagcaatggccagcctggctctaagtatgagagattatagggtgtcacttgttgggatgggtgtcatcagacagagggtttggatgacacaagaggcagtctaaagtaggttgtgtgtgaaagagraaatcttcttctcccattttccatgtcttattttcctctgcaagtatcagctcacttcaaacactgtaacaacctgcattgcttgacagagcacagtgagagtggagcagggtgggaggagttgatctgagactgagacctttcatttcacataaaactgttggttttgggagatttcctcccagcttctcccagtgagttcctgctttctggggatatgctgcttgacatcttggcatttgagtccctctcacaggaaatcttcaaagtcacacagatcccacattaccaaccaaggga

SEQ ID NO: 435422 - DNA, 571 bp, Homo sapiens
agaagcaagattggaatgtactgagccaaatcaaagagccttaatagcagagacagctgtctgcctttgtcctgaaacatttcctcttcttaaggagccaaattcagaacaaagccccactgtattttatagaaagaattaagtggaaaaacatgtacaaagtgggaagctcaagggtaggtgwggattcaggcatttctagaacagcaggactttgggaagatataaattagtgctcactcccagaggaccatgccagccaagctaaggtattttgactttattgtacaagcagaacgcagccacgaatgatttgagacaggagagttaggtggtaataacaacgtttggaagattaaactggccatggcatgtaatacaaatttgagtgagagaagctatgaaagccatggccagtttccaatatgaggatattattaatagtttagacctagataatccatcctttctcatccctctggccacttgcctagctcagggtcaaaggtgagcctaacatctccattcccaaaccccactgcatttagaaaaccctcttcccatagccatt

SEQ ID NO: 435423 - DNA, 541 bp, Homo sapiens
agacctgtgataggcacatcaacaccaagtccagacacggacccaagttgggtctaatctcttgcmaagacactgacctaattggcagtggatggtcaggtgctgttccaagaatggctttttcgttgctatccttaggggaggcatgtgagaaccaggcagagatgtgggcctctttctaagatcttacaaccaatacatatttcttggttgaatacaagttcaaatatgttctgacaccttcaaatacttattttgttatttctgattaaattagccctaaaccattgattctccgacattattgcctaaaagcctcttgcctggcactcaaggaatctggcagaatttttcctttacaaatcgagtcactggaaccaaaacctttgcctgtcctactatctagtagtcatcaacacagaaggtcagctgagtgcagttgaactattttactacaaggtaatgatgccttgagtcatgtaccttgtacaagtagagaggctaaaggaaaatctttttattattattgaacctagttcga

SEQ ID NO: 435424 - DNA, 520 bp, Homo sapiens
tgttgtctcacctggcagtgagataattttcagttacaaataaaaaagtgcctatgagtttgccatttattgtgtcttctcttttaggcacagtcttctagggatacaatgtcaatcacacaaactacttcagttgtaggagtctctgtgttaagactttttggtacctaaaattgtttcacattttcagcctgtcagtagggctgcrggttagcactatgcagaggtgacgttctgcacactggtatggtgagctggtcactgtccctctgtttagttactgcccatgcctaccagtcattaaagacttggactgtcacatcgcactctttctagaaagcatgagcctaggaggccctgagttacaccctgttcagtacaccaattgtaaattctaaaataacaagatcttcctcattcaacattagcagaacaaaaggcttcactctaggtgccctgcgcagactccggaagagttcacaattccagagcacttcatgaaatcactcttagtatttat

SEQ ID NO: 435425 - DNA, 520 bp, Homo sapiens
tgttgtctcacctggcagtgagataattttcagttacaaataaaaaagtgcctatgagtttgccatttattgtgtcttctcttttaggcacagtcttctagggatacaatgtcaatcacacaaactacttcagttgtaggagtctctgtgttaagactttttggtacctaaaattgtttcacattttcagcctgtcagtagggctgcgggttagcactatgcagaggtgacgttctgcacactggtatggtgagctggtcactgtccctctgtttagttactgcccatgcctaccagtcattaaagacttggactgtcacatygcactctttctagaaagcatgagcctaggaggccctgagttacaccctgttcagtacaccaattgtaaattctaaaataacaagatcttcctcattcaacattagcagaacaaaaggcttcactctaggtgccctgcgcagactccggaagagttcacaattccagagcacttcatgaaatcactcttagtatttat

SEQ ID NO: 435426 - DNA, 535 bp, Homo sapiens
ccagagaaagcactgtccttaaagattgcccctgtctccctcttgggagttgtatttgttctacccactaggatggttgattttatccatcaacttgactgggccacaggatgcccagatagcygtttaaacattatttctggaagaggttagcatttgagttggtgaactgagaaaggcagatagcatcatctaatccattgagggtctcaatagaacaaaaaggtagaggcaagttgaattaattctgcctgactgcttgagctggaacatccattttctcctgccctcagctctcctggttctcaggcttttagaattggaatggaatctacaccaccaggtctctggctttcaggccttcaaaccacacaactggctttcctgggtctccagcttgcagacagcagatcatgggacttctcagtctccataattgcatgagccaatatgttataaaaaactctttttatatatcttctactggtggtccttctctggagaaccctgactgatacacctatagtttaggatg

SEQ ID NO: 435427 - DNA, 592 bp, Homo sapiens
acacccacctacttatccacacacctacctacttacctacacacctgcctacttatccacacacctacctacttacctgcacacctacctacttagccacacacctactgaattatctacacacctacctacttatctacacacctacctacttacctgcacacctacctagttatccacacaccttacctacttacctacacacctgcctacttacctgcatgtctgcatacttacctacacacctacctacttagtgcctacttacctacacacctgcctacttacctgcacmcctacctacttacctgcccacctacttacttacctacacacctgcctacttacctgcacacctacctacctacttacctgcatacctacctgcttacttacatggctaccatccacctatctataatacctagacatgtaaatctatctatacaatatgtagctatttttacaaaggccagggtataccattgtatacagcacattgtttaatgaactgctttctttttcattaagtaagagatcacaaacagctttttgtgaaatttactacccatttttttcatcatataaaatg

SEQ ID NO: 435428 - DNA, 614 bp, Homo sapiens
gtaaaaaaaaaaagctgactttcaaagtttgttttgtttaacaacttaggcattagacgaccaattattcagctgagagccactattcaggagggcgtttgatgtggagacgtcatggacagttggaaaacatgcaaactagcaaaggcaacccagaagaacaccactcgccgttccactacgcgaagtttaactctgtgtttctgaagcttccacgtgcatgcggatgacctggtgtcctgttaaaatgcagattcagagtcagtaaatctgggatggagcctgagatgctgaatttctaacagctcccaggtggtgctgattgytgctgttggtctgctattctttgagtccaagagtctgagtgactgtagatctgccatgcaaccaatcattacaaaaaaaaaaaaaaagatacaataagttgactgagacaggacagaatatgggaaacacaggtgtgtacataacattgtaaaccaaaacgtatctgaggcaggtctcaattaacttagaagtttattttgccaaagttaaaaacacgcccagaaataaggattacaaatttgtgggagcaatctctgttccatgccattttccaaagatggttttga

SEQ ID NO: 435429 - DNA, 614 bp, Homo sapiens
gtaaaaaaaaaaagctgactttcaaagtttgttttgtttaacaacttaggcattagacgaccaattattcagctgagagccactattcaggagggcgtttgatgtggagacgtcatggacagttggaaaacatgcaaactagcaaaggcaacccagaagaacaccactcgccgttccactacgcgaagtttaactctgtgtttctgaagcttccacgtgcatgcggatgacctggtgtcctgttaaaatgcagattcagagtcagtaaatctgggatggagcctgagatgctgaatttctaacagctcccaggtggtgctgattgctgctgttggtctgctattctttgagtccaagagtctgagtgactgtagatctgccatgcaaccaatcattacaaaaaaaaaaaaaaagatacaataagttgactgagacaggacagaatatgggaaacacaggtgtrtacataacattgtaaaccaaaacgtatctgaggcaggtctcaattaacttagaagtttattttgccaaagttaaaaacacgcccagaaataaggattacaaatttgtgggagcaatctctgttccatgccattttccaaagatggttttga

SEQ ID NO: 435430 - DNA, 614 bp, Homo sapiens
gtaaaaaaaaaaagctgactttcaaagtttgttttgtttaacaacttaggcattagacgaccaattattcagctgagagccactattcaggagggcgtttgatgtggagacgtcatggacagttggaaaacatgcaaactagcaaaggcaacccagaagaacaccactcgccgttccactacgcgaagtttaactctgtgtttctgaagcttccacgtgcatgcggatgacctggtgtcctgttaaaatgcagattcagagtcagtaaatctgggatggagcctgagatgctgaatttctaacagctcccaggtggtgctgattgctgctgttggtctgctattctttgagtccaagagtctgagtgactgtagatctgccatgcaaccaatcattacaaaaaaaaaaaaaaagatacaataagttgactgagacaggacagaatatgggaaacacaggtgtgtacataacattgtaaaccaaaacgtatctgaggcaggtctcaattaayttagaagtttattttgccaaagttaaaaacacgcccagaaataaggattacaaatttgtgggagcaatctctgttccatgccattttccaaagatggttttga

SEQ ID NO: 435431 - DNA, 605 bp, Homo sapiens
tgtaaattcttaactcccttcagctattagtagctctattgtggttgattgtttctctgtgtgaagatctgaaatatacaaaacattcaaactttaaatgtttatctgctgggaggaaactgcctcaaatataaataaccctatgtaagtgtaagtcttttcattccaaataccaaaaaggaagggaagacccaggcttaaagttgactcggtttctgttctggtgaagaagaggttgggattatttttgtaggatttgaactcccaccatgaggcatatcccaacaaaacctgctaggatgaaaggcaggttgcaaatcactgaaagccatttggatcagtggttctccgccttgcctctcttagaattcacctggggagatggtaaaaattcccaataccaggcrgatcacatctggatctccggagttggggcccaagcatcagtattttagtgtgcagccagtagtgagaccgctgacactcagtggtgctccacaagcttgaatgtgcctgtgatgcatctggaagtctagggaaaaggccggttttgattcagtagctctgggatgaggcttttccagcgagcttccaggtgacatgga

SEQ ID NO: 435432 - DNA, 649 bp, Homo sapiens
tattacacctgttagtcatgtgcattattttcaagtttttattccctactatacactggctagatcctgaattcttctaggttcctccaatcaactttttttccatggaattgctaaaaatgggagcctctctgtttctgcagccctataaactgaaattaaattttaagggacaagttgcctttctgatggttgggctacatggcaagttctccagaccacctgatgccataaccaaagacattccagcagcaatccaggacataatgttgctggcttcatgctatggacagcttttcccaaggtgacaaaacaagagccctcatcgtagtgagactctagctcctcttagttttttctcatttatgcctatctctttcacttggcaggataatcatgtaattaaagtttcacagatactactgggggtaccttgacagaatctgacctaaaaatatttagtccacctaatgagtaactttaactatcctcaatacatctattgctcattcygctttaattcaactcagtcaggagatactagatgatagaaatactctgtagtatctattggttaaataagaaaatgtctgtgctattgctaatattacatgctgtacctggataaatttctctgggaacattgaga

SEQ ID NO: 435433 - DNA, 415 bp, Homo sapiens
ttccaaatgactgtactattgyactcccaccagcaatgcataacagttccaatttgcccacttcctcgccaacaattgttactgtctgtgttttttattcgagccattttagtgggtgtgagtggtttctcattgtggttttgatttgcatttccctgaggaatatgttgagtatgtttttatttgcttcttggtaatgcaagctcttattaatctattcattcattcatgtatttcagtcccagctttatcagttatgtgtggtcttggacaagttattttacttctctgaactcagttttctcattcataaagtggaaataataatctctatcttatgggattgttgaaaggactagaatgaatatatgcaaagctcttggtagaaattgagaactcaatgaagacagaagag

SEQ ID NO: 435434 - DNA, 435 bp, Homo sapiens
gagcctggcactgctcacctgggcagagagtccactcaagccccagagtccttggcttcattggaagttcctcctgggagcatcaacacagccctttcccccgtatccactggcttttggggagctgggcctgggaagcccttttctctccctacgctgtattcatcctgccagccaagctggagcctctgcattttttagtccaattattggcagctgtacaggtttcccagaacacctggccctcctcaccctcattctgtggcattatttaatcaaactggctaggagtatttatagctcccctgaaaggcagcagccgctccattcccgggaaagtggaacattgagacattaaagagtattttcaaaagaaaaaaagtcctctcacagactcatgwtgttgccatcccaatgtgtcttccaaaaataggc

SEQ ID NO: 435435 - DNA, 374 bp, Homo sapiens
gtgcctgtggccacactttttttctgtaaagtgccccttggtctgcagtaatgtttacaggatcctttgtagatggaatgaaataaatactttgtaagtgctcataatggccaargccctgtggacaggaaaggcagatcatactgagaatgtgcatcttctcagtcaaatcaattgtaccaaggggactccttgaggaatggtgctgtgtcagaggctcaatgtcaggttggacatttggcagcagaagtagctagatgagactgggtgggtggaaactcttgctgctgggcccatgtgtaggctccatctctgccatgttggccactctgctcacacacccatcataccagcactggaatgggtgacatgaa

SEQ ID NO: 435436 - DNA, 374 bp, Homo sapiens
gtgcctgtggccacactttttttctgtaaagtgccccttggtctgcagtaatgtttacaggatcctttgtagatggaatgaaataaatactttgtaagtgctcataatggccaaggccctgtggacaggaaaggcagatcatactgagaatgtgcatcttctcagtcaaatcaattgtaccaaggggactccttgargaatggtgctgtgtcagaggctcaatgtcaggttggacatttggcagcagaagtagctagatgagactgggtgggtggaaactcttgctgctgggcccatgtgtaggctccatctctgccatgttggccactctgctcacacacccatcataccagcactggaatgggtgacatgaa

SEQ ID NO: 435437 - DNA, 374 bp, Homo sapiens
gtgcctgtggccacactttttttctgtaaagtgccccttggtctgcagtaatgtttacaggatcctttgtagatggaatgaaataaatactttgtaagtgctcataatggccaaggccctgtggacaggaaaggcagatcatactgagaatgtgcatcttctcagtcaaatcaattgtaccaaggggactccttgaggaatggtgctgtgtcagaggctcaatgtcargttggacatttggcagcagaagtagctagatgagactgggtgggtggaaactcttgctgctgggcccatgtgtaggctccatctctgccatgttggccactctgctcacacacccatcataccagcactggaatgggtgacatgaa

SEQ ID NO: 435438 - DNA, 374 bp, Homo sapiens
gtgcctgtggccacactttttttctgtaaagtgccccttggtctgcagtaatgtttacaggatcctttgtagatggaatgaaataaatactttgtaagtgctcataatggccaaggccctgtggacaggaaaggcagatcatactgagaatgtgcatcttctcagtcaaatcaattgtaccaaggggactccttgaggaatggtgctgtgtcagaggctcaatgtcaggttggacatttggcagcagaagtagctagatgagactgggtgggtggaaactcttgctgctgggcccatgtgtargctccatctctgccatgttggccactctgctcacacacccatcataccagcactggaatgggtgacatgaa

SEQ ID NO: 435439 - DNA, 588 bp, Homo sapiens
agaccacgagggaagcaaactgtgtctcacaaaatgccagccttacttgaggctcctgcaccatctttgagcaaagggaagagccatcttctaacgaggggaaatggaccaattctaaaggagcagctggttcaggggaatctggggattcaatattctcaaatacctatatccagacactgctgtcccaaattgcagggttctattccttcctcatgaaagacttgaccatggcataggagacctagtggggtggggaattcaaccattccagaaactcctctactcttagaattaagtcctgagcctggtcttctctctgccctccagttgtaagagatcaagttttccttaaaagctgcagagaaacctttgactttcagtattgccttgaattggtggttaattgctctgactgtccttatctctcatcaataaatcaagagcactcagcatcaaccacccacttccatagtcctcgttgctatgattgtcttcattctctcaagcctcagagatattgcatcagtccatgctatcctttctaytggaaagccaacccagttcatcactggtggaacgttatgg

SEQ ID NO: 435440 - DNA, 566 bp, Homo sapiens
gcctctgttttgtttgaatttttgacactgaacatcgattacttttgtgattttattagaacacaagacctctccagttgtgcatgagcccacttcaccccatctcaccacagccatgctaccaggtcctgcagaccctcgggcctccacactcaggctccttggcccctagacttgcaccccagctactgattcatctcagtccttcactggcgactcactccactggagcgcccacacaggctgacgcagcacagccgcgtgtctctgtgggtctctggcccttctcccagcttcttcctgtgcttgctcctgccacaggcagcaggagctgcagcagctgccaccaccacacctcttcagcctctggtggccaggtccggctctgcattacagaaagttgcctgactgtaaaaaattgatacrtaatagatgcacatcttttcagggtacatatgataattcgatacattcatataatgtgtaaagattaaattggggtaattgagatattcattgcctcaaatgtttcttttctttatgctaggaacgcttgaattattctc

SEQ ID NO: 435441 - DNA, 434 bp, Homo sapiens
acttaaggacatgagaaacatgaaaaatcaaggaaatatgacacttccaaaagaacacaataattcctccgcagtagattccaatgcaaaagaaatttatggaatgcctgaaaaagaattttaaaaattgatattaaagaaggtcagtgagatacaagaaaacacagtaaacaaaataaagaaatcagaaaaacaattcagtatgtgaatgagaaatttactagagataactatcacaaaaaagaatcaaacagaaatcctggaactgagtaagtcaatgaatgaagtaaaaaatacaatggagaatttcaacaataggcaagatcaagaagaagaaagaatttcagaacytgaagacaggtattttgaagtaatccagttagacaaaaataaataaataaataaatagaatagaatagaatagaatgaacaaa

SEQ ID NO: 435442 - DNA, 528 bp, Homo sapiens
atacttccacacgcatgtttatagcagcacaattcacagttgtaaaattgtggaaccaacccaaatgcccatcaatcagcgagtggataaagaaactgtgagataaaaaggaatggattaacagcatttgcagtgacatggatgatattggagactattctaagtgaagtaactcaggaatggaaaaccaaacatcgtatgttctcactgatatgtgggagctaagctatgaggatccaaaggcatgagaatgatacaatggactttggggacttgggggaaagagtggagggggtcgagggttaagactacaaatacggtgcagtgtatactgctcaggtgatggccacaccaaaatctcacaaatcaccactaaagaacttactcatgtaaggaaataccacctgtacccaaataacttatggaaaataaataaataagaagccaggatccttccatggtacaactggctattcatgaagctyttgaaatggataaggttgtagcatctggtccattgttgtcatt

SEQ ID NO: 435443 - DNA, 569 bp, Homo sapiens
cttcctcttcgactctgggagaagatggctgccttcataaggaggggtctggtgagattctacatagggggatggtgagggcctgcaacaggactcaccttgccttccatgtctggagccccagtaggcctcatttctgaggagctgcagcccttccaacccccaccactgttttcagtttgctctccttcccagaaaggtgtccctggcaacagctcctccctacctacttatccctgcctactcttacccagccctccaggggtggcacaggatctcggtgcctttaccctggagatctgagggtgatctggatattgcaccattcatggtacttgaaaccaggaatggatgggcacaatgcatggtgctacctaagcatttgatcaaactcacttcatagtgcccaaagcacaggctggagtgttccaccagctaggcacatgtccttcctcacaagtgctttctgaatgtgcrtgtagaacgaaacctctttggccgtagttgcttcttccatcagctgctctctctaccgaatggctccaaaaagtgggggggctcagagcagt

SEQ ID NO: 435444 - DNA, 548 bp, Homo sapiens
  misc_feature (1)...(548): n = A,T,C or G
aattcagctcctcagtcacactaattatatatgcrgtagctcaatggatatcacatggctcctggctgctgtactgggcatggagatatgaagtatttccatcattgcagatgattcactgtagatggtacctacctgaaaccctgggtcttgctgggattgctggggggtatgtaatgagaaggctggggcaaccctgtgcagagatctgacctttgagagcagagcaacagaagaggagctagcaacggaaaccaggaagacaaatgctgatgaagcgacatacaacatgctgagggaagcccaggagacagcaaccaaccacattcagaaaaaatgcatgccttgctgttttcctccaaatagtccatgttgtcctgtccctgggccttgcttcatgaagtgccttatcctgggaaccctgccatcatcatccttcccatccctggtcagacgctgcccaggatttaaggccncacacagtcagctcctccccatatggctatgaatccagaatctcccaaccagacggaaacagaaccaggcac

SEQ ID NO: 435445 - DNA, 570 bp, Homo sapiens
gaggtgaggtgactttacttgccaaagacctattactggtatggtaggctaaataatggcccacaaagatgtccacatcctaacccctggaacctgtgaatatgactttatatggcaaaagggactttgygtatgtaattaagttaaggatcttgaagtgagaaggttgtcctagattatctgggaaggctgtgaatgcaatcacaagtgtccttataagaggaaggcagaaggagatttggcacagacagaagaaaaagggatgtgatgacaagagctccatgtgtatatcaaggattgtgagtgtaaagccttcagcacagggcttggcgcagagtcattctctgagtagcagttaaagcaatctgtgcttgtcacccctttggtgcctctgggacctcctccgcaagataccttaagaaagagattgaaacgatgtgctttgaagatggaggagggggtgatgagccaaggaatacaggtggccaacctgaaaaaggcaaagtaatggattctcccctcagagcctccaaaagcatccagccctgttgacaccttgattttaggcca

SEQ ID NO: 435446 - DNA, 584 bp, Homo sapiens
tggcttattggtgtccagactgttatatgtgcccccacgcccacggctgggtatgtatgtcttgctcccagggggaagcccttcagctgaatgtggaagaagggcgtggtggaggcaacagctgccggaggcaatagctgccagaggcactgctcatggagtgggctgaagagcaggaggaggctgggaatggcctcctacaaccttgatcttgccagagccctgcttcttgatctttgaggtgcattcccacataggaacgaggttggacagccccagctcctgcctgcctttgccaagtgttgcactggggatccagcaggaagtgaaacaaacccagaytctttcttctgaggcacttccaggttagggaatcctgggcagtggctgccacacaccatactgtgatgtggcgacctccctgctggtttgaaattccttcatgtcagcggctgtgccctcccttctgtgggagctccaaacctcacacccaataagtgcataacacaagtatgcataaaagataaagcacccagtcctcctttctaggaggcagatggctgaggaaagtttgtttttagcct

SEQ ID NO: 435447 - DNA, 639 bp, Homo sapiens
tgtaattgctggttgcacagggacaggaagaaagggtaaaaggggcctttggctagttacgtggggctgaaacagcatgaatggttcaaggaacagcaagtaatggaatgtggttaagatggaggaggcaagcatcccatttatgcttttaaaaagactatatttgtatatacacatacatatgtgagcaaacgtacagaaaaaggtcgagtttccacgttttattctctatgtgctcctcattgtttaaattatttccaataagaaagtatctgtgttctgtatacaaacgaaatgcagggtgcatatggaaggtcagtgccagataaaggtggacagacaggcagtaaggacaggaaagaaatgctttcattaggagtttgatctttatcatgaaactggtaatatacagacaaaatttaataatcctatttagcatcttctggttattaaatcaacatacactcattgtagggaatttggaatacaaaggtatacaaaaataaattyaaatgcctcagtaatcccccgagagagccagtgttgacattttggtatagttcctactgattttaatacatgcacataaatatttttgactatatgtgatcattttatgtaaatagtttggtgtatatt

SEQ ID NO: 435448 - DNA, 536 bp, Homo sapiens
tttgtcaagtattttttcatatttgtcacaatctcccaagtaggctgtaaactcctttgggaagagactcttgttttatatttctatatattcttctcagcaacctgcacaatcctgaacacatagtttctacactaaatgcatatttttaaacaattgtctggttaagtcaccacttytatatatctcttcttttttctctaaggaatgaacagcaacagaagaaagcaatagaataatgtttgtggtttatgatgtggagtcttctctgtaggtaagtatccatcatttgggaatggttgtaagtacttaaagtatcttgggtgctgcagctttgattttaggcactacagaacatggtgagatataatgatgaataaaatggacacagtccctgtcctcacaaagctcacaaatttcttttccagtgttgtaacttcttattccattattttcatagtagtttttcttttaaaatttttctattttagtgtaataaattttctcagctttgatttatttttatttatttattt

SEQ ID NO: 435449 - DNA, 571 bp, Homo sapiens
tgggaaaagaaagccctgtttccaaagtgtcagctacaacgctgtttccaccagtggctggaatgcaagagtcttccatacactgatgaatgcagaaagcaattgctgcaaaaggtcatttcataaccactggaaatactgcctttctcccacccgaccctgccctgtgctttctggggaaaagtcaccctgtgaagaagccatcaggtcagaggcagaggctacaaggaacccttggctttataccacacagcacaccctagagcaagtttgtccaacctagagcccaggagagccttgaatgcagcccaacagaattcgtaaactttcttaaaacattatgagattattttgcgatttttctttttagctcatcagctrtcattaatgttagcatattttatgtgtggcccaagacaattcttcttctaatgtggcccagagaagccaaaagattggataaccctgccctagagggtcatgcaacaggaaagggggcatcccaaaaggaaacatgaaaactatgctccctccaggaactgaaagaactctccacaactgataccaaaaa

SEQ ID NO: 435450 - DNA, 585 bp, Homo sapiens
gggtttcactgctaattcctttggggaaaatactgaagagataaaaataataaacgtgggaaagtgatgaaagttacagaygcttacaaagttcttacagtcttattcccttgttgatggttcatgactcttttctgaagataggaattggaaacttccctttgaatcttgtcctgtaattttatttttaagactggggctaatccaatgtcacttctcctctgagccatctacggagtaggtggtatgcaatttttctccttgaagtctcctggctcaccattggaaaggtttaaggcagatgcaaattttcaggctctctccccttaaactattctctattcacaaaggaattacacctttcagacacttcttcacaatgttaaactctgctgtctaaagtcttgatttcttatccacaccaaataacgcatgttatttttttccaaacatcaaggtgtatttccttagtgttttattttttaatcataacccctcacagccttacatattttcatcttttctcatttgtaattatatctaccttaattgtttctcttcttagagacttccttgaatgtgaca

SEQ ID NO: 435451 - DNA, 585 bp, Homo sapiens
gggtttcactgctaattcctttggggaaaatactgaagagataaaaataataaacgtgggaaagtgatgaaagttacagatgcttacaaagttcttacagtcttattcccttgttgatggttcatgactcttttctgaagataggaattggaaacttccctttgaatcttgtcctgtaattttatttttaagactggggctaatccaatgtcacttctcctctgagccatctacggagtaggtggtatgcaatttttctccttgaagkctcctggctcaccattggaaaggtttaaggcagatgcaaattttcaggctctctccccttaaactattctctattcacaaaggaattacacctttcagacacttcttcacaatgttaaactctgctgtctaaagtcttgatttcttatccacaccaaataacgcatgttatttttttccaaacatcaaggtgtatttccttagtgttttattttttaatcataacccctcacagccttacatattttcatcttttctcatttgtaattatatctaccttaattgtttctcttcttagagacttccttgaatgtgaca

SEQ ID NO: 435452 - DNA, 565 bp, Homo sapiens
gacactaacactagaagacctcctttaaaatacacwtctttacctgggaggatgagacacataagccttcattgttagtcttctctcataactatcatgccctaaagtgtctgccagttgaattgcttgttaatttaggcaaattggaaaggcatagaaagatgacttaacagagcaagactaggaaatacatgtaacatggtgtcatgtgccatcttacatatgggcaccaaaactcatgctgagaggcctgagtttccttatgaaaatgagcattattactcttctatccattatgtgcccagaatagttgtaaataaagacatccagaaaagctactttcaaatgcagtggtgggaaaaaagacatcaaaaaatgccgacagtgatgagcaaaggattttagctatttttatttcttatctcttctccatatttttcttttgtgatataggtattagtccataataaaagaaatttgtgttttaaaaatatggtaatactgaactttctaccctacttaaattggccagaataagtttgaaacatttcagcttaagaagtta

SEQ ID NO: 435453 - DNA, 566 bp, Homo sapiens
gacactaacactagaagacctcctttaaaatacacatctttacctgggaggatgagacacataagccttcattgttagtcttctctcataactatcatgccctaaagtgtctgccagttgaattgcttgttaatttaggcaaattggaaaggcatagaaagatgacttaacagagcaagactaggaaatacatgtaacatggtgtcatgtgccatcttacatatgggcaccaaaactcatgctgagaggcctgagtttccttatgaaaatgarcattattactcttctatccattatgtgcccagaatagttgtaaataaagacatccagaaaagctactttcaaatgcagtggtgggaaaaaagacatcaaaaaatgccgacagtgatgagcaaaggattttagctatttttatttcttatctcttctccatatttttcttttgtgatataggtattagtccataataaaagaaatttgtgttttaaaaatatggtaatactgaactttctaccctacttaaattggccagaataagtttgaaacatttcagcttaagaagttat

SEQ ID NO: 435454 - DNA, 566 bp, Homo sapiens
gacactaacactagaagacctcctttaaaatacacatctttacctgggaggatgagacacataagccttcattgttagtcttctctcataactatcatgccctaaagtgtctgccagttgaattgcttgttaatttaggcaaattggaaaggcatagaaagatgacttaacagagcaagactaggaaatacatgtaacatggtgtcatgtgccatcttacatatgggcaccaaaactcatgctgagaggcctgagtttccttatgaaaatgagcrttattactcttctatccattatgtgcccagaatagttgtaaataaagacatccagaaaagctactttcaaatgcagtggtgggaaaaaagacatcaaaaaatgccgacagtgatgagcaaaggattttagctatttttatttcttatctcttctccatatttttcttttgtgatataggtattagtccataataaaagaaatttgtgttttaaaaatatggtaatactgaactttctaccctacttaaattggccagaataagtttgaaacatttcagcttaagaagttat

SEQ ID NO: 435455 - DNA, 503 bp, Homo sapiens
ttcatccaaattccctaaatgttaacattttactatatctgctwtattcttctgtgtttgtgtgcacatgtgcatgtgtatttttttctgaaatgtttaaaagttgtccacatagtgcccttttgttcctaaatactttagtgtgtatttcctaaaaacatggacgtaaccctacatatccacagtatagttatcaaacttggagaattggccgggcatgttggctcacacctctataatcccagcaccttgggaggctgaggcaggaggatcacttgaggccaggaactggagaccagcctggccaacatagtgagactccctatcttaaaaaaattttttaggccgggcgtggtagctcacgcctgtaatcccagcactttgggaggctgaggcaggcggatcacctgaggtcaggagttcgagaccagcctgaccaacgaggtgaaactctgtctctactaaaacacaaaaattagctgggcatggtggtgggcgcctgt

SEQ ID NO: 435456 - DNA, 503 bp, Homo sapiens
ttcatccaaattccctaaatgttaacattttactatatctgctatattcttctgtgtttgtgtgcacatgtgcatgtgtatttttttctgaaatgtttaaaagttgtccacatagtgcccttttgttcctaaatactttagtgwgtatttcctaaaaacatggacgtaaccctacatatccacagtatagttatcaaacttggagaattggccgggcatgttggctcacacctctataatcccagcaccttgggaggctgaggcaggaggatcacttgaggccaggaactggagaccagcctggccaacatagtgagactccctatcttaaaaaaattttttaggccgggcgtggtagctcacgcctgtaatcccagcactttgggaggctgaggcaggcggatcacctgaggtcaggagttcgagaccagcctgaccaacgaggtgaaactctgtctctactaaaacacaaaaattagctgggcatggtggtgggcgcctgt

SEQ ID NO: 435457 - DNA, 503 bp, Homo sapiens
ttcatccaaattccctaaatgttaacattttactatatctgctatattcttctgtgtttgtgtgcacatgtgcatgtgtatttttttctgaaatgtttaaaagttgtccacatagtgcccttttgttcctaaatactttagtgtgtatttcctaaaaacatggacgtaaccctacatatccacagtatagttatcaaacttggagaattggccgggcatgttggctcacacctctataatcccagcaccttgggaggctgaggcaggaggatcacttgaggccaggaactggagaccagcctggccaacatagtgagactccctatcttaaaaaaattttttaggccgggcgtggtagctcacgcctgtaatcccagcactttgggaggctgaggcaggcggatcacctgaggtcaggagttcragaccagcctgaccaacgaggtgaaactctgtctctactaaaacacaaaaattagctgggcatggtggtgggcgcctgt

SEQ ID NO: 435458 - DNA, 619 bp, Homo sapiens
cttaccttacccatcctattcaaaatgtcagtctccatatccttccttgtcttcgtggttccccttttcctgctccatttttttcctacagaacttataaacttctagtatattttatattttgcttattaatataattattgttttttgggtcagctacagcctgttaaaatataactcctccaaagcaggaatctgtcccctttctttcctgctgatttgtcccaattgtcaagtaaagtgcctgaaacatttttgctaaatgatgcattaattatattctcttcattgtcttaaagttgctcttttctgtattatttttagtttgagtatgtttttaattaaggtgtaattcctatcttattttgtatatgcctgtattttgttttattttattttattaaggtgtaattcctaccktattttgtagctgtattttattttaatgcaagctgtcttgtgggacttgtatatttatgcaaccacacggactatatctttgcttcataataaagaatacatatgttaggagagtcagagggacatcattgttgaggcaaagataatctttgaatatgctctaaaaatagttttgacagcaatgtgtttcttgatataa

SEQ ID NO: 435459 - DNA, 497 bp, Homo sapiens
tcatttcattaaagaaattggttgatgtttttaatatattttttcttttggaacactactatatgttaagaaaatttgctccttagaatttgacaaatctttttttcaaagcaatttaagctctttgtgttcgttgttgggagttagattagtgatgttggattgctagtataatatctttaatagttactaatttataccagttttctatttattacctgtcaattttcaaattcatattttctacaaaattgtccaattcttattttcattttcyagcaaatatttatatgcagttttcttctatgttcctagttatgtttctttctatgttttcgatagcaatatttataccttctttctattttataaaattagttttgcctgaggctcatttattttataatccttctgggaatcaacatttaagttaatggagcattttttttgtattttatttaatttctggcattacctttattaccttcttttatcac

SEQ ID NO: 435460 - DNA, 391 bp, Homo sapiens
gactgtctcagctgctcctgtgacctcagtcaccacctctaccctgatgtcccccagatctgcatttccagccgggtctctctcttcatacccatggagtgtttgcccagtgcccatagccctctctctctctcaacatgcccaccacccaacacctgctcctccagtggggtctcccccgtcccatgaaggcactcatggcaccttcatccatccaatgcccaaaccagaaatagagaagttgttctccttcctagttcccgtttccagttaatcaccgagccctacttcctgcggtgttttccaacccatccactcctcttccctgctgccaccaccctgggccaggccacagtcatctstcgtctgagctattgtggagctttcttgg

SEQ ID NO: 435461 - DNA, 414 bp, Homo sapiens
aaccaatgttatttaattttgtaaaaggctgaattttaaaaaaaatcctgtaactttcaggcccttgggattttyttggttattttctgcttttttctattttctagtcaaactagtttctatctgctgtgtctctaattcatatacttgtatatattcttagtcctgaagcttaagcctaggagagatgaatgatgattttctgattagcaacaaaaggattaccaatctagatgacagttgggattttaaaaatatattttattttttaatttttgtaggtacatggtagatgcttatatttatgggatacatgagacattttgatacaggcaggaaacgagtaataaccacaacatgacaaatagggtatccatcctctgcagcattcattgttttttaatggctgaacag

SEQ ID NO: 435462 - DNA, 586 bp, Homo sapiens
gaccattaaacattatagatatcttttgttcttgttgttttcctatgactctcatgaaaatttgaaactgtgttttattatcctcaaatcatttattcaggcctacataaattttggtactggaaacttgcctagcatagcaccaagatcaagggcttattttctattaaattagaattcagatctttgtatcacaaatttataaatgtatggtagtattagccacaaaataatctgtcatctggtctttacatttcaacactgggtaaaatgtaaactggataaaatggaaacttaattaggatattaaaaaatagatctatgagggacattcaaaataaatttagactggatatgtttatagggtgaactgtaattgtccacaaaactaactgtttarggaaacatcatattccctatgctaccccttttaaaggctataatatttaataaatatgctgccaaattgatcaatgtttagaatgtactttttctacagctgcagaaaaaatcagaatattatggtattgggccaaacaggtcataagaattgctgagaagaaaggtacaatcaattgagaataaa

SEQ ID NO: 435463 - DNA, 586 bp, Homo sapiens
gaccattaaacattatagatatcttttgttcttgttgttttcctatgactctcatgaaaatttgaaactgtgttttattatcctcaaatcatttattcaggcctacataaattttggtactggaaacttgcctagcatagcaccaagatcaagggcttattttctattaaattagaattcagatctttgtatcacaaatttataaatgtatggtagtattagccacaaaataatctgtcatctggtctttacatttcaacactgggtaaaatgtaaactggataaaatggaaacttaattaggatattaaaaaatagatctatgagggacattcaaaataaatttagactggatatgtttatagggtgaactgtaattgtccacaaaactaactgtttaaggaaacatcatatyccctatgctaccccttttaaaggctataatatttaataaatatgctgccaaattgatcaatgtttagaatgtactttttctacagctgcagaaaaaatcagaatattatggtattgggccaaacaggtcataagaattgctgagaagaaaggtacaatcaattgagaataaa

SEQ ID NO: 435464 - DNA, 588 bp, Homo sapiens
ttactgcctaagtttcaaggagtatataaagggtggaaaagcaatgattttttaaagatgacaaactattgaggttaacaggatttctttgactttaaaagtcatatgctgaaagctcttgttaaaaaaagattggcacaggtgacattgtcaaggataaacaatcattcttaaatcctttgtttcagtccacagtgaaacttaatccccgaggtgttactgtctctccatgcctgcatgtggatctcaccattcctctagtcctggtgcttgctttcaacacagagctctggactgcaaggcatttgatttctggtaattaatcagctcctcatacacgctatgtttctcccccaggcccagctcaagtgagtgatccaaatctggcttcaggaaaaaagaaagtgtttatgctctgagtgcacagaatgaaacactgataaacagttcttggtaaaacattgaatcacatggcattatttttcttttcaagtcrtaagtcattgtgaaaaaatacacgtagcaaaaaaaccaaaaccaaaacaaaagccaaacaaaaacacgttggatgccctttaaacagaaagc

SEQ ID NO: 435465 - DNA, 585 bp, Homo sapiens
gactcttgtacctaggttagagtcaaagctgaaaagaaaaggtgctaggtactctctcattccagaccaaaccctgtctgacatggcaagggcactggcacttgaattcccttttagtctagggcatcgcagacagtaacctagctaaggctgctttgctgttcctccacctaaggcaggctacctcccatgctgggtgtagacagcccactagcttttattctggagctgaaattttgaactcaaagctgagtcagggttcagtactgaggaagctgtaccaggctgcctaaaagacacacttgtaacctgtgagagtcagttatagggacagttatggcaaagaagayattgctagtcaacactggccaaagaaatagcaacattctgctcttctatataccaagatgcttgtcctctctcccttgtctcttttccctaacccagcatcacaaatggaggtgggaagaggcatgtaaagtacaaagaatgtgtctatctccactcttactcctcaagcccagaagctcagcctctgttggaagaagaagagatctgtgaaacagatatatgaccaaagtttta

SEQ ID NO: 435466 - DNA, 457 bp, Homo sapiens
agatgaatgcataatcacttcccctccactcctcttttcatatgtaaaatatggatttggtgagtactaatcaaagtaaccacttgtcatactgcctaccttcctccttttctttttcttytcttcctttccctcctgtctgctcctttctctttaaatattggtcctcaaacttctttggaaaaagcacaggccacagatcgtatttgtaacttgtggctttttttgtttgttttttgttttttcgaggcgcattctcaatcttggccaaataaacctctaaatcaattaagatcgatctcagacactttttgatttacaccgtctgtcaatccatccatagatccctctacccatctattgtagctagtcattgacaacatggcccaggagagtcatggccagaactgagctcagaggctaatagacctaggagaaacattgtctcggcattatt

SEQ ID NO: 435467 - DNA, 407 bp, Homo sapiens
tatggggttaccatgactttacctcttcaacatattgctgctaktttttaggccattgtcttccctagatattgttggagtttgtattaactcttttaagttttatccagcaaaatggtgcaccttatattctatttccatgaacttctaattaatatccagggaacagtttaggaactgagaacatcttgtttaacccactcaagtcacacttaagaaaaccttgaaggttttcaccttgtttggatgctatataagaatgcaattcagattcaaaaagtgtgttctgaaatcttacttggaacactttcactttgtaaaaagaatctttcattgtatatgagaataatctatctaccaagtgtactggatggattcccaatgaactttcctcatgtctgacttgt

SEQ ID NO: 435468 - DNA, 407 bp, Homo sapiens
tatggggttaccatgactttacctcttcaacatattgctgctagtttttaggccattgtcttccctagatattgttggagtttgtattaactcttttaagttttatccagcaaaatggtgcaccttatattctatttccatgaacttctaattaatatccagggaacagtttaggaactgagaacatcttgtttaacccactcaagtcacacttaagaaaacyttgaaggttttcaccttgtttggatgctatataagaatgcaattcagattcaaaaagtgtgttctgaaatcttacttggaacactttcactttgtaaaaagaatctttcattgtatatgagaataatctatctaccaagtgtactggatggattcccaatgaactttcctcatgtctgacttgt

SEQ ID NO: 435469 - DNA, 549 bp, Homo sapiens
tgctttctacttcccagtgtttcacttttttttcatgtcatggcacacagagaagatgataaatggccaagcctatcagcagctatggggatggttccagaggatccagctgccccaggaccctctggttattccagagtgccgagagaatcaataacatggtgttcctggaatctgccagggcttgctgctgagctcggctcaattcagctcttaccaacctacattttgcctgcatcacaaacttgacttgtttccgctcaaggtcacttaagacttatttgctgttaaacataacataccctttcactgtccttattttatgtaaaataagcaytttaatttaaagcaacatttgtcactgacggccacttcttcctgcaaagtcttgtgtctctttctgagatcccagtttttacttatttttctgcctgtgttgaacacattctgtgcattaccttacattgtcttggctcacttttatcccagcaattgctgtaataatcagctccagcctcatgccatgcgactcagaaggtctatggtgct

SEQ ID NO: 435470 - DNA, 549 bp, Homo sapiens
tgctttctacttcccagtgtttcacttttttttcatgtcatggcacacagagaagatgataaatggccaagcctatcagcagctatggggatggttccagaggatccagctgccccaggaccctctggttattccagagtgccgagagaatcaataacatggtgttcctggaatctgccagggcttgctgctgagctcggctcaattcagctcttaccaacctacattttgcctgcatcacaaacttgacttgtttccgctcaaggtcacttaagacttatttgctgttaaacataacataccctttcactgtccttattttatgtaaaataagcattttaatttaaagcaacatttgtcactgwcggccacttcttcctgcaaagtcttgtgtctctttctgagatcccagtttttacttatttttctgcctgtgttgaacacattctgtgcattaccttacattgtcttggctcacttttatcccagcaattgctgtaataatcagctccagcctcatgccatgcgactcagaaggtctatggtgct

SEQ ID NO: 435471 - DNA, 549 bp, Homo sapiens
tgctttctacttcccagtgtttcacttttttttcatgtcatggcacacagagaagatgataaatggccaagcctatcagcagctatggggatggttccagaggatccagctgccccaggaccctctggttattccagagtgccgagagaatcaataacatggtgttcctggaatctgccagggcttgctgctgagctcggctcaattcagctcttaccaacctacattttgcctgcatcacaaacttgacttgtttccgctcaaggtcacttaagacttatttgctgttaaacataacataccctttcactgtccttattttatgtaaaataagcattttaatttaaagcaacatttgtcactgacggccacttcttcctgcaaastcttgtgtctctttctgagatcccagtttttacttatttttctgcctgtgttgaacacattctgtgcattaccttacattgtcttggctcacttttatcccagcaattgctgtaataatcagctccagcctcatgccatgcgactcagaaggtctatggtgct

SEQ ID NO: 435472 - DNA, 601 bp, Homo sapiens
tggtcgaactactgcctgtctgccaggcagacacagctgctctcagggtctgccagagccacgttacagcctgctgggaaatatgccgatgagcgggagtttggcgtggsgtcagtttggacctcaggcctcactgtgggctcatcctcgctgtggttttctggcataatgagtagatgctccaccaacccaaagagaatgctgtggttctcttgccctgtttcttcaacacacatgcacacacacacatgaacctaaacacatgcacatacacacttacattcacttgccacatattctccttggaataaaaaggaaagtcttgtaaggaaattggccgtgtgccacattgccataggctatactgtaggtgctttggataaagcttgtgaaggaacatatgggcctcatgaaagaaacacctgcttgttcaaactgaaaaataaaaaataaaagttgccccactgctaatttggaaccccctagaaggaaagctgactgtgattaaatgaaagaggccactggaagctttttctgcccataccctcccagctggggcatctccattcccttgatttttaaacggatatcattaaaggca

SEQ ID NO: 435473 - DNA, 549 bp, Homo sapiens
tgctttctacttcccagtgtttcacttttttttcatgtcatggcacacagagaagatgataaatggccaagcctatcagcagctatggggatggttccagaggatccagctgccccaggaccctctggttattccagagtgccgagagaatcaataacatggtgttcctggaatctgccagggcttgctgctgagctcggctcaattcagctcttaccaacctacattttgcctgcatcacaaacttgacttgtttccgctcaaggtcacttaagacttatttgctgttaaacataacataccctttcactgtccttattttatgtaaaataagcattttaatttaaagcaacatttgtcactgacggccacttcttcctgcaaagtcttgtgtctctttctgagatcccagtttttacttatttttctgcctgtgttgaacacattctgtgcattaccttacattgtcttggctcacttttatcccagcaattgctgtaataatcagctcyagcctcatgccatgcgactcagaaggtctatggtgct

SEQ ID NO: 435474 - DNA, 571 bp, Homo sapiens
tttgggtttttcatagcaattgtataacttttatttgaaccttaaattctattatgaatgcaactgaaaaaaatatgctgggtgccatgataatagttgattgttttggtgactaaaagtaacagatasatatacaaagccagaatgcagaactaaaatcttcagtttgaccctgtgggacatttaattccataggaagatggggctatcttctctctgagtctgtcggtatgaataaatttcaaaattctctgacctgcccatccaagtagctgcaaacgactggctcactgatgagatcttataatttcatgaaagcatacaaaataaaacaatgttttgtggcagctggttcagagaagtggcctcagaaaagaagtagctctatggttctacctccttattaccactgttcttctaggaaggacagaacaaaagtatttttggaatttttctatactgtaggaacggtgctaggtactgagcatgcaatggcagaaaactcacaccctgctcttaaggaacttaaaatcagcctgagcaccttccagctttctctagtagtaggaag

SEQ ID NO: 435475 - DNA, 623 bp, Homo sapiens
ataatatacaactctattgtaggatttccaaacaccaggttccattttgcttagggaagtaattattgagtgcccactatgtgccgtcctgttaggggaagtgacatatgaatccagtcagttccatcaaggtgttgagttaaytctactgccatgaacttggtctccaacaagattgggatagtttataagccccagactgctcaaggtgccacagaaaatgtcaggcccactgttgtctttttagttcttggggatgaatctgtgccttggatttaagctgaactgaattgtcccacagaaaacttcagcccattattgaatcctgggcttcgtgcatcagatcatgactcccacttctccattgccaactcttttgaccccggcaacaaggcagtcttctgtgactaagactcacactaagatcctgaaaacgatcgcctgaagactaatgggcccttttctcctcaccatagatttagattactaattaactcatctgctacaagttctctaaggggttatttctgccaacccaagaaaagccacttaggcccccacttccccctggtccccagggaaggctctaaatgctttgcagccctgcacacttataggaaaga

SEQ ID NO: 435476 - DNA, 576 bp, Homo sapiens
ctttgcagccctgcacacttataggaaagatgtacccatcttacatacacaggttatgatcccaaaccagactccagcctgttgaaaatttaagggcctagtcttaccttgaattcttttcctagtgtaaagtttgtaacaaagccctatgtctgtgacccttttagcttgcaatgactactcgcttctacacaattccctcaattctgttgagaatgatcctgttttccatgcagtactgtatctcactgaaattaaacaattaaatctgaatccttagggcttgcacaaagaaactttcaaataatctcagatgcttacagcccagcaggacagttacaactccrtaatgtatccagacatcatgtcagatacacatgaaaaattctagcatctctatatcagtgacagatttcacacacaaagccaaacgattcaaatcagatcctagcattcaagcttttcagtgaacagcgcctgaaattaaattactttgacctgaagcccaggctgatgcttagcatttcctttctggagccatagttcacctttagagatgttctaatttccccttta

SEQ ID NO: 435477 - DNA, 571 bp, Homo sapiens
tggtatttattatagggttgtaactgcacaatcctcttgtcagtttcaaatcctatttccagtttgatttgactttgatactgtatacctaaaagtggggcatgacatcgtagaaagactgtagagctagaggctctgtttttgcactcttactcactagaatagatgcttaatctctttgaatcacaggactgtcccttggagaatggacataatgatttctgaggatatgttagtgtgatattctattccaagaaagttattacactagttataataatacygcctggagccctcactattaatattcaactgtaaaacagatgtattataatagtaaaggtataagtaacacagaccatagtagtgtagcaaagtgggtggaacttctcagtatctttttcctggatactttgttttgagttgatcatggaggctctgggtattttgtagaaaacatggtttaccaagaatccaaataataaaatccctgcacgagagtaatatgaattatatgtaatttatattactaaattattactgtattacaaataaagcactattttaaacc

SEQ ID NO: 435478 - DNA, 632 bp, Homo sapiens
tggaaatgtctttgaaattgtcagtatacgattttgtctgggtttgctgattagataagttttatatttgccactactagatgttttaagatggcaggatttggccgggcacagtggctgacgcctgtaatcccagcactgtgggaggccgaggcrggcggatcacgagatcatgagatcaagaccatcctggctaacatggagaaaaccatctctactaaaaatacaaaaaattagctgggtgtggtggcatgcacctgtagtcccagctacttgggaggctgaggcaggagaattgcttgaatcccagaggtggagggtgcagtgagtcgaaatcagaccactgcactccagcctgggtgacagagcaagactccgtctcaaaaaaaaaaaaaaaaggcagggtttgatataaagattatgagactatgagactatacgtccagccaaaaacaggatcttttgtaattttttaacaagcaagaccagttgaatactgttggttcaataaaaacagctacatttacttacttatgtgaacacctgatattcacaagctatgcaaatggctaacagggaaataacttggaacaatgattagctttgtctaatgtcttggttctcatgagtaa

SEQ ID NO: 435479 - DNA, 632 bp, Homo sapiens
tggaaatgtctttgaaattgtcagtatacgattttgtctgggtttgctgattagataagttttatatttgccactactagatgttttaagatggcaggatttggccgggcacagtggctgacgcctgtaatcccagcactgtgggaggccgaggcgggcggatcacgagatcatgagatcaagaccatcctggctaacatggagaaaaccatctctactaaaaatacaaaaaattagctgggtgtggtggcatgcacctgtagtcccagctacttgggaggctgaggcaggagaattgcttgaatcccagaggtggagggtgcagtgagtcgaaatcagaccactgcactccagcctgggtgacagagcaagactccgtctcaaaaaaaaaaaaaaaaggcagggtttgatataaagattatgagactatgagactatacgtccagccaaaaacaggatcttttgtaattttttaacaagcaagaccagttgaatactgttggttcaataaaaacagctacatttacttacttatgtgaacacctgatattcacargctatgcaaatggctaacagggaaataacttggaacaatgattagctttgtctaatgtcttggttctcatgagtaa

SEQ ID NO: 435480 - DNA, 580 bp, Homo sapiens
tagtgctatcacatccttgagtagattatagacaatcaagaaatattaattaaattagtttcacaccattctccaaacatagctccctacttccagttttctttctctctctgccatcaggacctatttctaagactattcctgtcacttcctatttataaaccttcaatggggcttcatcacatatgtaataaccagaaacctttccatcctggtatccgaggtagccatgatttttcctttctctgtgtatccagtcytttactcgtatttcatcagccctgtccctcctgatagcacacattatgaattatactctagtggcttcctgagcactttaaacttttcatttctgcctttatataaactatgatcccatctcagattgccattttcatccatctccacctgttgtagtcctaatcctcctgaaaggcccagttcaaatcccacttcatctaagaagctgacccagatttccctatgcagaactaaactccctcaatccacgctggctgtcacagccttttatctgtaacatttttactgcaatgagcaatttgtattttgacttagaatt

SEQ ID NO: 435481 - DNA, 579 bp, Homo sapiens
tgctgttaaaccataatgcaacttgaaagtgatggggagaggggctcttcttggatgcgacacccttccagggtcccagggcattgtcataattaacagcatttgcagttttgtaccacatgcaggctttggcccaaggaaaggcttggtactgaagggcctgagagcacgtgacctgacagccgtcgacctgggcaaggaacagygacactggagtgggaggttgggggaaactgggggagtcagaggagttgtcacacacaaaaacaatgggagctggaaaaggagggaaggaaaatcagacatatcatgtagtagttgagaatagcattcatgagcccatgtgaggcttcttccttcaccccaagacagtccctgagatatgggggagattgaacgggagggggcagtctcccaatggaggagagacaaaagccagaagagcgctgttcatgaaagtgatgtgaccggtttttttttttttggtgtgacctgagaaacatcggatgcctttgtaattattaactgcaacttttaatagtatccagaaagtcccaaatgctttcatgtagctaattt

SEQ ID NO: 435482 - DNA, 475 bp, Homo sapiens
ctgctgaaatatcttagggagtctttaatccttgctttctgggcaagggaatgattaggaaaattggctcttaaaaaattcactgatgccacattactaactgcatttgataccatagccagcaatttctagtgggacactagtgggagaaattttgggccagtgtcaaatatgaagaactgaggatggaaatgtaacttttactgatcttgtcaatagcctcaagaccgtaatgcattcaaagataatcctctcattactctgagctctcaatacacatacagtaggtgggctttaggtctggaactattatcaggattgtacagttaggacaggctttgttatgctgtcataaaaaagtaagccaaaaatctcagttgactttgcacaataaaagtttrtttcttgcccaggagatttctaatgcaagtcagataacattccaagagagttatcctccatgcagtgactcagt

SEQ ID NO: 435483 - DNA, 588 bp, Homo sapiens
agtgtcaataggattgatacccattcttttttgaacatctgattagaattcaggtgtaaatctgtctggtcctggacatttttggttgccaattttttttattaccatttcaatctcactgcttgttattagtctgttcagaggttgtatatcttcctggtttaatctaggagggttgtatatttcctggaatttatccatctcctctagattttctagtttatgtgcataaaggtattcatagtagccttgaataatcttttgtttttttatcagttgtaatatctcccatttagttactaattgagcttatttggatctgctctcttcttttcttggttaatcttgctaatggtctatttarttatcttttcaaagaaacagctttttgtttcatttatcttttgtattgtttcctttttgtttgtttgtttcatttagttctgctccaatcttcgttatttcttttcttctgctgggattgggttttgattgttcttgtttctccagttccatgaggtgtgaccttaggttgtctatttgtaccctttcagacatttgatgtaggcatttaatgctatgaacttt

SEQ ID NO: 435484 - DNA, 588 bp, Homo sapiens
agtgtcaataggattgatacccattcttttttgaacatctgattagaattcaggtgtaaatctgtctggtcctggacatttttggttgccaattttttttattaccatttcaatctcactgcttgttattagtctgttcagaggttgtatatcttcctggtttaatctaggagggttgtatatttcctggaatttatccatctcctctagattttctagtttatgtgcataaaggtattcatagtagccttgaataatcttttgtttttttatcagttgtaatatctcccatttagttactaattgagcttatttggatctgctctcttcttttcttggttaatcttgctaatggtctatttagttatcttttcaaagaaacagctttttgtttcatttatcttttgtattgtttcctttttgtttgtttgtttcatttagttctgctccratcttcgttatttcttttcttctgctgggattgggttttgattgttcttgtttctccagttccatgaggtgtgaccttaggttgtctatttgtaccctttcagacatttgatgtaggcatttaatgctatgaacttt

SEQ ID NO: 435485 - DNA, 619 bp, Homo sapiens
gtttatgatggcatgtcatatatctctcatggatacaatagttctggatgtttctagggatggtaggtacaaacataatgttttagcacactttctttagcgacaacatcatagaatacagggagaatacagaattggggaaggagcaacgtatgactcaatagttctgaaccacaacctggaaatgtctgttgccatccttcccaactttttcatctgtttttaaaatcttgtatacctctttaaatgcttttttggaacagtgtaggaagaggaacacttttcttctttatttaaaaaataattactgtgttagaaaactacttatcatgtaggaaataataagcaatttatggtcacaagtctaatggaaaaataatttctgttaagaaatmtttagttcatatatcattgattagcttagtaagacaggaattacagttacccagatgttgagttattctcaagtaaccttggctctagttgaaataatctattttccaagtgtgcacatacctatgtttgcagcagttgattgccttataagtcagtctcttttgttgaagttgttgttggcatctttattgacatacataaagacaaactctaaaatattata

SEQ ID NO: 435486 - DNA, 472 bp, Homo sapiens
ttttgtttcattttttaaagtcttctacctcagttgctaatggacaaggtttccctttgtctttggctagatatttctttcttagagacaaagagaaacaatggtgcttttatctatttctactggggatgaatagggcctggttatctraaatccatgcctatgaccaagcagcaagaggcaatgtgattatagcaaagagatgaacaaaaacacagcaagaataatgcagaattaaaaatattttaagttattagcaattttcataaaaataggtgaaactgactttgccaagttatgacagtaaaagaaatatgatgtagtttactctattttgcttctgacatgcaagctgtccttggtcatacctaggaataggtcaatctaactttgggaagaatttagtttatagtttaacttgaaagcaaggatgataatagtttctccctaaaatgaatcccctccttgctca

SEQ ID NO: 435487 - DNA, 578 bp, Homo sapiens
atatttcaaatattgcatgggacatactgaaaagactgcaaagcagttgtgtttgcttaaaacaaaaactaaggttgactcttggcagctgaaatttgtatttctacagtagacacacaattacttatcctgtctgctcgtttttttaaataaaaactcctctattttatacaaatatttttagcatggaacatacttatattttaaaattatttgttatttatctaaaattcaaatttaactgggcatcctgtattttgtcttggcaacattagaaaatgctacacttactttaaatatcaggaacgtttaacattttaaaaaacaaccaatccaaatkttgtataatttgaagtatttaacactcaaaagagggagtgttatcctaagaggttgatagaagcctttttcattatatctgaattttaatcctgttccaacccaaaggacctaatctcaattttgtaaatgtattttttaaccttgaaatttgcagatctaggagagtaaaaaagttcttaatatccttggaatatctgtgtttctctctccacaatgtttcgcatcatcctaacatg

SEQ ID NO: 435488 - DNA, 576 bp, Homo sapiens
tgtgtttttttctacaattttcactgttttagctttttatttaggtttattatccatcctggaattattttgtgtatcatataagttgcttttcctcaaaagtcatatcgtttgctttasttttgtttgctcttcagtggccttcaagtagctgttttgttggtttatttgctttttcatattgtctggtctataattattatccctggtagggttaatccaattcaatctactttgccattactgaagctattccaaacacaaccaacctcttcatgtcctggaagcatggtgataatgcctaaatagttaactccttcttctagtatcctgccagatgaatttgtatcagcaattgtgtcatgttctgagagttgcactaaaccaccaatcattcagttggtgaggtctttgagaaaaatgataaattttgggttaggtgatgagaaaagtgtgtgttttacatagagattaaggagccctaccctagagtgtataaagattagcctattgctgtcatcaaagtcatttatcatttattacatatattttattgcttggtaataatcttttagt

SEQ ID NO: 435489 - DNA, 607 bp, Homo sapiens
aagtgctcactgaatttctcttgagtgataagctaggatacaaggtatcagaaaaaaaggagtaaggatgggcattggatacagatgtcagggaagtctgaatgtcttttgctggttaaaagaacaggatactttttattttcattctaaaccatgcctgatccttgccccctatatcaatgtatcacttccttgatggcccctcaaacatgacttctttgaagttgagggtcattgacaaaggctccttggaagtgcaccgtggctactaaaatttctgtctgtgctttgtgcctgggtatcagtacacgtgtcaactgaggttttcttattatttaaatttcttccttcatctgattaataaaacaatgcatacatgtacttcatgcatatataacatacctttttacatttctctttacttttcaaacattttttttatttcagtaggtttttggggaacaggtggtgtttagttacataaataagttcttcagtggtgatwtttgagattttggggcacccatcacccgagcagtatacactgtacctaatgtgtagtcttttattccttgccaacccccattccttcccccgagtcccccaa

SEQ ID NO: 435490 - DNA, 420 bp, Homo sapiens
gggcacccatcacccgagcagtatacactgtacctaatgtgtagtcttttattccttgccaacccccattccttcccccgagtcccccaagtccaatgtttcattcttatacctttgtgtcctcatagcctagctcccacttgtgagtgagaacatatgtttggtttttcattcctgagttacttcatttacaataatagtgtccaaatccattcaagttgctgcatatatatatatatatatatatatatatatatayacacacacacacatatatatacacatatatacatatatatatgtgtatatatatatatgtgtgtatatatatatatgttctttgtccactcattgattgctgaacacttgggctggttccatatttttgcaattgcaaattaagctgctataaacatgcat

SEQ ID NO: 435491 - DNA, 491 bp, Homo sapiens
tgcatatataacatacctttttacatttctctttacttttcaaacattttttttatttcagtaggtttttggggaacaggtggtgtttagttacataaataagttcttcagtggtgatatttgagattttggggcacccatcacccgagcagtatacactgtacctaatgtgtagtcttttattccttgccaacccccattccttcccccgagtcccccaagtccaatgtttcattcttatacctttgtgtcctcatagcctagctcccacttgtgagtgagaacatatgtttggtttttcattcctgagttacttcatttacaataatagtgtccaaatccattcaagttgctgcatatatatatatatatatatatatatatatatacacacacacacacatatatatacacatatatacatatatatatgtgtrtatatatatatgtgtgtatatatatatatgttctttgtccactcattgattgct

SEQ ID NO: 435492 - DNA, 562 bp, Homo sapiens
ctgcttcagtcattgtcttgttaccagcagaagtgacatgttgcagacctctctttaatacttggccatctaagataaaaagtaaaaggaccattgagttttgttttgtttttttttttttaaataaatgyacggggtacatgtgcagttttgttacatggatatattgggtaatggtgagttttgggcttccagtgtgcccatcacccaaacagtgagcattgtaaccaaaaggtaatttttaaagggattcttatagtaatttttaaaattaaaaatgccacatcacatgtgcatttttagaaaaatgattaaaagagaaaatcataactctgttttgaagggatcttttattttcatcaaaatgttatagtgaggaaataaccattattaaacttcttttcttcttactcagtaatcagataaaggcatccagcttcacccacaatttcttcaaatacattgaaaatggagttaaatattttcacaggtaagtcactttataaatcaatagatgagactactgtaactatattactagttcttttgacataaatattaa

SEQ ID NO: 435493 - DNA, 562 bp, Homo sapiens
ctgcttcagtcattgtcttgttaccagcagaagtgacatgttgcagacctctctttaatacttggccatctaagataaaaagtaaaaggaccattgagttttgttttgtttttttttttttaaataaatgtacggggtacatgtgcagttttgttacatggatatattgggtaatggtgagttttgggcttccagtgtgcccatcacccaaacagtgagcattgtaaccaaaaggtaatttttaaagggattcttatagtaatttttaaaattaaaaatgccacatcacatgtgcatttttagaaaaatgattaaaagagaaaatcataactctgttttgaagggatcttttattttcatcaaaatgttatagtgaggaaataaccattattaaacttcttttcttcttactcagtaatcagataaaggcatccagcttcacccacaatttcttcaaatacattgaaaatggagttaaatattttcacaggtaagtyactttataaatcaatagatgagactactgtaactatattactagttcttttgacataaatattaa

SEQ ID NO: 435494 - DNA, 564 bp, Homo sapiens
gttgccagactaatttatctttttcttctcctgctgaaaacattgcagtggtgttctgttgccttctctattaatactaattccttatcctggcactcaaagacttccacaatccatccccaaactgtgttttcatttttattttcattggttccctctaaatatctakacttgtgaaatattagccttatgtattcttaaaatgcatttggatcattctctttccaacacttgaaatacacctttccttctctctgttaaaactgttcaactcttgtcagcctttcacccaccacaaataatattttgtctatatcagctcttagtaatctcatgtctttgaatagttacacttaacctgtaaaaccgtgtgtgtgtgtgcttgtgtatgcgtgtgtgtactcatgcattacccaacaatatctcttgtatttttgtcttatttaccttatttttattattcaccttttcatccatatataatttcactccccaattagattgaataatctctacaaacaggaatctcatcttaaaccttgtacccccactacagcatctggt

SEQ ID NO: 435495 - DNA, 632 bp, Homo sapiens
catgttgccagactaatttatctttttcttctcctgctgaaaacattgcagtggtgttctgttgccttctctattaatactaattccttatcctggcactcaaagacttccacaatccatccccaaactgtgttttcatttttattttcattggttccctctaaatatctagacttgtgaaatattagccttatgtattcttaaaatgcatttggatcattctctttccaacacttgaaatacacctttccttctctctgttaaaactgttcaactcttgtcagcctttcacccaccacaaataatattttgtctatrtcagctcttagtaatctcatgtctttgaatagttacacttaacctgtaaaaccgtgtgtgtgtgtgcttgtgtatgcgtgtgtgtactcatgcattacccaacaatatctcttgtatttttgtcttatttaccttatttttattattcaccttttcatccatatataatttcactccccaattagattgaataatctctacaaacaggaatctcatcttaaaccttgtacccccactacagcatctggtaagtaatgagcttggaatagaggctcaataaatgtgtatcgaacatactgtttttcctgaatttg

SEQ ID NO: 435496 - DNA, 604 bp, Homo sapiens
catggtatggatataccacagtttatttaaccattcacctattgaggacatctagatattttctagtttggggctactatatagaaggctatcaaagaaaatagtgcacagggttttgtgtaaaaacaagttttcatttttccaggacaagtgcctgtttctaatcctctttgacaaaatgtattttcatatattttacctattttctaattggattgtttgttttaattgttgagtgttttcatttgttctagatattagtccattgttacatatgcagcttgcaaataaatgaattcagtaaagttccgggatgcaaaatcaatgtacacaaatcagtagcactgctatacaccaacagtgaccaagctgagaatcaaatcaagaactcaatcccctttacaatagctgccaaaaaaaaaaaaactacaaaaaaaaagcaaacaaacttaggaatatatctaaccaaggaggtgaaagacctctacaaagaaaactacaaaacactgctgaaagattcatagatgatacaaacaaayggaaacacctcccatgctcatggatgggtagaatcaacatcgtgaatatgaccatactgccaaaa

SEQ ID NO: 435497 - DNA, 560 bp, Homo sapiens
agataatgacaagggatattacctgggtggttctggcctaattatatgagccctttaaggcagtgttttatccaaaagatagcaggaaagagatttaaagcctgagaaggtttcaatgagccattgctggctttggagatggagcagaccatgtgcaaggactggaaagtggcctctaattgcgagagtaacccctggctgagagcccgcaagcagagaaggcctttgtcctacaattgcaagaatctgaattctgtcagcaatctgagagagcttggaagcagattcttctccagagccttcagattagaaagcttcccagctgacaacttgattctgaccttgggagatgctaaacagagaactccatcaaacttgcctggacttctgacatacaaactgtgaactaataaatgagtgtttatcattcaagttaatcttaactggaatggtgagctaataagaygatgctgttttaagccgctaaatatgccataatttgttatggggtgacagaaaacaaacatgcaccccactcccacacccaacccaggatgtgg

SEQ ID NO: 435498 - DNA, 457 bp, Homo sapiens
ttttagttaagattctctgttctttcaaagccacttgaccatttctaccaaatctagaatcatcctaaattcagaaattccttctctaattatttcctaggaccatattcatcagccccacattggtacctttattgagagctaactaaatagcactcttctcattacatgctcagtttttcatgcattctctgatttaatccttatgacaaccctgggaagtagtgattattatgcttagtgtaaagatgagaaacctgaggtccaagatatttatcaattttattcgaggtcacatagtttaataaaatccagaagcaggattagaagtcagtcactccaatgttaagcactttattcttaactgtcatactttgatgactctcagtttagcrgtgctaataactacccagtgagtgtcatgatatcttttctctaaactccttagaaaaaattg

SEQ ID NO: 435499 - DNA, 602 bp, Homo sapiens
aaaccaaaaccacaacatctgtaagacatcagtggacaaatgagctctatgactgtctttcatgttaaatgtctgagaactagaacagacttaaactttccagccttctacaatctaatgtctagggtatttgaagaaaaggttataaacagtttcatctcaaagcatcctaccaccccaactaaactggcamaatgtcttatgagtcccttggctggatgcacagagttataccacagagttgtgtgtaactacaatgctaaatggtgggatatgacacactttgatgcattaaacactgcttcttagtggattagagtttctttatagggcctttcagtgaaccatgaaaaagttgttggttccattccaatttaatttgtgaagccacttgcaccactgatgcaagagaacacgttctagaaaataaattctgtattattctgtgtcctttcttatctccaatagcttatttctttattagtaagtaaaagatcattttcagtgattaaaaatagcaaccctggaatccctaaatatattcttgctttttgtcatgaaaaaagttaacagtgataaagacaattctaaaatttgacaat

SEQ ID NO: 435500 - DNA, 573 bp, Homo sapiens
tgacacactttgatgcattaaacactgcttcttagtggattagagtttctttatagggcctttcagtgaaccatgaaaaagttgttggttccattccaatttaatttgtgaagccacttgcaccactgatgcaagagaacacgttctagaaaataaattctgtattattctgtgtcctttcttatctccaatagcttatttctttattagtaagtaaaagatcattttcagtgattaaaaayagcaaccctggaatccctaaatatattcttgctttttgtcatgaaaaaagttaacagtgataaagacaattctaaaatttgacaataaattatagagattcatatgggaaatttaaaactaagttttagttttaaagccaaaaattgtaaactaaaagttttaacactgagtttaggaacttagaaggtgattgcattttaaataacacttaatccctaaacaacaacaacaaagaaagtacaaaaataaggctgtaaaatgaaaactaaacataaactttctgcaaatattaaaaacatagagaagtgaaaaataccctactttcagttt

SEQ ID NO: 435501 - DNA, 573 bp, Homo sapiens
tgacacactttgatgcattaaacactgcttcttagtggattagagtttctttatagggcctttcagtgaaccatgaaaaagttgttggttccattccaatttaatttgtgaagccacttgcaccactgatgcaagagaacacgttctagaaaataaattctgtattattctgtgtcctttcttatctccaatagcttatttctttattagtaagtaaaagatcattttcagtgattaaaaatagcaaccctggaatccctaaatatattcttgytttttgtcatgaaaaaagttaacagtgataaagacaattctaaaatttgacaataaattatagagattcatatgggaaatttaaaactaagttttagttttaaagccaaaaattgtaaactaaaagttttaacactgagtttaggaacttagaaggtgattgcattttaaataacacttaatccctaaacaacaacaacaaagaaagtacaaaaataaggctgtaaaatgaaaactaaacataaactttctgcaaatattaaaaacatagagaagtgaaaaataccctactttcagttt

SEQ ID NO: 435502 - DNA, 541 bp, Homo sapiens
ctgtgtcctttcttatctccaatagcttatttctttattagtaagtaaaagatcattttcagtgattaaaaatagcaaccctggaatccctaaatatattcttgctttttgtcatgaaaaaagttaacagygataaagacaattctaaaatttgacaataaattatagagattcatatgggaaatttaaaactaagttttagttttaaagccaaaaattgtaaactaaaagttttaacactgagtttaggaacttagaaggtgattgcattttaaataacacttaatccctaaacaacaacaacaaagaaagtacaaaaataaggctgtaaaatgaaaactaaacataaactttctgcaaatattaaaaacatagagaagtgaaaaataccctactttcagttttctgttcgcgaatagtacatttcaacatttttagacaagaccttcgacctataacccaaaatgggacaacatttctgaaacgagaaaatagctatatgaacaataagaaggaaatcatttgctaagcaaatggacaa

SEQ ID NO: 435503 - DNA, 573 bp, Homo sapiens
tgacacactttgatgcattaaacactgcttcttagtggattagagtttctttatagggcctttcagtgaaccatgaaaaagttgttggttccattccaatttaatttgtgaagccacttgcaccactgatgcaagagaacacgttctagaaaataaattctgtattattctgtgtcctttcttatctccaatagcttatttctttattagtaagtaaaagatcattttcagtgattaaaaatagcaaccctggaatccctaaatatattcttgctttttgtcatgaaaaaagttaacagtgataaagacaattctaaaatttgacaataaattatagagattcatatgggaaattwaaaactaagttttagttttaaagccaaaaattgtaaactaaaagttttaacactgagtttaggaacttagaaggtgattgcattttaaataacacttaatccctaaacaacaacaacaaagaaagtacaaaaataaggctgtaaaatgaaaactaaacataaactttctgcaaatattaaaaacatagagaagtgaaaaataccctactttcagttt

SEQ ID NO: 435504 - DNA, 541 bp, Homo sapiens
ctgtgtcctttcttatctccaatagcttatttctttattagtaagtaaaagatcattttcagtgattaaaaatagcaaccctggaatccctaaatatattcttgctttttgtcatgaaaaaagttaacagtgataaagacaattctaaaatttgacaataaattatagagattcatatgggaaatttaaaactaagttttagttttaaagccaaaaattgtaaactaaaagttttaacactgagtttaggaacttagaaggtgattgcattttaaataacacttaatccctaaacaacaacaacaaagaaagtacaaaaataaggctgyaaaatgaaaactaaacataaactttctgcaaatattaaaaacatagagaagtgaaaaataccctactttcagttttctgttcgcgaatagtacatttcaacatttttagacaagaccttcgacctataacccaaaatgggacaacatttctgaaacgagaaaatagctatatgaacaataagaaggaaatcatttgctaagcaaatggacaa

SEQ ID NO: 435505 - DNA, 591 bp, Homo sapiens
ttctcttgacagccctcccaacccagtatgaaattatagtacactccaatggagcacaaggtggttaacacatcttgaaagtaagtccatggcaggaaaataaacttttgtttatagcactttgtaggtaactatctgttctatttccctagatcaggggatggcacactacaagaggcaggcctagacactgcctgttttttaaataaagttttatttgaacacagcgatgccaatttttatttttatttacatattgtttatgactacttttgtgctaaaacagaagagttgagtagcccacggagctgaaaatatttgttatttgtctctacagaaaaagtttataaaccccaaattggaatatcttacgtattcctattccatagtagttggttcacaaatgcctccaattaatccactcatgtgtcttgtgttgaaatctgtctgatatggaccacatagtagcttcatgtgtaaggaacataagattgaatcttgtagcaaagtacccttttccctttttccaaattttaaatgatagcaatmtgaatttgatattgtagaaaccaaactataaatttaaaaatc

SEQ ID NO: 435506 - DNA, 591 bp, Homo sapiens
ttctcttgacagccctcccaacccagtatgaaattatagtacactccaatggagcacaaggtggttaacacatcttgaaagtaagtccatggcaggaaaataaacttttgtttatagcactttgtaggtaactatctgttctatttccctagatcaggggatggcacactacaagaggcaggcctagacactgcctgttttttaaataaagttttatttgaacacagcgatgccaatttttatttttatttacatattgtttatgactacttttgtgctaaaacagaagagttgagtagcccacggagctgaaaatatttgttatttgtctctacagaaaaagtttataaaccccaaattggaatatcttacgtattcctattccatagtagttggttcacaaatgcctccaattaatccactcatgtgtcttgtgttgaaatctgtctgatatggaccacatagtagcttcatgtgtaaggaacataagattgaatcttgtagcaaagtacccttttccctttttccaaattttaaatgatagcaatctgaatttgrtattgtagaaaccaaactataaatttaaaaatc

SEQ ID NO: 435507 - DNA, 650 bp, Homo sapiens
cctgttctacctggatctggggttctgctaaacagcaaatgccaggagagaagcaaatcgtgtatttaaaattacccctaagcttgggagaaaatccacccactgtctccattatcgagattacccaggaggccgtgcacttgattcttcctttccttatgtttccaactctcattcctccaacttctcagacaaatgtatatagccatggagwgtggtgggggaattgtggcagggaggtgttgggttgggagaattagagtcatttattttacttgttcactgtgccttggggctttgggtagggtgtctggcttccaggaaaagatgctcattgaatttaagaagtgaaataatataaaaatatttgttctcctctatactttctctttacctatgagtggaaggggccagcaggtagtctgaagactcaagaaggggcattattcattgatacttcatattattttgttacctacttcattttctggtgagcacaaatttgcaggaaacacacttctcaactggggttcaaccaaatttacaacataaatgtttgaagccctgcctctgagccaaagtaagttaattaagataattcattagaccaacatccattgagtactccaaatatttatatatatatggca

SEQ ID NO: 435508 - DNA, 446 bp, Homo sapiens
caagtcaaaattatatgctccaaataccttgtcaaagaggccctatgtcggggcatcaggtgctggcttagttgctactaaaacrgcacggtatttcctatttttctattattccttgtgtctatagtgtcctaggggctgtccatggaaaagagaggtcaggaaggtcacaaacacttcaaggtccctaatagtaaaatcataaaagaaacaaacttattaacgtttaacattgacacccaagtagaggccagtggatgctgttgttgggaaacaatttatcagacagggaggttgtgtgatgggttttatctggtacagtccatttggcttctctgaataataaaaaaattatttgttttagagtgaagaggcttttccaagtgcttaaactgtccagctgcttagtgaacaaggatctagctctggttgagtatggaaatatc

SEQ ID NO: 435509 - DNA, 587 bp, Homo sapiens
tatgtgtatattatattcatttatttagggtgcccagaacaaagcttaatagaagaggaaataggtgacagaaatattttaaaatattaacagataaattgcscctgtatttctatagatccctatattccatgaccctttcccaggtcaggcatctaaaccacacaacgtcacgaaaaaatgcaactgatagagggaataaaattcctggctttagaatatcaaaaacctagggtttcaggcaaaaagaaaacatgtggaagaatatatgataaggcagtatctaacctttgctcaaactaggtaaaagatgtttaggacaagaggagaggtagagggagccatcaaggaatcaaagagagctgagacattggcaggcatcctctatgtcccactgccttcagccaagacccatggggaagacaatggaactcccaaatgagtttgaggatctgaaagcacagagggatagtcatagaaccatcagctcctcagttcccatcctagtgctagaaaagagaaaatgtctgtttcgtgatcttagggttgagtcagcctcataaaatctcccaatgcttagtagaatg

SEQ ID NO: 435510 - DNA, 587 bp, Homo sapiens
tatgtgtatattatattcatttatttagggtgcccagaacaaagcttaatagaagaggaaataggtgacagaaatattttaaaatattaacagataaattgcccctgtatttctatagatccctatattccatgaccctttcccaggtcaggcatctaaaccacacaacgtcaygaaaaaatgcaactgatagagggaataaaattcctggctttagaatatcaaaaacctagggtttcaggcaaaaagaaaacatgtggaagaatatatgataaggcagtatctaacctttgctcaaactaggtaaaagatgtttaggacaagaggagaggtagagggagccatcaaggaatcaaagagagctgagacattggcaggcatcctctatgtcccactgccttcagccaagacccatggggaagacaatggaactcccaaatgagtttgaggatctgaaagcacagagggatagtcatagaaccatcagctcctcagttcccatcctagtgctagaaaagagaaaatgtctgtttcgtgatcttagggttgagtcagcctcataaaatctcccaatgcttagtagaatg

SEQ ID NO: 435511 - DNA, 615 bp, Homo sapiens
tttcttgcataactgagaggaatgtggcatggatgtagaaactgtagcaagttatccagcagatctaggtaagatcatggatgaaggtggctacgctaaacaacagattttcagtgtagacaaaatggccttctatttgaagaagataccatctagaaattttatacctagagagaagacagtgcccggcttcaaagcttcaaaagacaggctgatgctcttgttaggggctgatgcagctggtgactttaagttaaaatcaattcttatttaccattatgaaaactccagggcccttaaaaatgctaaacctatgctgcctgtgctctataaatggagaaataaagcctggatgatagcatgtatgtttaaagcatgttttactaaarattttaagcccactattgagacctactactcaaaaaagaaagatttcctccaaaatattattgctcattaacaatgcgcccagtcactcaagagctctgaagatgtacagggagattaattttgttttcatgcctgctaatgcaacatccattctgcatcccatggatcaaggagtcatttcaattttcaggtcttattatttaagaatatataacatgtattttt

SEQ ID NO: 435512 - DNA, 615 bp, Homo sapiens
tttcttgcataactgagaggaatgtggcatggatgtagaaactgtagcaagttatccagcagatctaggtaagatcatggatgaaggtggctacgctaaacaacagattttcagtgtagacaaaatggccttctatttgaagaagataccatctagaaattttatacctagagagaagacagtgcccggcttcaaagcttcaaaagacaggctgatgctcttgttaggggctgatgcagctggtgactttaagttaaaatcaattcttatttaccattatgaaaactccagggcccttaaaaatgctaaacctatgctgcctgtgctctataaatggagaaataaagcctggatgatagcatgtatgtttaaagcatgttttactaaaaattttaagcccactattgagacctactactcaaaaaagaaagatttcctccaaaatattattgctcattaacaatgcgcccagtcactcaagagctctgaagatgtacagggwgattaattttgttttcatgcctgctaatgcaacatccattctgcatcccatggatcaaggagtcatttcaattttcaggtcttattatttaagaatatataacatgtattttt

SEQ ID NO: 435513 - DNA, 586 bp, Homo sapiens
catttacaaacttacctgatatacatttctgcagctacaaaaaaaaagcatttatttacttatttttgaaatagagtttccctcttgttgcccaagctggagtgcaatggcgtgatcttggctcactgcaacctccgcctcccrggttcaagcaattctcctgcctcagcctcccaagtagctgggattacaggcacgagccaccacgcctggcattttgtttgtacttttagtagaaacagggtttcaccacattaaccaggctggtctcaaactcctggcctcaggtgatctgcctacctcagcctcccaaagtgctgggattacaggtgtgagccaccgtgcccggccaaaaaaagagtatttaagtttactttatgctacaggaacaataagtcgactggataggttatgtccaatggaatttattcattaggctgatgtcaaaagtcagaagcatctcagagttaacgtgatcaaatctattcaattgttatttctcactgaaattttactcattttttttaaattgctgtgaaaggcatagtaagcaggtagattcgaaccctcttcctttgtactacca

SEQ ID NO: 435514 - DNA, 428 bp, Homo sapiens
cactttgttcaatgttgtatgactggcacccaatatagttctagcatccagcaggtattcaatacataattgtgtgcaatgacttagcctgagtattttttatttttaccctttattccaaatgttcatatcctattgctacatgattcttaaatgcccctttgatacttcttgtacataattaaagaaatctcattccttttcttgcattcctatgaggaaatccttgcataatacctttgtccatgacacatcagtttaaatactcccaccagaaargaagttgcataaattgaagaaatttttgtgtcacctcaaccacccttccccaactactcagaaatactagaatatctgaaatatacaacagtgattttaacagagtttctaaacagaaatttaaggttaagtttcagaaagaaaacata

SEQ ID NO: 435515 - DNA, 566 bp, Homo sapiens
gcaatgaaaaccaaactaatcttttgttcaacagtcccaattctgaaattacacatatgttcaatattaggtctaaatatctcccctttctttaattccactctgattcccttccattctgtaaaggttgccctgattcattggaagtggcatgctaaatccatggtcaggtaaggaaggtgcaacatgggagaagataggggtccgcaagagaggaccagctggcctctaacagtctatctgcagagaggctggacctcatccttaaaagatgtgcaataatggtcagatttgctcttggcatctgccacttggactttgaagttgtgtttgggaagagaaggagactgtgattcattatacttcacaagcctgcttagtctactgcaatcagtttggggccagctgtcagagccagggagctgctgcctccattatcracagtcagaacggtcagtcttcaagaaccacttacttctggatgagctgatggtgcccacataggtggtagctgatgtggacccaggcccagtgagggtgggcttccagtctccatttgtgaagaa

SEQ ID NO: 435516 - DNA, 602 bp, Homo sapiens
aaggggcctggtgggaggtgactggatcattgggcaggtttcgcccttgctgttctcctgataatgagtgagttctcacaagatgtggttgtttaaacatgtgtagctcctccctctccactctctcttcctctggtttcagccatataagatgtgcctccttctccttcgccttctaccatgattgaaagtttcctgaggcctccccagccatgcctcctaaacagtctgtggaactgtggaccaattaaacctcttttctttatgaattaccagcttcaggtatttctttacagcagtgcaagaacagactaatacagtccattttatttttcaggaaatgtatgagactacatctatttttggagggaaaagattcagctgtgttagccagccattctttcccagcctctttttagctgaaaccttggaggatgctgttttctrttttattaagagaggcatgtcccttgtggcactcagaaacaatttggtttgctctacagcagacttggagtggccaagggtcccgacagacacaaacacctgagaccatgacagagtaccctaaattaccaaggggaataagagggaggagagga

SEQ ID NO: 435517 - DNA, 532 bp, Homo sapiens
gtaaagatcgaaaagcagtagctcaataatagatgttgaattttcactaaagcaagcaagacatctaagggcaagctttccaaaatttgttccatggctcagtagtgtcatcaaagacccaatctcatttcattcttctatttcagcattctcagcatgctgacatttgtctccaggctggtcacctcatggttgaaagatggctgacaaaactccaggtttcacatttttaaacgggagcaactgaagcagaagtgagggagatattgaaagaaatcatttctcatrtggccttcatttctttaagggaggaaaaccctcgtgaaagtgatctcctatacttctacttatgtagtattgactagaatggtgttactttcatgtggacattgatgcagggggataggattaccataaatagcttggacattcatggcgtgggcatactgccacctgaatacaataaaacagaagtgcagttagcaagaaatataggagaatgactgctaggtaagcaacaaatagtgtcagc

SEQ ID NO: 435518 - DNA, 532 bp, Homo sapiens
gtaaagatcgaaaagcagtagctcaataatagatgttgaattttcactaaagcaagcaagacatctaagggcaagctttccaaaatttgttccatggctcagtagtgtcatcaaagacccaatctcatttcattcttctatttcagcattctcagcatgctgacatttgtctccaggctggtcacctcatggttgaaagatggctgacaaaactccaggtttcacatttttaaacgggagcaactgaagcagaagtgagggagatattgaaagaaatcatttctcatgtggccttcatttctttaagggaggaaaaccctcgtgaaagtgatctcctatacttctacttatgtagtrttgactagaatggtgttactttcatgtggacattgatgcagggggataggattaccataaatagcttggacattcatggcgtgggcatactgccacctgaatacaataaaacagaagtgcagttagcaagaaatataggagaatgactgctaggtaagcaacaaatagtgtcagc

SEQ ID NO: 435519 - DNA, 598 bp, Homo sapiens
aactcctgacctcgtgatccgcctacctcagcctcccaaagtgttgggattatagacatgagccaccgcctctggcctaaaggaagatttctgaaagactatccctaattttatgattgtatatgttttcccaagaaaagaaatgaaagactagaaggcatattgagcccaaaatgaaatatgtgacaaagaattgaaacaaagggcctcatcagagacgttctgaaaatattttatgctcttataaaaagaaatgtgtatataacacaggtagacttttctgagactatttgcaaattatagctttaaattgtatgctaatcttaacacacaaatggaaggaaaatatctaagtatataattttattttataattttttcttcattgttatactagtttctagttttttaattagcttattttaaattrttaataaatggtaatcttaatatagttaaatattaatatttcttacttgaggcattgttattcaaatgtattattcttactgagtcaatatatttgtcatgtaaagaaatagaaaggatgttttgtttcctaattagaaaagtaatattaattagatataccattatt

SEQ ID NO: 435520 - DNA, 500 bp, Homo sapiens
cttttcagtgagctaacgcactctggctattcttgctgaagatcttttccttgactgccaggtccaagggtgtggtggggtatgatgtgaaatagtacttcctttgtacctcyccttgtagctgtaggaatctccatgtattgacacatggaagctgatctctgttccccttcaggccagttaggtttccttgagctcaattggatgtatgtttattcccatccatgtatcatctaaatctttatatggtagattttcagtacatttatcttgtaaatcttaggattatttattttagaaactatcaacattctagcagttattcattagtcatcaaaattaatgctaaccgcaatataacacaatccctgaataactgtggaataactcaatagttttcttctcacttaagagccgagtgaatcaggtggctcttctgtgcatccttctttcaattggtgattcagggacccagaagttaactcctttttgtggagctg

SEQ ID NO: 435521 - DNA, 548 bp, Homo sapiens
aaaatggacattgcaagctaatctgtattgggtcaaagagactagaaaaacatatgtgttgtctatttttagaacaattgcatttattgtttaaaatagcttaacattattcttatttctgaacttgtatggtagtcttacaagtcctccagaatcttataaattgctttattggctaatgttcactggccatatcaaaagcacctaaggaagsctctagccaaataaaataatttaatggagatccaccgagtgacaggagatacatgttacaaactgtactgaccacagagaagatgtggccttggccttcaggagtttatagccaagtaaactgtatggtaaataaaaaatcaattaactctactaataaagcaaggaaagcatagtcagaggcaaacccatgatagtacctaaaggaaatgtaggtaaaagtatttgggtaatattcttttagggaaaaatgtcaaaaagtgtccaagtaggagtcaggacaaagcaaaccataagaattgagaggttgtttctggtacagattctttcactta

SEQ ID NO: 435522 - DNA, 571 bp, Homo sapiens
gttctttatcagaattttcttccttctcataaacagtgtagtggttaaaaatgtaagccctgcccagatttgcatttgctttcatccaccaaaatgcttttgtatgtcctgggtaaattactgtactaggcttcatctgtttctccaaatctattctccagtcttctccaccctgctctgcagcctggaggctggcctctagggactgcattgccaagttctctttacctstggtttacagttgggttcaactaatgggagatgattcagaagatccaagagaggaaaaagagcgggaggggagggtagttattctcccagatgcctgccttccaggccacagtttgtcaatcactgtgcacttgtctcaaaggcttcagctgctgttgactggtcttgcaatgttccagattgggacaataaggactttctaatggtgctatcccttcaccattgcttgctggtttcccttaaccattcccacaattttgtaaatagcccttcatttaattatctttgtttacctcttttgaagtttccttctgttccctgctgggatggatcccatcag

SEQ ID NO: 435523 - DNA, 590 bp, Homo sapiens
gtctcaaaggcttcagctgctgttgactggtcttgcaatgttccagattgggacaataaggactttctaatggtgctatcccttcaccattgcttgctggtttcccttaaccattcccacaattttgtaaatagcccttcatttaattatctttgtttacctcttttgargtttccttctgttccctgctgggatggatcccatcaggtacaattatctttcatctctaaatctatttcctagtatagcacttacatcatagaagttttgtgatggttaagtgagttaatataggtaaaattcttagcacagttcctaagacatagcaagtgttcaatgaatgttagctgtcattctcattactgttatcatgatgatcatttgtatttaggacccagacatagggactgagataaaaatgctgagagctgggcttttgaccaaaacctcagctcaagtcaggatacttggcaacatctaagtgcaaccaaaagttgggtacccgttggcccattgtatgataaatctacccttgccaatattcctgtgattgataaaactcacagcaggatagttctgatcatcattat

SEQ ID NO: 435524 - DNA, 564 bp, Homo sapiens
tctgtaccatatgtctggccagaagatgataacagcctaatgtcagtaagggcttggggataaagaaaaggctccatttatttatttagattatgttgaataaagagtcaaacttgttttaccttcacttggtactggaggtgattggccatggctaagccagtaaaaaacaaacaccccccgattcccagccctccaacactttgtgctttgcttcccttgtgcctattgtgtgtgtgtgtgcgtgcaagtgtgtgtgtgtgtgtgtgtgtgtgtgtgtctgtgtttgtggtggcccaccaagtacctcttcagagggatgattgttggagtagaatatatctattttgggtcttataaccaaatatcatcaacaccccagcaacgcttctawcaagtatgttgtaaacaatgtctaaaataagagatctgggtttatttgttgacttaacttatccaggatattcattagttcaaataattaggaactggtcacattgtggcagcccatgtatgttcctaggcagatcatttcaaaggtgaaactatgttacactgttacta

SEQ ID NO: 435525 - DNA, 550 bp, Homo sapiens
attccttgcatggatcatgagcaacatgtgaccctcaaattcttctcagttcattataacctttcatctcttctatggcatctgaattccagatatatatattctatttattatgtttaatctgttaataatttaaagaaatatttaactctatgaacatgaagattgcaactgaagcagaaagaatattcaaggagtgtttgcactcctttttcttggtttaattgctcaaggtgagttaactgcaaaattatcagctcaatgctaaagagattggcctgccagcccaccccattcttgtttcagtgtcctgtgctagcccaccccattcttgtttcagtgtcctgtgctactgaagttcttctcatggcatagggcattaacattattcgtccctgtatttgtgcctgtgtctgttaagaccttttatacawtagcctcagaactctggttgcaattagagttttgattagctgtcagtgatgtcatagccatgcttattttaaatccactgtgctaagtgttttccttttcttaatgtactgtagaa

SEQ ID NO: 435526 - DNA, 601 bp, Homo sapiens
cttgcacttgggtgtagccaggtgactgagttctatccaatggaatgtgagtagaagtgatatgtagcatttctgggccaggtgcataaaaacttcaccttattgtttctctgtgctccttttcttcacatgatttaatgcagaggggcatggtaaccttgaaagctattaaagttcatggagcctcaagatagaaggaacccacacctctgaatcagtgttcacaggagagccccagttaatcaggaatactcatttcatctgcacatgcgtgagaaaggagtgtttgagccattataagctttgaatttgtttttttttttacagcagcaagaatacattaactaattttctgtctaattakaattttttatagaatttattttctctcacaacttgttacttatgaatacttgaagtcctatatgtcagcttttggtgatgtctttgaaagtgagcaaaaaattcacattgagcgaatgtttatccatctgaccatattgtcatgatgcttatttttactgttctctgccagccctgaatttattaaaatacacagacaggctagtcctatttcaatttgtcttttactgatgtccac

SEQ ID NO: 435527 - DNA, 581 bp, Homo sapiens
actgctgcttgtatgaaacattactaacaaaaagggagagagggcatgtcatctcctctccattataaacaagaytgaaaaataaaaatcgcaaatgggcctacacataatcatatctcagtgcatttggtgagttaggtaggaatcacttccctaaaatttaaataataggattttccccaataatagcttaaaagagaagagtgtctttaaagttgatgtgcttgatcaatgctacatggaaaattacctgaagaacatgactatattaaatatcataagatattgagaagggtttcttttgcatagacaacacagctgtgctaagatactcattctacttggcagagtctaggagcatctgagagttctgtcacctgtcactacattgtctttggggtttctgtagcattgtttattattagctcaggagatgctgcatgtgagtacaagatctcatcctgctgggagccacaaagttggatgaaactcaacttggggagcttgttggctctgaagaaagatactgtcttgagaaataagacccacagtcttccaccttttccctcccctgtaaaaga

SEQ ID NO: 435528 - DNA, 581 bp, Homo sapiens
actgctgcttgtatgaaacattactaacaaaaagggagagagggcatgtcatctcctctccattataaacaagattgaaaaataaaaatcgcaaatgggcctacacataatcatatctcagtgcatttggtgagttaggtaggaatcacttccctaaaatttaaataataggattttccccaataatagcttaaaagagaagagtgtctttaaagttgatgtgcttgatcaatgctacatggaaaattacctgaagaacatgactatattaaatatcataagatattgagaagggtttcttttgcatagacaacacagctgtgctaagatactcattctacttggcagagtctaggagcatctgagagttcygtcacctgtcactacattgtctttggggtttctgtagcattgtttattattagctcaggagatgctgcatgtgagtacaagatctcatcctgctgggagccacaaagttggatgaaactcaacttggggagcttgttggctctgaagaaagatactgtcttgagaaataagacccacagtcttccaccttttccctcccctgtaaaaga

SEQ ID NO: 435529 - DNA, 589 bp, Homo sapiens
tttttgttcttcaacaagcatttattgaatacctaaaatgttctaagtagcacatcaggtataatggccagtggtaaagagagcagtagaattggtctctttagaagatttcactggccattacagtggatgcttaatccttaatgctgagctaaactttgatccttaatgctgcagatactcctgtaggcataattagtagttaggtccctactttacctcattctagacttccctcatccttggctggcgttgtgctgacttartggaattagacaatcattcctgagaagtcaaacccttcaattatactgctatggtggatggaattgaccactaccccttatcactgaacatagaagcacaccagtagacaaactagtgagtcttttggctatcagacataataattccatgcccccaaatttgtagtcacaacccaaggtcctaatgataatcaaattcactatgcctggctttgttggtctagttatgcttaatacagaatggccaggtaataattacagctttcaggtcagtggatctgactttgtctcctagaagaagtcactaccatctgtgaccaagg

SEQ ID NO: 435530 - DNA, 589 bp, Homo sapiens
aaacgccaaatctgttttttgcccgcggtggggaagggggcagatctcgggaggccccgagagccttttagtttttggtgggggaagagcgagagcgcgcgtgtgcccgcgtgagtgtatatgagagaggggcgggcgggcgcggggacgggggggatggccgagaagcgaaggggctcgccgtgcagcatgctaagcctcaaggcgcacgctttctcggtggaggcgctgatcggcgccgagaagcagcaacagcttcagaagaagcggcgaaaactgggcgccgaagaggcggcgrgggccgtggacgacggaggctgcagccgcggcggcggcgcgggcgaaaagggttcttctgagggagacgaaggcgctgcgctcccgccgccggctggggcgacgtctgggccggctcggagtggcgcagacctggagcgcggagccgcgggtgagtgggccccttcctgcctataacttctctccggcgcgaacctgaacttctgcgagtctgtgggtgtgcgtgcgcgccgcgtccctacatggccaaggccactcagccactagcgcattggccgtgtcagtcgcaaag

SEQ ID NO: 435531 - DNA, 575 bp, Homo sapiens
gattcctttcctttcacttctgatcctttgctcaatatgaagttcagtgacttcatgtaggtagcttgaaatcattcatggtgggactatttacaccatggaaattggcaaatgccacaaaatatggctttgtcttcagagagccaattgttccacatttaccagctcactactggctctatctctattttttaatggttctgtatgaaattgtattatgcatgattaacttaacatagtctaaaactacaaaaatgtcttgaaccccttgtgaatgatacagacctttaaataactgttcctccactgaaattataaagtacttgcacaatattttatgtctatgtattttgtaacaccataaaatatatggtgtwtttttactttacacaatgtttacatttctgtttatcatttacattctcactggttttgtatctagaccatccttctgagatcagtctcctttttcttgaaatgtagccttcatgacttcctgtagagtggatgctttggtagtaaattcccttcaatttctgtaaattatcttgtatctgtaaaagactgtattttgc

SEQ ID NO: 435532 - DNA, 575 bp, Homo sapiens
gattcctttcctttcacttctgatcctttgctcaatatgaagttcagtgacttcatgtaggtagcttgaaatcattcatggtgggactatttacaccatggaaattggcaaatgccacaaaatatggctttgtcttcagagagccaattgttccacatttaccagctcactactggctctatctctattttttaatggttctgtatgaaattgtattatgcatgattaacttaacatagtctaaaactacaaaaatgtcttgaaccccttgtgaatgatacagacctttaaataactgttcctccactgaaattataaagtacttgcacaatattttatgtctatgtattttgtaacaccataaaatatatggtgtawttttactttacacaatgtttacatttctgtttatcatttacattctcactggttttgtatctagaccatccttctgagatcagtctcctttttcttgaaatgtagccttcatgacttcctgtagagtggatgctttggtagtaaattcccttcaatttctgtaaattatcttgtatctgtaaaagactgtattttgc

SEQ ID NO: 435533 - DNA, 569 bp, Homo sapiens
tctgcagccttgatcgcagccacctatgctcagcccaacctcactggaggctactggctgccctgaaccaaacataagggtgctcagctgtcttttaaaattcaacttaaacatcatttctaagagggcctctgatgacaatgtcttacttatgcccctacttaccccaattggatgtgagactgactccctccttgctcctaggtaatttcttcttcttttttttaattatttctaattcttggaaatartaaaaaaaaatgcctaaatactaataacaaatttttgatattgctctcatgtgcaacaaaactacccacattatattaaaaagcaataatcaggaatgtttatttctgatcaatttattatttcactgaatatccattcgatttttttatgttaacaagacttttttccaggtttattgagatataattgacaaatagaaattgtatatatttaagttgcacaacttgatgtttatatgtatatatatgcattgtgaaatgataaatgatgccaagaatcaaaatagttggatttattttcaacaaaattgtttttaa

SEQ ID NO: 435534 - DNA, 571 bp, Homo sapiens
ccctttctgcggggtctggagagggggagcaggccggggcccgaaaaccccccatcccacccctaaatctgggcggactgtgaacagccacacagtgggacagttaagtgtctctgccaagctcggtccttccctcaccgggatatattatcccgccaccatccggcaggccggccggggattattatccccgttgtaacgcagaggaagttatggccgggacgcggtcagggtcacgaaataaaaacatgtggacccacggcgcgagctgagctctgccggcctaccccgcccccgaatcctgtagagccaggcgaggccgaggccctaggcccaaggccggggcgtattcgggtttacgtctgcgggagaaagaggtgggtggtgcggctggcgaagtcagtgagggaccggagacagccgggcctggagagagccgggaccggagagtcggggcgcgggcgccgcggaggctcggagccgcaaggaggcccaggctccccgggacgcggccactgtacytccatagccaaagcggcgggcgcccaaggccagagcgctaccgacgaga

SEQ ID NO: 435535 - DNA, 584 bp, Homo sapiens
ggagaaggtcagcaagaaaacatgtgagcaaaggaatctgtgtcacaaataagttcaagggaaggtactatgcctggatgtgcacataggccagatatatgcttctctccacccaaacatctcagtgtagtaaagaataacacagcagtattgccaccagcatatctcgcctccagccacagggcggttttctcctatctcagaatagaacgaatgtacaatcgggtattatactgagacattccgttctcaggggcatgcaggagacagaggccttcctcttatctcaaccgcaagaggccttcctcttttactaatcstcctcagcacagacccttcacgggtgtcgggctgggggatggtcaggtctttcccgtcccacgaggccatacctcaggctgtctcagtggggagaaaccttggacaatacctggctttcctgggcagaggtccctgtggctttctgcagtgcattgtgcccctggttaatcgagaatggagaatggcgatgacttttaccaagcatactgcctgtaaacattttgttaacaaggcacatcctgcacagccctagatcccttaaa

SEQ ID NO: 435536 - DNA, 597 bp, Homo sapiens
tcatctcctggacttccttctctgctggtttccagttaggtttggccaatcggaggcatcaatgggagattaaacgttgggagaagagcaacattcagggattccttccccagtccctctggcagtagctgcattctatgccaggtggtcccttgtcctggttctgggtctcactgggctctgggaacactgttttctctgcctgttccttcggccttaaggcaggtaatgattccccactgttaactagtgtctgagtgcctcagcctctcttatttgttccatgggtccctccagcatcttgttaagtagttctttcattaggtctgcagggaattctrttccttctgatacctacaacaaggattcaaatccagatccagaaaattccaaagctactaaccacaggcagtgttttcaatccaatatattttagtagaatatattggattccaatccaatatattctaactggaagtaatctgtgaatttggttttacattttctcaggagataaatcttacctagtgagagtaataaaagtaaaaagtatatgtataaggaaagaggtcaagacagaaagagagagagctcaca

SEQ ID NO: 435537 - DNA, 599 bp, Homo sapiens
aatctgtgaatttggttttacattttctcaggagataaatcttacctagtgagagtaataaaagtaaaaagtatatgtataaggaaagaggtcaagacagaaagagagagagctcacatatgctttatgttttcttatctgttaatattttgttggtccaataaccctataaagtaagctggaaaagagaattttatcccatttccagagacacragaactggaacttaccaaggttaaccgccacggaaccaaatctagaacataggttctgtgtcacatagtgtcagactatggattctgtgttctctcctctttgtatatgatgcatgttatagatttctttaaatggtgattagtggctcagttaattacctaaaataatatcaattttcattatggtgtttgcctgagtgacttctaaaaaatgctgctatttcctatttagtggttgtaaaagacatatttgtgcagtcagtactttttaaaatcttgttgaatcagctaataacatgcacaagcattagaaattattcattcctaataggattttcacatttatatgccataatcactggaaaacaaaatctctaaatattt

SEQ ID NO: 435538 - DNA, 518 bp, Homo sapiens
ttttttgtggagaagttttagatcggttaggagtcggctttaygtgggaagagagcaaaaacttggtgcaacgctttctggactaattgaagaaaaatgtaaactacttgaaaagtttagccttattcaaaaagagtatgaaggctatgaagtagagtcatctttagaggatgccagctttgagaaggcggcagcagaagaagcacgaagtttggaggcaacctgtgaaaagctgagcaggtccaattctgaacttgaggatgaaatcctctgtctagaaaaagacttaaaagaagagaaatctaaacattctcaacaagatgaattgatggcggatatttcaaaaagtatacagtctctagaagatgagtcaaaatccctcaaatcacaaatagctgaagccaaaatcatctgcaagacatttaaaatgagtgaagaacgacgggctatagcaataaaagatgctttgaatgaaaattctcaacttcagacaagccataaacagctttttcagcaag

SEQ ID NO: 435539 - DNA, 518 bp, Homo sapiens
ttttttgtggagaagttttagatcggttaggagtcggctttatgtgggaagagagcaaaaacttggtgcaacgctttctggactaattgaagaaaaatgtaaactacttgaaaagtttagccttattcaaaaagagtatgaaggctatgaagtagagtcatctttagaggatgccagctttgagaaggcggcagcagaagaagcacgaagtttggaggcaacctgtgaaaagctgarcaggtccaattctgaacttgaggatgaaatcctctgtctagaaaaagacttaaaagaagagaaatctaaacattctcaacaagatgaattgatggcggatatttcaaaaagtatacagtctctagaagatgagtcaaaatccctcaaatcacaaatagctgaagccaaaatcatctgcaagacatttaaaatgagtgaagaacgacgggctatagcaataaaagatgctttgaatgaaaattctcaacttcagacaagccataaacagctttttcagcaag

SEQ ID NO: 435540 - DNA, 518 bp, Homo sapiens
ttttttgtggagaagttttagatcggttaggagtcggctttatgtgggaagagagcaaaaacttggtgcaacgctttctggactaattgaagaaaaatgtaaactacttgaaaagtttagccttattcaaaaagagtatgaaggctatgaagtagagtcatctttagaggatgccagctttgagaaggcggcagcagaagaagcacgaagtttggaggcaacctgtgaaaagctgagcaggtccaattctgaacttgaggatgaaatcctctgtctagaaaaagacttaaaasaagagaaatctaaacattctcaacaagatgaattgatggcggatatttcaaaaagtatacagtctctagaagatgagtcaaaatccctcaaatcacaaatagctgaagccaaaatcatctgcaagacatttaaaatgagtgaagaacgacgggctatagcaataaaagatgctttgaatgaaaattctcaacttcagacaagccataaacagctttttcagcaag

SEQ ID NO: 435541 - DNA, 318 bp, Homo sapiens
agtcaaaatccctcaaatcacaaatagctgaagccaaaatcatctgcaagacatttaaaatgagtgaagaacgacgggctatagcaataaaagatgctttgaatgaaaattctcaacttcagacaagccataaacagctttttcagcaagaagctgaagtatggaaaggasaagtgagtgaacttaataaacagaaaataacatttgaagactccaaagtacacgcagaacaagttctgaatgataaagaaaatcacatcaagaccctgactggacacttgccaatgatgaaagatcaggctgctgtgcttgaagaag

SEQ ID NO: 435542 - DNA, 572 bp, Homo sapiens
tcttcacatagcaggagtgcggagaaatccaaataaaatatttttggctaaccacaactgcagattgakccaaaccaactgtgaagggagctagatttgctttcccactcagtttaattacgaaaatagtaaaggcataaatagaaggcatgccttaattttaaaactgtgatgagaatatttaagcaattttcaaatatacaagtaatattaatcacaccttagcaattttcacatatacaatacattattattaactatagtcacaatgctttacaatagatctccagaaatttttcatcctgtctaattgaaactttgtatcatttcaccaacatcttctcaaccctcatctcccccagcccctgccaaccaccattctactctttgcttccatgagttcaattttttcagattctacatataaatgagataatgaagtatttacctttctgtgcctggattacttcacttagcatgatgtcctctaggttcatccatgttgttgcaaatgacaagatttcctcttttcaggctgaatactattccatacatatgtatgtttgtgtata

SEQ ID NO: 435543 - DNA, 540 bp, Homo sapiens
actatacaatctggccaaaatatagaaaaaaattcttggcaggtgtattagtctgttctcatgctgctaataaagacatacccaagactgggtaatttataaaagaaagaggtttagtgaactcacagttccacatggctggggagaactcacaatcatgatagaaggcaaaggaaaagcaaaggcacatcttacatggyagacaagagagagggcatgtgcagggaagctcccctttgtaaaaccatcagatctcatgagacttattcactatcacaacaacagcatgggaaagacccacccccatgattcaattacctctcaccagctgctgagcatggttcaggtgggctggctacatgtgggaattatgcaagctacaattcaagatgggatctgcgtaaggacacagccaaaccatatcagcaggcattgaagaacattgttgtagcaagtcaggtatgagatctttcaggaaggtgaggcacatgaggttagtaccacatttgccaggattttccagaaaggcatcttcctgac

SEQ ID NO: 435544 - DNA, 540 bp, Homo sapiens
actatacaatctggccaaaatatagaaaaaaattcttggcaggtgtattagtctgttctcatgctgctaataaagacatacccaagactgggtaatttataaaagaaagaggtttagtgaactcacagttccacatggctggggagaactcacaatcatgatagaaggcaaaggaaaagcaaaggcacatcttacatggcagacaagagagagggcatgtgcagggragctcccctttgtaaaaccatcagatctcatgagacttattcactatcacaacaacagcatgggaaagacccacccccatgattcaattacctctcaccagctgctgagcatggttcaggtgggctggctacatgtgggaattatgcaagctacaattcaagatgggatctgcgtaaggacacagccaaaccatatcagcaggcattgaagaacattgttgtagcaagtcaggtatgagatctttcaggaaggtgaggcacatgaggttagtaccacatttgccaggattttccagaaaggcatcttcctgac

SEQ ID NO: 435545 - DNA, 583 bp, Homo sapiens
ctaacttctctgagcatgttttatctctaaaatgagaaataatatacctagtaagtaatgttattattattttttaatggcagtttgattgaggttatcaggagcagtcggtaggaaacccacacccttactctgatctttgctgtggatttgatcttcattgagaagtttgctaagcttttgtcctgtaaagcccctttggttggttatttatttctgtggtataatgctattttgaagaatagagattgtgatgtcttcacctacttctgactataaggaaaaattcttacctgaggcagcaggtgtttttatttagttctacaaacacatttggaacttggcatcaaatgacccttgacattaattttagctttaaggactcctgataacggggctccaatttcactctgaaatcccaaccccatccaggygctctgattctcacaagtaggcttggtccttatattttgagctgctgttatgactccttgcccttggggcctctcctagcactaaaacctcaccttattgaaagtctcctgggatctgaagtcctgctcttgaactcatccaagggcct

SEQ ID NO: 435546 - DNA, 629 bp, Homo sapiens
cctgtgtccgtgtgttctccttgttcaattcccatctatgagtgagaacatgtggtgttttgttttttgtccttgggatagtttgctgagaatgatggtttctgttgtggggttgggggagtggggagggataacattaggagatatacctaatgctaaatgatgaattaatgagtgcagcacaccaacatggcacatatatacatatgtaacaaaacctgcatgttgtgcacatgtaccctaaaacttaaagtataataataaaaataataatgaaaagagattaagtttcatcaaatgctttttaaatatatcattacatatactgttgatatggagaattacattgattttcaaatgttaaaccaaccttccattcctagaataaatttaacttgatcataatgtagtcccttttcatatagtgctggatttgacttgctaatattttgtttagcaattttatatccatgtgtatgatagagrttgacctataattttcttttcatttaatattcttttcagttttgatattgtactagtctgggttctccagagaagcagaatcaagtgtgtgtgtgtgtgtgtgtgtgtgtgtgtagatagaggcagaggcagaaagacagaaa

SEQ ID NO: 435547 - DNA, 632 bp, Homo sapiens
aggatggtgatgggctgctgcttatgttaagtcaataatagtcacatgcacattattcttctagtaattagacttaatttgttgaacattttccccagctttgtcccaagaagggtttaaagtgcttgattttcacaagtagtccttccagctcatccacaaatcaatgtccagctgggtgcagtgactcaagcttgtaatcccagcagtctgggaggctggtgggaggattgcttgagccctgaagtttgagaccagtttgggaaacatagtgaaacctcttccctacaaaaaagtaaacaattagcyagccattgtagcaagcacctatagtcacagatactccaaaggctgaggtgggaagatcacctgagcccaagagatcaaggctacagtgagcatgatcaccccactgcactttggcctgggcaactgagagagatcctgtctcaaaaaagaaaaaaaatcctattttaagccttaaagatcaaggtggcagtgagcagcgatcaaaccactgtactttgccttggcaactgaaagagactttgtctcaaaaaagaaaacaaacaaacaaaaaaaatttcctatttctaagccttcaaaaggtaagacatttttaattattttaa

SEQ ID NO: 435548 - DNA, 561 bp, Homo sapiens
aatttcccactgcatagataccatgtgttttttaagttgaggttcttcatgtgtattttcccactttcattaatctcttctttttatcttacatactttttttcttagattttcccagccaataacttcttgttttaaatgtttcataaaaagtatttgggagtattcatatgaaaatkatggttgttttcataattgtgtccttctttgtaggatccaaatctaaaaaaataaaaaataaataaaaagttattggcatgtaaaaaccattcagaaaggtatgttcttatgtaaaatttcaatcataaaataaaatagcaaatgaataaataaaaaagattcatgcatataggaaaggcaaactaaaattttaacccccaaagtcctctttccatggttatggataattccaaaagcacatctgtttaagaattattggctagcattgctgaaaaataagtccagattttctctttcatcttgagtttgaataatattctcttataggcaaaggggccattaagcctgaaatgctattcatgttacatttatgcatataaa

SEQ ID NO: 435549 - DNA, 618 bp, Homo sapiens
attaaaagctagaaattattaagctaagtgagaaaggcatgccaagtaagtataaatccggagttgtccaacttgagctgaagtgctattagatctaccaagtcataagactgaatggtcactgcaaccatctatcctataatggatgcaatatgttttagggcaagagaaaatgcaaaagacaaaagtaggctgaatgaacagttggcccagatccctatatcactgatgcctctctctcagcttatacatacagtctcctaggtccttccaaccagctgataccttagtaaacaagccaggcctaatgcaagggcactttggctaggtatattggcacaatatgtcaaccactcagatgtgggacctcaaatataatccatgagggtaaacctactctgataagtagaatacatagattcatcsccatccatagaaagggttcagaaaacaggagctggccctgtgcttttacagagctttatccttcccataagggcaggaccagatattatcaaaaaaaaaaaagaaaattttcaaaagtaaattttgctcaatccttatgccttatccattcttcttctagacaggtcaatgagccccacagattatttaaaa

SEQ ID NO: 435550 - DNA, 588 bp, Homo sapiens
ggtgcaagtgaagcctattttctcatgcgtcacacaaagctctcatgataattggaaggtactctgtggaggtgatgacttaataacaccttcccttctcaaaagcacttgaagaagcaagatccttccttggcakttctcagatgggcagcagagttcccagcaccatcagtaaactcagccacactgtagaaatgtttgccttttctatatgaagattatctaggttcttacacagcagtcatctctagacacctggatttcctaactgcctttgtgagttctgctcaaatataatttaaggtcattttcattgcttgtttgcttttaccgtcacactttaatatcatgcaaaagtacatttctactctcttaatgctcaaattttgctcaccaatagttttagataataggataatatgactaaaatatattaatagatatcagcatattatctatcagtatattaatatattaaagcaatcaatatgttaatggttattttggctggtagctttttttaagttcaagaaatatctgtgtgcaactgactctggtaaatgttcaacgttaacaaaaaagaccagc

SEQ ID NO: 435551 - DNA, 588 bp, Homo sapiens
ggtgcaagtgaagcctattttctcatgcgtcacacaaagctctcatgataattggaaggtactctgtggaggtgatgacttaataacaccttcccttctcaaaagcacttgaagaagcaagatccttccttggcagttctcagatgggcagcagagttcccagcaccatcagtaaactcagccacactgtagaaatgtttgccttttctatatgaagattatctaggttcttacacagcagtcatctctagacacctggatttcctaactgcctttgtgagttctgstcaaatataatttaaggtcattttcattgcttgtttgcttttaccgtcacactttaatatcatgcaaaagtacatttctactctcttaatgctcaaattttgctcaccaatagttttagataataggataatatgactaaaatatattaatagatatcagcatattatctatcagtatattaatatattaaagcaatcaatatgttaatggttattttggctggtagctttttttaagttcaagaaatatctgtgtgcaactgactctggtaaatgttcaacgttaacaaaaaagaccagc

SEQ ID NO: 435552 - DNA, 634 bp, Homo sapiens
aaccaaatttccttgtcaattgtctttatctataactatttaaagtcatttccacagttaattgcttaatggtgatgcagtttctaaaaacttcacaagcatgcaaaattctagaatatggtgtctcttagaagattcatgaaagaatgaaaaggatcctgaaaaacactcgtgaacacagatttttaataactttaatataatgggtaaaaattccccataagttccctgataccccaagaattggacaggttaagaattctcaaaagttaggctgggtgcagcggctcacgtcagcaatcccagcactttgggaggccaaggccagtggatcacttgaggtcaggagtttgagaccagcctggcyaacggtgaaaccccacctctactaaaaatgtaaaaattagtaaaaattagccgggtgtggtggtttgtgcctgtaatcccagctactctggaggctgaggcaagagaattgtttgaacccaggaggtggaggttgcagtgagccaagattgtgccactgcactccaacctaggtaacagagtgagactctgtctcaaaaaaaagcccaaaagtttaataaatagaccaactggtttataaaactgctaacctaagtaaaacaaaaat

SEQ ID NO: 435553 - DNA, 472 bp, Homo sapiens
atagtctcacaactcagaaaggtccttccacacttggaaccatatacccattggaacccttaaggtaaagctaacaaggacagttccccccagaagaagatggcatccttaatgtgaacagcttttcccacgatcacagatcaagacttctctactatcatgagacacttatcttaagtatctgtgcagctgctaacacttacagcatgtggagaaaacatggggtattataaaaatttggttgtagggaattaacaaaaaaacccacttagttaagcaagtaaactctttatctaattcattctttaatctatttgattttaggtggtttgatttatggggaccctgagttaggagcatataccaaattcttggtgttatcccaacagtcataagagtctccctgktgcactgtacttactcaaatgttttaagagtttgcatgcaggcatctctaaaatatcaaatggta

SEQ ID NO: 435554 - DNA, 512 bp, Homo sapiens
tttttatagatgcattcgaaagcatgaaaaaaatcatgtctctattttactttaaaattttaaaaacacaactaatgaatatggtaattctcttccaatctgttatcttttctctcactaaactaatttgwgagccttcaatttacacagttagaaaatatgctctagtgcatatactaggataaaataacagggtcataagacaggtgcactccataatctttgtgacaactttcacttccagtgtctgataaatatttgcccgtagactcccacgtttcatccatccatccatcaatcaaatctacctatctttatttatttattgtgagaaagacctgaaatttgcctttccttccctgatttctgccacaaactaggcaaggagttctgcataggggtttctcagagctctggctaccaccgatgttcctaacagggaaacgcaggcttgaatgctcagggttgatgtgggagtgcgtgtgaaacgggggtggggtgaaagggcagtg

SEQ ID NO: 435555 - DNA, 512 bp, Homo sapiens
tttttatagatgcattcgaaagcatgaaaaaaatcatgtctctattttactttaaaattttaaaaacacaactaatgaatatggtaattctcttccaatctgttatcttttctctcactaaactaatttgagagccttcaatttacacagttagaaaatatgctctagtgcatatactaggataaaataacagggtcataagacaggtgcactccataatctttgtgacaactttcacttccagtgtctgataaatatttgcccgtagactcccacgtttcatccatccatcmatcaatcaaatctacctatctttatttatttattgtgagaaagacctgaaatttgcctttccttccctgatttctgccacaaactaggcaaggagttctgcataggggtttctcagagctctggctaccaccgatgttcctaacagggaaacgcaggcttgaatgctcagggttgatgtgggagtgcgtgtgaaacgggggtggggtgaaagggcagtg

SEQ ID NO: 435556 - DNA, 540 bp, Homo sapiens
tgccatgacagtttgccaatgccatgtcatcacgagaagtccccaccccttgccatggaaacagatggaagttactgcccatttctagctatctctgaataaccckccccttaattagcatgccattaaaagtgaattataaaagtgactacaagccacccctaggctgctgctctgggagcacaacccacggagggctccctgccctgccggagtggatgcagggttgtaacaccgccaatgcctccgtagagctgctttcttccaccacaggcttgcttttggatttcttcctgagcgacgccaagaacctgcccttcctcagtgtgactcttgcctaaaacctatccctggtattctcttttcctaagcatgccctgacttgttctttcatctcctctgatcttgcaattggacctcagtgactctattctgcagatccagaaaactcaaccttaatcttcccagagccctgttgtctctaatattggaatctatagccttgttttctcagacgcctagattacagacctctctctt

SEQ ID NO: 435557 - DNA, 571 bp, Homo sapiens
gctgctttcttccaccacaggcttgcttttggatttcttcctgagcgacgccaagaacctgcccttcctcagtgtgactcttgcctaaaacctatccctggtattctcttttcctaagcatgccctgacttgttctttcatctcctctgatcttgcaattggacctcagtgactctattctgcagatccagaaaactcaaccttaatcttcccagagccctgttgtctctaatattggaatctatagccttgttttctcagacgcctagattacagrcctctctcttgaacacctattggtatggtatccggggatcctttaaatacttgatgattggcaggggttaaatagcggaaatcagtgcctgacaattcgccttccaggatatggactgtcattccctctcttggtgggcctcagtctcttatccataaaagtagagattgtaatactcatttgaattgcagatacctcaacccgaacccacctaatataatgtaaaagccaagaatgcaacccctttcctcaccccgtgaaggtaaagccctcagagccaaggagagaaggctc

SEQ ID NO: 435558 - DNA, 290 bp, Homo sapiens
ttcccagagccctgttgtctctaatattggaatctatagccttgttttctcagacgcctagattacagacctctctcttgaacacctattggtatggtatcyggggatcctttaaatacttgatgattggcaggggttaaatagcggaaatcagtgcctgacaattcgccttccaggatatggactgtcattccctctcttggtgggcctcagtctcttatccataaaagtagagattgtaatactcatttgaattgcagatacctcaacccgaacccacctaatataat

SEQ ID NO: 435559 - DNA, 506 bp, Homo sapiens
ctatcagagaacagctgctgagaggctgaaatgctaggtagatatttcagaggcagcacagatattgggagatggaggtttaattttgaaaagaaaaaaaaggggmaaagagacctcaaaaagaccctaccatgtggttatggagtatggaatacactctaacacaaccattttaataacagactaaccaaatctcaacagaatcaaggtggtctactggcaatttaactatctgccacactattattctacatattctagagaaaaataatgtaatacagagtcactgcagtgtattgttcacaatatttggaatataataaaaattactagatatgcaaagacaaaagaaaaatgactaacaagcaagaaaagtaataatcaataccagtataccagagattagataagatatactggggttagcagagaagggcttcaaaaaatgttattattatattaaataaaatagagaaaaaatattggtaaaatagatgaaaagatgc

SEQ ID NO: 435560 - DNA, 506 bp, Homo sapiens
ctatcagagaacagctgctgagaggctgaaatgctaggtagatatttcagaggcagcacagatattgggagatggaggtttaattttgaaaagaaaaaaaaggggaaaagagacctcaaaaagaccctaccatgtggttatggagtatggaatacactctaacacaaccattttaataacagactaaccaaatctcaacagaaycaaggtggtctactggcaatttaactatctgccacactattattctacatattctagagaaaaataatgtaatacagagtcactgcagtgtattgttcacaatatttggaatataataaaaattactagatatgcaaagacaaaagaaaaatgactaacaagcaagaaaagtaataatcaataccagtataccagagattagataagatatactggggttagcagagaagggcttcaaaaaatgttattattatattaaataaaatagagaaaaaatattggtaaaatagatgaaaagatgc

SEQ ID NO: 435561 - DNA, 552 bp, Homo sapiens
tcgcaatccccaatgaagccatttttgactttgtctcatggggctccttgggtaaggctgccagtgaaattggggcaggatcacaggaagaaggaaacttccagctgaactttgtaataatttaaaatgatcgtaaactttcctgggcagaatccaggaggacagcaaatgggaagtgcaaatatgagcacagaagccaaggaaagcagggaaaggtggagcctgaaagccctgcttgtgttctcagcaaagaggttggttgcctgaggcaagatctgagtctggcaccagrggcctgaatattaactccatgcaggtggtgggaatgagactgtccttgttggctgcatggtaagtgggtgatgcctgtcgctgccagctttccctgacttccctggtgacctgtatattgcagcagaagcagccataatcctcctgggaatgtaactccatttgcctaagaaccacacccctatccccaacagaggctgcagcaagccccgcccaaggagagtctgagcttagaaatgcctaaccctgcacctacctgat

SEQ ID NO: 435562 - DNA, 602 bp, Homo sapiens
caaggctttcaaattaatccaatccaaaaaagacaaaaaaaaaagaaaaaataatgaacaaagcctccgaaaagtttgggattatgataaatgaccaaacataagaataattggtgttcctggactgggcacagtggctcacacctataatcccagcactttgggaagccgaggtaggtggatcatttgaagtcaggagttcaagaccagcctggccaacatggtgaaagctcttctctactaaaaacacataattagccagatagtactggtgtgtgcctgtaatctcagctactcgggaggctgaagcaggagaattgcttgagcctgggcggcagaggttgtagagctgagattgcaccamtgcactccagtctaggcaatagagtgagaccctgtctcaaaaagaagaaagaaagaaagaaagaaagtttggaaaacttatttaaggaaataatcaaggaaaaacaacttccctggccttgttagatatatagacacgcaaacagataaagctcaaggaacacccagaaaattcatcccaaaagatcataacctggacagatagttatcaggttatctaaagtcaagatgcaggaaag

SEQ ID NO: 435563 - DNA, 602 bp, Homo sapiens
caaggctttcaaattaatccaatccaaaaaagacaaaaaaaaaagaaaaaataatgaacaaagcctccgaaaagtttgggattatgataaatgaccaaacataagaataattggtgttcctggactgggcacagtggctcacacctataatcccagcactttgggaagccgaggtaggtggatcatttgaagtcaggagttcaagaccagcctggccaacatggtgaaagctcttctctactaaaaacacataattagccagatagtactggtgtgtgcctgtaatctcagctactcgggaggctgaagcaggagaattgcttgagcctgggcggcagaggttgtagagctgagattgcaccactgcactccagtctargcaatagagtgagaccctgtctcaaaaagaagaaagaaagaaagaaagaaagtttggaaaacttatttaaggaaataatcaaggaaaaacaacttccctggccttgttagatatatagacacgcaaacagataaagctcaaggaacacccagaaaattcatcccaaaagatcataacctggacagatagttatcaggttatctaaagtcaagatgcaggaaag

SEQ ID NO: 435564 - DNA, 589 bp, Homo sapiens
tttttttccagtatcatctacttaatttaattattttgagattcatctatggtattttgtatatcaatagttcattccttcttaagttcaaaagtttacatttaaagttcaataacattgacctttataaataaatttagagtctaggttcaatgcaaaaaggtacatcctgctcctgctaaagattgtgggtatagggcagtgttttcttgagctcctacttgtgcctattttaaaaatacaataacagggctggaggtagagcaagatggcagataagaaaactccactgattktaccctatgaaaggacactaatttaacaactatctacataaaagaaaacatcttaataagatccataaaccaggtgagcactcacaggacctggttttaactttatatcactgtaagacacacagaagaggtaggaaaaactgtcttgaatcaccgacaccacccctaccccatgccccagcagttgcagcattgtgtagacagcaattctgagcaatgcaggaaggaaagcacagcaatttttagtcattgaactcactgctgtcttgttagaatagaaaagaaaactgaac

SEQ ID NO: 435565 - DNA, 589 bp, Homo sapiens
tttttttccagtatcatctacttaatttaattattttgagattcatctatggtattttgtatatcaatagttcattccttcttaagttcaaaagtttacatttaaagttcaataacattgacctttataaataaatttagagtctaggttcaatgcaaaaaggtacatcctgctcctgctaaagattgtgggtatagggcagtgttttcttgagctcctacttgtgcctattttaaaaatacaataacagggctggaggtagagcaagatggcagataagaaaactccactgattttmccctatgaaaggacactaatttaacaactatctacataaaagaaaacatcttaataagatccataaaccaggtgagcactcacaggacctggttttaactttatatcactgtaagacacacagaagaggtaggaaaaactgtcttgaatcaccgacaccacccctaccccatgccccagcagttgcagcattgtgtagacagcaattctgagcaatgcaggaaggaaagcacagcaatttttagtcattgaactcactgctgtcttgttagaatagaaaagaaaactgaac

SEQ ID NO: 435566 - DNA, 589 bp, Homo sapiens
tttttttccagtatcatctacttaatttaattattttgagattcatctatggtattttgtatatcaatagttcattccttcttaagttcaaaagtttacatttaaagttcaataacattgacctttataaataaatttagagtctaggttcaatgcaaaaaggtacatcctgctcctgctaaagattgtgggtatagggcagtgttttcttgagctcctacttgtgcctattttaaaaatacaataacagggctggaggtagagcaagatggcagataagaaaactccactgattttaccctatgaaaggacactaatttaacaactatctacataaaagaaaacatcttaataagwtccataaaccaggtgagcactcacaggacctggttttaactttatatcactgtaagacacacagaagaggtaggaaaaactgtcttgaatcaccgacaccacccctaccccatgccccagcagttgcagcattgtgtagacagcaattctgagcaatgcaggaaggaaagcacagcaatttttagtcattgaactcactgctgtcttgttagaatagaaaagaaaactgaac

SEQ ID NO: 435567 - DNA, 606 bp, Homo sapiens
attaaaataagtaaatgaacaataagtaatcacctgatagtacaaaactcacaggtaatagtaagtaaacagaaaaacacagaatattataacactttaagtgtggtatgtaaattactcttatactaattagaaataaaccatgaatcagtcaaaaataataactacagcaacttttccagacatacacagtacaagaagacatgaactcaaataacagttaaaaagcagaagacaaagttaaggcatagattttttgatagttttctttttgcttgttggtttcttttgcaaacaatgttaagatgttataagcttaaaataatggcttatttagcatttgcaaactcatggtaaccccaaattttaaaaaataccatgaatacacaaaaaataaaaaacaagacaccaaatcatatcaccaaagaaaatcttcttcactagaagaagatagaaaggaaagaaagaaggaggtgaagaccacaatacaaccagaaaaaaaatgacttaatggaragagtaaatccttacttatcaacaacaacattgtacataaatggactaaactctccaatcaaaagacatagagtggctcaatgggtaaaa

SEQ ID NO: 435568 - DNA, 562 bp, Homo sapiens
acgccatttcggctagaagggacctaagaaattaggtagtcatttaacagatgaagaaactgaatttcagaagtaaagtgatttgttcaaggtctggaaggttgtaaattgcaaagcaagtagtagaggccaggtgttttgagtacaacttacaatacagtgctcttccctaccaccaggtaagtaatttgtcatcattttcttccttttgaaaccctctatgtaattgtaaaccttcatcttaggtaccgccctagcttcacagagcttccmaaggaagcacatcacctaaacatgctccgattgtgcagaaagcaagacacaattattttgttttgtaatctgtccttgtacttatctcttcccctttcaattaaaattttctgatgccccaacaactttgggctcttcatttcaattccaaaataaaattggtaatctgaaacaatctaatattgttctaaaaaaaggaatttaatccaaagaaattactccaaggaaataagttttgaggcaagccactgggaaagacatcttagagtaggtgggttttgtgaaattc

SEQ ID NO: 435569 - DNA, 610 bp, Homo sapiens
atttgtcatcattttcttccttttgaaaccctctatgtaattgtaaaccttcatcttaggtaccgccctagcttcacagagcttcccaaggaagcacatcacctaaacatgctccgattgtgcagaaagcaagacacaattattttgttttgtaatctgtccttgtacttatctcttcccctttcaattaaaattttctgatgccccaacaactttgggctcttcatttcaattccaaaataaaattggtaatctgaaacaatctaatattgttctaaaaaaaggaatttaatccaaagaaattactccaaggaaataagttttgaggcaagccactgggaaagacatcttagagtaggtgggttttgtgaaattccagtaatgactatatgcagtatcccctttctcattttccttgacatattcaatccatattgttctgcctagctcaatcaaaattatttttttatttcttattcttaatccttttctmtaacaagcaatttcttttgagaaatctattaatcatttatataacagttctgcgtggtctatttaagtgttttaacaacattaatatcttctatataatgagagatcgcttatattt

SEQ ID NO: 435570 - DNA, 574 bp, Homo sapiens
gtgagcactctctcccaataaaatgatacattggtggagcaacttaatctacccctcccagtcactaatataattagtcccactgtgactgagctgaagsggcacccagcaagcaggaaagacagtaccttggccactcaaagcagtcatgccctcctggtgcctgaattgaagcagttccctgcatcctgggaaatcgcatcttggccacccaaagaacttatgatcccccagggcctgaactgaagcagtaccctgtgacctgggaaaaagtgccttggcctcccagtgtggtcatactcctctgtgcctaagctgaaacagcaccttacatcccagagaaacagcgccttggccactcaaagcagtcacactccatgaatccaagccaaagtggtgcatttcttcccagggaatcagtgctttggccatgctaagcaaccatgtgtcccagggctgagctgacatggcatcccacatcacagagaaacagaatattggctgagctgaaacactccacactataggccaaaccacaatagtatccagcttccccaaagctggaattgcctcc

SEQ ID NO: 435571 - DNA, 533 bp, Homo sapiens
gtatacatatttcaaaacatcatgttgtatagcataagtatatataatttttacaagtcaatttaaactaatagtaagaagaataaaagagtaacataatcaaaatatcttgaaaacacaatttttctgaatttaggtaattaatatgccaaaaggtagatatgactaatgaaaccataaaatatatcatctgaaaaccattgacaacatgcatcttctcctttctctacggttcctctaaaagattgtgatttgagatttagtgagctcctgccacatgtattatatccacaactcatttgctaaaggaccatctttgaaataataaattttgctctcattctaccggaagtttgtattattaataaaaaaaaaaccatgagatctgcrgaggcaaaaagagtgctttattttctggaatcaatctatggattagagaaatacaaattttctggaatcaatctatggattagggaaatacagcctttgggacaaagcaacaatgcactctgaggagggtttgaagaattaga

SEQ ID NO: 435572 - DNA, 533 bp, Homo sapiens
gtatacatatttcaaaacatcatgttgtatagcataagtatatataatttttacaagtcaatttaaactaatagtaagaagaataaaagagtaacataatcaaaatatcttgaaaacacaatttttctgaatttaggtaattaatatgccaaaaggtagatatgactaatgaaaccataaaatatatcatctgaaaaccattgacaacatgcatcttctcctttctctacggttcctctaaaagattgtgatttgagatttagtgagctcctgccacatgtattatatccacaactcatttgctaaaggaccatctttgaaataataaattttgctctcattctaccggaagtttgtattattaataaaaaaaaaaccatgagatctgcggaggcaaaaagagtgctttattttctggaatcaatctatggattagagaaatacaaattttctggaatcaatctatggattagggaaatacagcctttgggacaaagcaamaatgcactctgaggagggtttgaagaattaga

SEQ ID NO: 435573 - DNA, 240 bp, Homo sapiens
gtgaggaacagagaattgattggatgccctgtaagcataaaactacaagtctctcttttttgactgactttaratggtcaactggggaattcacagctacaatctattttggttttgcttctcctagaaagggaagtcttgcgacatttttgcaacattttttaaaatcacacaatgtgtaactgcccctcatcctactatggctgcctggttctcctttaacttgagcatctcatttag

SEQ ID NO: 435574 - DNA, 560 bp, Homo sapiens
tattctgttttattgtagaaagaaaagagagactcgatccttttcttttctggcacttaactttcaagaaaatggggcaaatgacagaaattaagtttatactggaggtttyagttttctaaaaagctagcctccagagtctgccctgcaggagttccacaattacagttccataatcctataaaattacaactcacatctatgctaatatgctgagaccaccacaaaatcccgaactgtcaatggaatgacaacagcacattcaccaccagtcaacccatcaaggcaagaagacggaatagctaaccaggggttacatcttagaaacactttcattaacaatgggtgaaatacatttttaaaacttagatttaaatatcaggtgttatgttacttgaagtaccccatttctttaatactctaatcaaatactacttaaaatcacatagacaaactcagtaactttctctctgagccaaatggtagattttccttttagaatagagatggttttaactttcctataatatattcatgaaaaatgtgtttgaaaggaaaat

SEQ ID NO: 435575 - DNA, 590 bp, Homo sapiens
gtggtactttgctatggcagtcctaggaaaccaatacacagcccattccatttttagcaactttcaggtcagaatgttcttctcgacactgagctagaatttaattttatgtaactactggtcctagcatggtcttctggagtcaaacacacgtctattcttcctctacaaaacagccttcaagcttccaggatgcgattatgtcccagctgagacatccctttgtttatgttcctaggtcattcaccatcctggtgtcatttaaagcctgatgtctgcagccatagagctgtttgctctttccttagcggccaccagagctacgttgcacaagctatccycaatatcttcttctttgagatgtataccagcaaggcttaagatggactgcagctcagtattagggggaggagttactccctttgagaatcttcgaaagtgacacctttttattcataatcttaaagacgtggtggccaagtgtggtggctaagtgtggtggctcacgcctgtaatccttacaccttgggaggccaagataggaggattgcttgagtccaggagttctagaccagcctaggcaacacagg

SEQ ID NO: 435576 - DNA, 581 bp, Homo sapiens
gcaactttagttgatgatgaggtgctcataacctttgttgagcatttatgatatgctgggcattagaccatgcgatttttatgcataattacatttattcctcaaaacaagcgtaggaggtcagtactcttgatagctgtagtttacatatcaggaaaccaaggttcagagagttttaagtgacttgcccaagggctccagccataagtgctaaagctgggattgaactggaggaaaatctgtctcagggcctttaaccactatcttgcctcttgtagatacaaaggtggaaactgggacaatctcgactagaaacttaacaaggaagaccggcttcaagattctttttctactttatcatatactctaaatgggtcctagaactatttgcatgtgcttgctggcttagctggtatgccagtttccttgacaggaaatatagatgatatggatgatgatggtaacaattattaattgaatacytacaatgtgtagacatttacatacattatctcaataaatcctcatggcaactctgtgaaatagggctaatccgtattttgtggatgaacacattgaag

SEQ ID NO: 435577 - DNA, 553 bp, Homo sapiens
agtgagactccatctcaaaaaaaaaaaaaaaaaaaaaaaagagttcagaarcatgaatgcaccataaacaccacgtccacatctaggactccagaggtctcaggggtaaagaaagttaggagtgtggtccagtctgtaatctgacccccagccaccctaaagggtgctctagatcagcagtgccactgtggtttgctctgggtcttccttcccccatcaaagctaagaacagactttttctggggatctgaaactcaccaagccctgactagggcaccatttagaaaccaaaagaagcctaagatgctgcccaacaactaggccctcaataaatgtccctcggactatttatttattctgattaagaaaaaagaagtgtatacatttatggtatgcaacttgatattttgaaatacatatgctttgtggaatgactaaatcaagctaattactatatgttacctcacatatgtgtgaggagaacacttaaaatctaccctcttagcaactttcaagtacaatatataatacatcattattaactatagtcacc

SEQ ID NO: 435578 - DNA, 527 bp, Homo sapiens
tgggattgctaggtcatatggtacttctatttttagttttttgagactgaactttttttttaaaagaaactcctaaacctggaattaaggggcctggcacccttttcctgtatctgtccccttgctggtacctccacataggcatgccctttcctctctcactcccaggcaaattcatctattttcagcaaggattcaggttaaacctgctcccccttgaagtttcctggtgactgcccataccgcggcagaattagctgctctgcgaccccttgcacgtagttytagaagacatgtcaagctatggcagagctccctgagggcagggtttgccttcaagaactattcatcagtacttgtcagttgtgggctgtcattactgcccttcctaggggctaagaatgtcaccagggaggcttttgtgtttccgggagggctccaaataccgcaccctgaaacatgacctccgaaacatgacctctgaacctcagaaggcttctgaagtttttcttttttttttttttaaa

SEQ ID NO: 435579 - DNA, 527 bp, Homo sapiens
tgggattgctaggtcatatggtacttctatttttagttttttgagactgaactttttttttaaaagaaactcctaaacctggaattaaggggcctggcacccttttcctgtatctgtccccttgctggtacctccacataggcatgccctttcctctctcactcccaggcaaattcatctattttcagcaaggattcaggttaaacctgctcccccttgaagtttcctggtgactgcccataccgcggcagaattagctgctctgcgaccccttgcacgtagttctagaagacatgycaagctatggcagagctccctgagggcagggtttgccttcaagaactattcatcagtacttgtcagttgtgggctgtcattactgcccttcctaggggctaagaatgtcaccagggaggcttttgtgtttccgggagggctccaaataccgcaccctgaaacatgacctccgaaacatgacctctgaacctcagaaggcttctgaagtttttcttttttttttttttaaa

SEQ ID NO: 435580 - DNA, 490 bp, Homo sapiens
taagctaaacaacttagatataaaacatcaaaagtttcagaggccatatttaacttaactttcttaagggtatttattcctccttacctgatgaagaacttccagggtaacagggtaaaagaggttttcaataattattcgaagcacagggctctgcccaggtaggactgtgccttcattggaaggacctccagaaagggccaggcttcctgattggacggcactgacagcctgcagtgcagcttgggctcgctatagaacaacccaaaatgagaacttttgattatacagacgcattatatgaatcctaaaatttagttgacataaaacagtatgaagcaatrtagttaagtaaaacaagatttatctactccgtctggagatacatatcctaaatttgtaatcagtcaacagtcaaacacctccctgcataccacaatgacacagtatttttaaaaggtgcttaaatttacttgaagaataaaaacac

SEQ ID NO: 435581 - DNA, 591 bp, Homo sapiens
ggcactgttccctgggggaatgggaggtggattgagtcctaagtacttctcagagtgtaggctctcactgcacggagagtgcttctcctattgaaagaaatgtatacttggccttcacacagaaactaactactttatctggagctcgtgaagaaaagagctgggcatggaggctcacgcatgtaatcccaacactttgggaaggccaaggcagaaggatggtttgagtccaagaatttcaagacccagcctgggcaacaaagtgagacccccatcttttacaaaaaataaaataattagccraatgtggtggcacatgcctatagtcccagctactcaggagcctgaggcaggaggattgcttgagcccaggagttcaaggctgcaatgagctatgattgcactagtgtactccagcttgggagacagagtatgtccctgtctctaaaaaaagagaaaatgaaaaaggtatcattctatcactgggcattggagagaagctggctgcagcagttagtgaaagacagcatgccagtcccaacacgatacctctttaatgaatttcaagggtgactacttttattccttcta

SEQ ID NO: 435582 - DNA, 597 bp, Homo sapiens
actcctgcttcccctggaagctgaacagaggggttgtacaaggcttataatttttcttccactcttcttccgtggttttgttttaatctaaatcaagttacagttaccttggcaagccatttcttttgattgggtgatttaatctatttacatttaatactattcttgatataccatcaattctcattattcacaattccttatttgtgaatttttcctacttgctagaagtttgtaattcctaaatcaacacttaaggtgttttcatggtcatttgcaacatgcacacagtggcaaaaatatttgaattgctcaacatatgtgttcccagctgaggctgaacaaggtgacacacaaacctcytgtatcagctctcatactgtaaacaagcgtccttcttgtggtctacttagtgccaggttttttgtatttttcttggtgatttcacagtttacaagagcccccaagagcagtgctgcagtgctgtttagtgttccaaagtgcaagaaggctgtgaggttacttgcttttagcctgaactttagtatttcttctaaagaagggctgccaacattaaattctctcagttttattttt

SEQ ID NO: 435583 - DNA, 606 bp, Homo sapiens
ccatttaccacacactaaaataaaattttttttaacctcactcctttcagtaggagatggcttaaaaaaattattttaatctcacaatgcagttataaactggtgcaatcactttgaaaactggcattatgtaatgaaactgaagaaatatgttctctatgacccaacaattcctttcctatgtacttcttagagaaaactcttgtccagcaggaaagaatgttcatagtagcatcaaactaaaacaaccaaactatttatcaacaataaaatggataaacaaaccatgatctattattcttccaatgggatactacagacttgaccgtactgagaatgaatgagcaacagccacatgtatgaatatggatgaatcaccaaagacatacagggcaaataaagtcacagaagaaaaccagcatgagtccatttatgtaaggttctaaatacagctttaaaatttttctaatgctttaaagtattgaatgctttaaaaaawttttaagttgcatttagggatatataatgagtggtaaaaaaacaacaggaaaacagaaaagcaagagaataattatcaaatttgggactgtggttatcttgggggaa

SEQ ID NO: 435584 - DNA, 607 bp, Homo sapiens
ggggtgctggatgcagaatggactgcaagcagctgtgtcctgtttggacattagtgtaggaatccaactgcatagccttcatttgtttcaaagcagaatttagagccattctagtagctcactgtgatatttttaaataaatggagaaaaattttattaactgacttaacaaaaaaacactgcctattaaactcatatagtattgtttagagagtatctacaaaattctaacctcgatgttttcttgcaaaagaagtggaaataagtagagagactctctcaaagaatcgctgagaaacacaaaatattcataagtagtataagatttacttatgtgcatttttgaagattatacaataatcaatttgcatcaggctttccaatttaggaatactgataggatttccctgtagggggagttttcacataaattttgaagaaatcattaaaactgaaaactttcctgtattttgtagtctactggrgttccaatccagtgtgctttcttatatttataaggccagtctacaatgtgtgttatcataggtcttggagcaaatatcacgtaaatgaaggcatttctgcattctatacattcataggtttt

SEQ ID NO: 435585 - DNA, 595 bp, Homo sapiens
taataaacttttaattaaaatgtgactagtgggccgagcacagtggctcacacctgtaatcctagcactttgggaggccaaggcaggtagttcagaaggtcgggagttcaagaccagcctggtcaacgtggtgaaacctcatctctactaaaaatacagaaattagctgggtgtggtggcacacacctgtaatcycagctactttggaggctgaggcaggagaattgcttgaacctgaggggcggaggttgcagtgagccaagatcgcgccactgcactccagcctgggcgacagagtgagactctgtctcaaaaaaaaaaaaaattgtgactagtatgtttttaactcttctattcacatagtgttacatctctgcgtaacttaaatgattcaagtcagtcttgatatgtcttaaagcatttttataagttgcctggactattcacaaattggtttaatccatgcctctatgtaagacataatatttgttttttctggcttaagctcttttcaattttaagataatttattacacttaaaatcactctctggccacaatacttagtggcatagcgtattagatggcatctttga

SEQ ID NO: 435586 - DNA, 605 bp, Homo sapiens
gtactcatatatctgacactcatgattttttaagaaaaaattatcatcattcaaattaggaagcattttaaaacttacggcacgtgcatggttaaatggcattttctctttcttagttgtacgtcaaataatagttcacttttttttttttttttcttgagacagagtccttgatctgtcacccaggctggagtgcagtggtgcgatctcggctcactgcaagcttcacctcccgggttcacaccattctcagcctcctgagtagctgggactacaggtgcccaccaccatacccggctaattttttgtgtttttagtaragatggggtttcaccatgttagccaggatggtctcgatcttctgacctcgtgatctgcccaccttagccttccaaagtgctgggattacaggcgtaagccaccgcgcctggccaatagttcactttttaatcaacagcattaattattttattcagctttgttctcctttccaaaatataaccttcgttctgatatactttatatctctctgtaatttatatgaagacagtgactgttaaaaagcagtgtgcctcaaaattacctcctctttcctacacaagtgc

SEQ ID NO: 435587 - DNA, 601 bp, Homo sapiens
ggccaaagtgcctctcagtggggttgccagagcaaataaagggtgtcccatacactacttggaacattcttgtaccaaaaaaaytgttcattgcttgcctgaaactcaaatctcactgggtgttttgtattcacttaatttattttgtttttgcttaattactctgtgagggcttgcgctctgggaaaggatcaacccagaggaatatttaccggctctcaggttgcctaaccatgctatcatcttgccgtgactgtgaaaaaaactcccttttcttcttattcccaatgttttactttgaaaaatgtcaaacctacagaagatttgtgagaaatgtacaatgaacttccatatgctgtttatatgtcactaattttaccatttttgtcacattttcttcctttctctccctttgtacgtgtgtatccttagctgaaccatttgagagttacagatatcatgatacccaagccccaaaacactctgcatgtctctctcaaaaattagaatattttcctatatataagcatgatgcaaagatcacactcgggtcatatttaacattgacacaatactattttctaatatgcagtctatattt

SEQ ID NO: 435588 - DNA, 590 bp, Homo sapiens
atcacctaggtattaagccccacatgcattagttatttatcctgatgttctccctccctgtggccccattcctagttttagtaatatgagtattctctctctcttttggtcagtctagatataagtttgtcaattttgaattttcactcttgtttttattaatatatwctctacttcatttattttcattctaatctttattatttccttccattttgctttgggtttagtttgctctccttttttctggtttctgaaaatggaagtttaggttagtgattagagctatttcttctttttaaatataggtatttatatagctattaatctctctctaagcacttcttcagctgcatccataagtttggcatgtttaatctttattttcatttatttcaaactataattttccttgtggtatcccttttgacttactggttattaagagtatgttgtttaatttttacctatttgtgaatttttcaaatttacttctaattaatttctaatgtcattacattgtgactgatgaacatgctttgtattatttcaatcatttaaatttattaaggttttcatcatagtgtatg

SEQ ID NO: 435589 - DNA, 520 bp, Homo sapiens
atgtcattacttaatttgtttttgacagctcccatttgcagaggaaaggaaagtatgagctacacatgggcaaggattttacatacatccacatttgtttgtttgttgtgaatattgacacattttcttgggggaatggcagggaatccaggccaacatcatttctttcttagtatagcaacagctcaagatgtttgctgtccatggaaagytgaaggaaaaattcaagtcagtgtctgtaccaaagggaagaagtattagattggtaagcactttccagccatgatgagaagatggcagagcgagttaggaatgtaggttttcttctacgacagaagaggtcattttaatgagtaaatggagcacaggggagccctcacatttgtaccaaggagaatcccaaagccctgtttcacaacagctatgtgtgggttgtgtgatagcacttcctatggtttatgttacctaactgtgctcctcagggtggtcctcatcatgcgttttttaggtaactaattgt

SEQ ID NO: 435590 - DNA, 558 bp, Homo sapiens
agagcagttgattttttccccgaattccagtctgattgcttatttggtgaaaagcagatttaaaaacctgtgctccatttactaccatctcatttggcactggaaacacaaatgtacaactagttataaaagtaggatcaagtccaaaacctgtggctatcwgtttcggggaggcagctgtcaatgcaagataaggaaaaaattcctcaatatttagagctgccccagtttggaattaactacttcatgggatggtgagcaacctttcccaagatgcagcgactgaatagatacttggtatataggcagaagaggtaatttacgcatttggtaaagtagaccgggtgacctgtaccacctaggcatctccatgattttaaaattaggatacatttgctaaaatatttccccaagcacccaggatatcctttgcatggtggaaccttgttctgatgttgcttcagatcaaacatagtagcctgaaatgtggctgtagtagagtagttgcctgagatgggaagaattcacctcccaggctcctgactccagggccatgga

SEQ ID NO: 435591 - DNA, 583 bp, Homo sapiens
gtcaggcccacataccagccccatccaaggttacatatctgatttcctcactgcctgttaacatgactttattatttttcctgatgccatggatttcttcttttgtatcaacaaaatgtgcatgttccttatgtaaaaggtggtataagttctatctttgacattacccaattataaaatgcagtaaacataaaaacaattttctttttgatttatttacaaaagtggtctttccaaaacagttttactagtttaactcattttatctgaactccagcttaaagctatgaagtcatgtgtgataaataaacatgcatctgagtttatgtaattcagccaagaaatattttttgaacattttctatgttatagatatatttgtggatgctgagaatgttcatggtaaatacaagacagtctctgccctcacggagcttgcattctggtgggagactagrgaagaataatttatgaataaactattgaatatatactatgtttgtatagtttgtagtacagagacttggttgtgctggggagggggataccttcatagaatgttcaagaaaaaccttactaataa

SEQ ID NO: 435592 - DNA, 615 bp, Homo sapiens
tttagttaggatggaggtgaagcacctggcaggtagctgtcattggatggtgttgagcagagcccttagcttttgtctgtattgctgtcttgtcctrtggggggtcagaagcaacatctctgaagtggaatgtgtattaatgacttttttttttttttagacagagtctcactctgtcacccaggctggagtgctgccatgacagctcgctgcatcctgaaaccatcctcccacctcagcctccccagtagctgggattacaggcatgtgccaccatgcccagctaatttttaaattttttgtagagatggggtttcgccatgttgcccaggctggtctggaactcctgacctcatgtgatcctcccacctctgcctcccaaagcactgagtttagagacatgagccactatacttggtctgaacagctcttttttaatcccttccttcaactgactgaaagtcagggccctgcccagcatcactttctctaactgctttagacagaggcagagatatgacttgaggattcattcatccatttgttcagtaggtatttacagattgcctcctctgggaaggtattggcaacactgaaaagttggtgtccccaggt

SEQ ID NO: 435593 - DNA, 555 bp, Homo sapiens
cacatgtgaaccaggggtcactggccctgccccaaaggctggacttgaatatgcagctggtgccactggctaacagagccacagtctcggtcacaataatagaactgttgacccatgaggtttctggtcataggggcagaaactgccaacagggagagggcagctggccatctgaagccaggatctgtcccatccaggaaaggagaattggcaggagttggggacatcttgccatgggtgaatactcctctgagaagggagaagggaggaggcagcttacagacagaaccatgarggagggacaacatggagcccaaagccctgctcctgagttgctgggtctggatctcggggtcagggttgtttgtgagattggagaggcagcagaagtagcccagatgaaagggaagaacctgggttggtctctttgctgggcaaactctttgcaccacagtctgggctggctcaggcattggataggagtgagcctgagggtgggggtactgacccatccagcggcacaatttgggaaaggaaggggcagaagaagcaagg

SEQ ID NO: 435594 - DNA, 558 bp, Homo sapiens
actcttatcctaatttctgccaaaagaagagcaagtccatctttgacaatgatctctacactcacatgctcctttcttctgtagggatactccccaaactttacatttagaacatggtaaaaagcctctgaaacagcatgagtgagaatggtaatcccagggactaataacaacaattgccatttattgaatattgttcattcagaaaggcacggtgtgaaatactttttgtttttcacctaacgttatttatagtctaatggaagaaatagaaaagcacataagcagttactatccaggagtactatgaaaatgagcatccaggaggaacatgtaaaccaatctcagagttgtgaaacaattccccaaaaagaagacattagagtaagtcctgaaaattgggtaaaataaaatataaaataacatcataaccttcccaattaccaggaggcatttgtttattcgttatttgattattatttattcaggacatttagygtgagaaagggaaaggcaaaagcatgaagaagttaagtcagtagctaaagacacaaactc

SEQ ID NO: 435595 - DNA, 340 bp, Homo sapiens
aattgagtgcatttgtactctaaggatctgaaggacagayacttgtttcgtgagttcatttaacaatatttaatgaacacctcttatacagtgggctaacacagtgctagtttctgggtttacaatggtgagtgaaagcgagaagctcttccttccagagctgacagctcttctcgttaactctctcttactagaatttggggaagaggaagcctgaaggagtccacaaaacaatgtccttcaaatcagagtttattcaatgctgatttttcatttttctatggttctgtttggggacaagtcagtcaaataacttgaacctcagcgtcctcatctgcag

SEQ ID NO: 435596 - DNA, 648 bp, Homo sapiens
aatagcagaataggtcacttatggttaacagcaatgtattgtatatttcaaaatagctagaaagaggacttgaaatgttcccaaaacatagaaactataaatgcttgaggtgatagacttcttaaatacccagatttgatcattaggttttctatacatgtactcaaaatatcacatgtgccctataaatatgtactcatcaaaaaaaattaaagatggtcagaattactaaaagctaaccatgcataaaacaatctcaagtgattcaaagcaatcagtatatgataaatcttgaaattccaactggtggtgaaataatgggatatccagtaaagtgcatagagtatctggttaacttctggggagaaattaactacagtttgaatccatatcccacaactggcactcagataaactccacatggattagagagytaagcataaaaagtaaacacctaatttcagggtgaaaagtgacttttgggtgtaaaaggaacaggacatatcctaaaagaacaaactgataaaattggccaaaagccaatgaacatgtctataaaagatagcaccacaatcaaaatcaaaaggcaaacaacaaaataggaaaacatatccacaacatctgtatgtaacagatcaacagttcag

SEQ ID NO: 435597 - DNA, 601 bp, Homo sapiens
atcccacaactggcactcagataaactccacatggattagagagctaagcataaaaagtaaacacctaatttcagggtgaaaagtgacttttgggtgtaaaaggaacaggacatatcctaaaagaacaaactgataaaattggccaaaagccaatgaacatgtctataaaagatagcaccacaatcaaaatcaaaaggcaaacaacaaaataggaaaacatatccacaacatctgtatgtaacagatcaacagttcagcccttatgaatcaataagaaaaaagatgaagattaatagtagaacatgggtccaatcacacattcacatacaaataaatacctatggcaaacagacacgagagaaatgttcatttcacagatatccaaagaaacacaaaatgtgacgctgttattttgactatcaaagtgggcaggatttcaaaagcaatcacactcagcattagtgaaggtttgaggaacagacttacatactgttggtatctgyatgtatataaatggtgcaagtcttctggtgaaccatttggtgatgtgaatcaaaagtgttataactatatatacccattgatttaggtgattctgcc

SEQ ID NO: 435598 - DNA, 593 bp, Homo sapiens
ttttcaaactttctacaataaacttgtatcatttttgaaatccgaaaaatgtagtatccttgatttttaaaaagttaagagctgaattcaattactttaaagaagtgaagaactccaatgcttggatggcttttagtcttagttaatcctttttataatttagtaaacgataggcacaatctctaactgcctcgatgagttaactttaagtgactctgagatatatagatcaaattccccatgatatayggaaaagcatccaaaatgaatctgaacagttcttccacacacacttgcaaaggtgctggaaacaggtcagaaactgtcaacgtggcttgcttgcatgcagatcatcaactgcaaacatcttgagaaagtcacagaaagcccaagggcgcagaaaagcctgttttgtcacaaactgtctttcagtactagggaacagcttgacaggtttccaatggctttcctcgagtatgcttttggaagctggaaaaagaagatggcaaactgaggaaggaggcaccctctttttccccgtcccccattattagagcagaactggaacggttttggaaacaaccactaagtac

SEQ ID NO: 435599 - DNA, 593 bp, Homo sapiens
ttttcaaactttctacaataaacttgtatcatttttgaaatccgaaaaatgtagtatccttgatttttaaaaagttaagagctgaattcaattactttaaagaagtgaagaactccaatgcttggatggcttttagtcttagttaatcctttttataatttagtaaacgataggcacaatctctaactgcctcgatgagttaactttaagtgactctgagatatatagatcaaattccccatgatatatggaaaagcatccaaaatgaatctgaacagtkcttccacacacacttgcaaaggtgctggaaacaggtcagaaactgtcaacgtggcttgcttgcatgcagatcatcaactgcaaacatcttgagaaagtcacagaaagcccaagggcgcagaaaagcctgttttgtcacaaactgtctttcagtactagggaacagcttgacaggtttccaatggctttcctcgagtatgcttttggaagctggaaaaagaagatggcaaactgaggaaggaggcaccctctttttccccgtcccccattattagagcagaactggaacggttttggaaacaaccactaagtac

SEQ ID NO: 435600 - DNA, 593 bp, Homo sapiens
ttttcaaactttctacaataaacttgtatcatttttgaaatccgaaaaatgtagtatccttgatttttaaaaagttaagagctgaattcaattactttaaagaagtgaagaactccaatgcttggatggcttttagtcttagttaatcctttttataatttagtaaacgataggcacaatctctaactgcctcgatgagttaactttaagtgactctgagatatatagatcaaattccccatgatatatggaaaagcatccaaaatgaatctgaacagttcttccacacacacttgcaaaggtgctggaaacaggtcagaaactgtcaacgtggcttgcttgcatgcagatcatcaactgcaaacatcttgagaaastcacagaaagcccaagggcgcagaaaagcctgttttgtcacaaactgtctttcagtactagggaacagcttgacaggtttccaatggctttcctcgagtatgcttttggaagctggaaaaagaagatggcaaactgaggaaggaggcaccctctttttccccgtcccccattattagagcagaactggaacggttttggaaacaaccactaagtac

SEQ ID NO: 435601 - DNA, 409 bp, Homo sapiens
acacattaaagtaaacacagaccaaacagcattcaaatataggtttggcacacacacacaactgacaaaagatccaagtttttctgtttccttctcttctgcttatctctgtttctcccatctcatcctctgactgctacactcttttctgcrtgtatttaagctaattagatatgtagatcagaatgtggggctgttggtcttcaaaccccatgaaggggaaatcactggagtgactgagaaacatcaaggagtgaatgagagccccaggtggtgctggcattttcatttactggcttgatcatcttagaaaccccttccaaaaacttgaaagcatattttatcttatgtgttagcacaaccttttctcccggtgcactgagtctacagtggctatagaatgttgcaa

SEQ ID NO: 435602 - DNA, 409 bp, Homo sapiens
acacattaaagtaaacacagaccaaacagcattcaaatataggtttggcacacacacacaactgacaaaagatccaagtttttctgtttccttctcttctgcttatctctgtttctcccatctcatcctctgactgctacactcttttctgcgtgtatttaagctaattagatatgtagatcagaatgtggggctgttggtcttcaraccccatgaaggggaaatcactggagtgactgagaaacatcaaggagtgaatgagagccccaggtggtgctggcattttcatttactggcttgatcatcttagaaaccccttccaaaaacttgaaagcatattttatcttatgtgttagcacaaccttttctcccggtgcactgagtctacagtggctatagaatgttgcaa

SEQ ID NO: 435603 - DNA, 477 bp, Homo sapiens
agacattttctgagtggaatactgaatgaaaatcatttgaaagcaaacaaaacagaactgaaaatctagggttgcctggctggattcaggtatattttgaaagactcacatggacatcgcacttaagtagattgtacagtttgcttaggaagccagaagcaggggtgagggtggratgcaagggtctctgcctgtattgggtcctatcttgtatttcttcattgggaaagaaacctgtcttgaattgcactttttgcctcagatcattaatgtaaccataaagatctggaagatgctgtagaacagaaattgcaaattagtgaccaaggcatgggttttgtttggaccatactatatcttacaaaagaatgtcttaagttgattgccaacattttaaaaatttcttcatggtaacaattggctagatccaagtagctatcatgacctttagaaaaaaacaaattattttccagaact

SEQ ID NO: 435604 - DNA, 561 bp, Homo sapiens
ctgtccttgcttctctcctagcttctggcmgctgctggaatttcagagatgcataggccctcaatgtggggtgggagggaagtaggtggaggtccttggctcatggacacattgctccaatctctgcctctgtctccatgtggccttcccctctgggtgtgtgtgtgtgtcttaaatctctttctcttatgaagacattggttattgggtttaggtcccaccttaaattcaggatgatttatctcaatatccttaactaaattacttctgcaaagactctaagtgaagtcacattcacaagtacaaggggtaggacttggacagatcttttggacagccactattcacccaggtacagtcatcatagttattactttcaattcaggctcctattgtctcttgactatactcttataatagtctccttgcctgcagtcttcacacagcaacccattctcagtaaagtatccccagtgagctttccaaaacatcttcctcttttacaccctcaagtggctccctgtcacctgcaggggaacatctgacatgctgaactagacc

SEQ ID NO: 435605 - DNA, 561 bp, Homo sapiens
ctgtccttgcttctctcctagcttctggcagctgctggaatttcagagatgcataggccctcaatgtggggtgggagggaagtaggtggaggtccttggctcatggacacattgctccaatctctgcctctgtctccatgtggccttcccctctgggtgtgtgtgtgtgtcttaaatctctttctcttatgaagacattggttattgggtttaggtcccaccttaaattcaggatgatttatctcaatatccttaactaaattacttctgcaaagactctaagtgaagtcacattcacaagtasaaggggtaggacttggacagatcttttggacagccactattcacccaggtacagtcatcatagttattactttcaattcaggctcctattgtctcttgactatactcttataatagtctccttgcctgcagtcttcacacagcaacccattctcagtaaagtatccccagtgagctttccaaaacatcttcctcttttacaccctcaagtggctccctgtcacctgcaggggaacatctgacatgctgaactagacc

SEQ ID NO: 435606 - DNA, 591 bp, Homo sapiens
gggaatagtattgtcacccctgtttttggcacaaatgatttgagtgttttccaaacatcattaaatgccaaggtccctgaccctaaatgtggttcaggtgtagggactcagaggcccacagctagactgggcaagggaggggtagaagattaaaatgggaatgactgacaggcataggctattaattctcaaaggttggctctgcatcttcttgcagactcattgcgatttcctcaaagcaaggccttcactgcctggttgtgcatcatagagttcacagcattgtgaaatcacccttaaggcaaagctgacagcatctttatttattgtgcatggatttcatgttarcctcatcatccttttgctgcatgttgataaggcagaaatagtgagtcatttaaatagcggattacaaagactctgatgtagtaaatctaccctctaggttttcatttcataaagaatctgtgcattatttatcatcctcatcagcagaataataaaagccaacacagaccttctcatgaaccccataatgtagatattattgtcctcagtttacccaggataaaattgaggcacagagaggtt

SEQ ID NO: 435607 - DNA, 605 bp, Homo sapiens
tctcatgaaccccataatgtagatattattgtcctcagtttacccaggataaaattgaggcacagagaggttaagtaccttgcccagggctcccccatgccaataaatatggagctgacgttggaacccagagccttgcagtgccagtgctgttagccactgtccccgactccatttgtgagaatgctgctgactggcatttatgagagtgcttagtacctgccagrcactgtgcctggggatttacatggattatctacttttaccctcaaaacaccgatatgagttaggcactattaatttcattttctgattgagagagctgatgtgagagaaatgcagtgattttctcaagtttaaactcaccttgtaagcttcaaagctgtgattggaaccctaggggtccatgttccccttgctcatgtgttctggcccctcctcagctgactttggatttttgtcccctcctactgctccctccaaccccagagtgaaggtctcctggctttgtccaaacattagttccatcagggccgccccaccggcctgtgcccaccctaataccacttccttggagtcccttttgccattggagatgatgcatt

SEQ ID NO: 435608 - DNA, 352 bp, Homo sapiens
atttcagggagccaagagctcagcactcctgggctgcatgctctagacctgaggggcttagaccaggcctactgctttgagggcacctttccatcagtgggcatgtaagcatacttaatgaaacagtggagttagtaatgtggatccaagcagaaaagattctgaagcataaatgcacttgtatttggagagcagcatcagagtctgggctttgtgagtggatgaagtgaggcagggagtggtagttagtggacaagkttcaagataaaatgaccatgtaggagattgaagccactgggagcactggctcttgctctgggaaagatgggaaatgacagagagaatgagtgac

SEQ ID NO: 435609 - DNA, 610 bp, Homo sapiens
aaatctacaatatatgcaaatgttaataaacttcccctagcttttatgatccttgttaggacatgactaagtttggttgtattrtcaaatgtatttgagaggcacatttggttgtacataatgtacaaaggagggaaagatattttctccattagaggaaattcatttcatctcactgaatgattgaaactatggtttgggaaagggaggtgcagtaagcatgaaactgaataaatttacttaatgcagatactgcaggaactactaagtccaccaatagtaacaataattgtaattatgattgagattattaaaacactatgaaagctatataacagtttctacaggcaaaaaaaaaacttaaaattattaataatctcagacatgttttgtttcttctgttaaacattcatttattcattcattcatatctgtattaaataaatatttatcaaaaaaactgctaaatgccaggcattatatgagtacttgtaaatatagcagtgaataaaaggaggtgaaaacctctctccttattgagcctaaacttacagttattagttgatcatattggtgtttattatgttatataaagtatcttaggtgctgg

SEQ ID NO: 435610 - DNA, 610 bp, Homo sapiens
aaatctacaatatatgcaaatgttaataaacttcccctagcttttatgatccttgttaggacatgactaagtttggttgtattatcaaatgtatttgagaggcacatttggttgtacataatgtacaaaggagggaaagatattttctccattagaggaaattcatttcatctcactgaatgattgaaactatggtttgggaaagggaggtgcagtaagcatgaaactgaataaatttacttaatgcagatactgcaggaactactaagtccaccaatagtaacaataattgtaattatgattgagattattaaaacactatgaaagctatataacagtttctacaggcaaaaaaaaaacttaaaattattaataatctcagacatgttttgtttcttctgttaaacattcatttattcattcattcatatctgtattaaataaatatttatcmaaaaaactgctaaatgccaggcattatatgagtacttgtaaatatagcagtgaataaaaggaggtgaaaacctctctccttattgagcctaaacttacagttattagttgatcatattggtgtttattatgttatataaagtatcttaggtgctgg

SEQ ID NO: 435611 - DNA, 578 bp, Homo sapiens
ttccagcactttgggatgtccaggtgagcagatcacgaggtcaggagttcaagaccagcctgaccaaattggtgaaactccatctctactaaaagtacaaaaattagccaggcaaggtgacgcatgttagctgtaatcccagctactcagaaggctgaggcagaagaatcacttgaacccaagagacagaggttgcagtgagccgagatcacgccactgccctccagcctgggcaacagagtgagactctgtcctgagaaaaaaaaaatcttaraaacaatttgtcctgtgcctctgaggagacatagggagcagagaaaaagaggaagatcaggaaagatgcttgtaaggttgtacaagtctcttggggggttaaatctagtaggtcagtaaaggtaacaccaatgctaatccaaagggaccactgtgaaaatcagaaaaaagatgccccttgctccacaagccttattgctacctgcctgaaggttatcacgaatatgcaatgttgtggaaactaggatgtgaacagggactgctagaggttttcatagctcgatttgcacaaccatgagctgcag

SEQ ID NO: 435612 - DNA, 538 bp, Homo sapiens
aaacaatttgtcctgtgcctctgaggagacatagggagcagagaaaaagaggaagatcaggaaagatgcttgtaaggttgtacaagtctcttggggggttaaatctagtaggtcagtaaaggtaacaccaatgctaatccaaagggaccactgtgaaaatcagaaaaaagatgccccttgctccacaagccttattgctacctgcctgaaggttatcacgaatatgcaatgttgtggaaactaggatgtgaacagggactgctagaggttttcatagctcratttgcacaaccatgagctgcagcttttagaattaaaagatttaaatttggaagtttgattatatttggttgttaagtgcttggaaggaaggggaagttttctgtggtggatgcctttctcttagtcttcaacatccagcaacttttgttgtttttttgggtggcaactttgtacattagttgcagatgtgtatcaggtgctaatggcaagaagaaataagactattttatgaaacatatactaagtgctagatatt

SEQ ID NO: 435613 - DNA, 628 bp, Homo sapiens
caggaagcttactatataaaacaaaggaaagaagtactactttgtttgagataagggattagggcaggtgtctgaccaccaagcaccctcttaatttcctgaagttcttgaggtaattccttgagaaaagtttgaaaacacttgttaagaggacagagtacagaagagtttcaatctgcagacagagctgattagttggggcctggaagtcatcagtcctgatgccaaaattggaatataatcaaaatctatgggcaagccttctatccattcatctatttattcatctatctatccatccatccattattctatttcatcatctgtaaagtaagtttaataatcttttctaccttgatcaaatagaacctttaaactactaaaagttgtctaaaataatgaataagtgaaggtgttctagattaactcctgcttctgtatttataaragaaattcttgattctatctgtatgttctatctgtatcaagctttaaagttgtgaatatatgcataacttccaaaacgctggaaatgtttaaggaagcagttaatacagagatgaaggtctccatgatgatcaagaaatagaatctctaagttcaaatgacaaaactgggatttagaacc

SEQ ID NO: 435614 - DNA, 603 bp, Homo sapiens
tctatttaattttctgtaatttacatttaaatttaatagccacatgatgctaataactgtcatattggacaagaaaatatagaacagtcccacccatcttggaaagttgtattggatattgctattctaggagagtaaattactttttaagtatcatagaatagcataaagataaaaattcagttcagtcttatactaaatatgaaactctttacaatggatgattggctaggaaycaacagacctagtgctaaatgccagctctgccaattcccaataatagtttacaggaaaagtcaacttgattctcaatttttttttaactaccaagtagaagtatgatataaaatgacattacatgtaaactaattattacttacttataacaatatataacacttgtacacttaggtaatactgaataacaaactaccataaaacttaatagcttacaacagcaatgatcttcgatctcttgtgacactatgtatcagccaggtggctctgctgatcagggcaaagcaaagcttatcagctgggctgttaatatgtctggatcagctatgaactgacctggaaaggctgcagctaagacaattgggg

SEQ ID NO: 435615 - DNA, 546 bp, Homo sapiens
  misc_feature (1)...(546): n = A,T,C or G
atgattacttattcagcaacagataaacaaaacagaaattactgcctggaagtgtaacattgttttagcaaaagtgtaaatacttggcactggctttggagctaagaggtagcagaatgtggttgcacattaaggaaaccacaaaaaaggtgggaagggacaggaaaaaactttntattngaagctgaaaataacagtacttgtttcatatagtgtcaaaagtttgtcaacactgtcacctaaggtaacatagaaagtagaaaaatgcctaatgaacttgtgaattcagctgagaataattataggcaaaatgtcaaaggtcctcatttattttagctgcatataatgtaatatccagatagagagagmcagaagaaagagatatgaattagagaagggatttttaggttttcaaataagactttctgttttgtttgttttttaaagaattttcttcactagacactcccggaaaaagactcttgagacaataattacatccagggcactgccagaaaaatgcaatctaaggtcaagtttcaaggg

SEQ ID NO: 435616 - DNA, 614 bp, Homo sapiens
aatttgattttcttgaaggtccacaaacagcagaagctaaactatcaatttttaaatgtgctttttaattttttggttgttattaaaaataagttaaaatattttaaatggcaaaaaactgccttagtaggaattggaaatggatagaagtctatcctcttcccaacaaagctctcctaatttctttctctttgaatgaaactcatgaagaaaaatcaaaataatagtcatactcaactgcacacaataatggtcattaaaatcatagtcatcaaaataatagtcataattaactgcatacaataatatactcatatataagtttactatatttacacacatacacacatacatgcataatattggtgtacatagggatgcacaccttcctatgtgtgtgtagtttagagatatgtacatgtgtgtacatatgtgtgtacatgtgtacatgtgtgtatgtgtacacgtgtgcatgcatgtgtgtacatgtgtgcrtgcatgtgcgtgtatatgtgtgtgtgtgtatgtgtgtgtacatatctctatactccacacacatagaaaccctcaggcatgaagttacatatacatattgatgaacataagccatgaaa

SEQ ID NO: 435617 - DNA, 590 bp, Homo sapiens
gcaaagcaaccttggatagtatgcatgcattaaggatagatggaaacttacctgcagagattcagaaattcaaagattacaggaagaaggtagagatatcaggaaaatgtcttgtgcaagttgaaagtggccagaagttacttgcatctcctcyatcagaatatagggtctttttccaccctttgaacttgggttgaccttgtgacttgctctgactaatgttaagtagcaatcatgcaattgtgaggttccaaggcctaagcctcaagatacctttaattattttgattgttctttcagaaatattctctgagaccattatgcaagaaagctagaatggcattccagaagataagatgccacaagaaagagaacaaaggagcctcagttgagtttctgcaccaattgtcaggtgtagaagtgtgggcatctgggagcttctaacatacttgaatgtacttgcttgaaatattccagatgaaaccagcccaaccaaccatctgaattgtgagaaataataaatcagtgttgctttaagtaactaggttaaggggtttcatgttacacaacaatagataactgatacattt

SEQ ID NO: 435618 - DNA, 621 bp, Homo sapiens
ggaatgtatctgtccactgttcattatcaagttctacttctagacagtaaatcctgacaggacagggtctggtctgttatgtgcatcatcctctgcctggtacttgcatccwagaggtccagccaatatcacctgcatgaataaataaataaataacttgttttttggaatgtgtgtgtatatacaaatttgggtccacttctgaaatgcgactttctggaacaaaaaaatatgcctttatttcttgctattttactatctaactcagagactgggacactgtacatcttaaaacatgttcatggggccaaccttttccaaatgactaactgtacctgagcagtgctgaaaacacactcacatttttcctgtaagttccttttttgtcatttatgcagaacacttgtgttattatatattgccaattttattattttagacctgcaagttatggtggaattgattgacctttatattttggttactctagaattattggtactcacaaataggccttaaagttacactaattatactcctgtgcttagattcatagacatgttcagttatattgtgttttccatattgaatcctggaaaacctgttgttttggctagaccc

SEQ ID NO: 435619 - DNA, 621 bp, Homo sapiens
ggaatgtatctgtccactgttcattatcaagttctacttctagacagtaaatcctgacaggacagggtctggtctgttatgtgcatcatcctctgcctggtacttgcatccaagaggtccagccaatatcacctgcatgaataaataaataaataacttgttttttggaatgtgtgtgtatatacaaatttgggtccacttctgaaatgcractttctggaacaaaaaaatatgcctttatttcttgctattttactatctaactcagagactgggacactgtacatcttaaaacatgttcatggggccaaccttttccaaatgactaactgtacctgagcagtgctgaaaacacactcacatttttcctgtaagttccttttttgtcatttatgcagaacacttgtgttattatatattgccaattttattattttagacctgcaagttatggtggaattgattgacctttatattttggttactctagaattattggtactcacaaataggccttaaagttacactaattatactcctgtgcttagattcatagacatgttcagttatattgtgttttccatattgaatcctggaaaacctgttgttttggctagaccc

SEQ ID NO: 435620 - DNA, 537 bp, Homo sapiens
gagctgggagcttatggaaattctctcttcgtttctttttctctttctttctctttccctttctttctttctttctttctttctttctttctttctttcwttctctttcttctttctttcttttttcttttttctttcttttctttctttctttctctttctttccaagctctcattctatcacccaggctggagtgcaccaggcatgcaccaccacacccagctagatttttgtttgtttgtttgcttttatttttgtagagatggtgtttcaccatgttgcccaggctggtcttgaactcctgggctcaagtgatctgccttccttggcctcccaaagtactgggatcaaaggcatgagccactacacctagccatgttgttttcttttttaataaaatataatgcaaaataactagttgagactgagcattaacatgaagagattggaggcttgaggagaacaaaaaaggtagaaaatgtcatctagaggagtgggagagccgctgagccaggggtcagtgttatgatgtcctg

SEQ ID NO: 435621 - DNA, 621 bp, Homo sapiens
ggaatgtatctgtccactgttcattatcaagttctacttctagacagtaaatcctgacaggacagggtctggtctgttatgtgcatcatcctctgcctggtacttgcatccaagaggtccagccaatatcacctgcatgaataaataaataaataacttgttttttggaatgtgtgtgtatatacaaatttgggtccacttctgaaatgcgactttctggaacaaaaaaatatgcctttatttcttgctattttactatctaactcagagactgggacactgtacatcttaaaacatgttcatggggccaaccttttccaaatgactaactgtacctgrgcagtgctgaaaacacactcacatttttcctgtaagttccttttttgtcatttatgcagaacacttgtgttattatatattgccaattttattattttagacctgcaagttatggtggaattgattgacctttatattttggttactctagaattattggtactcacaaataggccttaaagttacactaattatactcctgtgcttagattcatagacatgttcagttatattgtgttttccatattgaatcctggaaaacctgttgttttggctagaccc

SEQ ID NO: 435622 - DNA, 575 bp, Homo sapiens
agaaccgtttgtgccttggagcctaagtcattcttagaaacaatatggaaagaaatgaccatttgctacctaacatataagctttatgctgatggaaaatactgaaatcttyccaatttattctttttctttatggatatttgtactgttattttctttaatgttctagaaagaaggccaccttgatgaccttttttaacatgataataacttatattcatatagtgccatatattatttctactacagagctacttccattcattccaaatgacatttatgaaccaccatgtgtcagtcactagggatgtgagggagattttgatgaaggatcagctcacaagagatcatgcagaagtatatggtcactaaacactgaaatccagaccagctcctgttcaactttcgggcacattagatataagccatggtccccattttaaagctgagaaaactcatctagagagtggataaatagcttactcaaagtgactcataattgctttctatcatgatttcaatacttaaacctcactgactcatactactaagagaaaattactctaaacaaataa

SEQ ID NO: 435623 - DNA, 588 bp, Homo sapiens
atcgcaacttaagctgacctaggcaaagtagacaattcattggaaaaataacagactcaaacagaaatctggacaggcaaaccacagggaagaagtagataaaactaagtgtcaacaaaattcagggaccttactcccaataggcctctatatctcgtctatgctttttttggtatattgtctttactctctctcattgcagaacagctacctcaacattgtaaaaaaataaaataaaattgtaggagytgacagctctctagtatcccatctaataattcccagaacaagaaaagggaaaattctcgttttgatacaatttgaaaataaatgccctagaagggctctgttgtttagcaaagtttgggttggatgaccatccctgtaccaatcaatgtaaccagtggttaaaggatggagtaaaaccttctaataataggtctttgtgcaaacatacagtttgaatggcagaagaaacaaatccttcaggaggcttccaaggtattccaagaagggtgaggtgatttgttcccaagatacagagtaaaaatggtaggtaagaagctagaatctaaggctttttctttc

SEQ ID NO: 435624 - DNA, 631 bp, Homo sapiens
tgttcctatatatatatttatgtatagatatagatatagatatggggagagagagagagagagccaaatgctcattctactcttattttttacacttcatctactctttgtcattgtccttccaaaatagataycatttctttgaggagataagtttctggcttgagccaaaccgatctctttatagaaaactgaaaatctcgtgaattcctctacgtttaatatttgtccacaccatttgtgtctcctgctataccttcttcatattcttctacctaaatcattccaatcctcgtatatttaggtaaactccactcatgtttgttatttttttattctttctcacagtcattcctgattattttcctcctagagccacactttaatagttttctaatcatctgtaacatataaagaggtggacttaatcttcattattttttactgttagttatctttgcacatattcatgccatacatcctcatgaacttcataggctgggtcagcattagcttttggattctttgtacatcatagaggccaaaagatgaagatgaggaggaaaagtataaggatgatggtatgataaagatagtaatgatgatgataattatctgagtgatgatagtg

SEQ ID NO: 435625 - DNA, 562 bp, Homo sapiens
aaattataaaaactctctacatgaaattaataaagataaaatctgaaattaatgaaatagaacgaataagttgcagaaaaaaatataaatggcatgcagaccagttcattgtaaaagcaagtaagatacrtaaaacattttagcttaattaaaaataaaagagaaggataaaatgtattaaaaattaagaaatattaaggaggtataaccacaaataaaaatttgatcaagggataatttagagtaaaattttgaaaacctagaggaaaaggatgatttcctagggatctgtaaatgattataattgatcacaaaggaatagaaaatgtgaataagtcaagtccaataaaagacaggaagtatgattaagtagctatcattaaaatagtcaccagaaacaaataagttcacagactgggtctatctaacttataaataatttcaacatgatgctccctagaataaaacatcaactcaatttatcttatgaagacaccagggctttaaaatcaaagcatagacgaatgctaataagaatgttatagagttgctatatgtataa

SEQ ID NO: 435626 - DNA, 629 bp, Homo sapiens
ggatatattgtcaggtaataacaacagctatacagaaaaataaagtgcagtaagaggattgatttgataaaagaatattctatctgagaagacaaagcccataaaatggaagtaggaatgtccctggaagtgaattatagaatttcagagaaagaaacatttgggaccttaatgaattggaaaatgcttcatgggtcagtctgctactagcactgcagaaggggtagatttacggagcacgagcatgagcattgcagattggaggtacacagtaagcaaagacacagaagcaggatgacagagtgaagggaagatagtaaggtgattctttcaatttcttcaccttcttatctgctcccaagtcctgactacattaactcagtagtacttcctgttcttgtctttcacttgatcactccccaacccagaccaagggcatttacctcctggtggctgtttcctgggtccatctgcattttttaaaaaatcaagatttgtcttgcatgtctcaccgtgcttactccccaaaacagccccaaacacaccactttcttaacatayatacacatattcacacgcatatacatacatacacatatatacatatacacacatgcacatgcacataa

SEQ ID NO: 435627 - DNA, 628 bp, Homo sapiens
accacttcccaaatcttcctccccactctccctgcaaaatacatatatatatatttcccttatattcattattacatatagctgtgttatgggacagagatattttatgttattttactatataaatagtattcataactgagtcatgtagtttactatgtgtctttgcccatttgtgatgctaaaacaaaatacctgagactgggtaacagataaacaacataaattctatttcccttgattctggagactgggaagttcaagacttaggcacyggcaggttaggtgtctgctgctgctggtctctgttttcaagacggtgccttttacaatgcatcctccagagggaagaaacactgtgtcctcacacagcagaaggaaaggaaagaaaaaaaagccctaactaattccctccagcccttttataaggcactaatccacatgaggctgagccctcatgacttaatcccctcctataggccttgcctcttaatactgttgcattgaggattaagtttcaacatggatttgagggagcacaacattcaaaccatagcactatgtttgcatttactcgctttgactttttttcctcctggagttgatcatggcttcattattttcattt

SEQ ID NO: 435628 - DNA, 606 bp, Homo sapiens
caccccatttcactcactaaaagccaagtgtctctatagtagctgacaagtcaygtaagttctgactatcaggtactcctctgttaataaatgtgtaagatcattacctctctgctttcttcagcttctctacctccttctaattcttttctggccaaatggctacaactgtaaggcctaaggttttcccctctgtcttgcattgccttataccagatacgcatattgcccactccctcaccttcaagattttgcccaaatgtcacctcagtgaagcctaccctgagcagccaatttaaaacgaattacttctctccacccattcaacactcccaattacctgttgcagtgctcactgtagtttcctcttttccaaagcactttgcactaatatggtatataatttacctgtttatggtctttgtttgttttttaatcccatagccaaaataaagttctgtcaattactgttgactgtgatggcttgtttagcttatctgtgtctcagtttctccatctataaaatttaaatgagaacaattattttcacttattgagtggctaccatgttcaatgcactgtgatagtctcttcatatgtaatttg

SEQ ID NO: 435629 - DNA, 647 bp, Homo sapiens
tacctctctgctttcttcagcttctctacctccttctaattcttttctggccaaatggctacaactgtaaggcctaaggttttcccctctgtcttgcattgccttataccagatacgcatattgcccactccctcaccttcaagattttgcccaaatgtcacctcagtgaagcctaccctgagcagccaatttaaaacgaattacttctctccacccattcaacactcccaattacctgttgcagtgctcactgtagtttcctcttttccaaagcactttgcactaatatggtatataatttacctgtttatggtctttgtttgttttttaatcccatagccaaaataaagttctgtcaattactgttgactgtgawggcttgtttagcttatctgtgtctcagtttctccatctataaaatttaaatgagaacaattattttcacttattgagtggctaccatgttcaatgcactgtgatagtctcttcatatgtaatttgtcatgtaagcactgcaatcaccttcaggtagattgtccacatctagcaaatgagataacgttagaaaaggctaggtgacttgcccaaggtcccacagctagtaattgatgcagactggacaggattataggagataacctagaca

SEQ ID NO: 435630 - DNA, 655 bp, Homo sapiens
aagcagaggttcaagtactaggagattagttgaagtatagactttaaatttataaatttttaatgggaagttgccattatcctgtgatgtttagactttcctcactatttacaaatgtcaatagtggcatctgttctctctttctgatagccagtaggtatgagtagaactaccaggtgttaccaaagcaaacaggtagaaaaattgcaggcctcctctttatgtggttcccaagatttcatcattccagccccgtaaattctacccagctctattttttaatttttttaacacatgtcactgttaggccattatatgcccatgtgtaaccttaatttcctactttcatgggttttctttatctatatctaatgttcagcagacaagaaatactgtgaaagttgaaccttgaataccatattctcttcccagaattcccatatagcatgaatttctagttctcctgtggacatgttaactcattcagcacacagtgattgaactgctattctgtgccaggtgtgcagacactatggatggaactaaggacagcctaccttaagagcatcatggagctctggccctagtagtrgaggcaaataagcaatatgttaccaactttacccacatgaaatagaatagcatgcaacagtaa

SEQ ID NO: 435631 - DNA, 403 bp, Homo sapiens
aattaccaacatgaaaccgatttcaacctattctagctcytcaattcaacaggcaacccattaagacattgcatcttatttacttttgtattcgccaaagcaatgaacaaaatttattatgttgaacactcgtaaaagtcaaggccttggacttcaagtaacctgaaagtcacaaatatgctaaatgttgaatacacatttattttttatttatatttcattggcaaccagcccaagtttatgcggttttaaaatggatgtttatatggcaatttttaccctatctgtgccatctaatatttcatctggattttcaataaagtaatgaaggatatctttggatcatgcccttccctgtgtgtaaaatatattttctttttcatccttcacctatcaagttcaa

SEQ ID NO: 435632 - DNA, 533 bp, Homo sapiens
tgcttttggaggccaaagaaggaggattacttatagccaggagtttgagaccaggctcaggaacatartgagatcccatctctacaaaaaatgtctaaaaatgtagccagagatggttgtccatgcctgtagtcctagctactcaggaggctgaggaaggaagaatgcctgaacccaagattttgcattatggtgagctatgattgtgccactgcactccagcctgggtgacagagggagacactgtctctaaaataataataataataataaaaagcaaagggttatattagctagtttagagagctgttgcaaaggcttaattatataataccagccatagtggaggcaactatggaaggttggtttactccttcccttgtccccagatatgactctgaaaattctgtcattctacatgaaccctctctctaaggtacagctcacacattccacactctaatccttgtagagcatcttccactagctgtagtcactctggactccaacctccactgcctcagtacagagcc

SEQ ID NO: 435633 - DNA, 533 bp, Homo sapiens
tgcttttggaggccaaagaaggaggattacttatagccaggagtttgagaccaggctcaggaacatagygagatcccatctctacaaaaaatgtctaaaaatgtagccagagatggttgtccatgcctgtagtcctagctactcaggaggctgaggaaggaagaatgcctgaacccaagattttgcattatggtgagctatgattgtgccactgcactccagcctgggtgacagagggagacactgtctctaaaataataataataataataaaaagcaaagggttatattagctagtttagagagctgttgcaaaggcttaattatataataccagccatagtggaggcaactatggaaggttggtttactccttcccttgtccccagatatgactctgaaaattctgtcattctacatgaaccctctctctaaggtacagctcacacattccacactctaatccttgtagagcatcttccactagctgtagtcactctggactccaacctccactgcctcagtacagagcc

SEQ ID NO: 435634 - DNA, 413 bp, Homo sapiens
aaacggtatatatttttatttttttacctgcatcttgatagttggcacaatttggaaaacaaaatrttatttcgtttccctagttgtgccaaacaatgttcaaatgacaactaagaatttagtaacgtgcattacattatttaagtggcgaggtttcaagttcttaaatgagggaggaagtttggtgataataaaagtctaaatgttggcatagtctacagatacatgagaaaaggatttaaatcatcataaaaacatttatttaacattaaaattgattttaaagaccactaagagaaaaattcttcatttaaaaaaatccattcattctgtaaatgaaggctagatcctgcaagttcaaatgtgaatgacaaaaatttagtatttatccagaggtctcaatcctttcttct

SEQ ID NO: 435635 - DNA, 589 bp, Homo sapiens
accaggagaaaaacatcaaaaaagcccatttgagagacattctacaatataatctgataagtactcagcaaaatcatcaagataattgttttagtcagcctgggtgccataacaaaataacataaactaagtgtcttaaacaacaggagtttattttctcacagttctggatgctggcacagatcaggatagcagcatcattgggttctggtgaggaccctctttctgacttgcagacagctgcctttctgctatgtcctttcatggtggacagagagagagaaaaaactctttggtgtctgcttataagggcaccaatcccatcatgaggcctccgcactcaagacctcatctatctctaatgacgtctaaggctctaactccaaatgccatcatattgggagttagggctttgaaatacgaatttagaagaaatcatagttcattgygtaatagttattaataaggagaaaattttgataatctgccacaaccaacaggaacctaaggaaccatggtgactaaaatgcatatagtattctagatgggatcatggaatgaaaaaagaatgttaattaaaaagtaagga

SEQ ID NO: 435636 - DNA, 580 bp, Homo sapiens
gtgcctttcagagcaatataaagcaaagcacttttaaggtagctgggagtcaagaaaagacaatgaactatgaagaagacaatgactctttgattccacttctggagaaacagataaaggtaaataaaaataatttacttaaaaaaactctcaaatcactgattgaagaaccacactagaaaatgttaatacaaaatggccaatacccagacatatgcttctaaatgacttaatttcaagatattatttttatctgtttcacattatcagtggattaaaggtgagctagctgtgtatccgtaggcaaatgcttgaataaactatgtattttcatagattgtctcaggaaccatatccttgaaaccaataatagtgactggattttctttctctagggaagagaaaaatgtcatcaagggcagctggagtcttgatattcattttaaatgctttgttctcattagatgttgtagtcttgcatgtcataaatattttcaaaattagttaattcatttaaaaactaattratggtttatgcattataaaggtaatagataaatatttttaaaagtacacaaaa

SEQ ID NO: 435637 - DNA, 600 bp, Homo sapiens
tttttgaaagcctgcagacttagccacagaaaggcaactcctctctgttgtctataccctaaaatcaaggaaaaaggtatccactgaagaatcaaatagattcatagaaaaagattcctactattggtcagaggaggtttgctgtgtaggaaatatctgagtgtatttttaggtaatctacagggagtagaacctgtgactgtttttgtgtgtgtgtcctgaaatttctgtatcaaaattattctaagaatcttaagtctttagcaaggtcttggccaagtttggcattttgaagacaggagcatttttttttctataataaatatctacttactcataayagagcacaggtaggatccctggcatattgtactatctagtggacacagcccctctattttatcttcaacgtaaattagaaaccaatacccataatttctatttcgcacataaaagagctaatgcacagatttaaacgggtttttttttttatattaagcaaattaatcaaagagtcagaatcaatacctacatggtgtgaatcctagtttatgttcttgttatactgttctggtacttatttgaattatttaaaaatta

SEQ ID NO: 435638 - DNA, 592 bp, Homo sapiens
atataaatgctaaatgtaattgttgagttttaggctacatgatgtagttaaaatgagtatacctgttttccaggtaagcactaagctttcctacccttttttttttctttctttttttgagacagaatctccctctgtcatccaggctggagtgcagtggcatggttacagctcactgtacctttgacctctcasgctcaagagatcttcccaccctagcctcccaagtggctgtgtctacaggtatacaataccaagcctggcactttcctactcttatgtgtaaacatctaccaccatcactgtctacacatacagaaccttgaaatggatatgtatttcttactatgtttagcattgtataaacactttgctagtgttttctcatgaatcctcactacatactttgaagtagtaggcattattcctaatataaagatgaagaagctgaggctcagagaaactaagtacttttccaaggtaggcaatagatctgggaatcaaacccaggtatgtttaaggccaaagactatagtactcataatgtcatactttccccctgcttaaattccattgttcccatgaagtcctt

SEQ ID NO: 435639 - DNA, 500 bp, Homo sapiens
caaaaacatttttggaaatccttttagaattattctcagggactggagtacatttatttttaaaaagaaacttggtgktttaaaatctttttttttttttagggagaatctgctttattatttgagaagtttcaaaaaatatagaaaatacagatgataatatggcaagtatctaaaggtctccacttaacagaattaacatctgttaacattttgtcacttttgctttagttgttttttttttaattaaaaaagagaacattacagataaatgtgaagtccctgttattctgttgcccatttctgttctccctgctgctccctgagagtactaacacaaaggtgtacttctggggtgtgtgtgtatatgcatatccataaacaatatatggtatagcttctggagggatccaaagtcattagcactcaagcaagcctattaaataaaataatatcagcttgagttaaagataacatatagccgtgaaataacggagctg

SEQ ID NO: 435640 - DNA, 500 bp, Homo sapiens
caaaaacatttttggaaatccttttagaattattctcagggactggagtacatttatttttaaaaagaaacttggtgttttaaaatctttttttttttttagggagaatctgctttattatttgagaagtttcaaaaaatatagaaaatacagatgataatatggcaagtatctaaaggtctccacttaacagaattaacatctgttaacattttgtcacttttgctttagttgttttttttttaattaaaaaagagaacattacagataaatgtgaagtccctgttattctgttgcccatttctgtwctccctgctgctccctgagagtactaacacaaaggtgtacttctggggtgtgtgtgtatatgcatatccataaacaatatatggtatagcttctggagggatccaaagtcattagcactcaagcaagcctattaaataaaataatatcagcttgagttaaagataacatatagccgtgaaataacggagctg

SEQ ID NO: 435641 - DNA, 500 bp, Homo sapiens
caaaaacatttttggaaatccttttagaattattctcagggactggagtacatttatttttaaaaagaaacttggtgttttaaaatctttttttttttttagggagaatctgctttattatttgagaagtttcaaaaaatatagaaaatacagatgataatatggcaagtatctaaaggtctccacttaacagaattaacatctgttaacattttgtcacttttgctttagttgttttttttttaattaaaaaagagaacattacagataaatgtgaagtccctgttattctgttgcccatttctgttctccctgctgctccctgagagtactaacacaaaggtgtacttctggggtgtgtgtgtatatgcatatccataaacaatatatggtatagcttctggagggatccaaagtcattagcactcaagcaagcctattaartaaaataatatcagcttgagttaaagataacatatagccgtgaaataacggagctg

SEQ ID NO: 435642 - DNA, 666 bp, Homo sapiens
gggggacaccacttccttcaccagaacattcacatccttcccaaggtgccacgcccagttcttttgtccaacaataaactctgcgaagtggagtgaagtcaccacccaagccttagcctacctctgaccacagcctgtgactccacaaagataaatgaaaagaggaaagtcagtgatgttttmtatactgtcagcagcaatctcacagcctcaatacattttctttcaaaagtttaatatgtaataactggcatttcttcttcattcctagttggttagactgcatcacatctgccatgccaaactattaagagtaatacaattcttactcttagtttattaagagtaaaaactattactcttaatagtttagcatgctattactcttttcttattttttaatttttttaattttttattttttgagacggagtctcgccctgttgcccaggctggagtggtgcagtggcacaatcttggctcactgcaacctctgcctcccaggttcaagcgattctcctgcctcagcctgccaagtaactgggattacaggtgcccaccaccatgcctggctaatttttttttttttttgtatttttagtgggcaaggggtttcaccatgttggtcaggttggtctcgaactcctgacctcaagcgacgccccc

SEQ ID NO: 435643 - DNA, 666 bp, Homo sapiens
gggggacaccacttccttcaccagaacattcacatccttcccaaggtgccacgcccagttcttttgtccaacaataaactctgcgaagtggagtgaagtcaccacccaagccttagcctacctctgaccacagcctgtgactccacaaagataaatgaaaagaggaaagtcagtgatgttttctatactgtcagcagcaatctcacagcctcaatacattttctttcaaaagtttaatatgtaataactggcatttcttcttcattcctagttggttagactgcatcacatctgccatgccaaactattaagagtaatacaattcttactcttagtttattaagagtaaaaactattactcttaatagtttagcatgctattactcttttcttattttttaatttttttaattttttattttttgagacggagtctcgccctgttgcccaggctggagtggtgcagtggcacaatcttggctcactgcaacctctgcctcccaggttcaagcgattctcctgcctcagcctsccaagtaactgggattacaggtgcccaccaccatgcctggctaatttttttttttttttgtatttttagtgggcaaggggtttcaccatgttggtcaggttggtctcgaactcctgacctcaagcgacgccccc

SEQ ID NO: 435644 - DNA, 575 bp, Homo sapiens
atttgtgtgttctcagtgtggaatgaatgaatgaatgaatgaatgaatgaaccaaccattccttcacagtcttgcactatcagtgaatcttatgctttattgaacataaaaatcacctggaattgctgacttaaaatacagttttccaggctataccacamgagatgctaatacaggactggggtaggtccaggaattcgaatttttatctaagtagctgatgacttaatgcaaatgatccagcagccacactttgcaagctctacgctatgattagttgtggtttgtagtcccaattgtatatcataattatctgctgatctgaaaaaaacatagagcttctctacccactccttaccaccagtccatcaccaccattctgactccttagtcacaatgggtattgacattttaaataaatcccaaggctcccttccgggagaataaagaggataatatttataaactattttgagttccttagaagaagggtatcttagctcattaaggaaatattatcatgatataaatctaacatcatgaaacttatcttggacatgtcaaatttggtctaa

SEQ ID NO: 435645 - DNA, 575 bp, Homo sapiens
atttgtgtgttctcagtgtggaatgaatgaatgaatgaatgaatgaatgaaccaaccattccttcacagtcttgcactatcagtgaatcttatgctttattgaacataaaaatcacctggaattgctgacttaaaatacagttttccaggctataccacaagagatgctaatacaggactggggtaggtccaggaattcgaatttttatctaagtagctgatgacttaatgcaaatgatccagcagccacactttgcaagctctacgctatgattagttgtggtttgtagtcccaattgtatatcataattatctgctgatctgaaaaaaacatagagcttctctacccactccttaccaccagtccatcaccaccattctgactccttagtcacaatgggtattgacattttaaataaatcccaaggctcccttccgggagaataaagargataatatttataaactattttgagttccttagaagaagggtatcttagctcattaaggaaatattatcatgatataaatctaacatcatgaaacttatcttggacatgtcaaatttggtctaa

SEQ ID NO: 435646 - DNA, 607 bp, Homo sapiens
tggagacaaaatctgaggttattctttcattcctagttgtcacactaattttttgccttcacttttgtctctgtagaatatttacacgtacacctatctatatctatttagatataatttatatactacaaaattcacccatgtgtacagttcagtgatttttaatgtattcacagtcatcactacaatcaatttcagaacattttcattactccaaacagaaaccccaaactcattagcagccactctccatttctctacaatatccccaaccttaggtgaccacaaatctactttctgtctgtatagattttgcaattctgggcatttcatataaagaatcatagaacatgtggtcttttggtttagcttatttcacttaggataatgtttccaaggttcatttatgttgtggtgtatataggtactcttttcctttttattgctgagtaattttccattgtgtggatatacaactttttgttaagtcattcatcagttgatggacgtttggattttttccattttttggcctttatgaataaggctgctrcgaacattcatgtgtaagtttttgtggggaagtgtggttgtctttttttttttt

SEQ ID NO: 435647 - DNA, 657 bp, Homo sapiens
agtgcctggcacatagtaggtactcaataaatgtatattgaataaataccaatgtggtctcacagctccttaagcagtgaagccaggactgaaactcagttttatcagactcagatgcccatacactttaagcatttcacactgtttatgaaggccctaccttccaggtggaattaatgtgttccataaacctctgtatatacctttattacgtatattactttaactgtattgtgattatagttacctgtctctctctcctaatacatttgcttttcggtagggtgggaaccacaccttacccatatctctcatgcctagtatgatccatagtgggasaggaatactttttgtttttattgatgacttcagaaagaaacagtcttttctgctgatcttactttttgccaacactccctaaaggaagtgattctcgttcctttccttatccagcaacaaaaacccagagagatctgcgaaattgggctcattatgctgcttactctgcgaggtataaaacagttgccatcatgagaccaaagttctccactttaattttgattttatgaaatagcaaaactgttgcaagggatttctctagagccttgtaatttaggactggagcagacagaagagaatgagttaaacttggaagag

SEQ ID NO: 435648 - DNA, 657 bp, Homo sapiens
agtgcctggcacatagtaggtactcaataaatgtatattgaataaataccaatgtggtctcacagctccttaagcagtgaagccaggactgaaactcagttttatcagactcagatgcccatacactttaagcatttcacactgtttatgaaggccctaccttccaggtggaattaatgtgttccataaacctctgtatatacctttattacgtatattactttaactgtattgtgattatagttacctgtctctctctcctaatacatttgcttttcggtagggtgggaaccacaccttacccatatctctcatgcctagtatgatccatagtgggagaggaatactttttgtttttattgatgacttcagaaagaaacagtcttttctgctgatcttactttttgccaacactccctaaaggaaktgattctcgttcctttccttatccagcaacaaaaacccagagagatctgcgaaattgggctcattatgctgcttactctgcgaggtataaaacagttgccatcatgagaccaaagttctccactttaattttgattttatgaaatagcaaaactgttgcaagggatttctctagagccttgtaatttaggactggagcagacagaagagaatgagttaaacttggaagag

SEQ ID NO: 435649 - DNA, 505 bp, Homo sapiens
taggctcctatttgcaggttagacagagaaggtgaccgagcatgtagcataaaacagtaatagctaagagttattgagcacttcctgagtgccaaaccttgctatggtttacacgtattaactcatttaagctttacaatgtccctgtgagctacaagctaatgctttcccccttgtaaagatgaaggaactgggattgagaaacttgctccagcttaartagtaagccaaagagccaggatttaaactcaggtagcacagttcttaattgctctgctctgccacctctttgggcagagcccttgaagaaatgtaaagagcccttgaaggttcctgagctctagcctgctttctccagtacactaaatattgcagtgaagcctgggatcacatcgccactgtttgcttagctcttctagcctactgttaacatgcaaccctgttacccaggagagtaatgtgttaaacctacttcaatatttttatggcagttagttgatgagat

SEQ ID NO: 435650 - DNA, 554 bp, Homo sapiens
ttaatccttcttaaaaacctacattctagggctgggtgcggtggcttgcacctgtaatcccagcactttgggaggccaaggcgggcagatcacgaggtcaggagatcgagaccatcctggctaacgtggtgaaaccctgtctctactaaaaatacacacacacacacacacacacacagaattagccgagtatggtggtatgtgcttgtgggcgtggtggtgtgtgctttgtcttcccagctactcgggaggctgaggcaggagaatcccttgaacccaggaggcagaaaytgcagtgagccgagactgagccactgtactccagcctgggtgacagagggagactctgtctcaaaaaacaaaacaaaacacaacaaaccaaccaagcaaccaacccctacattctggctttctgatactgcctaagtaggaaaacaaagtgataattatctagtaatttttactgtgtgaagacaaacaatctgactcattcagactaaactcccctttccatcttagtggttggttttacatggtcttgaattatttagatg

SEQ ID NO: 435651 - DNA, 554 bp, Homo sapiens
ttaatccttcttaaaaacctacattctagggctgggtgcggtggcttgcacctgtaatcccagcactttgggaggccaaggcgggcagatcacgaggtcaggagatcgagaccatcctggctaacgtggtgaaaccctgtctctactaaaaatacacacacacacacacacacacacagaattagccgagtatggtggtatgtgcttgtgggcgtggtggtgtgtgctttgtcttcccagctactcgggaggctgaggcaggagaatcccttgaacccaggaggcagaaactgcagtgagccgagactgagccactgtactccagcctgggtgacagagggagactctgtctcaaaaaacaaaacaaaacacaacaaaccaaccaagcaaccaacccctacattctggctttctgatrctgcctaagtaggaaaacaaagtgataattatctagtaatttttactgtgtgaagacaaacaatctgactcattcagactaaactcccctttccatcttagtggttggttttacatggtcttgaattatttagatg

SEQ ID NO: 435652 - DNA, 557 bp, Homo sapiens
aataagtatcaaaaactacttaatcctctctcttaatttatttgccttgattatacagaagtacccattgctataaatttatcttaggagtaaatatatctggttagtgagccaagtaaaacaagtaaaacaaaaaaaaatcagttaatagaaaaattttggaaacctcgtctctgtagctttggaagctacctataaactgaagggtttcaggtcagattctgttttttttttttttttggtcaaatttgttttataggtgtacttttctgcaggacaagtttagatggattgggaattagagaaaaggtaaagaatctaatcactcacaaaatccctttatactaaatgyatgccaattattcacatttctttaaaatttggaagtttcttgttttgtgtgtgtctatacagccttgaatttcactagagggagtgcgaccagaggcccagaatccacactgactgacataaagacagaaagtgtcagggcattgtctatgtcttaggctctaggtagaagggatttccatagtttattcaacaaacatttaggt

SEQ ID NO: 435653 - DNA, 646 bp, Homo sapiens
attttttacatatgataaagcatctggtatcatatatataaatcaaatagattttttttaaacttagaaaaataaaatcaacatgatagcaatgctgatgaccaaaatcaaagctacaaaactgtgagaaggatgttcatatgattaacctaatgttagtataatgtggtggataacgacttgaatttaatcttgaaacttatgcatttggtagttcactccaggatatgacagtatttatatataaatatcttctccagtgtaaaattaagcctgagtgacttgttttattatatacattcctgagtcagaaaatatttttttgtccccacacctagctatcaatttattttgctgagagcttataaatgcttacttccttgcctggaggatggtccatacagctaaatgtcagaagagagaagaaaatgtaaaactcaccagtggcgtcagctttagttttgagctggttctcacacattttgacgtagcaattaaaagtctaactgaaaaatatgayacttttcactggggaggtctgaagactgcccctgcgttaacccacaacttcaatcccaacaggctgcattaatgagattaaatgaaagaggagttaaaggcatcaacggctccatttcattaagta

SEQ ID NO: 435654 - DNA, 646 bp, Homo sapiens
attttttacatatgataaagcatctggtatcatatatataaatcaaatagattttttttaaacttagaaaaataaaatcaacatgatagcaatgctgatgaccaaaatcaaagctacaaaactgtgagaaggatgttcatatgattaacctaatgttagtataatgtggtggataacgacttgaatttaatcttgaaacttatgcatttggtagttcactccaggatatgacagtatttatatataaatatcttctccagtgtaaaattaagcctgagtgacttgttttattatatacattcctgagtcagaaaatatttttttgtccccacacctagctatcaatttattttgctgagagcttataaatgcttacttccttgcctggaggatggtccatacagctaaatgtcagaagagagaagaaaatgtaaaactcaccagtggcgtcagctttagttttgagctggttctcacacattttgacgtagcaattaaaagtctaactgaaaaatatgatacttttcactggggaggtctgaagactgcccctgcgttaacccacaacttcaawcccaacaggctgcattaatgagattaaatgaaagaggagttaaaggcatcaacggctccatttcattaagta

SEQ ID NO: 435655 - DNA, 548 bp, Homo sapiens
gcagcaccttgaggtaaatattataggaatttgggcccagaaagtttaataacttgcccagagtkgcacagctgcttaagggggagccaggatgcagacttaagctgttcttaagacatccctgttcttttcttttcactgttcttttatttcttttaagagtttcatatgtagagggtataaccatcttatggtttgtttaaacaacttgggcctttttcttgtcctgtctgactttcccagctctctggttctgggattctatgctgaaagccaggcttggaggttggagaatgtagagataagcagacagtcctggggcatcatgagcaatgtccggtaagactgcaaagtactttgattgaaacttgtgtcacatgctcaaggatgtgacacaaatttttaaactacatataagtgcattttttaaatgacatataggtgcttctgtcctttcagatttatgctgctcacagttgaattatatttaattcaattcaaacccaatattttaggaaacaatataaacaaagttaaaatgaccaagt

SEQ ID NO: 435656 - DNA, 597 bp, Homo sapiens
atgccctgtcaggtagcattctctctctctgtttttattttaaagacagggtctggctccatcacccaagctggagtatagttacgtgatcacagctcactgcagccttgacctcctgggctcaagcgatccttccacctcagcctcccgagtagctggractatagcatgtgccaccatgcttggctaattttgtttatttttgtagagatgggggtctcactatgttacccaggctggtctcaaactcctgtcctcaagtgatgctcctgtcttggcctcctaaagtgctaggattacaggcatgagccggctactccacttggccttcaaatagtattttttatacttcttgtatacttttttttttccagcacaaaatcattaggaaaaatgcaaccgttatctcctatttttagtcaggactcctaataagtattattctcagaattaatccaaccaagtattcactaaatatttattatgcatctactatatgtagtaactctgtaggtaccagctacaaaaagaataacagtaatgaacctcatcatcctttttaataaaaggctaaaaattaaatctatttatttgatg

SEQ ID NO: 435657 - DNA, 538 bp, Homo sapiens
tgatccatgaccacaaaagggtggagtgttcattcagtaggttgattttattcaacagatattaagtgccttctctgaactgcgttagtgatgaggatgtagtggtgcacatggcatgtttttgccctcagaaagctttgtctcatgtttctttttgtttgtttgttttgttccacgtttggatttctagctaatgctaaagaaatttaacttctggccaaatgtcaaattcagaaatgtgtttcatatcctatctgccagtgggcagtaggattggactgggtaagagaattaggacaaataagaagccatggctggggctggttttaggatctactgaggaaaagcagaccgcataatccttgtctgagcacaaagaccatatcacagacaggatctgaatttgactttggcaaccagagaagcagccacattccagagagacctctcctgaaggcatccagtacrtaggattttctttgctcaaggccatatggtcctggagtgactcctgccctatgctatcttaaagcttctt

SEQ ID NO: 435658 - DNA, 435 bp, Homo sapiens
gcaccgaaatgtgaagacttaacacagtgaatarttatttcttgcctactgaaaagtccagggcagtggcaagtcactgggttctctgcttcacacagtctttctgggatacaggctgacagggttctgtcatcttcaacagatggatctcaaagtagccctggggtttctcagcccagtcatctgaagaggaaaagaacatggaggaacacacacgggaaattttcggggccagccctagaagtggtacacatcctttcgttcacataccactggctagaactcaatcagaaggccatgtccacccacaaaaaatgcagtctagcagtatgtccaagaaaaagagaaaagtaattttaatgaacagttagaaatctttgtcaaattaaggattatctatcttggtctaattcttcatttaattgtgtgtggctc

SEQ ID NO: 435659 - DNA, 435 bp, Homo sapiens
gcaccgaaatgtgaagacttaacacagtgaatagttatttcttgcctactgaaaagtccagggcagtggcaagtcactgggttctctgcttcacacagtctttctgggatacaggctgacagggttctgtcatcttcaacagatggatctcaaagtagccctggggtttctcagcccagtcatctgaagaggaaaagaacatggaggaacacacacgggaaattttcgggkccagccctagaagtggtacacatcctttcgttcacataccactggctagaactcaatcagaaggccatgtccacccacaaaaaatgcagtctagcagtatgtccaagaaaaagagaaaagtaattttaatgaacagttagaaatctttgtcaaattaaggattatctatcttggtctaattcttcatttaattgtgtgtggctc

SEQ ID NO: 435660 - DNA, 574 bp, Homo sapiens
atcctgaaactttactgaatttatcagttttaatgggtttttgtggagtctttagttttttttccaaaatatagatcatataatcttcaatcaaggataatttgactttcgcttttccagtgtggatgtcctttatttctttctcttgttctaattgctctgcctgcacactgtactgtgttcaataacagtggtgaaaktgggcatccttgtcttgttccaaatcttagaggaaagactttcagtttttcccattcagtatgataccagatgtgggcttgtcatatatagcttttatcaagttgaggtatgttccttctatacccagttttttaagggtttttatcatgaagtgaagttgaattttactgaatgcctttttggcatcttttgtaatgatcatatggtttttgtgttgttcattcctttgatatgatgtattacaattcttgatttgcatatgttgaaccatccttgcatccctggcatgaattctacttgatcatgatgaatgatcttctcaatatgttgttgaatttgttttgatagtatattgttgaggatttctgcatct

SEQ ID NO: 435661 - DNA, 615 bp, Homo sapiens
cccagttttttaagggtttttatcatgaagtgaagttgaattttactgaatgcctttttggcatcttttgtaatgatcatatggtttttgtgttgttcattcckttgatatgatgtattacaattcttgatttgcatatgttgaaccatccttgcatccctggcatgaattctacttgatcatgatgaatgatcttctcaatatgttgttgaatttgttttgatagtatattgttgaggatttctgcatctatgttcaccagagatactggtctgtagctagtggtgaagccagctaggactgagttcctccccagggcagggaattatccttcaggctaaaatgcttccccagtgagcacctgcagaactcttccctgtgctgtattcttctgtgatagggaaacactaagtttcaatgtaaagttccacactcacttcactctccttcccccaagcacatggattttctctctgtgctgccctgtctggggttgggagatgggtggagcaggaaattcaaggttgttcttcctatcctcttcaatgactctttccgtgatactatattcaaattaggtactgtgattgctcaccttattttttgggacctatg

SEQ ID NO: 435662 - DNA, 615 bp, Homo sapiens
cccagttttttaagggtttttatcatgaagtgaagttgaattttactgaatgcctttttggcatcttttgtaatgatcatatggtttttgtgttgttcattcctttgatatgatgtattacaattcttgatttgcatatgttgaaccatccttgcatccctggcatgaattctacttgatcatgatgaatgatcttctcaatatgttgttgaatttgttttgatagtatattgttgaggatttctgcatctatgttcaccagagatactggtctgtagctagtggtgaagccagctaggactgagttcctccccagggcagggaattatccttcaggctaaaatgcttccccagtgagcacctgcagaactcttccctgtgctgtattcttctgtgatagggaaacactaagtttcaatgtaaagttccacactcacttcactctccttcccccaagcacatggattttctctctgtgctgccctgkctggggttgggagatgggtggagcaggaaattcaaggttgttcttcctatcctcttcaatgactctttccgtgatactatattcaaattaggtactgtgattgctcaccttattttttgggacctatg

SEQ ID NO: 435663 - DNA, 486 bp, Homo sapiens
atggactcagtcttttctcaatgaatatttctaactcaggccaggtccctgaggacacaagaatttcctgaaaaaaaaaaaaaaattaaccattacttactagaaaaaggaaaactctgtaggtaagaacccatggggtaatgttttcaaagctaaatcttatcttttctacccattccctgttcccagggatgagagtgggggttggggtggggaggaaagaaaaccattaggcagtccttttttctttttcttcttttaattttgttcagcattaaaggaggraacttcataaacattgattgtcatttacagaaaacattcagaaatcatgtgtgcattatccgggaatgctaacagtattgaactaataatttacaggacataaaataaggacaaaaacctattacattctaaagtaatataaaactcttttttaattgttagggagtgctgttttattctagtatatttatgattaaaaaa

SEQ ID NO: 435664 - DNA, 313 bp, Homo sapiens
tgactactgtaagctatggtatttgtgtaactaaacacaaaaaaagtacagtaaaaatacagtatagaagataaaaaatggtacacctgtataggatgcttacaatgaatggagcttgcaggactggaagcttgctctgggtgtcagagtgagtgagtgctgaaagaatgtgaaggcccaggacattactctacacgagcggagactttatgtgtacacttaggctacactaaatttctataatttttttctttttwaaataaccaattaaccttagctttaccgtaacttttttacttgataaactgtaaaa

SEQ ID NO: 435665 - DNA, 631 bp, Homo sapiens
gtggagtaggcaggggaggtgaatctccctctcgtctgaacctcagagattctagatcagccatgtccaataaaaatataatgtggactacagatgtaacctaaaactttgtagcagccacattacacacagttaaaagaaagaacaggtgcaattaattttataatctattttatataactcaaagtacctaaaatattattatttcaacatataatcataaaaagaattaatgagatatttcccattctgttgtaaatcctaactmtttgaaataagtatatataagtctaaagccttaagaaggagaatgttgtaccatagatgcccaaagtagtgctggccacggtatagtaggtcagaagtcaggaaatgaaaggaacgcctccctttctcgtcttcctgagccttattggaatgggatgggtgtgtgatggggaaagctggactttttacacttgatcatccggagttagatcaatctactctctctatgtcgtagcctgtatggattatgtctttttgagaagtctggcttcttagcggtctgtgggggatccggggaaatgcctagtgtttactctaggactcagctgtgtgagagaggatctgtctcctctgtggcccacgt

SEQ ID NO: 435666 - DNA, 581 bp, Homo sapiens
accttgaattctttaagaacttggcatttcagtgcattttagagctagtagaggtcttagttattatggagtccatccctcttattttatagatgaggaaactagggctctgaggggtcaaatgtttaatatcacacagatacttggtcacagagctggyaccagaatgtccacctccatgtctgaagtttttcctcttctactgggcagtcttcagtatgagtcattttcccctctgctgtcctcacctccttttaaaaactcctgatacaggtgacccttctacaacataggtttgaactgtgtaggtcaagttatatgaagattttccttctgtttctgccaccctgggactgcgagaccaaaccctcctcttcctccttctcctcagcctactcagcatgaagacgaccatgatgaagacctttatgatgatccacttccacttaatgaacaggaaatctgtttcctcttgcttataattttcttagtaccattttcttttctctagcttactttattgtaagaatacagtatacaatacatttaacatgcaaagtatgtgtcaatcgactgtttat

SEQ ID NO: 435667 - DNA, 511 bp, Homo sapiens
ggtccccattctggagctttcatttaggtacatttctactgtgtctcatccaactggacatttattttctatgtactttattcttaaagtcaaaatagaacttggctgtaactcaggccactatttgtcttcctttatttgctaaggaatgattctgcgtatctgaatctggaataacccctaacctatgctctactcttgctttcgggccaaaattggtcattttaataaacttgaggctacttcccttttcactgtccaaaaatatcaaaaacttggtaaagaaaatrtagctctgttaaagtttctcctgaacactttggcttaggcaggtgtcatcagtgttaaaaatagtaaaacaagttttttaaaaaggtaagagaactgagactgccctacctggagatatcagaacagcagatgagaacaaagcgatctcctcctcggtcagctgcaaggaacacaaattctttgcaaagtcaaatgcttcattcactaggtcatcagaacc

SEQ ID NO: 435668 - DNA, 566 bp, Homo sapiens
gaggcttgaaaatattaagtaccctacctttttgactagagtcaacatttttacaccaggtagagatgttaaagattatatggttcagttgttcccaaatgtcagcccatggattggttatatctgagtcttagttagagatacaatgaactgggttcccctccaggagatttggattccatgggactcatggtgcccatgtctctgaactgtcaataatctcctttgatgttgttgatgcaattctaaatttggaattcattgtttctagtccatctctttattttacaaatgaggaaactgctatctagagagtttagctcaaggtcacatatcaagtgtggcagatttcacttttcaaagagggtcagaaaaaatatcttccatcccatatgttttctaggaccttaccactcccctattaagtagtagaatccatgtctcctatctttgaatctgggtgggscttcatgactgatggtatataatggaaataacaatatgtgttttctgaagctaagttagaaaaatctatgcatttctgccttgttctcttggggtgctag

SEQ ID NO: 435669 - DNA, 577 bp, Homo sapiens
atttctaaggtgaggtagaaaatcttcagcaaggaggaaacctatatagtcttagaagccaatgaagaagaggagagaggtcagaattcagaaaaatgatacaaagagaaacagtattactggagactgtagctcctagcacccatatatggacattatagcttatgttccacagagatggtcatcagtttaaacctcattctcaatcttgtatattctgaaacctgccactggagtctctgcatgtagatctgactggtgcttggaatgtcctccacatatacttgttgaatgaaatacttcctgtgggatttcatgtttgatttctgttgaaattcagtaggaacatgttatgtatagatatagaattttgttcacacgtacrtatttcgttaaatttgttgcataatgtgaaatgaactttcaattctattgaaattccttggctgaatagagggctttgtttgaggaggttggtgtacactctcggttatttgctaatccaggttcttcggtgaatctgttttggttcatgtgatttgaatgccttttctggtgttagcttaggagtaaattc

SEQ ID NO: 435670 - DNA, 557 bp, Homo sapiens
atatctttgtccctcgcctctaattcaacctggattgagttttaaatctttccttaaagaacagccattaaagatgataaaataatctggctcccagagctatccaagcccacaagttctaagaggaaacaacagagacatctgcagcatctaatcttgactttggagctaattaaggawcctgtgggatgcactaagtccaggatgttattttgcctaaaggaatggacagtcctaaggatgaatgattttgagtccccaggccagtattaatctggttgtcttcaggtaaacacttctggtgttcaaaaacgctttctctcttctcattcaagcagctccttgaagctggaaaccccaaaccaagtatcttctgggtaattccattgctttccaggatgatataaccaaggttgtaacacacgattggcctcattcaactgatatttagaaggtttgtttgtttgtttgtttgtttgtttgtttttaacagagttttgctctcatttgcccaggctggagtacaatggcgctatttcagctcactgcaacctcca

SEQ ID NO: 435671 - DNA, 557 bp, Homo sapiens
atatctttgtccctcgcctctaattcaacctggattgagttttaaatctttccttaaagaacagccattaaagatgataaaataatctggctcccagagctatccaagcccacaagttctaagaggaaacaacagagacatctgcagcatctaatcttgactttggagctaattaaggatcctgtgggaygcactaagtccaggatgttattttgcctaaaggaatggacagtcctaaggatgaatgattttgagtccccaggccagtattaatctggttgtcttcaggtaaacacttctggtgttcaaaaacgctttctctcttctcattcaagcagctccttgaagctggaaaccccaaaccaagtatcttctgggtaattccattgctttccaggatgatataaccaaggttgtaacacacgattggcctcattcaactgatatttagaaggtttgtttgtttgtttgtttgtttgtttgtttttaacagagttttgctctcatttgcccaggctggagtacaatggcgctatttcagctcactgcaacctcca

SEQ ID NO: 435672 - DNA, 557 bp, Homo sapiens
atatctttgtccctcgcctctaattcaacctggattgagttttaaatctttccttaaagaacagccattaaagatgataaaataatctggctcccagagctatccaagcccacaagttctaagaggaaacaacagagacatctgcagcatctaatcttgactttggagctaattaaggatcctgtgggatgcactaagtccaggatgttattttgcctaaaggaatggacagtcctaaggatgaatgattttgagtccccaggccagtattaatctggttgtcttcaggtaaacacttctggtgttcaaaaaygctttctctcttctcattcaagcagctccttgaagctggaaaccccaaaccaagtatcttctgggtaattccattgctttccaggatgatataaccaaggttgtaacacacgattggcctcattcaactgatatttagaaggtttgtttgtttgtttgtttgtttgtttgtttttaacagagttttgctctcatttgcccaggctggagtacaatggcgctatttcagctcactgcaacctcca

SEQ ID NO: 435673 - DNA, 336 bp, Homo sapiens
aatgacttatcgccctgaaaatgttggcagaacattcagcatagatcatacattacaggcacatgatgcaaatgcttcttggctcgtgattacagaccagcaatttcctaggccctatcgcagttccaaataactcattgtatttgctttctgaactaagttttttggactgattaaacgaagcctcccaaaagcatgcctggcactgggcatatatgactttgctgtttctcacaggayggatgtgaccctctgttgttgcccagggtttcacagaatatttgcgcaaacacacatgatcttcatttcctggactcttctcagcttaagcatgca

SEQ ID NO: 435674 - DNA, 336 bp, Homo sapiens
aatgacttatcgccctgaaaatgttggcagaacattcagcatagatcatacattacaggcacatgatgcaaatgcttcttggctcgtgattacagaccagcaatttcctaggccctatcgcagttccaaataactcattgtatttgctttctgaactaagttttttggactgattaaacgaagcctcccaaaagcatgcctggcactgggcatatatgactttgctgtttctcacaggatggatgtgaccctctgttgttgcccagggtttcacagaatatttgcgcaarcacacatgatcttcatttcctggactcttctcagcttaagcatgca

SEQ ID NO: 435675 - DNA, 611 bp, Homo sapiens
tatcatactgcaccatctcctaccattcttgataaattatagccaccagcttataaataaacaagtattattttagctttttacaacaatatgctaaagtagggggtggagataaacaaaactctcctgaaatccctttattttagcttagttgttcaaggaccataatcacaattcccctggccatgtgagggaatattggttttgatttgttttatttgctcttttctggagacttagaaattctgttctactgtttatatgtgtatcctggaatggagtatttgtttcatcttattttgacctcattgtagcagcataaaccccatytgtgcaggttaaatgacttcgaaagctcagatccccagtagattccaaaaggatcctaacagagaactataacttcctccatgaacaggaactgggatctcaccccctatttaatcacctatccaagttctgggaatgctgtgtgcttaaaacagtttttaatggattgatcacaagcaaaattcaaccctatcaacagtcaatctccttcactcacagagatgcatttggtgcagtttctggccttttggccgtcattgcatatctacactgtggggcct

SEQ ID NO: 435676 - DNA, 611 bp, Homo sapiens
tatcatactgcaccatctcctaccattcttgataaattatagccaccagcttataaataaacaagtattattttagctttttacaacaatatgctaaagtagggggtggagataaacaaaactctcctgaaatccctttattttagcttagttgttcaaggaccataatcacaattcccctggccatgtgagggaatattggttttgatttgttttatttgctcttttctggagacttagaaattctgttctactgtttatatgtgtatcctggaatggagtatttgtttcatcttattttgacctcattgtagcagcataaaccccatttgtgcaggttaaatgacttcraaagctcagatccccagtagattccaaaaggatcctaacagagaactataacttcctccatgaacaggaactgggatctcaccccctatttaatcacctatccaagttctgggaatgctgtgtgcttaaaacagtttttaatggattgatcacaagcaaaattcaaccctatcaacagtcaatctccttcactcacagagatgcatttggtgcagtttctggccttttggccgtcattgcatatctacactgtggggcct

SEQ ID NO: 435677 - DNA, 593 bp, Homo sapiens
gaaaactggaactgtaactggcaactcactggaggcttggtgtgaacaagcctgagaaccaaaagctctaggggaaccccatcacacttttgtgaattttacctgcaggagcttgaccagatcctcacagtgaatgtaagagaaaaatctcttggtgctttgcttctggcatggggagaggccaaggaaccatttttgaaacacaccagatcactctgttcttttaaacaaagtctacccttaggaaaagctagttaaccacggtctaatgtgctagagttttatcagagygccactgacccaggagaagggaaaaagttcaactctacccagctgtgtggacttccccatgggagagggaaatacccatttccagcccactgtggcattctggtgggagaaggaaaaaactcaactctagcccactccagccatcctgtctcacctaaggaaggagaaataaaatgagaaacacttggaaatttcacagttcagaggcacaaactcactgtaagactgagacctaattataaggccacagaatgcttctccttcccccacaccttaccactacattattaaagcctaccacc

SEQ ID NO: 435678 - DNA, 521 bp, Homo sapiens
atgtggagattaaaaaatagacttctataaaacatataggtccaagagaaatttaaaaaacattttgagccaaatgaaaatgaaaacacagcttatcaaaatgtgtgggatgcagcgaaatcagtgctttgaggggaatttatagcattgaatgcatatgttagagaataagaaagatctaaaatcaattatctcagcttctactgtargaaactaagaaaagaagaggaaattaaatccaaagtaagtagaataaaagaaataataaaaattagaacagaagtcaatgaaattgaaaatagaaactctataaagaaaatcaacaaaaccaaaagctggttctttgaagagataataaaattggtaaggccctagtgagtccaaccaaggaaaaaagagataaaacacaaattactgtatcagaaatgaaaaagggtttattacttcagatctcactaagatcatgaacaaggcaaggatgttccctgtcaccactgcttttcaacattgtactggaaata

SEQ ID NO: 435679 - DNA, 521 bp, Homo sapiens
atgtggagattaaaaaatagacttctataaaacatataggtccaagagaaatttaaaaaacattttgagccaaatgaaaatgaaaacacagcttatcaaaatgtgtgggatgcagcgaaatcagtgctttgaggggaatttatagcattgaatgcatatgttagagaataagaaagatctaaaatcaattatctcagcttctactgtaagaaactaagaaaagaagaggaaattaaatccaaagtaagtagaataaaagaaataataaaaattagaacagaagtcaatgaaattgaaaatagaaactctrtaaagaaaatcaacaaaaccaaaagctggttctttgaagagataataaaattggtaaggccctagtgagtccaaccaaggaaaaaagagataaaacacaaattactgtatcagaaatgaaaaagggtttattacttcagatctcactaagatcatgaacaaggcaaggatgttccctgtcaccactgcttttcaacattgtactggaaata

SEQ ID NO: 435680 - DNA, 547 bp, Homo sapiens
ctgtggaacaatggctctggaatttggtgactatatgttatccgcattgatgtttgcatttgcaaattgtctttcatttatcagaaagacctgggagagttgagatcaaatctaaaacggcttttatgtaaaggcagggagggtgtccatacccacatgtggagcgggcgggcagtgggttcaaaggacaggaaatcgcaaggagcagaaagttttcttacagcaggtgatgcttcagcaaagtcctgaagcaggtgtagggttgagactggaggaggaatggggaaacaggagtttgacacaaagggagttaaggaaacgggaaccaggaggataggggcaagggctaggctgtgagttatgtaaggcagagcagttaacttagaccctgsttatcatgctcagaaatcagaattaagtccaaggaaaggaggagtatgtgaccctatttataatgtcacagagatattagatggcaggaaatgcaatgtatccttcagttcatcatccctcatgccaacgagtaggctagcaggggagtggcatg

SEQ ID NO: 435681 - DNA, 529 bp, Homo sapiens
gtatagacttaaacctaaagaagaaagacataggggataatgaaagctgtcttcaaatattcgaaggccttgcagtgcaactatgtgaaagaggattatgattgatatgtaacagtttgtctctagaatcaccaaaccaagggtaccaatgaggtcccatcaacacctggaatttatttatctgctcttctccacttttataactgcaggatttgacagtttatcaggtttgtccttctttatgtctatgtgtcctcagggcattttctagttactcatgatttatccctcacatatttttctgttctcacctacattgtccatgagccccatggggaaagtaattcaggcttacctgtgctgttggcaaaaacawtattttgtaccaaggaagtggtctctcaatgccccaaagcttcaaaaccattttaatgcaaaaatctatgggtcctctagggttagcctgaagttgctgcctgtattttgctctagctgaggagacagtcatttctcccagtaaagcttcaga

SEQ ID NO: 435682 - DNA, 593 bp, Homo sapiens
tatttttctgttctcacctacattgtccatgagccccatggggaaagtaattcaggcttacctgtgctgttggcaaaaacaatattttgtaccaaggaagtggtctctcaatgccccaaagcttcaaaaccattttaatgcaaaaatctatgggtcctctagggttagcctgaagttgctgcctgtattttgctctagctgaggagacagtcatttctcccagtaaagcttcagaccaggttgccggggcaggactggaratcagtttctttcctctcacacccaaggcagctcaccagagtttattcttttccaaaagccctttccttctgtagaatatacttacagaatgtgacacctaggaaagaaagaccgagactggcactatcctcacacacccaaagtcagaaatgagctgtgatcacacaaaactggaacccaggagtggaagataccaggagatgtttcaacctaaggaaagatgagggtgtaactggggcttttataagatcaaatgtgcaaccttgagagttttgtctccatcactgttcctgttagagtatgtagtccaagagcactaggttggaaaggtg

SEQ ID NO: 435683 - DNA, 554 bp, Homo sapiens
tgatttgcacagaagaaagggtggatcactaaagcaaaattacagcaaggatatagcaagaattaaagagaattttaacaggaagggatcttggaggtcatctagtaaaatagcccttaacctttctgaggttttgaaaccctttgagaatggctggaagcaaatgaatattctcagtaagatgctcctactaattcatgtataatcaattcatacgaggttttagaggtggagggttagagaattcccaaaactcatccattgtcttcttgccaaaccataaatccctgattgggaattctcaatagagcaaaatacccctaagtctgcggacaagaaaactaaaacacagagttccaggactggcccacagccattcatttgtcagcaaacttggcttcygttatctttcccttctgtcctctgtacacctttctctaccttgggtcatggagaaaggaaactacatgatgtatgtatatggataggagaaccagctaagtgctaagatttatacacaaaagttggggtttcagctgattgtgttagaatga

SEQ ID NO: 435684 - DNA, 554 bp, Homo sapiens
tgatttgcacagaagaaagggtggatcactaaagcaaaattacagcaaggatatagcaagaattaaagagaattttaacaggaagggatcttggaggtcatctagtaaaatagcccttaacctttctgaggttttgaaaccctttgagaatggctggaagcaaatgaatattctcagtaagatgctcctactaattcatgtataatcaattcatacgaggttttagaggtggagggttagagaattcccaaaactcatccattgtcttcttgccaaaccataaatccctgattgggaattctcaatagagcaaaatacccctaagtctgcggacaagaaaactaaaacacagagttccaggactggcccacagccattcatttgtcagcaaacttggcttccgttatctttcccttctgtcctctgtacacctttctctaccttgggtcatggagaaaggaaactwcatgatgtatgtatatggataggagaaccagctaagtgctaagatttatacacaaaagttggggtttcagctgattgtgttagaatga

SEQ ID NO: 435685 - DNA, 466 bp, Homo sapiens
caaatgaaacttacatgtttcagagattgcttgggtgaaatcaagatgtttgcatttgcgtgctcttctgtatgcattgatttgaaacacataccctagtccttaaatctgagacttacatcctacaattaatgtcatttacaaattaaaaagatgttcatgaaaaagtgtgtcattttcccctttgaagcttgtcattttggaaagttcaagggaagctatgccgtgtagtgggaaaactgctggaagcctgcaatgctgagttccaacctaatcatgctcactacctgggtgaacctgggcacaccacgtaattttttttccttgaaattagaatcatcagtttgatcattgggttcctaacctgaatatacactagaatttgctaaaatacagatctcrgaacccatctccagcattactaaatcagaatttctaagaagtgtggcccattaatgtgtatttt

SEQ ID NO: 435686 - DNA, 554 bp, Homo sapiens
caacatactactttcaagtgtggagtaccgacctatttataaaaggaaattaagtaaaaccggtaattataactagcgtacaacctttcaacatagtcaatgagaaatgcaatttgcttaaaataatgagatactctggcaggaacaatctgttcatatgctgttcccaagagcctcaggatggaaacgaagccctggctgacatttgatactatctgtcagtttatcaactctgtctcagggtgagttttacgatggtgctaggaggtttgggatggaaaaaggaaaaagaagaatctctgggtagattttttctayccagttacaggaaacctgttagaaaatggattccgatttctattttaaacgcttgaacaagtaaaataatcaacctcagaccttcctttctgtgggtttcatttagcaccttccattccttcatactgtcagccaacccaaaatgttaaagtctctgacacactgctttgctggctactcacgacttcctttgactaaaagtcatctgcatttgtctttcagagttcatatcttat

SEQ ID NO: 435687 - DNA, 580 bp, Homo sapiens
atgaaaaaaaaatcaactctaatgactaagagaacattttgaataaatgaccttttgatatcacatagtaattataattaactttaaaggaccggcatctgatacatagtcctgtaaaaaatccttatagttgattccaagttaatggtaagattggacacatgaacacagtaaagtacagcaactttaacaaaatcacgtttcaagtgccctgatcccttggcctctcctgccactgctcaaggttttgcaatctttttcaagtgctttttctaatgaccctaacacttgactatagataaagcaacacatttgtccagttaaatattttctcttaaatattccccagtgcatcccaaaacaaaatagtatctaggattaattaatattaatattaatacataaatattacttttcaataagatgtaggcatgagccctttaatgaatcgagtctaaggayactacctctttgtgcaaaaggcatatcatttgtcaattcagtgttttctagttaaaaaggaaccctttggtatctgggttaaaaagcatttgaaataatactttctcctatatttata

SEQ ID NO: 435688 - DNA, 536 bp, Homo sapiens
taaggacactacctctttgtgcaaaaggcatatcatttgtcaattcagtgttttctagttaaaaaggaaccctttggtatctgggttaaaaagcatttgaaataatactttctcctatatttatatgaaatggtgtccagagagagttggggtccttcctaaggacatagagcgcttagaaaatatttcatttcaaatcttatgtttcatcaaaatatttcagatgagatgctgtgatggccaaagattgtgttctagaaactcaggtagacatgaataaagtatgaacatatttattacatggggactcagttcctcctcagaaaaggcccttgatagacgtctgtcagtcatccttcttctagaggggctttgttatttttcttttaccacagttcttcagggaattggcagtgagttctgtacaagggccatgatttatgctgggcagccatattaatcagcatggaaacagaagccyggccactgcagaagtctcacatcctgcaacggagcgtggcaaagtgacctgggtt

SEQ ID NO: 435689 - DNA, 562 bp, Homo sapiens
gtatggacattcatacaatggaattctatgcagcctttataaaaaatgaggcatctctgtatttactgatatgaagtgagctacaagatgtaacattaactgtgaaatgtaaagcccagattcagaacagttggcatcttatgcaaatattgatatacatawtcgtagctgtgtgtgtgcacagttattttggaaatttatcctagagccttggtgatcaccattgcctccagggataggaattggaatactaggttcagagaaaagaagaggacctacctttctaccttctgaattttatactacgtgtttttatcatctactaaaataacttaaatattttctaaaagaaagactagcgaacaccgacaaacaaaaagaagattttgagatgttatgaagagggctggtttcctaagtgtgttaacaattctaacagaattctaacaaaaaaattggaccttgagggtttcttgttcacaatgatctaattgtcagatgacagagcattcctctgccttcacctttcccagtaggtgtagattatctccttttttatgta

SEQ ID NO: 435690 - DNA, 591 bp, Homo sapiens
caaattagagctcccctggcaactgtcactctatgacatcacattttatctaatgaggcataaaaatgtacattgtgcactccgcagctccttaatgtgcatggggaatgagagtcaaggggagattgggagccatctctttgaattcttagctgtaatgtttcacctatgcagttttctttatttgcagctatattttccacttctcataattcagtaattccaaggcattgcagaccctataaatgccatgcagatattggttaattcctcctcttattccatccatcycactgccattaatttctcttccaatctctaagatcttctggggctcttaatagtatctatgtttatgcttgtccaaaatgcactcattttatgaggtgttggtttagtggctacaaaacgttttacagcatctagtgacaatctctacccagtgggtctggtttcaactgtagtcactagagtcctattaatctaatgaggaaaggtgcttcatgatttcagcctctttctgcagtgaggggagtagagatagagattagatagagatcccagtggtctctgatccagatggtgggtgta

SEQ ID NO: 435691 - DNA, 567 bp, Homo sapiens
tgtagctcaagtaataatgattttgcagtttatgttgaagaaagcatgatagactttatctaagatgatataaagggaggcttaaaaaaatttaagcaagtgaaaattttaaaaagaggttaaaaatagtttgcaaattttctatagaatataagaccccaacacgacaaagcaaatacaaccactcatccagtaagctgggcttcaagaataggggtgcattttgtgagcacaattttcttccaaactatgggaaaaaaatcttaacttgaagctattttcaggggataggaaaatgaacctgggaaagaggacacacaagtacagcaaggagtgttcagggyggaggcccaaagttacagtgcagaagtttggggcaattcctcactttatactcaggatgaagttttacctgatgttttattatggaaaaatctgtacctcctagaagtacagcaccaaggagtattcagggcagaggcccaaagttagggcacagaagtttgggaatctcctggttcaggaacaaggagattctacatgaatgaactctctagggagagtgga

SEQ ID NO: 435692 - DNA, 569 bp, Homo sapiens
acaggaaaattcggtcaagtggatagaaagtatgataggaaaaggtccttagtgagattatatacagtcagacaaattttcacaggaacaaggacatcttggaaatcttgctccggctagacaggatatgtggatatgtgaccccccaccctttttttttagatggaatcttgctctgttgcccagactggagtgcagtggcacgatctcagctcactgcaacctgtgcctcctgggttcaagcaattctcttgcctcagcttcctgagtagctgggattacaggcacccaccaccatgcccaactaatttttgtatttttagtagacatcgggtttcaccatgttggccaggctgttctcaaacacctgacctcgtgatcagcccaccttggsctcccaaagtgctgggattacaggcgtgaaccaccgcgcctggcctatgtgacccttttaatcttaatgtaagtatttgtggatatcttaatggttaccaaatcatcacattagttatttgattttcaaaataatttggagctggctttgtagaatgagtctctggattagtttg

SEQ ID NO: 435693 - DNA, 527 bp, Homo sapiens
ttatttgattttcaaaataatttggagctggctttgtagaatgagtctctggattagtttgtttcctgctcaatcctccttcttgttggagcctcatgtgactaccctggtttgcctgaatgtgagagggagacagtgtgctgtttttctgttacttgtgttggtgtgtcagctttcctgagtactactgacacaatctccaccctgccagagcgttctcctcatctcttatttggactgtcatctcctatttgcaatggtcaatccaagttctagcactctggacttccccataaagataccctcttgaaagcaaaatggatcaaaatcggcagttttcaacttagctttcatagattgctccttgactcaaacaatcagctatttctaaaattaaatatagaaattttagctaaaggttgtacttaaactaatatytggggagcaactagtagcaaattgaatgaataggaccacatcttttgttcagttgtgaatactactcatttgttagcttgtaaacaaca

SEQ ID NO: 435694 - DNA, 527 bp, Homo sapiens
ttatttgattttcaaaataatttggagctggctttgtagaatgagtctctggattagtttgtttcctgctcaatcctccttcttgttggagcctcatgtgactaccctggtttgcctgaatgtgagagggagacagtgtgctgtttttctgttacttgtgttggtgtgtcagctttcctgagtactactgacacaatctccaccctgccagagcgttctcctcatctcttatttggactgtcatctcctatttgcaatggtcaatccaagttctagcactctggacttccccataaagataccctcttgaaagcaaaatggatcaaaatcggcagttttcaacttagctttcatagattgctccttgactcaaacaatcagctatttctaaaattaaatatagaaattttagctaaaggttgtacttaaactaatatctggggagcaactagtagcaaattgaatgaatargaccacatcttttgttcagttgtgaatactactcatttgttagcttgtaaacaaca

SEQ ID NO: 435695 - DNA, 577 bp, Homo sapiens
atttctaaggtgaggtagaaaatcttcagcaaggaggaaacctatatagtcttrgaagccaatgaagaagaggagagaggtcagaattcagaaaaatgatacaaagagaaacagtattactggagactgtagctcctagcacccatatatggacattatagcttatgttccacagagatggtcatcagtttaaacctcattctcaatcttgtatattctgaaacctgccactggagtctctgcatgtagatctgactggtgcttggaatgtcctccacatatacttgttgaatgaaatacttcctgtgggatttcatgtttgatttctgttgaaattcagtaggaacatgttatgtatagatatagaattttgttcacacgtacatatttcgttaaatttgttgcataatgtgaaatgaactttcaattctattgaaattccttggctgaatagagggctttgtttgaggaggttggtgtacactctcggttatttgctaatccaggttcttcggtgaatctgttttggttcatgtgatttgaatgccttttctggtgttagcttaggagtaaattc

SEQ ID NO: 435696 - DNA, 615 bp, Homo sapiens
gctttgctctaaggtaccagcagccattcttgctgcctggttttccaagaacagtttactttttttcatgggggttctgggaagtagactattctttttacagaagttcagcctcatgtcttctctttctgctctgagtagagacatgttcacaagtccagagcctctccagagttctgataggcagactttcttctgctgctagcctcttgagcactgaagactgtgacttctttccagcttcatcagttaccatttattttatttgccacagatttgttaaaatgtcttctatggaggcctcttcctgcttttttcctttattgtggacatgtaccatttttattctttgcctgtcatcttcacagcrtcttgggaccaagaagagataaatttgtgcaggtgtttaattcaccatcttgaaccagaaaccccagcaatagtagtattaagagatgcagttttatactttatcactttagaatagtttttcttagtccattttaatgagcttttgatacttagcaggattggagctgctcttgtacataaggcacttgtatgggaaagtttctgtgggaaatatgggagtgacacgatcatccttggcctcag

SEQ ID NO: 435697 - DNA, 602 bp, Homo sapiens
ttttctacatattcctaccactcatctacgtgcatctaccatattctctgctttactcctattttaatgaatgaattttctgtgttcctatctaaaaccaatctgtctgcttgtatattagatttccttcccttaccactcaaggacatggcttcagtaattttcccctcctgtatcatcagggattccctctggtctaattcattatcagcaaacgtgctatatctcactttaaaaaaaaaggcaaacmcttttttgccctatacttcgtaatctccctccaaagtctatcctattttctccccctttgcagcaaaaattgataagacattggaaaagtatttgagtgttagtttgcatttttaaagagtaatatgaaattgaagacagaccatccagtaatgaataagaaataaacatttttccccctggtattttcctgttacttacagaagctaagggttgggagttcaggattctctcatttcaactcttctaatgaggaacaaagatcaaacacacccattggtaagcaacttatattttacaaaaatgcacctaaaggatgttagagcctattactaagatcccaggtgtggtat

SEQ ID NO: 435698 - DNA, 489 bp, Homo sapiens
attagattttagctcctcctgaataacagtttcttagtgacttttatatactctgcaaacagcacactgcttggcacgtagtagatgctcacaaaatatttgttgttgaattaatgcagygggtctcgatttccctccttttcttccctaagcctggagctaaggcaggtgaaccttcagagtcctttgaggggcagagagaagtcaagtcaaacctgggggaaggtggccgcctctgcttccgtggctccctcaagaacatgcttgtggaaccttgcaccgtgaggactggaaggcacctcagagtatctagagagctaggagatgtccttgggcaagatactgtgataccaaatgttattcatttaacaaacctttgtcaagggtcaacacatgccaggccataaagaagctacagttcctatccttacaaatcatacagggtgaggcagagacagacctgtacacaggtataataggcacacagta

SEQ ID NO: 435699 - DNA, 571 bp, Homo sapiens
tgttacagatgggaagcaacaacaaaataatgccaatatggtagagcaaaccttgcctctataacagacctggtggacattctgagctccaagggttcaggacagctagttttcatatgacaatatttcataaaactagaatcaaagccccagattttatataaatgtgagcagtcatattttccatttcaacaatatttattaagggagttttattattttatttttcagtaattaatactatttatactcctattaacaaaacattaatcattttatttattaagggtcagtattatgtaaaatgaggtttggggcaaaaccaaaccaaacagatccatgttgagaattattgtattactgtagggattacaaggscttcttccttgcacagcaccacatttctcctacttggtccgttttctttgttcctttgtgtcccaaagaggctttctcacatctctaatcagtattccaagcaactgatacagactgaaaatagacacaggaggcgcccttacctgtcaggtgtgcagaaaggccttgcaaggaactcagcaggtgggactgc

SEQ ID NO: 435700 - DNA, 574 bp, Homo sapiens
ctccacttctcatctctggggctcctttggtcctttattttacttttggtcaatttccagcaattcattgaataggttcttccaccaagtttctctggttttaaatcctacccatcctgtaagcttaagttctctataattcattcatttgctgtcaaaaaacacgtattgagaccttttacatgttaggcactttgccgagctctagggatatgaagatgaagaaaacacagggcagcagaggagagagacatgacaacctagattgcctgtagagtcctttatgtcccagggtaaaggatatgcacttyatgtgaagtcattcaaccctctcacaacctggagttggataatatgatgatgctcacttcacagttgaagaaactgaagcccagagaagttaattcagttgcctaaggttacacagttaggaaaagtaagaaagaggatgccaacccggatagtttggctgcaatgtttgtgctcttggccatgctgctgtattgtgtaataaagttttatgagagagaagcactaggaggcaggaagccatgggtagtaggtgacacaaagg

SEQ ID NO: 435701 - DNA, 602 bp, Homo sapiens
tgatgacctcacccccagcaaatgggcagggaagagagctagaatgagaaggccagaacatggagcaccatgaaaagaaactgctcaagcaagagaagtggcatgtgggctttaaagaccagggttagaaaacagcagccctgacctttgtgttgaagtagcggggcgaggatctctcatagaagtgttaattctgtactccttccccrattctgagtaggtgccttttacatagagatgatcaatgtgtacttgtctaattaattacaaactgcccccagtgtattcatcttaccttttcgtcatctctccttttcttttccctgaattcattcatttattccacacatttattgaatacttactatattctagacactatgctatctagaaattaaaaacgaatatgaattcaaagatgaatgaatcacagccccttatgtcaaatagcttacatttgagttgtctccatgtgtgtagagagggagggagggaggcaaatatgtggtctttatgatggtgtgacagggcctgtattaggacatgtaccaaatatggtaggaaaattaagtgggggagggtcaattagttatcagtagtcc

SEQ ID NO: 435702 - DNA, 526 bp, Homo sapiens
tatctattgaataaatgaaccacttgctactggaatcactcccctctcttggttttcctgcctttcttcctactttttcacatgttcttctcagtcatctttactgggtcttccttctctggcttctaaacgctagtgttcctcaggactccatcctggatcctttttttctctctcttcactctctccttagatgatctcatctagttcatgaatttaaataccatctttatgtggcttacttctggattctttctcaagcccagaactccagacttacatggtcaattgcctacttgacatctccacttgaatatatagtaggcatctcaaaatgaacatgtccataatagaactcttgatccaccccctccacatatttcaacccaaacctgccaccctttagaatttctgaatagaaaaaaatcaatctggttggaaaatggggaaagctgttctgtttrtgtaggacttaagtaaaatagaaaaaaaatcaattttatcaaagaaggagaggagcagtggc

SEQ ID NO: 435703 - DNA, 591 bp, Homo sapiens
tttttaaagtaaagtatttttcatgagaacatttgaaattcatatttgttttaacaagtcaaattacaaagaatgtaatctatattcaatttgtargctgaaagacttcaggaggacaaatatttaaaataaatttgttgtgtttactgggggtactattatatttttttttaagaaacatccaaaataaacttacatagcacaaactttcttgtgagatagcttagtatgagccactgagcagttactttccctgtattaaagcctgtgcctatgggatacgaaacatctaagtttaaaatatttcctgtctaattattccaaataggggtttggcaatacataattaaaatttttagcttctcaaattaaccttatatgaggcttataattatacaattatatagtcattgtgttgaggggatgcacatgttaaatgttaaatttgttagatttttttttaagtgaaaataagtttattaagtaagtataccttacttagccaaaagagtggctagtttatagacagagcagtggcataggctggtggcctgaatatacctattattatttctttattatatgccaaac

SEQ ID NO: 435704 - DNA, 591 bp, Homo sapiens
tttttaaagtaaagtatttttcatgagaacatttgaaattcatatttgttttaacaagtcaaattacaaagaatgtaatctatattcaatttgtaggctgaaagacttcaggaggacaaatatttaaaataaatttgttgtgtttactgggggtactattatatttttttttaagaaacatccaaaataaacttacatagcacaaactttcttgtgagatagcttagtatgagccactgagcagttactttccctgtattaaagcctgtgcctatgggatacgaaacatctaagtttaaaatatttcctgtctaattattccaaataggggtttggcaatacataattaaaatktttagcttctcaaattaaccttatatgaggcttataattatacaattatatagtcattgtgttgaggggatgcacatgttaaatgttaaatttgttagatttttttttaagtgaaaataagtttattaagtaagtataccttacttagccaaaagagtggctagtttatagacagagcagtggcataggctggtggcctgaatatacctattattatttctttattatatgccaaac

SEQ ID NO: 435705 - DNA, 591 bp, Homo sapiens
tttttaaagtaaagtatttttcatgagaacatttgaaattcatatttgttttaacaagtcaaattacaaagaatgtaatctatattcaatttgtaggctgaaagacttcaggaggacaaatatttaaaataaatttgttgtgtttactgggggtactattatatttttttttaagaaacatccaaaataaacttacatagcacaaactttcttgtgagatagcttagtatgagccactgagcagttactttccctgtattaaagcctgtgcctatgggatacgaaacatctaagtttaaaatatttcctgtctaattattccaaataggggtttggcaatacataattaaaatttttagcttctcaaattaaccttatatgaggcttataattatacaattatatartcattgtgttgaggggatgcacatgttaaatgttaaatttgttagatttttttttaagtgaaaataagtttattaagtaagtataccttacttagccaaaagagtggctagtttatagacagagcagtggcataggctggtggcctgaatatacctattattatttctttattatatgccaaac

SEQ ID NO: 435706 - DNA, 591 bp, Homo sapiens
tttttaaagtaaagtatttttcatgagaacatttgaaattcatatttgttttaacaagtcaaattacaaagaatgtaatctatattcaatttgtaggctgaaagacttcaggaggacaaatatttaaaataaatttgttgtgtttactgggggtactattatatttttttttaagaaacatccaaaataaacttacatagcacaaactttcttgtgagatagcttagtatgagccactgagcagttactttccctgtattaaagcctgtgcctatgggatacgaaacatctaagtttaaaatatttcctgtctaattattccaaataggggtttggcaatacataattaaaatttttagcttctcaaattaaccttatatgaggcttataattatacaattatatagtcattgtgttgaggggatgcacatgttaaatgttaaatttgttagatttttttttaagtgaaaataagtttattaagtaagtataccttacttagccaaaagagtggctagtttatagacagagcagtggcataggctggtggcctgaatatrcctattattatttctttattatatgccaaac

SEQ ID NO: 435707 - DNA, 574 bp, Homo sapiens
cattgttgcatgtatatagtgttttcctttgtatttcacagtagtattttattttatttcagtaatgattcatggttttatttatgcagaaattgaatttccattgctaaaagtttttgttcatcttgatattattgtgaaagaaatcatttcttagcttcacttttcaaaactgtaaatagtctataaaattatagttgatttttatataataatcatgtatctcatgtccttgttaaacattattataggaaggtgatagataacccctcctaaatccttaggaatctcagatatgatcataycatcattgaataaagacagttttatgtcatcctttcccacctgtatgcctttaatttctcttctgggtctcactgcattgtctcggactgcctataaaatataattgccccatgaccaatacaggagttagtgccaccaactccctcctaagcaggcaaaaatccatgtataacttttgactcaccaaaaactgaactgctactagcctgtgatgacctgaaaccctacgaaaaacatgaacagttaatgcttaaatagattaaaatct

SEQ ID NO: 435708 - DNA, 574 bp, Homo sapiens
cattgttgcatgtatatagtgttttcctttgtatttcacagtagtattttattttatttcagtaatgattcatggttttatttatgcagaaattgaatttccattgctaaaagtttttgttcatcttgatattattgtgaaagaaatcatttcttagcttcacttttcaaaactgtaaatagtctataaaattatagttgatttttatataataatcatgtatctcatgtccttgttaaacattattataggaaggtgatagataacccctcctaaatccttaggaatctcagatatgatcataccatcattgaataaagacagttttatgtcatcctttcccacctgtatgcctttaatttctcttctgggtctcactgcattgtctcggactgcctataaaatataattgccccatgaccaatacaggagttagtgccaccaactccctcctaagcagkcaaaaatccatgtataacttttgactcaccaaaaactgaactgctactagcctgtgatgacctgaaaccctacgaaaaacatgaacagttaatgcttaaatagattaaaatct

SEQ ID NO: 435709 - DNA, 585 bp, Homo sapiens
ggaggtcaaggctgaagtaaacagtgactgcaccactgtactccagcatgtgtgacagaacgggaccttgtctcaaaaaagaaagaaaaaaaggcaaaagacaacgttaattatgtcttcactaaatatctagagcaagagcaagatcatgtaggtacatagatcacacaggtacatagattcctcctgtttatcagactgaaacttcatgggcttttcatgtttttctctcaagaaaaaaattaaactttgaaaccaacttggtgaactttggagaccaaaaattatggtatccaaaggtctattaaaaaaaatagtgctatttggttacacctaatttatatcaagaaaatcctaccaattaactctagatttctaaragttcaattattttagtaaattgtagtctcaccgatgtctgaagtgaataaatatctacccatatttgccatctaatatcattattcctgcttattcttgcaaaggcattaccatgttattcaagatctcctcagacaaatagcatttaggtagtgatgctttattgctgctgttcactatttggtggtctctacatgaaaagag

SEQ ID NO: 435710 - DNA, 525 bp, Homo sapiens
tcaacttttccctgattatttactcagttaaaaacactaagatagaacatatggtgaagaaaacccttgttcttaagagttaaaagacaagtagggagatccayatatcaatgaatatacttgtgaaaaataactaactttctcacatgccaaagttttaatgttgccctttatgagagaaattgaaaaatgtcaatggtgttcctaatggaagaaactgaaaaacataaaacttttgtcagatggaggaagcagctggggtaagtagaactgcagacagaaagatagtgtgggcaacatcaaacaggggaaaattcacagttaacacacactataaatccaactcatctagaatctaggacatagggctttcataggatccaaatcctaaggaaatgtgtatacaatatagaagcaatgcaaggttccttagaagagcagtggcaccactagactcgtattttgatataaccacctctcttccctactgtttacagaatagatatgaaggtagggagtaagtag

SEQ ID NO: 435711 - DNA, 578 bp, Homo sapiens
gagaaaatctaatgttttcttttctcttttaaaatataaaatgtatcccataatagatgctgctatctgctayaggaacaaaaatctagaattctgaacatggaacatttatgaagaaacatgttataactaaatgataacattctttctctatataatgctcgctgtgaacctattactattaagtcccacacagactgtgagtttcggaggaacagcagagagtaatagcccccatggtgcttcaaccaaccctggccattaattgtatactctaagtggctcattagaaatcttaggaagtgtctttgctatacaggcaaaaaaggatgattggaaagataagatgcaagatgagaaagcactgctacccagtgaagtcaagtgacaagaacattgtgattgactgtgttacaaggccactgttaaattgagcagaatcaagactgacagaaaactctggggttggcaatcagtaagccacattttgttacatgcacaaggatcagaatatattttatgaaacatataggaaagctaagaggcattgtggaaagaaaataaaagatatttaatag

SEQ ID NO: 435712 - DNA, 578 bp, Homo sapiens
gagaaaatctaatgttttcttttctcttttaaaatataaaatgtatcccataatagatgctgctatctgctacaggaacaaaaatctagaattctgaacatggaacatttatgaagaaacatgttataactaaatgataacattctttctctatataatgctcgctgtgaacctattactattaagtcccacacagactgtgagtttcggaggaacagcagagagtaatagcccccatggtgcttcaaccaaccctggccattaattgtatactctaagtggctcattagaaatcttaggaagtgtctttgctatacaggcaaaaaaggatgattggaaagataagatgcaagatgagaaagcactgctacccagtgaagtcaagtgacaagaacattgtgattgactgtgttacaaggccactgttaaattgagcagaatcaagactgacagaaaactctggggttggcaatcagtaagycacattttgttacatgcacaaggatcagaatatattttatgaaacatataggaaagctaagaggcattgtggaaagaaaataaaagatatttaatag

SEQ ID NO: 435713 - DNA, 565 bp, Homo sapiens
agcaataataaattacaaatatatatttaaaaataatatgactctaaatagctttatggaaaagtttccagatgtgggggaccttatggtttacagtaacaaaaagttattttagtrttttatctctatagaaacatttttgttctaacaagaaatccataggtgtttggaacaagtaaatttaaaacatcattttacatgaatgtgaaatacagaaaaaaatttctattttttagacattttaggcattacatgcctaaaatgtaatgtcctaaatccatattataaattctatatttgtcagtcagataaattttgaatattccttataactgaaactgttcttaagaatttctaagatttaaagtctctttttattcaccatggattaataactccaaatcattcatttattccttcattaatttctaaccaatagcatcttcttgctctactgcttatacaacattgaataagtcctgttccatgctctcaaggatctcagacgctagtgaatgataatgagacataaacagtcaagtggacaacaatagagagagaaaga

SEQ ID NO: 435714 - DNA, 592 bp, Homo sapiens
taaatgttttagggccttggcagtcatggcaaggattttggttgtagatatatggaaacctattgcacattttgagcagagaagttacgtgattgattttcagtttaaccagttacactattttctgttaagcacagaaagagtggaattgggaaggcagaacaaggtaaataagartttattggaataaaccaagtgagagattacagtgacttaatgtgacttgattaatgtgttaccaatgaaatgattgagcagtcgtcgggtgatagatgtactttgctgtctttctcaagaggattcattgaataattgagtgtgagctctaaaagaaagacagaagtcaaaggttctttcagattttttacataaccatctgtaaggatggattattgctaactgatttggggaagaatagagatggaacaggtttgaagagtgggggtacagcagctgaattttagacatactaaaattaggatggctattatgcttccaagtgaagttgttgattagtaagtggtatggactctagaaggtctggggaaaagcaccagcctgaagatgtaaatttggaagtaatctgtagatt

SEQ ID NO: 435715 - DNA, 605 bp, Homo sapiens
ataaataacattgaaacaaagaaaaatacaaaaggtcgactaattgaaaactctttttttaagaagaaaataaatgagagagagagagagagagaagacccaaataaataacataagagatgaaaacagagacattagtgctgttagtgcaamatttcaagtgatcattagaggctacactatatgccaataaattggcataccgttgctcatattagtctctaaagaggaaatggataaattcctcgacacatacaagtgaactgtgaagaaattcaaacctgaacaaaccaatgacaagtaatgagatcaaatccataataaaatgactctagcaaataaaagtcaaggacccagtggtttcactgctgaattttatcaaatatttaaataacatatgccaatcctacacaaactattccaaaaaacagaggcagaaggaatactttcaaacccattctatgaggccagtattaccctgatatcaaaactagacaaagacacataaaacaaaaaactacaggccaatatctctgttgaacatttatgcaaaaatccttaacaaaatactagcaaagaaaattcaaaaatatattaaaagattc

SEQ ID NO: 435716 - DNA, 618 bp, Homo sapiens
acaagtttagctctcatatccaagagttctgcaatgcccttcctgatggcctgctctatttattccaggttttcttagccagccctcacagttcataacccaatatcttgcaataagtatctcaatatttttcacctactggttatttttctccagttgaatactgattagttcatcaggtgttatcccttcgagtgttcactcaaaccttttagtaaggtcctggtcactctgttatatttaagcttcctgttccctgctttgttatgatttattcttatcacrtacaactatccagaataatacattgacttatctttcctctggtgcctttttcttccaataaaatatgcattctataaggcagatacttgtgtatttgatttgttttatggcatttctaacacctgcaatggggccaacatgtagtaagttccttcataagtattttctgaatgaataaatactgataataaaatgatggctgaaattatgctattgtttcatgtggatttgttgaatttgcattgcatcattaagcaccatcacttttcttgtgtcctaaatgatgtgtgcttagtgatactatcaccaaatatatatgttttgtcatatggt

SEQ ID NO: 435717 - DNA, 618 bp, Homo sapiens
acaagtttagctctcatatccaagagttctgcaatgcccttcctgatggcctgctctatttattccaggttttcttagccagccctcacagttcataacccaatatcttgcaataagtatctcaatatttttcacctactggttatttttctccagttgaatactgattagttcatcaggtgttatcccttcgagtgttcactcaaaccttttagtaaggtcctggtcactctgttatatttaagcttcctgttccctgctttgttatgatttattcttatcacgtacaactatccagwataatacattgacttatctttcctctggtgcctttttcttccaataaaatatgcattctataaggcagatacttgtgtatttgatttgttttatggcatttctaacacctgcaatggggccaacatgtagtaagttccttcataagtattttctgaatgaataaatactgataataaaatgatggctgaaattatgctattgtttcatgtggatttgttgaatttgcattgcatcattaagcaccatcacttttcttgtgtcctaaatgatgtgtgcttagtgatactatcaccaaatatatatgttttgtcatatggt

SEQ ID NO: 435718 - DNA, 562 bp, Homo sapiens
ttactaaattcacatgaatttgaaaagcatttgagcttaacttatgagtgytcatttacttatactccaatttggtagcatgctagacacaacatagcatgatgcatatacatgcacataaatacatctaaacatgtatacacacacaaactataatccagtaactttgatctttgattttagacatgatatagcaataaaactcaccattttataaaatatatgtagatctaaattatttttctgacaaaactggaacctattcgcatggttaaactttgtttgccccaacaggtaatccaaggaaggcttttcaccaaagtttgggtacagcagtcagtatggtagttcaatttttaaaagtgtttctttactttttcttcagtttcaaacaggtttccaatgtttacatttcaggtaaaccataaataataattctaatcagtcttacctcagcaccagcagcttagtaacaacagattcaaaccaggcagagaagaaaagagaggaaaatagagagctttagacaactctacttaattctatagtagcaaattaacca

SEQ ID NO: 435719 - DNA, 545 bp, Homo sapiens
ggagtttaaaagaaattatttaggcagatagtcagggtaaggaagtcctcagtaaggttttcctttcaatgaaaaacagcccccaaatcattttcttttctaacaaagagcagcctatatcgaactgcagacatataaaggcaagctagaagcttgcacgggtgaatgatcgcagctgagtcaataggaaaaggctacctggggcaaggcatgttcaacatggcggctccattttctcttttccttgccaaccacgtgtacagtaaggagcacaggacatggttaccgtccaagtagaaaacccatttgcataataataagattagggtgggatgaccaacttctttgcatgctatataaacatcacacctggtccaaccaatgtttgggtgctatgtaaattagatgcygcttcctcaagccagtctatgaaacctgatgcattcccccggaacccagaagtcccacttgggcacccctctccctcaaaagagagagagctattctcctttctctttcttttgcctatcaaacatctgttccta

SEQ ID NO: 435720 - DNA, 520 bp, Homo sapiens
aaatgtcccaggtgcagagacttgtatttggccggtgtgtgggaccagaggtaaaagtacagctcagaaattacatctgcaaacacttgatctgtcttgaagcccactggagcctgtcaccagctggttttgccctcacaaaggattccttggcctcaggtggtcattcctgagaactcaaactcttattccctcctcagggctatagacatcctgagggtgagggggctgtgtgcaccacttactgcctgccttaggttccctcaccctggggaaataggaatggctgctgagaatccaaagcatatagcatccaggagttggtttttgtcctcctccaaagggtactgttccacttctctttacccttccattttatttattgtaagaacagaatttccacattagtcattgcctgttaaaaaaaacatagtttttttttttyttctaatgaaagggttgtgcattaaaaacaagggaaatattcatgtcctttctgggaatgggcagcaaacttctc

SEQ ID NO: 435721 - DNA, 579 bp, Homo sapiens
gaggaagttctgtctgcatgccttcctgttttttaaagataagcaaagttagagcccagtagaaattcaactatgtcacataggcattaaactgggcttgcatttccacatggtcttattccaggaccaaaaaggctggagaatactgaaagatcaatgttgtacccagtgctttgtttctttattttatcccaagaataatatttaaaacactctttgatgtactcaaaaccataatagaagacaatttgtctaggggacaaaggatcaacagaaggatgatatatttcttcctcaagctcagtaagctgccattttggtagattagttgacccatgcaatacattaaataatcaaaacactaaagtattaaaacacactattgtcatataagagatatttgatgatttcagcagactaaccaagcattatgagttccactctgcttaaattttatttgtttgtatatgcatgtttttcagtctctttcggagcaactaaagtcttagtttaattacagtaawgaaaagttgaaaaattttacactgcgtttcccaatacaaaaaaaaaatacgatgc

SEQ ID NO: 435722 - DNA, 565 bp, Homo sapiens
caaattttcctcatggtaataaacaatatatttttttgtaataggaaatactttattttcaaattccttattctttcttgtcatgcagcacaaatccataacaatgaaacagaaacaargaaaaaaagtatttctcattaaatgccatcatatgttagatgttatatgtgatcatattgttttcattcatataaataatcactaagggtttgtttcttttctttcaatgccttatgaaaccgattttaaaataaaggattctttccaattaattaacactaacttagatcagctggccaagagaatgaataaaatagaaataagaacataattggaaaccattgtatattgaattattatctcccaattactgtacagttcctaataatagttagctttcaattatctagttattgtcatcatttacccccacattatgtattggagcactctcttaattatgaaagacatgatgtcagtagtcttttttaataactgataatttaacttcatgcattaatcattccatatacaattatgccacaggatcaatataatttaatga

SEQ ID NO: 435723 - DNA, 595 bp, Homo sapiens
acatgcattggcggcaaaaatgaaatgtcttttcaagatgcttatcaagttatgatagtggcttcttaaagaacttgacactttcaatgcaatagtcccactttctttaaaagtcaggagtgcactccatatgtaactttgtgggactcttttatatctttatttccaaaataggtcactttctttaaaagaaataaaaracaaaaaaaattatattctactttgtgtgcttcatattttgaatctctttactacttcaataatgcaagctttaaaatgaacccacatatttaaatttcttctgaaattcactgtgcaggagtgagtgtgccctactaaggcaataagcaattttgtttcttcgtccttttatgtattgtaggcaatgtggaggaaatgtaacaattgagatgcatttgtcattctttaacacagaaatcaccatgttagattctgaatccaaaaaaagggttgccaacacttttacaaagttgaaaagttcaagacatttatacgaatgctggaaataatttaattaagctggttccacaatgaagagcaacaatgataacttcaataatttaatttagcttat

SEQ ID NO: 435724 - DNA, 528 bp, Homo sapiens
gaaggcaggggaggaaattccaggtagagrtaccatcaagtgcacagcctctgccaaaagaacatgcttgacatgttcagagaaccacaaggaggacagagaacatggaccagcgagagctgtcagtctatagtggtagcagtggaatgggcgatgagagttgaattatagaagactataacctcactgatagaatttaagataaaaagactagacagaatcactcaatgctgacgctcaatttcccatgagagtttgcaattacgttcacatatcaattgactttagccatttaatgagaaacattttcaaaattatactatttaaagttttttaaaagttgcaaattgaaatgtttctaaagccaatctccacttcccagttcactcccagagctcagtatcggttcatttaaccagcaaaggctctgtcattaaatttggaagtatatataccaataccatttggcgttattacttacatgcctaatagacattttatgcttttctcattacaggagcacagaaa

SEQ ID NO: 435725 - DNA, 528 bp, Homo sapiens
gaaggcaggggaggaaattccaggtagaggtaccatcaagtgcacagcctctgccaaaagaacatgcttgacatgttcagagaaccacaaggaggacagagaacatggaccagcgagagctgtcagtctatagtggtagcagtggaatgggcgatgagagttgaattatagaagactataacctcactgatagaatttaagataaaaagactagacagaatcactcaatgctgacgctcaatttcccatgagagtttgcaattacgttcacatatcaattgactttagccatttaatgagaaacattttcaaaattatactatttaaagttttttaaaagttgcaaattgaaatgtttctaaagccaatctccacttcccagttcactcccagagctcagtatcggttcatttaaccagcaaaggctctgtcattaaatttggaagtatatataccmataccatttggcgttattacttacatgcctaatagacattttatgcttttctcattacaggagcacagaaa

SEQ ID NO: 435726 - DNA, 417 bp, Homo sapiens
ccagtatctcagaagatgaccttatttcgaaatagtgtcttgtagatgtaattagttaagatgaggttatattagagtagggtgggctgggttcctagtccaatataactagtgtycttatgaaaaggagaaattagaacacatacaaagaaacacacaaggaaaatgtgaagatgaaagcagagattgggacgatgcttctgaaagtcaagaaatgctaaatatggccaataagctggccaaagccagaagataaatgtggaacgaattgtggaacgaattcatctttacagccttcagaaggaaccaaggctgaagattatcttcttggacttttagccaagacaactggaggcaatacatttactctacttaagccactctgttcaaggtactttgttatagcagccctagcaa

SEQ ID NO: 435727 - DNA, 601 bp, Homo sapiens
tgtaattttctaaagaatccaaaaataaagctctcatttgatccagcaatccctcttctgaatatgtaccaaaggaaatgaaatcacctcctcataaagatgactgcatttctatgttcactgcagccttattcacattagtcaagatatggaaattwaaaaaaaccctaaatttccttcaacgaataaatgaataaagaaaccatagtagtccatatatatatatatgggaatattattcagccttaaaaaagaaggttctgccatttacacaacagagataaaactggaggacatgatactgagtgaaataagccagacgcagaaacatattgcatgatctcacgtatgtagaatcttgaacagaaaataataaaataaaataaaataaaacaaaacaaaaaaaatcaaatacacagacatggagaagaaaataatggtaaccaggaactgggggtgagctggaatggggagatgtaagtcagtttataaagcagcagatacataatatgagtaagtctaaggatctaatgtaaatgaaacctatagttaaaaaaaatcattctttatttgggattcctgctgaatgagtagattttag

SEQ ID NO: 435728 - DNA, 601 bp, Homo sapiens
tgtaattttctaaagaatccaaaaataaagctctcatttgatccagcaatccctcttctgaatatgtaccaaaggaaatgaaatcacctcctcataaagatgactgcatttctatgttcactgcagccttattcacattagtcaagatatggaaatttaaaaaaaccctaaatttccttcaacgaataaatgaataaagaaaccatagtagtccatatatatatatatgggaatattattcagccttaaaaaagaaggttctgccatttacacaacagagrtaaaactggaggacatgatactgagtgaaataagccagacgcagaaacatattgcatgatctcacgtatgtagaatcttgaacagaaaataataaaataaaataaaataaaacaaaacaaaaaaaatcaaatacacagacatggagaagaaaataatggtaaccaggaactgggggtgagctggaatggggagatgtaagtcagtttataaagcagcagatacataatatgagtaagtctaaggatctaatgtaaatgaaacctatagttaaaaaaaatcattctttatttgggattcctgctgaatgagtagattttag

SEQ ID NO: 435729 - DNA, 615 bp, Homo sapiens
aaaagttaaaatttatcaaaacataggcacagaaacacagaccgtacatggtgccattcacagtggagagaaatgtaaacacatgtaaaaatgcagtattaaatcataaatcataactgcataaaattaactgtagcatatattatgctactgtaataatttcatagcccctcctgttgctattgaggtragttcaagtgtttggagtagctacttaaaatgccatgtcatactaatcctctaggcatgagcagttccagtaaattgtgtattgcagtaaaaaagggtctctcccaattctcgagtcttcttccgcctgtttagtgcaacattgtaaatctctaataaaccctgggaacccatatgaaatgccaccagtgatgctagaagtgctccaaagaagtagagaaaagtaatgacattataagaaaaagttgaattgcttgatctgtaccataacttgaagtctgctgctgtgattgcccactgtttcaaacagatgattcatcttgtaaacacaggatgtaaacttacaatatcattatcaaatatagtatagtactgtaaatgtattttctcttatgattttcttaataactcaccagttttagagga

SEQ ID NO: 435730 - DNA, 615 bp, Homo sapiens
aaaagttaaaatttatcaaaacataggcacagaaacacagaccgtacatggtgccattcacagtggagagaaatgtaaacacatgtaaaaatgcagtattaaatcataaatcataactgcataaaattaactgtagcatatattatgctactgtaataatttcatagcccctcctgttgctattgaggtaagttcaagtgtttggagtagctacttaaaatgccatgtcatactaatcytctaggcatgagcagttccagtaaattgtgtattgcagtaaaaaagggtctctcccaattctcgagtcttcttccgcctgtttagtgcaacattgtaaatctctaataaaccctgggaacccatatgaaatgccaccagtgatgctagaagtgctccaaagaagtagagaaaagtaatgacattataagaaaaagttgaattgcttgatctgtaccataacttgaagtctgctgctgtgattgcccactgtttcaaacagatgattcatcttgtaaacacaggatgtaaacttacaatatcattatcaaatatagtatagtactgtaaatgtattttctcttatgattttcttaataactcaccagttttagagga

SEQ ID NO: 435731 - DNA, 621 bp, Homo sapiens
tcttttattattttaatttagcagtttagattttggaaaaattttacaaaaaaaagttttagcacaaaatctttttattyacagaagtagactcgatttatcactaactcaattatgtctgcattaataaaaagttggactcttttattggacagtttttttcaaacatatgcaagaaatataaacagattggactgatgacctacaaaattttagaactggtccaaatatagattaatcatacaaaattctaagattaataacaaagatttaacacggaaggtgtttcacaagttcctttaaatcctaagcaaagcagttagttactggtctgcattctacacaaggttaccctatggtcatccaaaggacaaaatataaatgggattggaatatattcaattttggcaggaatgccatctggagcataaagcaacaaatgaaatgcagttaaataaacaaattaaaaagattgagcccatggaataaaaattttttaaattgtggaaaattgggtggataccaatatgattatatctaaatttattctaaatgcacatgatattagtagtctgggactaataaatactactattaatttattcatttaatgttaaaatg

SEQ ID NO: 435732 - DNA, 476 bp, Homo sapiens
acagatttttttcatcagcatatggaacattcttgaaggtatgtcaggtcatgaaacaagactcagtaaattcaaaagtgtcaaaatcatattaagtaacttttctgaacacaatggaataagactagaactcaataacaagaggaatgttggaaactggacaamtatgtggaaagtaaacatgtttctgaagaataacgagttaatgaagaaattaagaagaaaatttaaaaatttattgagacaaataaaaatgcaaacacaatatacaggaagctatgagatacagaaaaagtggtacaaagagggaagtttatagaaataaacttcaacatcaaaaaagtagtaaggcttcaaataaacaacctaatacacacctcaaggaactaggaaagcaagaacaaacctaaccccaaatcagtagaagaaaagaaacaataacaattagagcagaaataaatgaaattgagactaaa

SEQ ID NO: 435733 - DNA, 602 bp, Homo sapiens
tagtttttacacagaaagacaggaagaaagttacagtaatattttcaggttttatggctgcctttgggaaaaaggggaccaggtttctgtgactggcattaaggaagagggattctagtttctatggctatcctcaggggagaatgaaaggccagaggcagaagggcagaaggtcagagagagctacttctgaagccttcattttcgggtatcatttttgagaccctatacatacttggtttcttattctaaggcttctgtgaccttttatcatcctaatgataggcattatgaatctaaagatagctgattaaatgtataccgtttcatagaaaaattgagtcaaaagacatgatatggtggggaaaacaatagtatttattgtacaatttggctgtgttagacacattgatttcttttcccagagtctcctattttcacaacaaatgttctctcatcaccatggttactatgggagcaaccattattagasctgcctcatattattatatcttatgaagctgttagtatctctttcaactccacattcagtgatatcacattggtagcttgaaactaaccatagtgagaatatttacact

SEQ ID NO: 435734 - DNA, 537 bp, Homo sapiens
tttcagataattttattattaattccatagtttaggcccaagaattagcttgaacccaagtgcacagagctaaattacctagtttgtgtcactgaagtaattcattgagaatcaaagtctctgaaggtgaacartatcaatttcattatatatagaggaaaataagcacatcagataaactattttctaagcaaaaatgtcaaatttcctgcaggaaccacagctgggccctgggctcaattccttggaacatgccagtctgacacaaggagtaatcaatggcccttggagtcctgtcctacctatgaaagaaataggtgaaatttctctattattccttccttctgactataatcttctctcactgcccgctcctctttagggatcctccatttcccaattgcctgcattttgatacttgatactctgaagaacatggagtaaatcaacaaactaattcactaagatggtaatgactaattatatttattaaagtttctgatcttgtgtcccctttactattatggaaggagctcc

SEQ ID NO: 435735 - DNA, 604 bp, Homo sapiens
gaatcccttcaggtctattttaagaaatagaaaaatgagtactttgtttcatagctcctccccagggaggtgcacctctagccttgctgaactatcagcttgtacaggttgtactttctcctctgcatacctttacagatgcccctctatagctcagtggtcttccatctacactgtcttcacaactgcatgccagcatgccagcatttctactctattgctgttttgcatttttagtatcccctgaagcagtttgcagatacaacgagctgcctacttgaccgtccaaagtttctcaggggaggagggtgaggggggaccaattgttttttgagtttttttaatagwagtttggccatagatttgcataggttttgagtggtcttccccaatcccattttgttatttttattgcacagcagattgtgaggctcgtcagtggtatatacgtcatacataggttatagcatcaactcaaacacccccaattaatcatcattctaaacttgtaattatcatcccaagcttagcattttcatcataataaataaatttttatggggtcaaggcactagacttattgtttgttttattacgaacaata

SEQ ID NO: 435736 - DNA, 605 bp, Homo sapiens
caaatctgttccttttgaatacagtagtataaaagcttataccaggtcactatttaaacagctcagttttctcaacatttacaattcaactaccaggaagatttcaaaggacatgactaaattctggtggtaacatagaaactaagactgactgtagtttaggctgtgtgtacagagccaggctgcaagccccacttggctgctggggaggagacagasttagagcttcaagttgcctgttcctgaggcaaagtctggcatcaggtactgctggtgaaggtcagaggcaggaactcactctgggatgtgacgggagctcaaggcacacatgtatccagtggtggtcatgggctgataccagactccagaaaaagctgggaggtcctcacctgggaggtcaagaggccaaaattctggccaaaaattaccagcaaagctagttctcaagatgaccaaagtcagggttctacttcctactgaaaaagctacctttccttgtctatttttaggctactgatgctttttaatttgtcttcaaagagccagggtagttttataagaaatatgaacataagaggcaaataccaatcatgacgttaagtagg

SEQ ID NO: 435737 - DNA, 608 bp, Homo sapiens
aagctctgcccagaaacaagaaatgagttcagtgaaaggccagattgattaaatcatataattataatttttaatttaaaaaatgtttggcacaatctgtagcccctggagagacatttcttaaacagaaattatgcagtttttctcttgaccaaaagccatttttttcaggacataaaaaagtggaaaagtaggaagatatcaaatgtgtccaaataaaaagagccttcatctccagtgagactttgaaaattacctctagatctacggaaatgcaaccatactttccttggagttttggtatctactagaaataacctagaactgaattatttgtgtgactaataagtacctactctttaatttcacctctggttgaaaaggaacttttaaatagtagttacaatcatgccggtcacctgagaggcagtcaaccactgtcacacaaacatcctccaagttagracaggttaggagaaggagaggtaggtagatgaaaattataccttatagaacttttgattagtggtcatttactgacaacattgtcaggcacctaccaaacaccaataggaggcttttgagatttctgatgcttatatttagtg

SEQ ID NO: 435738 - DNA, 608 bp, Homo sapiens
aagctctgcccagaaacaagaaatgagttcagtgaaaggccagattgattaaatcatataattataatttttaatttaaaaaatgtttggcacaatctgtagcccctggagagacatttcttaaacagaaattatgcagtttttctcttgaccaaaagccatttttttcaggacataaaaaagtggaaaagtaggaagatatcaaatgtgtccaaataaaaagagccttcatctccagtgagactttgaaaattacctctagatctacggaaatgcaaccatactttccttggagttttggtatctactagaaataacctagaactgaattatttgtgtgactaataagtacctactctttaatttcacctctggttgaaaaggaacttttaaatagtagttacaatcatgccggtcacctgagaggcagtcaaccactgtcacacaaacatcctccaagttaggacaggttaggagaaggagaggtaggtagatgaaaattataccttatagaacttttgattagtggtcatttactgacaacattgtcaggcacctaccaaacaccartaggaggcttttgagatttctgatgcttatatttagtg

SEQ ID NO: 435739 - DNA, 582 bp, Homo sapiens
gtgctatgaagtttcagagtgcctggaacatagtaagtattcatgaaatggttactgaatatattagttttatctcaagcaaggcatttttataagaaattttgagtaatactttacagcttttataacagtgaagccatgaaccctttcttgtatcatcattacaaagtttgcccaaacttttaagccactcagtggtacagaaaacttatttggaagggaaataaattaaaaraatgaaataaaacaaatcatgcttattaaacttaacggaaaaaccctagggtcaaagctctagaaattaacaatatgttcacgtagacaaatgaacttcagacttagaagagtgatgaatattttttaaccttaacatatagacagatgcaaataataatgaaggcattatcacaaggaggtgttcttttgtaaaatcatattcctactagctgtattttgaaggaaaattcacacacaaaaggggcaagttcacattattattaataattattaatcattagtacctagctgagcttgatttgcatccgccatctgaaccaaggcattttctttcttattaaacat

SEQ ID NO: 435740 - DNA, 517 bp, Homo sapiens
atgatattttattgagatattccagttattacatttttttctaaattttgagatcatcaatatttcagggtataactttttatttctttttaattttactatctttgtttaataacatttagattttgcaatccaccaaggaagtatgacttcattttaagaaactttcttccatttttatttaaatcttttatttaacaatacacttggtttattactagccctttagttctcacaagtgggaaatcttttattcatgaatttcatagtacttggtggaaattctttctgatacacgaaattagatgactaatattgttcaccttttgatgacaaccytacttgtacattctcccaatagtaatgtattacatgccttgagactgtttagctttttcagttaatttctttgatgatgaaaaggttagcaccataaggtctgaccctactttcagtttacattaatttcacgtttttcaaattcatttcagaagcccatcacattaaaatgttcata

SEQ ID NO: 435741 - DNA, 567 bp, Homo sapiens
aacaatgaatgactttttcycaattagatctgtctaaaatgaaataatctgatttcctttgagaaatagtgactcatctatcaatgaacatataagatcctagaagctataaatagagtaaaacaataacaacaaaaaaatctaacttctattgggtacttactataagtaaggcacttttctaagtgtttttatgtagactcttcatgactgtccaatgagtggggtagcatccctggacaggcagtatgcataatggttaagagcatgatctcaggaggtggactgagttcagatccaggctttgtcgcttacttgttgtgtgacttatcttggctcagtttcctcatacgtaataggtgaatgacagtagtatagcccatataggaggatactgaggattaactgtgtgttaaggcatttaaagtttttaggacagtgactggttctaagtgtaagtgctcaatgctcaatggacattagctactatctctattttacagagatttaggcataaaaaaccaaacgaatgtgcccaaagtcatacagctaatatatggggagggc

SEQ ID NO: 435742 - DNA, 575 bp, Homo sapiens
  misc_feature (1)...(575): n = A,T,C or G
ggtggcttaaacaagaaaaatttatggaggttaaaagcccaagatcaagcatttctggtgaggggtcttcctgtcttacaaacagctgcctatttgctggctgacttttcagtgtcctcacacagcaaggagagaggacatgcaagcaagctctctagtgtctcttaagtastctaatccaatcccctcatgagggcaccacccaccttcatcatgtaatctaaacattatttcccaaaggtcccagctctaaataccatcacatagcgagttagggcttcaacataccaattctgggaggatacaaacattaagtcaataataatacccttttaatgactgtagaatcattcttgatactggcaatttgtgtctttccttttttttgagtctacttagaggtattattactaattttatttaccacataaacaactactggtttcattaatttttctctagttttttctgtcactgacttttgctttcatctttaatatttcctcttttctatctacttgnagggtttaacatgttctttttattctagttataactggaagcctagatgattc

SEQ ID NO: 435743 - DNA, 575 bp, Homo sapiens
  misc_feature (1)...(575): n = A,T,C or G
ggtggcttaaacaagaaaaatttatggaggttaaaagcccaagatcaagcatttctggtgaggggtcttcctgtcttacaaacagctgcctatttgctggctgacttttcagtgtcctcacacagcaaggagagaggacatgcaagcaagctctctagtgtctcttaagtagtctaatccaatcccctcatgagggcmccacccaccttcatcatgtaatctaaacattatttcccaaaggtcccagctctaaataccatcacatagcgagttagggcttcaacataccaattctgggaggatacaaacattaagtcaataataatacccttttaatgactgtagaatcattcttgatactggcaatttgtgtctttccttttttttgagtctacttagaggtattattactaattttatttaccacataaacaactactggtttcattaatttttctctagttttttctgtcactgacttttgctttcatctttaatatttcctcttttctatctacttgnagggtttaacatgttctttttattctagttataactggaagcctagatgattc

SEQ ID NO: 435744 - DNA, 552 bp, Homo sapiens
aaccaatatttatcaattatcaccattattcaaatacagcctttgaaatctctaagttacattaaaaattaatcatgtgataaattcctgtgggggcactagctatggaaccgtcttcgaaatgagctctctctgcagaagatcatctagtcatgagctttcagagagattaatcagtaycctttatttaaaccgataatgatcatttctgaattcttaaaggtggaggagagagggtatgcttgctgcggtctctcatctttaaatgatacgatcatacccgtacttctttgttgactcctgttttctcaccttcattttagcaccagctccttgcgtcattctatctcatgtcttttctacaaaccaagcaagcagttttgtgtgtgagctggtaagccagaatatgcctttctaaactgagaatggtttaacatggaggtctaacatagaaaatgaatgctgatcatgaataattttaaacatatattttagtgctgtgcttagtacttcacccattgctattgaaagacgtggggatttatttcctga

SEQ ID NO: 435745 - DNA, 602 bp, Homo sapiens
tgatttacatttctctaatgactaatgatattgagtatattttcatatrctttttgaatgtttatgtatcttctttggagaaacatctttaaaaaatattttgcctatttttaaatttggatgtctttttattattggattgtaaaagttatctatatattctggatatacaaccctaatcagatatattatttgcaaatattttctctcattctgtgggttttcttttcactttttgatggtcttctttgaagcacaaaagtttttagtttttatgaagtccaacatatcaatctcttatatcatctttggtttcatatttaagaatcattgcctaatctaaggtgatgaactttactccttttgtattttcatcaaagggttttataatctagctcttatgtttcagcctctggtctactttacataacttttgtgtatggtgtgagatatgagtacagatttattcttctgcatgtgggtatcttgtcccagcaccatttactgaaagactcttctttctcccagtgaattaccttgaaccctttgtcaaaatcatctgactataaatgttaggatttatttttggagtctctattcta

SEQ ID NO: 435746 - DNA, 602 bp, Homo sapiens
cctcaaagaggtaaaagcagaactaccattcaatccagcaatcccactactgcttgtatacccagaggaatataaatcattctgccatgaagccacatgcatgcaaatgttcattgcagcgcrgttcacaatagcaaaggcatggaatcaacctaaatgcccatccatgacacactggataaataaaatgtagtacatatagaccatggaaaactacgcatccataaaaaagaacaagatcatgtctttcacaggaacatggatagagctagaggctattatccttagcaaactaatgcaggaacagaaaaccaaataccgcatgttctcacttaaaagtgggagctaaataatgagaacttatgaacacagagaaggaaacaacaaacactggggtctacgtgaggatggagggtgggagaagggagaacagaaaagataactgttgggtaccaggctgaatacctgggtgaagaaataatctgtacaacaaaccctcatgacatgaatttaccttcaagtgtaccccctaacctaaaataaaagtttaaaacataaattaataataataaataaaagatagttagaaatatagatttgaa

SEQ ID NO: 435747 - DNA, 602 bp, Homo sapiens
cctcaaagaggtaaaagcagaactaccattcaatccagcaatcccactactgcttgtatacccagaggaatataaatcattctgccatgaagccacatgcatgcaaatgttcattgcagcgcagttcacaatagcaaaggcatggaatcaacctaaatgcccatccatgacacactggataaataaaatgtagtacatatagaccatggaaaactacgcatccataaaaaagaacaagatcatgtctttcacaggaacatggatagagctagaggctattatccttagcaaactaatgcaggaacagaaaaccaaataccgcatgttctcacttaaaagtgggagctaaataatgagaacttatgaacacagagaaggaaacaacaaacactggggtctacgtgaggatggaggrtgggagaagggagaacagaaaagataactgttgggtaccaggctgaatacctgggtgaagaaataatctgtacaacaaaccctcatgacatgaatttaccttcaagtgtaccccctaacctaaaataaaagtttaaaacataaattaataataataaataaaagatagttagaaatatagatttgaa

SEQ ID NO: 435748 - DNA, 602 bp, Homo sapiens
cctcaaagaggtaaaagcagaactaccattcaatccagcaatcccactactgcttgtatacccagaggaatataaatcattctgccatgaagccacatgcatgcaaatgttcattgcagcgcagttcacaatagcaaaggcatggaatcaacctaaatgcccatccatgacacactggataaataaaatgtagtacatatagaccatggaaaactacgcatccataaaaaagaacaagatcatgtctttcacaggaacatggatagagctagaggctattatccttagcaaactaatgcaggaacagaaaaccaaataccgcatgttctcacttaaaagtgggagctaaataatgagaacttatgaacacagagaaggaaacaacaaacactggggtctacgtgaggatggagggtgggagaagggagaacagaaaagataactgttgggtaccaggctkaatacctgggtgaagaaataatctgtacaacaaaccctcatgacatgaatttaccttcaagtgtaccccctaacctaaaataaaagtttaaaacataaattaataataataaataaaagatagttagaaatatagatttgaa

SEQ ID NO: 435749 - DNA, 556 bp, Homo sapiens
tgaatttgtaaagccagatcgttaactctgaaaaaaaagtcttccttaaatttatagcccaattaatactacagaaatcggtcattacttaaatgttcaaacagttggctttgcagggtaattattattttttccattccaagtacacatttttgtcttatgttaatwagacaaatacaaatttaagaaaatgtttacagttaatgtggagaaaatgaaaaagaagcatacatctatagtaagattcccaatgaactagaactgcattcttcatgttcaggcacctccagtgtcttcacagcatgactagaatattgttaacagtgacaatcttctagttagtgccaacaaaatagagaaaaccctagtggtgcgtggtcctcctacatgctgtgggagccctcctttggagaacaaaacaacctccattaatcagtcaacagaaattttttgaactcctactgtttgccaggcattgcactacattccagagggcttataaagaaatgtgaagcctgcccatgccttcaggaaaagtatgtttgtaggagagaca

SEQ ID NO: 435750 - DNA, 619 bp, Homo sapiens
atagaatttgttgaataaatgcttacttttttytctctctcttaaactataagcatcttaaaggaaggacatgtgtttctaccaggtacctggcccagccatttgaacatagtagtttctcaaacactgtggaattggtctacgttaatggggtgacttatgactggggtaatgaagataagctttccgtaaggcgcagaattttttgagccttgaaaaatgagttggatttggataggtggggaggggagagagcatcctggtcaggagattgacataatcaaaggaaaagggtagaggaaacacaagcgtgctgtgggttgatgattaaattagtttaacaagagcaagagattcttgtggcagaggaatgaaagatgaggctgcctccccactgtataaaataaacatttgttagcagagctctcatttttgtttcaatttaataaaagcaaaaataagtgattttgatgtgattaatgaccaataaggggtccacagtgctgacttggcgagcatccaccttcatggcacatgtagaaacacaagatttagtatagaattaacttgcccaagcatctgttcacaaatccatatgaaaaagaaaaaatagaccaaa

SEQ ID NO: 435751 - DNA, 574 bp, Homo sapiens
ctattacatttgttgtgatttatgacaatttgaatttatttttaccatcttatttataacttctattttatcatttttacattttatttttctttcttccaccgtatgaatattttctttcagaacttttcccctcctctcctggtttggaagtatcagcttcatttctattaagtagatacatttacatttttaacatgtctatttaactgaatatcatgcaaattctaaagttatgcagtatttctagcctctgcttgaataaggtaaggtccttcacattccttaatcctgtctaaacattttaaatataaaagattcctcttyacaggcactaattatttagatataacaacttcatttaccaaattgagtaatttaattaatttaatttaccaaattaagttcataaataacatctttattgcatttctatatcatatgtgcttagactcttttctctagagtaatcaaaggtattttatcctattccttctctctacttttgcccttctgcaagtctccatctcttcatcctatactcccaactaagaaatactgaagagatttcttt

SEQ ID NO: 435752 - DNA, 577 bp, Homo sapiens
ttcatttaaggttcataaaagccctataaggtaatttctacatccattttaaatgtgataaaactaaaatttctaagatttcaatcaatggtgtctgaagaattcctgtataggcaggrcttaaggacagaattctgattagtggagagataaaaaaaaatctttcagaaaagcactgtattttctcatagtgtatgtttacttgagagtgctttgagaaatgctgactgcatatggagtgcacttgggttccctgaacttttgacatcaactcttgcccaaggtttgtgtattagtctgttttcacactgctataaagaagtgctccagactgggtaatttatatagaaaagaggtttaattgactcacagttccacatggctgggcaggcttcaggaaacttaaaatcatggccgaaggggaagcaggcacatcttatatggcagcaggcgagagagaacatgtgaaggaggaactgtcaaacacttataaaaccttcagatctcatgagaattctcactttcatgagaacagcataggagaaacccacccccatgatccaatcacctcccacca

SEQ ID NO: 435753 - DNA, 595 bp, Homo sapiens
catggaactggctgttgttgtaacagtaacaactttgaatgagaaaataagagattttgctctgataagagacctctagaaacaatgtcatgtggaggagaggagatcaaattctattctgtagctagatattgacaccgtaggagattatcattagatgatttatttttgcatgacatggtaaagagacaatgtggagagtagatgactataattttaaaaataaaatgtgaaggcctaatgagaacagaagttggcttgcttgagaagcaatgtaaatgtcccaaataagattcagagtagaaatatctacttatagaagcatttgtaataatgaaaaattctaaacaaagggaattattttatatttttaatagcaattatccccagaatatattgaacaaagttctgagaacataatagatattttggcgggggsggggcggggggtggggggttttgttgtttctttcatgaattgttttgctcaacataagatgaataaatgttcatttttaaaacaaatagcaaagttaaaaagtgaaaaaatgagagtaaggatcattcatgatctcatcctatatataaccattat

SEQ ID NO: 435754 - DNA, 433 bp, Homo sapiens
ataaaaataagacacatagaccaatggaacagaatagcgaactcagaaataaaccctcatacttacagccaactgatctttgacaaagcaaacaaaaagrtaaagtggagaaaggacaccttattcaacaaatagcgctgggataattggcaagccacatgtaggagaatgaaactggatcctcatctctcaccttatacaaaaatcaactcaagatggatgaaggacttaaatctaagaccggaaactacaaaaattctagaagacagtgttggaaaaacccttctagatattggcttaggcaatgatttcataaccaagaacccaaaagcaaatgcaataaaaacaaagataaatagctgggacttaattaaactaaagagcttttgcatacaaaagaaacagcagagtaaacagacaacccacggagtgg

SEQ ID NO: 435755 - DNA, 567 bp, Homo sapiens
ctgatgtattcccttgcatatcagataaataaaatctgctttgttttttgagctgtggtgktctgtatttaatttattgatacccaagataatacagttagtaagttacaaagctgggacacaaatccattctgacttcaacccatatgcttaatttctgtgttcaattgttaaataaataatggaagcaaattgcattcaagctaactagttttaacataaaaaaggatgctgaccaggcacagtggctcacgcctgtaatcccagcactttgggaggctgaggaaggtagattacttgaggtcaggagtttgagaccagcctggccaacatggcaaaaccccatctctactaaaaatacaaaaattagctgggcgtggtggcaggagcctatatcccagctacttgggaggctgagacaggagcatcacttgaacccaggaagtgggggttgcagtgagctgagtttgtgccactgcactccagcctggatgacagagcaagactacatctcaacaaaagaaaaaaaaaggattctaattctacaaccttactccacctaactca

SEQ ID NO: 435756 - DNA, 467 bp, Homo sapiens
aatgctccaagtttagtttagactgtatattaaaggtagggtgattctgttaaagaggaaaagggaggagggcattccaagcaaagggaagatcttgagcaaaaataagcatagtgtgcacatctgccagcagaggtaccaacctaccctagaggaggggaatacagctagatttctaagggaaaaaaaattagcattcattttcattgttttttgcttataaaatcagtatcattatactttttcmtttccaaaatattatgcacatattatagtaaagcaacagactgttcttttatctcaaagatctcgctgcaatataaaggggaaggaaaccaacatttagcagatacacactaaatacatacatatacgttttatatttaaatatcctgtaatcacagtttaacatcaaaataactggtggtcatgaaaatctataaactggataattttactataaaata

SEQ ID NO: 435757 - DNA, 549 bp, Homo sapiens
gcctaactaaatgagaaggaaccagaaaaataattctagtaatatgacataacacagttctataacacccccaaaagatcacactagccctctagcaatggatctaaaccaagatgaaatctttgaaatatcagataaataattcaaaaaattgattattaagctactcaaggagataccagagaaatgtgaaaaccaacataaagaaatttaaaaaacaattcaggatatgaatgaaaaatttctaaagcgatagatatcayaaaaaacagtcagaacttctggaaatgaaagatgcacttagggaattacaaaatgcagtggaacatttcaacaatagactagaacaagtagaagaaagaatttcagagctcgaagataaggctttcaaattaatccaactagacaaaaaaaaagaaagaaaagaaaaaagaatcaacataaatgaacagtctccaaaaaatatgggattatgtaaaacacttaaacctaagaataactggtgttcctgagggagaagagaaagcaaaaaagtttggaaaacttatt

SEQ ID NO: 435758 - DNA, 647 bp, Homo sapiens
aaaattaaaaacttgtgcatcaaaagacgttatcaagaaagtaaaaagacaatctacagaatgggagaaaacatttgcaaatcatataactgatagggcattaaaatacaaaatatataaagaactctacaactcgccaattaaaaaatggggaaaggacttgaatagacatgtttctaaagaagatctataaataggcaataagcatatgaaaagatgctcaacatcactaatcattagggaaatgcaaatcaaaaccacaatgagrtatcacttcacacctgttaggatggctataattaaaaaattggaaactaacaactgttggggaagatgtgggaaaatttgaacacttgtgcactactaggaggaatgtaaaatggtggtgccactgtggaaactggtatggcaattcctcaaaaatatttaaacataattatcatatgatccagcaattccacctagatatctgtacacccatatttatagcagcattattcacaatatccaaaaggtgggagtgaccacgtctgttgaagatgattgaagaaataaaatgtgatatatacatataatgaaacattatgtagccttaaaaaggaaggaaattctaacatatgctataatatgagtgaaacttgaaagac

SEQ ID NO: 435759 - DNA, 490 bp, Homo sapiens
gttggatgcgggaagggaagtctgagtgcatgtgtagacgtgcacgtacacgttcacatgcacacagactgtgtaaatgctgttgaaccgggagctcagtaggcagtatcggggggtagatctttagcggggatccaagaccacacaggcaggatgtcaatcaaggtgggctgaacttaggtaggagagaccacagaagaacatgttatcaaatagagaccctcactgagagggcaggcaccaggcatggcctgggcatacatgtgggcccagcagctagaaccatggggccgaggccctcagtaggccatcacgctgcacrcctccagggcaccactgcatggaagtctgtgtgatggagtccttattttgcagtgcactgcctgcacagctgtacgaggccctaaaaccctgaccagtgtgggatcagatagccgcagcagtggggagtggaggaaaatatgaaatgacacatgtaaacacacgccaa

SEQ ID NO: 435760 - DNA, 466 bp, Homo sapiens
tcacagcttttcattgacttttgctatcatacatggaagtacttattatagaaaggccttagagaatcccttgggttccagacttagtcctccttgccctgttgtgtggcagcaaccaatttccgctcggtaatgaagatcagtcatgcagccagtgtattaactctttatttttcctgctggttgagtggcatgaggagcccacaatggcctggttaaagtttaaacctccaaygtaatgaaaactatgttgcctcccttcccttgaaaactaagacctccaaactagcagagctcaatgctacagggaccagaggcagaagttttgtgagtgggtggagtaggctgaataatagccattcaaatatagcaagttctaatttctgggacctgcaaatgttacattataaggaaaaggggcctttgcagatgtgattaaattacggatcatgatatggggagatta

SEQ ID NO: 435761 - DNA, 587 bp, Homo sapiens
agcaagaatggggaattgtgtaagaccataagaggtaattcctggtggcaagcaggaattgaaggtgtatttctgagggggggtccagtgtccagtggggtgggagggtgggaagtatagttgccaacctcaaaaatgccagggacaacagtaggctttctgcttaaagctgagtctggtaaagtgctgcctgccgtgaacattaaaatctctgtctgctagccacctggtccctggctttaagcagaaagaggatccttataagtgtgacacctcagyctgtccacagggggtgtgggctcaggatttgatatccaggccatgcaaaaatcccaaaccaagacactgctataagagctgatttgaggctgctgcacttccacatggcttaggcacatacaactgagaaatcatcccttaggatggcctccacatcccagggcacaatcaggaaaatgtgctgaaaataatctcaaggataaattccataacagattagaagcaccataccttaagagacatacctctcatgggagaatttatacataaagacctagagctaatggagcaatctgaaaggaaattta

SEQ ID NO: 435762 - DNA, 512 bp, Homo sapiens
gggtaaaaaaaaagaacaaaccaacctccaagctagcagaagaaaataactaaaattacagacaaatgaaattaaagtaagatgcaaaaattcatacaaaaaatcaactaaaagtggcttttttgagggaataaatatgattcagagactgctagttagattaataaagaaaaataaggatccaaatacgtataatcagaaatgacaaagatgacattgtaaccaatsccacagaaatacaaaaaaatccacagagactattgtgaataactctatgtacacatattagaaaatctaggggaaatggataaattctaggaaacacacaatctcccatgattgaaccatgaagaaagcaaaaacttgaacaggtgaaaaacaagtcctgcaatggaatcagtaataaaatatctaccagtcaaaaaaggcctggaacagatagattcacaaccaaattttaccagacacataaagaagaacaggtacaagccctaatgaaactattccaaaaa

SEQ ID NO: 435763 - DNA, 596 bp, Homo sapiens
ggctggctagaatgtcctaatgtatgagcatgaggcatttttgagtgtgtcagaaagatagcagtgggaagataatacccatcaaagttggcctgagacctgggcctggggaagctctctctgctctgtcatgttctgatgaggaactaaactttcaagtcttaatgaagacttatttgttagggcataagttagagcatattttatgtartcatttggtagcatgtcttataacttttaaatatttaaatttataatatgtgagcctccattttattcttgacttagccttgcaaatgttagggggaggtctcttagaactgtaagaattgagcttgaaatgtgtttggagatatgtcattaggaagctatatgtctttccaccaatctggaactctctactgtgtctgctcaccataccttgatgaggtggtgtatgtgaaatgtgcatgttgctgccagagagtgatctgggggacccagagaagcctggtatgttgcggggctgtagattacattattaaaaatatttgctgttcctctttgggaaaagattatactatttcacctcattgaaattagacttggaagttcat

SEQ ID NO: 435764 - DNA, 417 bp, Homo sapiens
  misc_feature (1)...(417): n = A,T,C or G
gttgctgagtgtagaatatatcttgagctaggttatgaaggaatgggtgatagggtaggaagggagtgaaaccagngaaccagttaaaacactgatatttctgacttcaagtcttcacatatagaacaataaaacagcatccatactctatgttcactgacttttcttcttggcctttgatctgggttcatagtttgtgctccccttatatcatgaagttcccttacatttgctgcatttgctcagagcttatcctctcaacccttgtgcagaagaatttgcagaattttcctctgataaaggcacagagcagtyacctggaattaccagactcctttgtccagagggatgacagtattcaaagaagctatgcactgttttccagaacttgctaaatattatctataagtcagtaat

SEQ ID NO: 435765 - DNA, 611 bp, Homo sapiens
aaaatcctctctaaaatgcagtgactcatgtgtgtttttwaattttatttctggctgggtattgcaagcttccactttggtaaagctgtggtagggaccaaatccatgctgtttatgaaaaaaaaaaaaatctctcattttagtagatagaggaaggtgtttcccattgctgggaggtgttgggtgatatttacatttcttttcttcaaaaatctcatcattgtgttttctgtgctttcaagggataggtttaacaacagaaacgagatagtggtttagactgaaaagaatcgtaagcaggaagaatattaccatgttttctaacagacactttctctgcatcaaagcttgagtctaccaaattattgaaaggagcatttgcaacaccaagcctcaataaagaatagagaaaaaaaaaaaaaaaaaactcagggcaatgttaccagtggagggcgtccaagttcctggcggcttgaacaaagaattggaaaaaacacacaaagaaagaaagaatgaagcagcaaaagcagagatttattgaaaatgaaagtacactccacaaggtgggagcgggcctgagagtatgggctcaagagcctcattacagagtt

SEQ ID NO: 435766 - DNA, 528 bp, Homo sapiens
cattataatttttataaatgtgcttattaatacatttacagctttaattacaatatacataactcataaacaggttgccaaatactttcttgagttcagtaaatccaagaatgaaaattaaagctgcttcataataattaatttggttgaatttagatattttgcacattataatcttcaagtaagaagctttaagatataktgaaattgatttttcaataattattaattttcatatttagtgaatttgatgattaagattttttggtattttaaaatacatatgcataaaagaaattattttaaattctatagttagctcagcagacatcaggaagttaggactaatgaactgtgatattttgtgacatttcattaataaggtttttttctctgttcttaagtagtttttgtattcttagcaattttctgccaagttatgatcaattagcaacttatttcctttattatcccgttccttaagaaatgtgaaatgcctttgtgtcataatcagcaatggtcttttgt

SEQ ID NO: 435767 - DNA, 528 bp, Homo sapiens
cattataatttttataaatgtgcttattaatacatttacagctttaattacaatatacataactcataaacaggttgccaaatactttcttgagttcagtaaatccaagaatgaaaattaaagctgcttcataataattaatttggttgaatttagatattttgcacattataatcttcaagtaagaagctttaagatatagtraaattgatttttcaataattattaattttcatatttagtgaatttgatgattaagattttttggtattttaaaatacatatgcataaaagaaattattttaaattctatagttagctcagcagacatcaggaagttaggactaatgaactgtgatattttgtgacatttcattaataaggtttttttctctgttcttaagtagtttttgtattcttagcaattttctgccaagttatgatcaattagcaacttatttcctttattatcccgttccttaagaaatgtgaaatgcctttgtgtcataatcagcaatggtcttttgt

SEQ ID NO: 435768 - DNA, 528 bp, Homo sapiens
cattataatttttataaatgtgcttattaatacatttacagctttaattacaatatacataactcataaacaggttgccaaatactttcttgagttcagtaaatccaagaatgaaaattaaagctgcttcataataattaatttggttgaatttagatattttgcacattataatcttcaagtaagaagctttaagatatagtgaaattgatttttcaataattattaattttcatatttagtgaatttgatgattaagattttttggtattttaaaatacatatgcatraaagaaattattttaaattctatagttagctcagcagacatcaggaagttaggactaatgaactgtgatattttgtgacatttcattaataaggtttttttctctgttcttaagtagtttttgtattcttagcaattttctgccaagttatgatcaattagcaacttatttcctttattatcccgttccttaagaaatgtgaaatgcctttgtgtcataatcagcaatggtcttttgt

SEQ ID NO: 435769 - DNA, 528 bp, Homo sapiens
cattataatttttataaatgtgcttattaatacatttacagctttaattacaatatacataactcataaacaggttgccaaatactttcttgagttcagtaaatccaagaatgaaaattaaagctgcttcataataattaatttggttgaatttagatattttgcacattataatcttcaagtaagaagctttaagatatagtgaaattgatttttcaataattattaattttcatatttagtgaatttgatgattaagattttttggtattttaaaatacatatgcataaaagaaattattttaaattctatagttagytcagcagacatcaggaagttaggactaatgaactgtgatattttgtgacatttcattaataaggtttttttctctgttcttaagtagtttttgtattcttagcaattttctgccaagttatgatcaattagcaacttatttcctttattatcccgttccttaagaaatgtgaaatgcctttgtgtcataatcagcaatggtcttttgt

SEQ ID NO: 435770 - DNA, 471 bp, Homo sapiens
cgggctccttctcctcagcaggggcgccactgctcggcactcccaggtgcccccagcccgcctcggcgagggcggggcttacggaaatgggcggggcatgccgggggcggggaatggtgggcggggctcttgcgtccctgggaggggcggggctttgccaatgccaggccccgagagcgggaggggccggggcggtgctgcggctccgrttacctccccgcggcctcccccgcccggccggctactttttccgtttccaaattaacaattgaaaacgcggcggcctgaaaggcgagcagcgggccaagcggaaagtgtgaaggtgccgccgcgtccccgaggccaggggcggagaggggggacgcgacgccaccgccgcctcggcctcgcccttccacctcacagcaccatcctaaagggctcttggagtaggtagtttcacgtgtgacctcaagtaagtcatttcacctt

SEQ ID NO: 435771 - DNA, 544 bp, Homo sapiens
tttcaactagttccaagtcatacattgaagtggtgaggccagtttcacaatctgctataggagatggaatgacatagttaagatgctatggtatggtgcctttggctgtaatacagctcctttatttaccagtgagggatctgagacaggttatttgatctctttaagccaatatctcctcatctgttaaataagggtagtatatgtctttttaggttgatgtatttgggaaaaaaagagatcatgtatggaaagcacctggcactgttcctggcacataggtgttaaataattggcagttgttattattaagaacattaggggcttttgcacctacaggaaatcccaatgatgcctagctcagagctgaagcaaggtaaccrgcatgcatattagctggaggagtccatccctatgggggagatagatttcagtaattctatgaaattcggatgaagtaggcctgtgaataggatgggaaaggccacatttcaaagccacttagctggggtatcagtgcggacagctcattagctcttggatc

SEQ ID NO: 435772 - DNA, 544 bp, Homo sapiens
tttcaactagttccaagtcatacattgaagtggtgaggccagtttcacaatctgctataggagatggaatgacatagttaagatgctatggtatggtgcctttggctgtaatacagctcctttatttaccagtgagggatctgagacaggttatttgatctctttaagccaatatctcctcatctgttaaataagggtagtatatgtctttttaggttgatgtatttgggaaaaaaagagatcatgtatggaaagcacctggcactgttcctggcacataggtgttaaataattggcagttgttattattaagaacattaggggcttttgcacctacaggaaatcccaatgatgcctagctcagagctgaagcaaggtaaccggcatgcatattagctggaggagtccatccctatggsggagatagatttcagtaattctatgaaattcggatgaagtaggcctgtgaataggatgggaaaggccacatttcaaagccacttagctggggtatcagtgcggacagctcattagctcttggatc

SEQ ID NO: 435773 - DNA, 581 bp, Homo sapiens
ccccatctttgtgtttatcttagaatctcttggtggtcatattattagataaggaaaagctgtgctttggaaatagcagcgccccagaagggtggagacccaaagcttagagacaggctagaaatgccatgttctgaaataggkcagatttcagatgaatgataaattgaatggatgaaaaatagctcttagccactttattccaatgaaataccataatagagtgatgagtcataagagtagctgaaaaaaatcgaattgtcaagattagtattaatatacagaaaaatagatgtttagtaatatttttaaatattaagagcactttaacatgtgcaatgtaaagacaagagctttgattaaaactttgattttatatacttttgtatataaaatattaatattttatatacaatagaggctttgccaattgtgtttctaagggctgaagagatataaaattctaattcaaaagcaacactaattttgcccatttggcattgaagtctttatggttgagattgatcaaccagactgttgaaatgtttaacagcattccgtaagggcattcaagaagtctc

SEQ ID NO: 435774 - DNA, 581 bp, Homo sapiens
ccccatctttgtgtttatcttagaatctcttggtggtcatattattagataaggaaaagctgtgctttggaaatagcagcgccccagaagggtggagacccaaagcttagagacaggctagaaatgccatgttctgaaatagggcagatttcagatgaatgataaattgaatggatgaaaaatagctcttagccactttattccaatgaaataccatratagagtgatgagtcataagagtagctgaaaaaaatcgaattgtcaagattagtattaatatacagaaaaatagatgtttagtaatatttttaaatattaagagcactttaacatgtgcaatgtaaagacaagagctttgattaaaactttgattttatatacttttgtatataaaatattaatattttatatacaatagaggctttgccaattgtgtttctaagggctgaagagatataaaattctaattcaaaagcaacactaattttgcccatttggcattgaagtctttatggttgagattgatcaaccagactgttgaaatgtttaacagcattccgtaagggcattcaagaagtctc

SEQ ID NO: 435775 - DNA, 362 bp, Homo sapiens
gatattatgataattataagtaacttttatattattgtactttgagaagaatatgtttatctaaagttgttttgagttcagaattaaacatattctatttctatatttggatcaaacgaaaatcttatatgtttagtaagacaaaacttaagatggaagactatacataaaatgacatatattaatatatatctgtattaagaacattaatagtagtatgctcataaaatagtcaactaaaatataattcaaaaacragtactcttattattgatattgagtgaaatgttttttgtataaaaaccatttttaaaagttaaaatttagagttttctaatgtcatcactattgcaactatcatc

SEQ ID NO: 435776 - DNA, 538 bp, Homo sapiens
atacagttgttgttggtacatatttgcatactgatattatgataattataagtaacttttatattattgtactttgagaagaatatgtttatctaaagttgttttgagttcagaattaaacatattctatttctatatttggatcaaacgaaaatcttatatgtttagtaagacaaaacttaagatggaagactatacataaaatgacatatattaatatatatctgtattaagaacattaatagtagtatgctcataaaatagtcaactaaaatataattcaaaaacaagtactcttattattgatattgagtgaaatgttttttgtataaaaaccatttttaaaagttaaaatttagagttttctaatgtcatcactattgcaactatcatcaataaaagtgctattttaaaatatacagcaaattattatcattacttataaagatgttctccctttctacctmaaaacataactgttttgaggctatagagattgcatggcatgtgcacatacacactcagacacacattaaat

SEQ ID NO: 435777 - DNA, 595 bp, Homo sapiens
gcaaacttgggatattgcttagtcttttttttcttcagttttctcatctataaatatttggcctaccttaaacatttataataaatattaaatgatatacagtgtgtcaattgttacaaataaaaaattcattaacacaccaaaaataattgagcatcagtatgtatcatataacattcccagcactttaagatgctgttaaaaaagtagaaacagattcctgaccatgtcaattacatccaatgagagtaacatttaatctgccaactacaattactactgttattatataagtttttcagatgagaatcctgaggattggtctgaagtaccaaagcttgttttctgaacataaggaagtttgggcagggtcatagacttttgaattcatcattctagaaaataggaatggatgtgaagaagaatttgtgcccagttaaggttggaaaccatacacttgcgatatatatctaaaatgatattygtgattatataattagtctactcacttaagccaaaagcttggagttatctttgactcctatctttgtctcacgttttatatttaatcaatcaacaagttctattggttata

SEQ ID NO: 435778 - DNA, 680 bp, Homo sapiens
tatgtaacaggggagagaatccagaaacaggccaggcatggtggctcacgcctgtaatcccagcactttgagagaccaaggcaggtggatcatgaggccaagagatccagaccatcctggccaacatgatgaaaccccgtttctactaaaaatacaaaaattagctgggcgtggtggcatgcaactgtagtcctagctacttgggaggctgaggcakgagaatcgcttgaacctgggaggcagagtttgcagtgaaccccttgactctgttccagcctggcaacagagcaggactgtgtctcaaaaaaaaaaacaaaccaaaaaccaaaacaaaacagaataaaacaaaaggactattcagtggtgcgaagacgtttgaatgttcacattgtcacaggatctttcaggtgtcgttttgccagccagaaaactctgtggccagtggtgcctttgcctcagtttgctcaggcctactgggttccatccaggctgtgctcagcccacagtactggcctggatcccacaccagccaagggtgagccaggcatggagtggtgaggagtgtgtgagtgaatgacagtgggatctggccactgcacacagccaggcatgccacctgctgaagtgaggcaggcagctctaggtgccagccaggcaccagctctgtgcaaggctgtggc

SEQ ID NO: 435779 - DNA, 581 bp, Homo sapiens
aattcaagttgtttacaatttttttttattataaataaaacttctatgaacaattgtgaacacatctttgtgcagacatatatctcttgagtacctcaaagtagaatcactgggatatagggtaagtgtatataaacttaaaatgattttttaaaacgtttttattttctttgagacagagycttgctttgttacctgggttggaatgcagtggcgcaatcatggctcactgcagcttcaacttcccgggctcaagtgatcctcccattcagccccccaagtagctggaaccacaagtacacaccaccaagcccagctaattttttaattctttgtagagacagggcctcactatgttgcccaggctgagttggaactcctgggctcaagtgatcctcctgcctcggcttccgaaagtgctgagattataggggtgagtcactgcacccctcctaatacttttttttccccctgaaggggtggtatattccattcccacaatcgcatgatgaggttttcataatttgttccttatcctagccaacacttgggattgttcaatttttaaattttaatcattc

SEQ ID NO: 435780 - DNA, 610 bp, Homo sapiens
ttttaattctttgtagagacagggcctcactatgttgcccaggctgagttggaactcctgggctcaagtgatcctcctgcctcggcttccgaaagtgctgagattataggggtgagtcactgcacccctcctaatacttttttttccccctgaaggggtggtatattccattcccacaatcgcatgatgaggttttcataatttgttccttatcctagccaacacttgggattgttcaatttttaaattttaatcattctaataagtgtgcgatgatatcttattttggttgaatttgtgttcctcaaataatatattatgtaattatctttcttggggtttcaaactgatggtaaaaattttagaaaatgagatcaacaggtgccagttcatggtccagaagtagcgacaatcacatcaacttcagtcctgcttatactgaggaaggttatccaactggagaataatgtacattttcatgtgagttagagaatggaaaaaataataattaggactatttctataatttccttgaatatttgagtcacctaataaattgatctctttttgyatacatacatgatcaaaaggagtccatcaaatcttggtt

SEQ ID NO: 435781 - DNA, 572 bp, Homo sapiens
gtgagatgaggggaaataacctttaaaattaacactgcaattttcatcttctgattgtctcagcctcccccagaatagaaaatgcttattctcttggagagagaaataaatttaatctttacacgggcacactcaaaattgctattatgcttttacgtattttttttcaccatgtcgtatacattttctttttattttgtgaagtgaggtgtgaacgtgaatgtgtgtgcctgtgtgtgcgtgcacacrtgaacaggagcggggacaaattctaaataagctcaggtagaatttatttattttttctaattacagagtgctcacagagcaccaagcaatggaccgattttgcatgtagcagaagcacagctgccttctctctaacctacacctcctcctctattcctgaccttgtaaatggcatggataattaatcaatgacatacgctgatgacataggtgtcattctaaactctgttttctatcatacctcctccatttccttcttagtgtggttgatcaaaggcccatctattctttttaataataatgtcttcatgttttcaaatata

SEQ ID NO: 435782 - DNA, 577 bp, Homo sapiens
cgcccggcccacaaacataaatttcacacagcacttagggatgaacagttaacaaatcctgtaatattaaataacaatatttttgagcatgtaaactatttttccaaacaaaacctcattacagaatcttaatacctggacccaaatgcagaacagtggctgaatcctgagaagtggctggagaccttgtcatacagcttctcatttgtaatatattagaccccaaggctgtccagaggcatcctctggctccagagggaatagcttgaaatcctttgccttagactatttaagaatgatgcaaagataataatttttaaaaatatgcacatattcaaaaaggaaccagaaatatttcaggttccagaatgcttctactgaatattgtaatgataatttacatttgcattrcttttatcttctatgaagtccatacatccaaagagtgacagtttaattttttttattttttcagtttgaacttctttacaggtgttcttgcctttactaataagaccccaagagacagcagtccccatactaacatattgagtgctagctaaaaatagtagccctg

SEQ ID NO: 435783 - DNA, 614 bp, Homo sapiens
ttcagaaggcagaataacagaatctgatcattaataggatgtgagcaatgagaaggttggacaaaataaagaagcactttaattttgtagagtcagcaaatataaaatcctcttgagaygtaagataacacaaactgctcattagagtgtggaattttacattttgttaattttcccctagtggatgagctaaacatattgcataatgtaacataacaataaatattcctctctgtagggaactgagtgattggcctgggcagagactctcccctgccattcctaccttccctggtccagtttggctcagcaaaggaaccttctcatgctagatgctggtgccatcagaagcaaggagaaatataaaccaccataatagaacaaagtggggaattttgctggcccagtggcttaccacacactagtttggatggcagtaggggaggattttttggatttggttgacaaataactaaattatacagattaggaggtcaaatgattacctaccaccttggtgccattatatccttccacggagcctgagtgggaaaatatagctgtggattaataaactggagattgtactaaagccgtccttgatacaggtttcc

SEQ ID NO: 435784 - DNA, 617 bp, Homo sapiens
atacatatttacttatctttgtctaaaaatgtattatttcacacattggatattaatctttgtatgtatgtctatttttgtaacgacctctcttgaagactgattcaatttattttaatttttcagttagctgaaaatcgcaagtttttatgggaatgaaagtaattatgttctctgcatggatttattygaaattcaaatgaaaacaaaacctaatgctacagtaagacaatttatggagaaatattaatcacagtgcctcattaattaattcatttcaccttcaaagtacatccgtgatgtggtgatatttgaaatttttctcctttatattttatacttttagtatgaggtaaatgtgtaaaaaaaaatgatgtactgattcctgctgctttcttgagcaaaacaaaattaagcctatctacctgaattagtaataaaatggttgaaaaagggaataatttacaaaactgatcttgtgtcagtcagtgaccaaccattgagaagtcaagtgtctgatttcataaataaataaggcagatcaactcacctattaacagaaaatgtgtgtttaaaattcttgtgaggaaatttaatgatttttgacctggcaatag

SEQ ID NO: 435785 - DNA, 666 bp, Homo sapiens
tttgttaatgaaataagacaacttctttgaaaaagtaaaaactttgaaatacatatccaccaaggagttcttgtatgcccaaagtcaaaatcattttgccactatagacagatagtttgtcttttgaaagaaaacatcatcataatagtgttggaaaagtctattccagatcaatgtttgtgtgtacttgtgaaaactttccttttattttttatataaagtgtttatatcttgggaacttaagatttttcctttcctattttcttgtttctctagtcattttccayagataatgcttgcaaaggaagttaaacgtgatgttttttctcatcataattggtccagtgaatttttgtcctcctcaagaccagtagtacatgttccatcgatctcctcctaacttcaatttcttcctataaaagatagattccatgattaataacttcaattaccttcttgtcactattaccaatgtccttgcctcgttgttccagtgatacaggcagctggcaaaagaaacttgaggagaaaaatcagaaaactctgtactatatcttagtattgacttgacattctcgatgcttccctagctaatatgttttcgtatgatcacaaggagctagtttaaactcctatattataatacacttacctctgccacctgtt

SEQ ID NO: 435786 - DNA, 666 bp, Homo sapiens
tttgttaatgaaataagacaacttctttgaaaaagtaaaaactttgaaatacatatccaccaaggagttcttgtatgcccaaagtcaaaatcattttgccactatagacagatagtttgtcttttgaaagaaaacatcatcataatagtgttggaaaagtctattccagatcaatgtttgtgtgtacttgtgaaaactttccttttattttttatataaagtgtttatatcttgggaacttaagatttttcctttcctattttcttgtttctctagtcattttccatagataatgcttgcaaaggaagttaaacgtgatgttttttctcatcataattggtccagtgaatttttgtcctcctcaagaccagtagtacatkttccatcgatctcctcctaacttcaatttcttcctataaaagatagattccatgattaataacttcaattaccttcttgtcactattaccaatgtccttgcctcgttgttccagtgatacaggcagctggcaaaagaaacttgaggagaaaaatcagaaaactctgtactatatcttagtattgacttgacattctcgatgcttccctagctaatatgttttcgtatgatcacaaggagctagtttaaactcctatattataatacacttacctctgccacctgtt

SEQ ID NO: 435787 - DNA, 451 bp, Homo sapiens
ctccccttccaaaacaagaaatctttcaatgctttwgtctggtgccccgtgtggcatccaggatgtaaaacccagttgggctgctttccggggttcctcagctgcagtgtaagtggaaggttccccactgagactccatctgccccaggaggctttcctgagtctggacagacctgcttgcaatgcatgcaaggcttctgctgtcccttgctgcctatctgtcagtaataaactggctgcatgtgggcgttcagtctcgccagactcagaaaagcaggtaaccaattcacgatgacactgcttcacaaaattgatacagtgagcatggtctagcctgacaaaactatgacctactggtgcagtgagaggggtggggtgggggcaaaaccttcctcccaggtagctggccaagggtgaaaatgtcagcctggggatattttatgaggaagaa

SEQ ID NO: 435788 - DNA, 451 bp, Homo sapiens
ctccccttccaaaacaagaaatctttcaatgctttagtcyggtgccccgtgtggcatccaggatgtaaaacccagttgggctgctttccggggttcctcagctgcagtgtaagtggaaggttccccactgagactccatctgccccaggaggctttcctgagtctggacagacctgcttgcaatgcatgcaaggcttctgctgtcccttgctgcctatctgtcagtaataaactggctgcatgtgggcgttcagtctcgccagactcagaaaagcaggtaaccaattcacgatgacactgcttcacaaaattgatacagtgagcatggtctagcctgacaaaactatgacctactggtgcagtgagaggggtggggtgggggcaaaaccttcctcccaggtagctggccaagggtgaaaatgtcagcctggggatattttatgaggaagaa

SEQ ID NO: 435789 - DNA, 451 bp, Homo sapiens
ctccccttccaaaacaagaaatctttcaatgctttagtctggtgccccgtgtggcatccaggatgtaaaacccagttgggctgctttccggggttcctcagctgcagtgtaagtggaaggttccccactgagactccatctgccccaggaggctttcctgagtctggacagacctgcttgcaatgcatgcaaggcttctgctgtcccttgctgcctatctgtcagtaataaactggctgcatgtgggcgttcagtctcgccagactcagaaaagcaggtaaccaattcacgatgacactgcttcacaaaattgatacagtgagcatggtctagcctgacaaaactatgacytactggtgcagtgagaggggtggggtgggggcaaaaccttcctcccaggtagctggccaagggtgaaaatgtcagcctggggatattttatgaggaagaa

SEQ ID NO: 435790 - DNA, 630 bp, Homo sapiens
ccaacaactgatatgtttctttggatactagagaaaacatggacccaccttgctgctctgttgacctccttagtcaaggtgatcaacaaagccgtccacagtgaatggggccctttgcagcagcaggccttggaagccattcaataagctgtggcccaggcactgcatctgaaaccttcacagccagcgagactgatggaattacaggcgtctgaaacctccatgcatgctaattccaagtccaaaacccagaggctcccagctggaactctaagagaacagtaagctccatgaaccaatgacaaacttactagaagggaccaagcaactcacagggaattatttggttaattggggkccaagactgagaaatgtgccttccaatgatacggcgtggctttctgacagctctgcaaaacaacaagcagaggggtccactgggtcgtggccaccatctggccacaggatggtcatcttttgattgagactgaacatggaagttccatccaatggaccaaactctgtgcagtggtgatgccatgcccctggaattggatgtggtgtgtgagagaggagtcaaaggtggctacaaagtcttggtctgagaaactgaactgacagggtaaattt

SEQ ID NO: 435791 - DNA, 503 bp, Homo sapiens
aaaacataaccttttcaacaaataaagtcaagcaattggacaaacgtcaaaatgaygacacttgacataaaacttataccttatataaaatttaactcaaatgggtcacagacttaaatataaaacttaaaattacaatacttttttaaaaaacataggggaaaatattagtgatgtagggctcggtaaagaggttttagacttgacactgacagcattacacattaaaacatgttaaattatacctcatcaaaattaaaaaccttttggcctggtgaaagcctgtataatagcattatctggagaaacagaaccaattgtgtgtgtgtctgtgtacacacacatatatatatatgagtgattgacccacacaattatggcagctaagaagttccataatcttccagtctgccacgtgcaagctgcaagcccaagaaagctggtggtgtgctggttctggtccaatcccgaaggcctgtgcaccatgggaactaacagtataa

SEQ ID NO: 435792 - DNA, 503 bp, Homo sapiens
aaaacataaccttttcaacaaataaagtcaagcaattggacaaacgtcaaaatgacgacacttgacataaaacttataccttatataaaatttaactcaaatgggtcacagacttaaatataaaacttaaaattacaatactttttwaaaaaacataggggaaaatattagtgatgtagggctcggtaaagaggttttagacttgacactgacagcattacacattaaaacatgttaaattatacctcatcaaaattaaaaaccttttggcctggtgaaagcctgtataatagcattatctggagaaacagaaccaattgtgtgtgtgtctgtgtacacacacatatatatatatgagtgattgacccacacaattatggcagctaagaagttccataatcttccagtctgccacgtgcaagctgcaagcccaagaaagctggtggtgtgctggttctggtccaatcccgaaggcctgtgcaccatgggaactaacagtataa

SEQ ID NO: 435793 - DNA, 551 bp, Homo sapiens
atgaagaactgcaaactggaaaaggttaacttcaattgagggttagaccagtatttttacatggaacgcttctaaacagatgttacttggttagaagacaaataaacaaataacatcataaaaatggcttaagtaaccatgtgtgcctttttggtcccaaagccaaggtggcgcatgagtctctgctgtgtattctcccgaattcaaatatagaggcatggagagaaagctgtgccaggcattagcagcaattttattgtggaatgaacatggaggagacatgttttctgttatgtttcagcatggcactttacatttctaaaggaaaaaagaattmgtaaagtagaagaaatcagctaatgaataattttaaattttagcacggaaacagagacactgaggctaatctgcagttaatttcagcataaatcatggtgaaacacaccctggtgaaccatatcaaagagggattggaagatgaaacaaaactgttaaaaggtcaaagaagatgtggcagaaaggacctgcccccaatagttgattattccacc

SEQ ID NO: 435794 - DNA, 551 bp, Homo sapiens
atgaagaactgcaaactggaaaaggttaacttcaattgagggttagaccagtatttttacatggaacgcttctaaacagatgttacttggttagaagacaaataaacaaataacatcataaaaatggcttaagtaaccatgtgtgcctttttggtcccaaagccaaggtggcgcatgagtctctgctgtgtattctcccgaattcaaatatagaggcatggagagaaagctgtgccaggcattagcagcaattttattgtggaatgaacatggaggagacatgttttctgttatgtttcagcatggcactttacatttctaaaggaaaaaagaattcgtaaagtagaagaaatcagytaatgaataattttaaattttagcacggaaacagagacactgaggctaatctgcagttaatttcagcataaatcatggtgaaacacaccctggtgaaccatatcaaagagggattggaagatgaaacaaaactgttaaaaggtcaaagaagatgtggcagaaaggacctgcccccaatagttgattattccacc

SEQ ID NO: 435795 - DNA, 665 bp, Homo sapiens
tgtattataaacttatatatgctatgatattgtgataaaataaatatacatttggtctctgtccccagctcctggtcagagctcctgaaacacttgtaccttcctaaatgataaaagcaacagaaacatcttttgttaccatattttgttttcattccccacccctgacaaaactctggtgcaataaaggtgagaggagcatcttttgttattgattacaagctccttacaacaacacctgagtctgtatattgacaaaatgatttttggaaagtctctaaggaagggggctggttgccaggagaaccaaccatgtcattagagggttggaactttcaggcctaccccccagcctccgcggagaggagaggagccagaagttgagttcaaccaccagtggccaatgatttcatcaaccatgcctacacgatgaagcctccataaaaccctaaccaaagcggttaggagaacttctgggtggtaaacactggagrtgctgggagggtggcatgtctggaaagcacatggaagctctgtgcttttccccctgccatgccctgtgcagctggctatttctgagccccacccttttataatggccagtaatacagttagcaaactgtttctccaagttctgtgagccatcctagcaaattatcgaacct

SEQ ID NO: 435796 - DNA, 367 bp, Homo sapiens
agcatccccagtctctctctccatgtgctcacttgagcacctctttaatagaaaacaccctggattagggtctgagagctcgggatcatggcctggcatcatcagcacctaacatggagccctcagtgtattgtctagcttctctcaaactcgctatcttyatttattttttaaaaagtttcatagatgttttaaaaccctgactttgggaaccacagaaccctgaattaagagtccagtttttccaaatcttttgctcaggatcacatgaaaaactttagctaccattcaaaactacaggtgctgagaggtaagcaggagatgggaaaatgcagcctaccatcactcttctggaagccagcagagt

SEQ ID NO: 435797 - DNA, 434 bp, Homo sapiens
gtttgtttggttttccttttaatgtagtttaatacatggaagacaatttttgttctctaagaactatccatcatttcagaagggtactgtttaataggaagaatgccttccatcacttttgaatgtgtttcccgaacctttcagctcatgtcctcattttattccagtacaagtagttctttcatggggatatagagcttgagaatgattaggtagctggatgttaagtagtttgttaaagasatatatctgtaaggtagtactaattattacttgtagaacaatgcaagtcaggtaattggttctgtacatcatttttctgccatggatttactttattcctgcctttccttgtgtgttcacccccagagaagtcatttctccagtttgtggctgaccctgtattgagaatgatacctggagtgccagctagc

SEQ ID NO: 435798 - DNA, 558 bp, Homo sapiens
ttcacagaactcctaagaagcattaggttctagagccacagagaggtcaaataacttgcaaaggtcaaaaagctagaagtgctagagctgggagtggcactgaggcagtccgacttctgagaccgggatcttaatgagtctgatctgcagctaccttggtaaaatctctaccaagaacaaaggtagggattttaaaaccggaaaccgttgagattttatttaatttaaaaagaggtttccagtagctgtgtggaagatgggcagaagagagagactcaagccagmgagacaaaccctctagacaagatggtgaactaaggcagtgtgttataggaggggagggttgtgggggcattcaagagatgtggacaaggtcaaagtgattggacatggtggccaaagtgtgtagtgggaaggagcctgagactggctgccaaattcctagctctagaggtggttagttggccaaagctttgatggagatagaggaggagtgggatgaggcgaccaagagctttgtttgggcacatattaaatttgacacccccctggagcatg

SEQ ID NO: 435799 - DNA, 558 bp, Homo sapiens
ttcacagaactcctaagaagcattaggttctagagccacagagaggtcaaataacttgcaaaggtcaaaaagctagaagtgctagagctgggagtggcactgaggcagtccgacttctgagaccgggatcttaatgagtctgatctgcagctaccttggtaaaatctctaccaagaacaaaggtagggattttaaaaccggaaaccgttgagattttatttaatttaaaaagaggtttccagtagctgtgtggaagatgggcagaagagagagactcaagccagagagacaaaccctctagacaagatggtgaactaaggcagtgtgttataggaggggmgggttgtgggggcattcaagagatgtggacaaggtcaaagtgattggacatggtggccaaagtgtgtagtgggaaggagcctgagactggctgccaaattcctagctctagaggtggttagttggccaaagctttgatggagatagaggaggagtgggatgaggcgaccaagagctttgtttgggcacatattaaatttgacacccccctggagcatg

SEQ ID NO: 435800 - DNA, 628 bp, Homo sapiens
acattctgtttcaaaggctgccactggttagcagtgcgagaatgacttcrggctccttcttgcttgccagctttaattttcggagcttccacacagtcgcctttttacgggtgctctgcctggaccctactgcccgtctcagatctgcaatcagagtaatgcacgatttattcgctaaaaggagcaacaaagattggtcttccatgaaaactgccatggttatattcctttatcctttatggggaatccacccagagtgttcttatcatttgttatttgccatttgaaagtggggcagcccatcctttacctctgtcacctgttaaatcgagagcaaaagctggtcatttctcatctgttaggtaagctgatctgggaaggaaacagtgactaaatcttttagcataaaactgatatccaggggaaatcatcagtttttccactctacttcttttatatgtgtctagaaacttcaaaaacagtgtatgtgatattccggtaatgtgaaggaaggttccatgagttataaagtacacaatggtaggtatacatgaattaaattcatctttaatatggacatactatatatccagaaaattaaaatttaaataaataaattcatatttaa

SEQ ID NO: 435801 - DNA, 628 bp, Homo sapiens
acattctgtttcaaaggctgccactggttagcagtgcgagaatgacttcgggctccttcttgcttgccagctttaattttcggagcttccacacagtcgcctttttacgggtgctctgcctggaccctactgcccgtctcagatctgcaatcagagtaatgcacgatttattcgctaaaaggagcaacaaagattggtcttccatgaaaactgccatggttatattccyttatcctttatggggaatccacccagagtgttcttatcatttgttatttgccatttgaaagtggggcagcccatcctttacctctgtcacctgttaaatcgagagcaaaagctggtcatttctcatctgttaggtaagctgatctgggaaggaaacagtgactaaatcttttagcataaaactgatatccaggggaaatcatcagtttttccactctacttcttttatatgtgtctagaaacttcaaaaacagtgtatgtgatattccggtaatgtgaaggaaggttccatgagttataaagtacacaatggtaggtatacatgaattaaattcatctttaatatggacatactatatatccagaaaattaaaatttaaataaataaattcatatttaa

SEQ ID NO: 435802 - DNA, 587 bp, Homo sapiens
aggcagaagttgcagtgagccgagatggtgccactgcactccagcctgggctacagagtgagactctgtcttgaaataaataaattaattaattaaaaaataaaataaaagcatgctatcaaagaacatatgtcataggccccccataactgggrctatcttacctgtctatacagctatcacgctgttctgtgccagtggaggcccagacaccccctgcacatactgggacacataactgtcagccccaacacctccctcaggcacagccaacagagtgtcccccggctccggtcattattcacttgccctcggtttgtcccacccagcagctgctttctctcacatacttttaaacactttcttccttccagctcttacccagggattcaggaagatctgtttctctgaggcacctactgtttgactgtgtctctgcccccctttctttctctctccatttccttccttccccatatctccttcttgattcagcccaaaattgacttaaccgttgcaaaatgagttacccaactgctacttccatataaaatataagaaagcctggtcatccaacgtcacgttta

SEQ ID NO: 435803 - DNA, 586 bp, Homo sapiens
gaggtggacctggtcaagaatagtaggccatcttacatattaataactagtttttatcatgttttattctatttgtggaaggatgtgatttgacctgtaacatgttttatttatttaatataacattatattatcacggcattctactatattttatgggaaatgaaagaactataactagtcttagaaagcctgtttaaatgaaaagtttgagatgaaatcactcaggcagtcatctcccatatgaccatgctggtttgcactgctggtcagtaaatattcatccttctctccctcctgtgtgggcagagtggacgtcctcactcccgtgctcatgggcatgaccatgacacttgctttggtcaatgggatgttagtggatatgatgtgggcrgaggcttgacatgtgcctgggcccttgtgcttgcctttctgtgcacctgcatttccccatagatagcaaatgcctcaggtagctgtcaatccaagcaggatgaaacacacatggtgcaaacaaacccagccacaacctagagccagatcagctgacatcagtccacccacaggtgtgtagaccacccacaac

SEQ ID NO: 435804 - DNA, 522 bp, Homo sapiens
gtgggggtcatagccataaaactctcctagcgtcctagcgagggcaggaatggagagaccccactccctcacttcagtgccttcttggctttccatagatgaagagcagggagtatgggagaattttctagatgctgttagcttccaagaagccatctgaaagttactgtagtttatttttcctargcaaacaagacaagccatcacacttcctttcaactttggattgaaaacaatttgggcatgatttcctcaaccaaatcaaattaatacacttgccatttattttggcttgtaaaattccttttcatattatttcatgaacaggagaaaaacagagagacattcaatgaagtgtacattttgtggtaaaattggtatatcttacctggaaaatgagtctacagcagtttatttgtgaaaatgtgaaaatgccaattcaatgtcaaaaatagcatatactacatttcattaatttaatagtgtcattgaccttaaaactgctaaaatagtagaatagca

SEQ ID NO: 435805 - DNA, 575 bp, Homo sapiens
cctcactcaccagccagggacagaggacatctccaagggatttgggggtctggaagattgcgggcagtgaatttgtagtaccagatgttggattttgttttctgtgtgttcagattacctcttgctgggtaacaacccaccccagactcagtggcataaagcaacaacaaccgtttattattcttatctctcctggttttttattattattttatyatccttatctcttctggctttggccagactcagctgggaagttctcacttgaggtcgctcatgcggctgaagtcagcagtgggtgggctggaattgtctcaaaagcatagtcactcacatgtctggctgttgatcctgaatcaactttagttgagattttcaccagaacacttagaagtggccccttcatgggactggcttcctcacaacatggtggtttgggtctgagggtagagtggagagagaggcagtgtcagctgtgtcaccctggatgacctggcctctgaaatcaagcagcattcctcccaccacattctatttgctagaggcaagttgccaggaccagcccatattcaagg

SEQ ID NO: 435806 - DNA, 564 bp, Homo sapiens
ttccctggtctgcttggtctcacaaagaatggcccctgcagatgacatttcccaggttccattattctctgattttcatctctatttgaacaatagtttgtacctgtgggagattaaacatgggaagcggggagtcagggtaggtatctctcatactgtctgctttgggcagcatctgtcagggcattaagcactttttggtggggatgaatatgtccatcctcttcactatggtcttggtgtcatgagttgaattacatcccctagaaagatatgttgatgtcctgacccccagtaccagtgaacatgaccttatttggaaataaagcctttgtcgatgtaagcaagtaaagagaaagtcatcctggatcaaggtgggccctaaatccaatggctggtgtccttaaatagagagatttgatggcatacagggacacgcaatgaagaaaacctcacgacagtggaggcagaggttggtgtgatggcagctgcaagtcatggaatggcaggaattgctagcaaccgycaggaagtaggaagaggcagggaagccttcttccctag

SEQ ID NO: 435807 - DNA, 647 bp, Homo sapiens
tagcactgtttttatttataatttaaattcaaatcagatatctttctatatatttatctgggtaggaaatctattttttatagagatkgggaaagagaatgagaaagcaaaaaaggagtgtagggagacagaaagattcagaatcagagagagactcagagaaatatattttcctgtggccactgggtaagagttataagacagaaaaaaaaagaaaaagacttgaaagaaagaagcatcctgggatgggattagacaactaggtgaataaagacaggacaagggcacagagtgtatctccctgagggaggaccaaggacatcatagagatgatggatctgagtgctgctgtccaatagaaccttcttcaagatggaaataggctgtatctgcactgcccaatatggcagccagtagccacctatagctaactgagcacttaaaatgggctattgcaactgaggaaccgaatttttcattgtatttaatttaaattaatttagatgtaaatatttatagccttgtatgactagtggctaccacagaatcagaaagctccctgaaccattcatgggtgtggggcaggaatactgaaggggctggctacctcttgcccaaggacagctgatgtctatacagaatgaaac

SEQ ID NO: 435808 - DNA, 611 bp, Homo sapiens
tgtcctgtgatgaaaatatgagctctgttactcacctcattaacaattaattttaaatggaaaacttgccatctcttctagggggcattcttcctgggtcttaccattatctgcatattgccaagcctgccattccaactcccttggaggtacaaatggcacagcctaattatgtaagtattatttctgaatttcattttactttcaaatacaaaactttgtttataagaggatgaaattctttacttggagtctttactgtaatgtgttggttcacacatcagaagcccactggagtaatcgtcccccaagatggcccttagtgactctcgcaccttggtcttcatgcccttgtgtggcycctcccacactgagtagggctgacctgtgtagccaacaggatattggggaaatgactgtgtgacttccaaggtcaggtcaggtcaagaaagatacgacagcttccagcttgcacacttctagatgacttgctgccatgctgtagggacgcctttagagaggtccatgtggcaaggaattgaggactcctgcaccagtcatgatcagtttgccaggcagacgagtgtgccaccttgaagtggatcctgcag

SEQ ID NO: 435809 - DNA, 522 bp, Homo sapiens
taatgctgtggttatcatcacttattattawttattattagcacagatatctgttcctttagattataggttccttgaggaaacacaccaggccttgtacattcagtaatgtgaacaagccttgtacatggtaggtgctcaacacattaaacctgtctaccatctggttttcattagaaactctactaaggtaaagattcaaaatgaccacgggcacaattataaaagaataatgagaattccaaaaatatcccatttggcagcatgatcttgctcaaattttcctacgagactaattaaagagaaacgggacacaggacagatataagcagacgtctgtgccacgtgctaagatgacagtcctgccttctctctccttcttatcatattgaatagtaatgcttgagagatagcttgccatagaataggcaaatataacacatgaagaggtgggacatataatcaagctttgagacttctaggaaaagtgcaagtctgggaacggtatacatgatatggtga

SEQ ID NO: 435810 - DNA, 518 bp, Homo sapiens
gttcagttctctcacacccttccttgcatcagactttgatctaagtcacaatacaaaagacctatttcacctctaacatttcccctttctcatgttaattagattacaggtatagctgtggcaatcaaagtcaaattaaataagatagaagtttatttctctctcacaaaagagtctaagtataaacgacgcagggttgctgtattagctccaggtgctggagatccatgctctctcttgttaatttgccatcttcaacatcggttactaactcaaagtcaaagatagctgttccaactcctgccatcacatttacattccaaccagcatgaaggggaaaaaattggcagatgatatgcatccatgtgcccattaaatttgggaggttctcttagtaaaataagagtagagaaacaaatatttaagragcaactaatatcttactacatatatgcatggaattcatttagattttggtgactaccacttatttatgtgtgcctttggtcatgctttct

SEQ ID NO: 435811 - DNA, 598 bp, Homo sapiens
acagctatcttaaaaatttaacttccaaatcttctaatgtattttgtatatcaatagtaatatttttacctttagaagctcttctttattccctgattattcacttttacagcatcatgctctgttttatggatgtaatatctcacatctctctgaggaggccaattataacttttttattttctgcactttctgaactctgaatcacctgcttcctttaagattagttttttccatgtttttgtagctctttctctgtaatgctgaagactttcatcagctgtcttgggcttctttgcagtgttcattcataataataattgtgtctctgtgttcatgggtgaggcttgtcaaaaggccaattcgactttagggtgagccagtgaggagccgtcattgtgccaatggctcctcaagtactgctaggtggagagttttgctctgtggaaccatccctgccattcattttcttgatgctccccrgtcccctactcatcaaaaaaaaaaaagtatattcaaattttttcaagtctttatcttagtttgggccactgtaatagaataccatatactgggaggcttcaaaacaacaagcatt

SEQ ID NO: 435812 - DNA, 608 bp, Homo sapiens
tcatgaatggggatatggatatctaataaaagttctaagcacatgaaatccagatacatctaacaagagagtgtataatgatcaagttgtgttatctcaggaatgttaagttgatttaaaattaagaaattgattactatgtcacacaaaacaaattaaaggattttttgaaaacttttgtttttcaggcagggtctgacagggtctgactctgttgcccaggttggagtgcagtagtgtgatcatggctcactgcagcctcaacctcctgggctcaagcaatcctcccacctgaccctcccaagaagctaggacaacaagtgtgtgccaccatgccagactagtttttaaagtttttggtagagatggggtcttgttgtgttgcctaggctggtctcaaactcctggcctcaagtgatcctcctacctcagcctcccaaagtgytgggtttacaggcatgagccactgtgctcagcctaaaaacttttaatagaatgacaaaaaaggaatttgaagaacatcagcatttatttatgacttgaataatttgtggcgaactaggtgtataatgaaactttattagtctggcaaaagggatctatacaaa

SEQ ID NO: 435813 - DNA, 521 bp, Homo sapiens
atttgtggcgaactaggtgtataatgaaactttattagtctggcaaaagggatctatacaaaacctacaataagcatacacctactggtgaaatattgaaagcattctttttaagatcaagaacaagataagaaagcccactgtcacaattcctcatttttattatacaggagatttcagccaatgcaatgtgacaaacaaaaagaatgactggaggaagaagcaaaactgtcattgtttaaagsttatcaatgaagaaaactcaaaatgatttataaatatattgctagaattgagaaggcaatttagcaaattactgggtataaaatcaataaatgtatgtatctgtgtgtctatgtatgtttgtatctatctatctaaatgagttgcatttctagatgctagcaccaagaatttggtgtagcaatataaataaagtaacaagaaataaatctaacaagagttttgtaataaccatatttccatttagataatgtgtgaggttaggcaaatagtactag

SEQ ID NO: 435814 - DNA, 521 bp, Homo sapiens
atttgtggcgaactaggtgtataatgaaactttattagtctggcaaaagggatctatacaaaacctacaataagcatacacctactggtgaaatattgaaagcattctttttaagatcaagaacaagataagaaagcccactgtcacaattcctcatttttattatacaggagatttcagccaatgcaatgtgacaaacaaaaagaatgactggaggaagaagcaaaactgtcattgtttaaaggttatcaatgaagaaaactcaaaatgatttayaaatatattgctagaattgagaaggcaatttagcaaattactgggtataaaatcaataaatgtatgtatctgtgtgtctatgtatgtttgtatctatctatctaaatgagttgcatttctagatgctagcaccaagaatttggtgtagcaatataaataaagtaacaagaaataaatctaacaagagttttgtaataaccatatttccatttagataatgtgtgaggttaggcaaatagtactag

SEQ ID NO: 435815 - DNA, 489 bp, Homo sapiens
  misc_feature (1)...(489): n = A,T,C or G
nnnnnnnnnnnnnnnnnnnnnnntatataaaaaatatgcaagagagtattatttaaagtgagaaaaaatatgcccccaaattaaataataaaaacctggaaaatgccacataaatcacaacatccacaaaagtatttttattcaktgattccctggcaagcctcaatggcctttttcctacgtttctgtctaagtgcactttgaccatataatgatgactttgttaatatttactgaagagagaatagaaaaatctttaggattgttgaccaagtttagttttaaaacaattcctttcaactttgtaactcattgttggtaatgtcatgtaactgtttaggatttttgtcaaattagtgaaaatacccttttcttacatctgtgagcgagaagattgtggcatttcaaattttctcagtgactagccttacatgctctttgaattagaaacccttgttaatcagctggttactgatgaactcattgcag

SEQ ID NO: 435816 - DNA, 567 bp, Homo sapiens
gaagctgtacacccaaccacaaggatttacatgtaactggaaagaaaaaaaaagaccatgcactatgcaatataatcattcattcatttttcaaatcgttaacacccatgatgtatcagacactaggatttcacagatatgaaagtacttattcccaccctcaagtagcccatggtctagaaattcaacatccaatccatgaccagtccatcacaaaatcttgtcaattttaccttctaattagctctcaaaagcatccaattctaactttataygcaccagagtgaccaaaccatcatctctcacctgaacttttacaagtcttctaactgttctctccacatcctctcttcttccttatattctccaaagccagaattacctttctgaaggtaaagatacatcttaaaatctttaagtgattgtctttgtacaccttaaaatctttaagtaattgctcagtattcatagactaaaaataaaatgccttaaaatgtccataaggccctaagtgtaatagccccaacctgcctgcaatcaaatgcaaaaaaacaaaaaaaatactgc

SEQ ID NO: 435817 - DNA, 567 bp, Homo sapiens
gaagctgtacacccaaccacaaggatttacatgtaactggaaagaaaaaaaaagaccatgcactatgcaatataatcattcattcatttttcaaatcgttaacacccatgatgtatcagacactaggatttcacagatatgaaagtacttattcccaccctcaagtagcccatggtctagaaattcaacatccaatccatgaccagtccatcacaaaatcttgtcaattttaccttctaattagctctcaaaagcatccaattctaactttatatgcaccagagtgaccaaaccatcatctctcacctgaacttttacaagtcttctaactgttctctccacatcctctcttcttccttatattctccaaagccagaattacctttctgaaggtaaagatacatcttaaaatctttaagtgattgtctttgtacaccttaaaatctttaagtaattgctcagtattcayagactaaaaataaaatgccttaaaatgtccataaggccctaagtgtaatagccccaacctgcctgcaatcaaatgcaaaaaaacaaaaaaaatactgc

SEQ ID NO: 435818 - DNA, 565 bp, Homo sapiens
gtgagcaaccagaatggatattctgcacgtggttaggcatctggccagatgttatgtgctataaccatcctaggtgatgcaccatttatcaaagccacacaggatgtcccatagagccaatgggagggctatcagcatcactaacattccatggtggttctctgcagatgagagctgacagtaagagaggctgtaatagaacttcgtttgatgattgcagtgagggtgatagtaccccctagaagggaggccaggtgttgccaccctaataaatatgtttctagccacacttcatcacagtatctcattttggagaatgcaacctgtaactataagaatctaagttctgtgtaaggtacatagcaataaattcacatctagacacatcatagtgggatttcagaaaatcaaagagaaaaacaaaaccttaaaagctacccgagaaaaaaagagcttacaaaagaacaacaattagactggcagcaatctacttgtaacagtcaatgacagggacaataggataacatcttcaaagggttgacaragagtggatatcaaattagga

SEQ ID NO: 435819 - DNA, 529 bp, Homo sapiens
tttaacagtagacacctggcaaggctgtgcatgcacctttcattgcatgtcagccattcccatgataaaagcttgtgtggggatctggcaagatggccaaatagaaacagctccagtctgcagatcccagtgagaccaacaccaaagatggatgatttctgcatttccaattgaggtaccctgtccattgcagggtagggcatcacctcacccgggaagtgcaaggggccagggacctccatcccctagctaagrgaagctatgagacattgtaccatccagcccagatactacgcttttcccatggtttttgcaatctgcagaccaggagattccctcgtgtgcctacatgaccagggccctgggtttcaagcacaaaacagcacaactgtttgggcagacaccaagctggctgcaggagtcttttttcataccccagtagcacctggaaccccagcaagacagaactgttcactcccctggaaagggggcagaagacaggaagtcaagtggtcttgctcagtgggtc

SEQ ID NO: 435820 - DNA, 529 bp, Homo sapiens
tttaacagtagacacctggcaaggctgtgcatgcacctttcattgcatgtcagccattcccatgataaaagcttgtgtggggatctggcaagatggccaaatagaaacagctccagtctgcagatcccagtgagaccaacaccaaagatggatgatttctgcatttccaattgaggtaccctgtccattgcagggtagggcatcacctcacccgggaagtgcaaggggccagggacctccatcccctagctaagagaagctatgagacattgtaccatccagcccagatactacgcttttcccatggtttttgcaatctgcagaccaggagattccctcgtgygcctacatgaccagggccctgggtttcaagcacaaaacagcacaactgtttgggcagacaccaagctggctgcaggagtcttttttcataccccagtagcacctggaaccccagcaagacagaactgttcactcccctggaaagggggcagaagacaggaagtcaagtggtcttgctcagtgggtc

SEQ ID NO: 435821 - DNA, 582 bp, Homo sapiens
gatgaacctcaaaataattatcctgaaagaagccaggcaaaaatgagttcatttaaatgaatatgatttcataaatataaaactttagaagaggaaaatcaatgaatagtaatagaaattaaatgagcagtgcctggagagtatgaaaggggacatgcaaaattttgggcatgatggatatgttcacttccttgactgtggtgctagatatayctgtatcaaagcttacatatggccaggcacagcggttcacgcctgtaatcccagcactctgggaggccaaggcaggcagatcatgaggtcaggagtttgagaccagtctgaccaacatggtgaagccccatcgctactgaaaatacaaaaattagtcaggcatggtggcacatgcctgtaatcccagctactcaggaggctgaggcaggagaatagcttgaacccaggaggcagaggttgctgtcagctgagatcacgccactgcactccagcctgggcaacagagcaagactgtctcaaaaacaaaaacaaaaacaaaaaaccacaacaacaacaacacaacgcttatatatatggttatatatacac

SEQ ID NO: 435822 - DNA, 590 bp, Homo sapiens
ttcaagcatattctttttaaagggtgttgattgcataaaaacatctttgaaaagacagtccactctgttggcaagatatacagaaatgtgagagacccatggagaagtgcctcctaacagagcccgtcttcctggtctatctttaatcattcctttatcccatctctccttcctaycccaagaaaagctcaaacaatgtttgtttaatggaacacttactgcatcctacctcacatttctttctttagggagataacttgtcaataaatggactcattcttactggaatggctgtgtgagtagccctgtttctagaactgtggagcttttcttcccaaaccaggatacctgtttgttagtaggttcctggtggagtgccatagggaaaaaaacccctggggttaaaaacggaacatctccctggatcacaatttttactagaaaaaaatggagaaaagcctattaacttttattaaaatacatgtaaatatattatgcagtgagtgcacattctcaaggattttaaagataaagaaaagatttctttgggcagtactgctacctctcccctgtcccagagcatagatgaa

SEQ ID NO: 435823 - DNA, 580 bp, Homo sapiens
tgtggccatattattgaagtgctttcactaattgtagacatcctaagctgtgagacagattacaatttataatgcagtttggcaatctcaagctctctctctctcttttgtagagtgaaagtttkggtggaaggaattgcaagaggagatgggtaggattagaaaaaaatatatagcccacctatctactgactataaaatgccttttggtggaggtgagaggctaaaagaggaagagagaaagatcttacaacccacatctatcaagctggtgatgtgactggctgatgagattagtcattagtgtgttgtgcctatgctgctgtttggagcctaatggtctgtttgctcgacagaaggggtgtcaattcttggagcacccatagcacataaaattgggttctaaataaaggaaagtggagcaaaatgtactgagtgcccactactgtaatatactttttcatgttcaacttcattacatcctctgagcagatgctgtgcttaagagaatgaatcctggagccaagctccctgtgttcaaattctggctcatgccaagtgtgagttgctgtccttgggc

SEQ ID NO: 435824 - DNA, 502 bp, Homo sapiens
gtaaggccatcagggtgagtcctaatccaacctgactagtgtccttataagaagaagaaatttcatcatataaaaaggatacaaggtttgcgcattcamagagaaaaggccatgtgaggacatagcaagaaggtggctgtctgcaagccagaagaagagccctcaccaagaactgtatgggctggcaccttgttcttagacttccagccttcaaaactgtaagacaataaatttctgttgtttaagccacccagtccatggtatttttgttatggcagccctagcaaactaatataacccctgtagcaaaagtgaacattcaaatacatttattggtaaagttctaggtggagggcattaaaggcagaaaaagggcctccatttttttttctattgttcttttaacccttctggctttcctcacaaattcaatgggggagcatattttaggacaatgttctagaaggctgtagtagctaccaaatatgttgtgtgttcctca

SEQ ID NO: 435825 - DNA, 577 bp, Homo sapiens
acccatgccccactgttccccactttcctaaatctttcttctgcgttctctggaaccccaatctgattaatccttacatattcagtctctcaaaacaattcatcttctgccttagttagaaatcagaagttccaacaggaggtctgtgaactgtttcaaggactcagtgaaatactttaaaagatttattgttttctttttgttatttttaaatacgtcattctaaactaaaaattgttactatattacaagaataatgcctcacatcatgtggctggcaagatggcagaataggaacagctccagtctgtagctcccagaaagatcaacacagaaggtaggtgatttctgcatttccaattgaggcacccagctyatctcactgggactggttagatagtgggtgcagcccacagaggatgagcggaagcagggtgtggcatcacctcacccaggaagcacaaggggttgaggaactccctcacctagccaagggaagccatgagggacggtgccatgagggacggtgctatccagcccagatactaggcttttcccacagtctccaaaacctaca

SEQ ID NO: 435826 - DNA, 596 bp, Homo sapiens
agacttgagactagagtgtgcctgatatttttgatagctttgggaataaaaaagcmtccatatgtctctgtgaatcattgctgtcgccattggtatgtgttggcatcaaatcttgttttccactgagaaaatcattaacttcatcaaataccaaacatgattgaaaccagtttttcctgaggtttcatcaagaaatgaaagcagaatgtaaaactttttaacaactataccagattttctgattttccacgaggtaaatcttgatgcatctaattaaattctgggcagatatttcattttgttttcaaagagagagaaaatgaaagacaattctaagcagtttaatttacagtctccctctccattccaagttctgccattattcccagaaagttgagcatatagatggacaatacatccaaaatctggcctcaaacattactttattttcataatttcaatgaatttcccaccattctagttctgctctccacatcccatggagcaggcctggtcttttttcatcacttgaaatgctcgtgtctggtttcttaaacaaaaatattgctatctgataaccacaagtcctatccttc

SEQ ID NO: 435827 - DNA, 596 bp, Homo sapiens
agacttgagactagagtgtgcctgatatttttgatagctttgggaataaaaaagcatccatatgtctctgtgaatcattgctgtcgccattggtatgtgttggcatcaaatcttgttttccactgagaaaatcattaacttcatcaaataccaaacatgattgaaaccagtttttcctgaggtttcatcaagaaatgaaagcagaatgtaaaaytttttaacaactataccagattttctgattttccacgaggtaaatcttgatgcatctaattaaattctgggcagatatttcattttgttttcaaagagagagaaaatgaaagacaattctaagcagtttaatttacagtctccctctccattccaagttctgccattattcccagaaagttgagcatatagatggacaatacatccaaaatctggcctcaaacattactttattttcataatttcaatgaatttcccaccattctagttctgctctccacatcccatggagcaggcctggtcttttttcatcacttgaaatgctcgtgtctggtttcttaaacaaaaatattgctatctgataaccacaagtcctatccttc

SEQ ID NO: 435828 - DNA, 517 bp, Homo sapiens
cacccctcataatcttcatatgaacagcatgaaaaaagctgacatgtttaaggactaaatttcccaatctaccttccatcttgtttttcacacacagaacttccaagcagaatcaccctccaggttagaggacagaggtgagtatggagaagtggcagccacacaggccatctgaaagcactggtagggaagcagcttggttatccagtggcagctttcrtggatgtccttctgccctggttttcaaccttgactggtgcacaatcatcactcacagcttttttgttttgtttcaataccatggctgggccctgctccagatcaattaaatgcagtctctgggggtgctgaccaagtaccagtacttttgtaaaacactccaggtgattctgacatgcagccaggattgggaaacattactctgaggtccagctggtccctaagtttctagttgccaagcctaggccatggtagctgcagctcatcctgattcagcagctttcctgcatgaccagtg

SEQ ID NO: 435829 - DNA, 517 bp, Homo sapiens
cacccctcataatcttcatatgaacagcatgaaaaaagctgacatgtttaaggactaaatttcccaatctaccttccatcttgtttttcacacacagaacttccaagcagaatcaccctccaggttagaggacagaggtgagtatggagaagtggcagccacacaggccatctgaaagcactggtagggaagcagcttggttatccagtggcagctttcatggatgtccttctgccctggttttcaaccttgactggtgcacaawcatcactcacagcttttttgttttgtttcaataccatggctgggccctgctccagatcaattaaatgcagtctctgggggtgctgaccaagtaccagtacttttgtaaaacactccaggtgattctgacatgcagccaggattgggaaacattactctgaggtccagctggtccctaagtttctagttgccaagcctaggccatggtagctgcagctcatcctgattcagcagctttcctgcatgaccagtg

SEQ ID NO: 435830 - DNA, 612 bp, Homo sapiens
aatccagtctctggtgccaaaaaagttggggatgactgagctagtggacaggagctctctcccactaatagtttccttctgtgcaagccactttgaccatcactatggcctttgtggtggaaaggaggtgaaaaaaatatattgtaagtgctggagaaactcaaatatcttataaatagtatctatttgccttgcctacaagataaaagtgaaaaaaagaacccctgacagaggaaagagatcaaagcagacctcaggaagttaggagaaatcttcagtctctgctatctccttccgattcctttcmtcctccttcagcagcatgtattataccagaaaggaaagtaatttggcatcgactaacacacatactgataagaaatcatcaaacatgtttccatcttcacctagcatgcacaggagccacagcaggagcttcaggtaataaacagacatcactattatctcaagcagtatatcaactggttccttcagtaatggcgtagatgggaaattctgcatcaccacttcataagtagggaaattgaggctctgggaaattacatcccttcctcaggtcagcccaatgcctaagtggcaggtcaagtttct

SEQ ID NO: 435831 - DNA, 548 bp, Homo sapiens
tagaaaattccaaccaaatttgcaaattgttactttgactcagatcctggtctccatttttgtctgccatctgacacattccctgtyaatttcttgagtttctcaactccaattactttcactccatatgttaaagctccccttgttttgaggcaaattttaattaggatggaaagactatttttctatataaacgaatccatacattggctatgccatttagggagaagctgcacctgcctgactgaggtcagcatctgccaccccagcctgttcatcaagccttctcttaccaaagccctcaacttggtaaggtgataaaattatctttacttctgaaaaccaaaattatctttgctcttgagacaccagctatgtttacctgctataccccaccaaggtcaaaatcaatacaatccacacttacaaaagccaaatgaccatttacaaaacctaatcttcatattgagtcccaatttctagtccttgtctagttttactgttctcagctaatccacaaagatgctgaggtttcatggggccaataa

SEQ ID NO: 435832 - DNA, 548 bp, Homo sapiens
tagaaaattccaaccaaatttgcaaattgttactttgactcagatcctggtctccatttttgtctgccatctgacacattccctgttaatttcttgagtttctcaactccaattactttcactccatatgttaaagctccccttgttttgaggcaaattttaattaggatggaaagactatttttcyatataaacgaatccatacattggctatgccatttagggagaagctgcacctgcctgactgaggtcagcatctgccaccccagcctgttcatcaagccttctcttaccaaagccctcaacttggtaaggtgataaaattatctttacttctgaaaaccaaaattatctttgctcttgagacaccagctatgtttacctgctataccccaccaaggtcaaaatcaatacaatccacacttacaaaagccaaatgaccatttacaaaacctaatcttcatattgagtcccaatttctagtccttgtctagttttactgttctcagctaatccacaaagatgctgaggtttcatggggccaataa

SEQ ID NO: 435833 - DNA, 533 bp, Homo sapiens
cctcttgtagtgggtagtattgtgtctcccagaaactgtttgtgtctccaaaaatgtcctagccctttgtacctgagaatgtgaccttatttggaaatagggtcttttagatctattcaagttaagatgagattatactgaataagggtgggcactaaatccaatgactagtgtctttataagaaggaaatttggactcagatagatacataggaaataacacmatctgacgatggaggcagagattggagcaaaatgtctacgagcctagccagaaatgccaaggatttccagcaactactagaagttatgaggaagcagaaaggatcatcctctagagctttcagagaaaacatggccctgctgatacattgattttggtcttccagccttcagaactgcaagagaactgtgtgttttaagccaccaaatttttggaaatgtgttatatacctttcaatttcatccaaattgttactgtaagagaggtgaactttttacctctaccctctaccctcttagagtcccagctg

SEQ ID NO: 435834 - DNA, 480 bp, Homo sapiens
aatccaatgactagtgtctttataagaaggaaatttggactcagatagatacataggaaataacaccatctgacgatggaggcagagattggagcaaaatgtctacgagcctagccagaaatgccaaggatttccagcaactactagaagttatgaggaagcagaaaggatcatcctctagagctttcagagaaaacatggccctgctgatacattgattttggtcttccagccttcagaactgcaagagaactgtgtgttttaagccaccaaatttttggaaatgtgttatatacctttcaatttcatccaaattgttactgtaagagaggtgaactttttacctctaccctctaccctcttagagtcccagctgggcatgagaattaaattgacataagatagattaacagaagagaagcatgtaacttttacatgatagaaggaaaygaaaacacaaagaagtgtcaaaaccaaaat

SEQ ID NO: 435835 - DNA, 532 bp, Homo sapiens
aagctaatctcaaagcttccagtacaattttatttgacctttagttaaagaccacctctaccaggcaactgactttgctacatccccttgggctgttgcagaagtcagatttcacagtgttcctttcattgttcggcttggaaacctaaaacctgttcatcctaaaagaaaccaacctgaaagtgccaattgaggcaataacaaaacatatatttcgtatttttgagaaaaaatacgcagggaagaaaaatgaagagaataaaatagctgtttatctgaaaactgtgtttttctatgctgagcactctgtttatagagccaatacatcatgtccaccaacaagtggaagtgaagcatgtttcttccacacattgtttgacayggaaagtgagtattttattggcattgggtaatttaaactcacatagtggtgtctgaagtatattagcagcataccatgcaaagactagattgttcagcaatttgtgtaccagagagaagcagtccaaaacaattcaggagagaggcaagg

SEQ ID NO: 435836 - DNA, 591 bp, Homo sapiens
tttttttggtgttgttgatataagtgcactacatttcacttcyacctacagagtagatcctattagtgttcaaaatatttgctgcccctccctgtgggggctgattgtaccttctctctccattgctattaagcttgtctctgcaagtttccttgagcaataagatatgaacagtagtgacatatgccacttccaaatagaagctataaaagccttcacatggttccacaatctctgactgccatggaaaaatgaaatattaaaagcttccacgctcttagaaaaaaactttatggaaagcataataacaagtaaacaccagaactctctaaacctatctaagcaatcaatgatggttctacagccgtggtaatagtaatgatcagaactgctcaagaacatcagccaatcagtgacaacctcttacttctaaaagtcattgattcaagaaaggatttataaaaggaagattccctgaatgtcaattaatcaataacagtatccccctagtaactatgcttctacagatgatgtcagcacactcccatactataaatctgccaatccccaaactccagtctttccaaaagc

SEQ ID NO: 435837 - DNA, 585 bp, Homo sapiens
gaatattagcaatgcaatgcattagatgcttaactctttccaaaggagagcctccagtctacaggaatctttaattaattgaagagggaacaattttaagaagacctccggagctttgcctattcaaatttcattcctctcttctcatccctgaccatgtaggccattcagtaagcaaatggattttaccttggttagcagcgctcattcacacagcatcacccctacctttgctgtctacactctggctttcactgctcaaattccaacaaaaccatcataaaacaaaataccacatttatttggataaatataaacaaagaaaatatttaaagctgctaatggtacactccccaaaaagagtsttctttatttcctaaatgggaaaatacatttatatacagtacatatatatctgcaatatgtagtgtatggttatctgcagataaacatcaccaaaataactttgcaatataagttgttcaatttaaataacaatagtattagtaattaagtatgatagttcaaaatagcatggaaatgtttacagtgtttttcacagaattattctattttaatgttgaa

SEQ ID NO: 435838 - DNA, 620 bp, Homo sapiens
gcaatataagttgttcaatttaaataacaatagtattagtaattaagtatgatagttcaaaatagcatggaaatgtttacagtgtttttcacagaattattctattttaatgttgaaaaattattcaaaattatcttctcattttgcatgtgaggacactgaatgatgaagtgacttgcctgaaggactctgcacactcagaacaagagccaaggtctcttctctcctggtccattgtatgtgtctgtatgtgttttacacaacatcacacacctcttaggtttttttataagtcttactggaaaattattgaagtgatcaactcaacacctacctggggccactataactcccttaaggatcamataaagatgaataagcgaatgagagaaactgacagcattcctgtcctgctgacctcagataccccagagcataactagtgacatcatctgtctcttcactccctaacagttcattgcttatattcttgacgtgaacctacacccccatcaggttgtagcaaaatgttcccaccatatgatccccctcatggctgtgtgtgcttcgctgcttcagtgcctgcccctcacccaaattctcctcaaattctgactaag

SEQ ID NO: 435839 - DNA, 519 bp, Homo sapiens
actgtgtcttctaagtcaacagagagggaaatgctgactgctggtgtttacctgcatagcagcagtcagcctgaagcaatgtgcccatgatcctacgagtattytagagggcctggcattttccttgatgttgtttgtggggccagtgctattccattgctgctgtgatattctgtgttcataaacctccaccaatttatttacgaaaataaatctatctcatctaagacgctggcaaaaattctttgtattatgcctgcctcccagaagttctttattcaaacagccacagacagacttgtaccatgaagtccgcaaagccccaactgccaacatcaccctgacaagaacatattgtgtacatcacagttgaaaaacaggagaagctgtgcagttggtttaaaaaaaaaaagtgctatcaagtttcaattagtggagttcaaattgtctactagaacaaggcttttcaaaatacttgtggtaaagaaccaattgcacactgataaaactgtaaatttc

SEQ ID NO: 435840 - DNA, 549 bp, Homo sapiens
gtaaattttactaccttctttatttttcatattaagaattcttgcccaactgaaagttttaaatctctcccacagattttcataaatatcacttctcttatgctataagtccattttacatattattgttaaaaggctatgtttagcaagcaatctagatgttatatatcaaagtgtctatagttaatgacaatatactacattcttgaaaaatgcaaagagtggatgttaagtgctttcatcacaaaaatgataactgtgaggtaatgcatttgttttttcctttttttgcttcttttttctttttacaaaccctgcatgtggcattcagtgcatttgttaattagctaaatttagctattccacaatttagacatacttcaaaatatcatgttgtacacaatgaatacatacaattatttgtcaaaaaaaaaaagaaaaacaaaaaacagcctagcacagtggctcrtgcttgatcccagcattttaggaagccaaggcagaggaacacttgagcctgggagtttgagaccagcctgggcaacacag

SEQ ID NO: 435841 - DNA, 610 bp, Homo sapiens
attctaggtaaggtggaacatttaagtagtgaggaaggaggaggattttaaataaaatgatcaggaatgcttaactatagtgcatcattttgcgtatggaaaagcaccagaaatctgaagatgcaagtacttaagcagaaatgaggctagatttctcatttttcaaaaagagatattaatatctgttctacattgacttccttagtgagcttctgtgattatcaaatgatatggatatagaaatrtaccgtagcttctgaaatattacacaaaatgcaaggaattattttgggcaccaccaccgaggaatgatctggtagggaatgtgaagcaatcaacagtcagcagaatgaaagtcataatttatctagaggctcactgttggctattaagaacaggtagaatgtggctaaaccagcgtgtgctgttggattattgtggtctgcagtgcataagaggttaagacaaccgatttgaaatctaatggaatttctgtgtgtagtttgaagtctgctcacagttactcctcggggctataatgtgatttgaagtggaggagagaatgaaggcgtaaagtatgtttcaggaatccgtgtacaaagcaaacagc

SEQ ID NO: 435842 - DNA, 610 bp, Homo sapiens
attctaggtaaggtggaacatttaagtagtgaggaaggaggaggattttaaataaaatgatcaggaatgcttaactatagtgcatcattttgcgtatggaaaagcaccagaaatctgaagatgcaagtacttaagcagaaatgaggctagatttctcatttttcaaaaagagatattaatatctgttctacattgacttccttagtgagcttctgtgattatcaaatgatatggatatagaaatgtaccgtagcttctgaaatattacacaaaatgcaaggaattattttgggcaccaccaccgaggaatgatctggtagggaatgtgaagcaatcaacagtcagcagaatgaaagtcataatttatctagagsctcactgttggctattaagaacaggtagaatgtggctaaaccagcgtgtgctgttggattattgtggtctgcagtgcataagaggttaagacaaccgatttgaaatctaatggaatttctgtgtgtagtttgaagtctgctcacagttactcctcggggctataatgtgatttgaagtggaggagagaatgaaggcgtaaagtatgtttcaggaatccgtgtacaaagcaaacagc

SEQ ID NO: 435843 - DNA, 558 bp, Homo sapiens
ggctataatgtgatttgaagtggaggagagamtgaaggcgtaaagtatgtttcaggaatccgtgtacaaagcaaacagcatctggccaatcactttggtgtgcatgaattctgggaaaaggatcaccagagtgttcaggaaaactgacttggcaaagccataaacttgaaagacaaaagatggcaggacaacacggagcaaaacaaagggttataggctttaaggttgagcagatccctggtttggctaataggagtgacaaatcttaattttttttaaaaaaaggtggcatattaaaatactcagattatacccactcactatctttgcagttataaagtttttccttatttctaacctcctgcagcaatttaagcctgtctccttttttacagtggtcataaaattattcagcctccttttaaaatacaactactgcatttgactctctgatctcctgcagcactgaattccactgtgtgcagaagtatttcattttattggtttttaaattttcttgctgcgccattcatatgaatacttattctcatattgtgc

SEQ ID NO: 435844 - DNA, 558 bp, Homo sapiens
ggctataatgtgatttgaagtggaggagagaatgaaggcgtaaagtatgtttcaggaatccgtgtacaaagcaaacagcatctggccaatcactttggtgtgcatgaattctgggaaaaggatcaccagagtgttcaggaaaactgacttggcaaagccataaacttgaaagacaaaagatggcaggacaacacggagcaaaacaaagggttataggctttaaggttgagcagatccctggtttggctaataggagtgacaaatcttaattttttttwaaaaaaggtggcatattaaaatactcagattatacccactcactatctttgcagttataaagtttttccttatttctaacctcctgcagcaatttaagcctgtctccttttttacagtggtcataaaattattcagcctccttttaaaatacaactactgcatttgactctctgatctcctgcagcactgaattccactgtgtgcagaagtatttcattttattggtttttaaattttcttgctgcgccattcatatgaatacttattctcatattgtgc

SEQ ID NO: 435845 - DNA, 557 bp, Homo sapiens
cttatttatttttttctggagatggagtctccctctgttgcccaggctggagtgcagtggcacgatcttggctcactgcggtctcggctaactgccatctctgcctcccgggttcaagcgattcacctacctcagcctactgagtagctgggattacaggttcacgccagtatacccagctaatttttgtatttttagtagagacagggtttcaccatgttggccaggatactctcgatctcctgaccttgtgatccgcccacctcagctgcccaaagtcctgggattacaggcatgagccagygcacctgaccaagataatattttaatgcaatatttacaaaatcaaaatttagtgcaaaaaatccataataaacaaactatcaaaattttaagtaaaggcaacaacagtataactgatttttttcttttgtctcagggttcaatatagcttggcatggtactctgtaatggtacataactccagattttcccatctactggaacgtaataacatgtaactgctgtctgctgtgtaaggtttattccctggcata

SEQ ID NO: 435846 - DNA, 616 bp, Homo sapiens
agttcttagaaatacataaggtgtggaatgtatgttaaaaacaaaacaaaacaaacaaaacaaaaatgcctagagtatgacacttgtttccctgggcattacattcctattgatatcactgaagacactgctcagtgaattgaaaattatgckattttgtcgtgctttttctgaagctcagataactaatatataaagtggtgatacttttgtgtgttgttttatttgatataattttttaaaccacagacccaaagaggaagaagaaaaacatacaatttttataaaatcataattattttaaatggacaaatatatagaacttgaaaaataaggactaatcatatacctgatatgaccttacactactataatgtggggcagctcataatattactactgggctagcctaatcactcactcctcttcttctcaagactcttacctaagttgaaaactatcacagcaaggcaggatgagtttaaaataactgccctattcagtttagctcaactgcagaattgggcttggtattgagaccaaaatggacctccttctccatccccactctcttgaattaatgtacccagttgcaagagcaagatgtggaacctga

SEQ ID NO: 435847 - DNA, 573 bp, Homo sapiens
gttaattccacccaagaaataaatgtggccaattcragtcagtttcttaccagaattagtcactggtggagaaagcctgaaaattcagactggtagaacaatttcctgtagaagacagaggtattgataaaaagccaattttgtaagcctagctccttttcctaaacaacagacatgtacttgcttgagatcactgtctaaataactaattgtcaacaatttcaagggttatggatatcagcaggtttcagaaaagattagggacagctcttagagattaaacaaataaagcagaacaaaacaaaagttagcagtggcttagacaagagggaaatacatttattttcatgtcacagtctagaggtagatagcttagggctggtgtggtatcagaactcagatttcctctgtcttgttctaccattttttgtgtcttctatcgttcagatcacctgatggtgaacaagggttagtccagcttctgtcagcccatcagcattctagaaagcaagaagaaagaacaaatcaaaaagggataaaggtaggcatcagctgcctcttaattaaagcatt

SEQ ID NO: 435848 - DNA, 623 bp, Homo sapiens
tggagaaagcctgaaaattcagactggtagaacaatttcctgtagaagacagaggtattgataaaaagccaattttgtaagcctagctccttttcctaaacaacagacatgtacttgcttgagatcactgtctaaataactaattgtcaacaatttcaagggttatggatatcagcaggtttcagaaaagattagggacagctcttagagattaaacaaataaagcagaacaaaacaaaarttagcagtggcttagacaagagggaaatacatttattttcatgtcacagtctagaggtagatagcttagggctggtgtggtatcagaactcagatttcctctgtcttgttctaccattttttgtgtcttctatcgttcagatcacctgatggtgaacaagggttagtccagcttctgtcagcccatcagcattctagaaagcaagaagaaagaacaaatcaaaaagggataaaggtaggcatcagctgcctcttaattaaagcatttagaaactgctatgtgacttatgcttgtatcccatttggtaaatctaaagccatggccatacctaacagcatgggaagctgggaaaattgaaatacttttagtggcaaggtaccca

SEQ ID NO: 435849 - DNA, 473 bp, Homo sapiens
gatatttaagaaattcttatcaatttcataatttatgaaccaaaaataagtgaaaacataatagaaagaaacaggaaatatttttgttagttgcagaagatataatgcaaaagttctagaaaagcaattgattgaaaaatagaattcatagaggagcttatcaaagtggaagagtaagagatgtatgtgaaaacatctgttccaattctacataccaaattcaagaattcccatttaaaaaaaaactgtaagaattattycagtgagaaaagtaagagacctatagggataaaactgtaaacatttattttatgtttatatctaatatatatttccattattatttcatatttctcaatagtgtcaagattttaaatctgctgatattaatctatagacttagttcaattagaataaaaattgtaatggaatcagtttttgaatattgaggaaattaaactaatctgtaagaa

SEQ ID NO: 435850 - DNA, 612 bp, Homo sapiens
tgcaattagggagtaatttataattataagcaatgcttataagttgtcagaaatttcttgatgatagtaaacccatatcctaagaaacaarcaaacaaacaacattaaaatagttttaaaaggctatttttgaaagctttaaaatagcctgtatatccatcagcacagaaatgggaaagcaaattatggcccacatacagggaactcaatgctgccattaaaatgatgatcatgaagattacataacagcatggaaatacttatgataattccatcaaaaaaaaaaacaaaaaagcaaaatataaaatcgtgttcatggtagcaaaagaataaaactggaaagaaatccactaaatcaataacttagtatctctttttaaacaactgtcgacaaagagtcaaactaaaatatttgaagagatttctgagccaaatatgagtgaccaatggcccatgacacagccccaggagatcctgagaacatgtgcccaagttggtcgggttacagcttggtttatacattttatggagacataagacatcaatcaatacacgtacaacggttcagctcagaaagacaggacaactggaagcgggtggggctttcaggtc

SEQ ID NO: 435851 - DNA, 606 bp, Homo sapiens
ttattctatggtagttctggaggccagaagcccaaaatcagtatcactgggccaaaatcaaggtgtgggcraggacacctctctctatgcaggttctagggaagactcctttgcctctttgagcttctggtaaccctaaggcttccgtggcttgtggccacatcagtgcaatccctgctttcatggtcatatcgcttctcctctttgtccatatcaaatgtccctctgtgtctctcctacaagcacacttgtgattgcatttagggcccattcatataatccaggatcattttcccatgtcaagaccattaacttaatcacatctgcaaagactctttttccacattaggtgacatttacaggttccaggattgagaacctgatatctttggcagctgttgttcttctaaggtagggtgctagatcaaggtaggtatgtgtctaatttctaacctctctaaaactacttaaacaatttgtcattttaaaaatgtaaggcaattttttcaaaaggtgtagggccagtaaatactactcagtgtaatttaatgtactcaccatgttggttgtgcagttcttttgtaatgaatggagaattttctggtt

SEQ ID NO: 435852 - DNA, 606 bp, Homo sapiens
ttattctatggtagttctggaggccagaagcccaaaatcagtatcactgggccaaaatcaaggtgtgggcaaggacacctctctctatgcaggttctagggaagactcctttgmctctttgagcttctggtaaccctaaggcttccgtggcttgtggccacatcagtgcaatccctgctttcatggtcatatcgcttctcctctttgtccatatcaaatgtccctctgtgtctctcctacaagcacacttgtgattgcatttagggcccattcatataatccaggatcattttcccatgtcaagaccattaacttaatcacatctgcaaagactctttttccacattaggtgacatttacaggttccaggattgagaacctgatatctttggcagctgttgttcttctaaggtagggtgctagatcaaggtaggtatgtgtctaatttctaacctctctaaaactacttaaacaatttgtcattttaaaaatgtaaggcaattttttcaaaaggtgtagggccagtaaatactactcagtgtaatttaatgtactcaccatgttggttgtgcagttcttttgtaatgaatggagaattttctggtt

SEQ ID NO: 435853 - DNA, 554 bp, Homo sapiens
gtaaatatttcttatcagacctaaaggttctgttcaagcactctcaaggtctctgttttaatgctaatgttggtcagctgtgcctgaattccaacaggaggagggtatattgaggaawgtctgacccttacttcccattatgtcctgaactagttttttgggttaactttggaatgcccttggcagaggggagggtttctcagttggctgggggcttcgaattttatttttggttctctttttttttttttttgagacagagtcttactctatcacccaggctggagtgcagtggcatgatctcatctcactgcaacctccacctcccgggttcaagcgattctcctgcctcagcctcccaagggactacaggcgtgtgccaccatgcccagctactttttatttttagtagagatggggtttcattatgttggccaaggtggtcttgaactcctcacctcaggtgatctatccatctcagcttcccaaagtgctgggattacaagtgtgagccactgttcctggcctattgttggttttcactacagcaaaaa

SEQ ID NO: 435854 - DNA, 606 bp, Homo sapiens
ttattctatggtagttctggaggccagaagcccaaaatcagtatcactgggccaaaatcaaggtgtgggcaaggacacctctctctatgcaggttctagggaagactcctttgcctctttgagcttctggtaaccctaaggcttccgtrgcttgtggccacatcagtgcaatccctgctttcatggtcatatcgcttctcctctttgtccatatcaaatgtccctctgtgtctctcctacaagcacacttgtgattgcatttagggcccattcatataatccaggatcattttcccatgtcaagaccattaacttaatcacatctgcaaagactctttttccacattaggtgacatttacaggttccaggattgagaacctgatatctttggcagctgttgttcttctaaggtagggtgctagatcaaggtaggtatgtgtctaatttctaacctctctaaaactacttaaacaatttgtcattttaaaaatgtaaggcaattttttcaaaaggtgtagggccagtaaatactactcagtgtaatttaatgtactcaccatgttggttgtgcagttcttttgtaatgaatggagaattttctggtt

SEQ ID NO: 435855 - DNA, 606 bp, Homo sapiens
ttattctatggtagttctggaggccagaagcccaaaatcagtatcactgggccaaaatcaaggtgtgggcaaggacacctctctctatgcaggttctagggaagactcctttgcctctttgagcttctggtaaccctaaggcttccgtggcttgtggccacatcagtgcaatccctgctttcatggtcatatcgcttctcctctttgtccatwtcaaatgtccctctgtgtctctcctacaagcacacttgtgattgcatttagggcccattcatataatccaggatcattttcccatgtcaagaccattaacttaatcacatctgcaaagactctttttccacattaggtgacatttacaggttccaggattgagaacctgatatctttggcagctgttgttcttctaaggtagggtgctagatcaaggtaggtatgtgtctaatttctaacctctctaaaactacttaaacaatttgtcattttaaaaatgtaaggcaattttttcaaaaggtgtagggccagtaaatactactcagtgtaatttaatgtactcaccatgttggttgtgcagttcttttgtaatgaatggagaattttctggtt

SEQ ID NO: 435856 - DNA, 561 bp, Homo sapiens
ctcatgtatcctggggtttctctttagtggtatatgttcaaatgagtgtcatccataacttactgacatctttcacyccatccccataaaattaattatcaagtcatgccaattttactgtaaaatttctcagatgtttctagtccactcattatcttacttagggccttcatttttcctcctgtggacacctaaacagcctcctatttacactgcctgctcctacttcacagtctacacagctaccaagataatctatttcaactatccatttgacaatgtcagtgcatgttaaaaccattcaatgatttctagtttccagttttgactgctaagacttgttttttagaagaaagctatgaggccctatgtatagcgctgatccaactgaatcagaggaagaaaccagagtctctcccccttggacaatcccttacactttgcccttctctgtgaccccagggcaccttccctatacccctgcaggattagaatgaccataataatttatcctacaaaggaggacacgtttgcaagtgaatgacaaatttattactaatt

SEQ ID NO: 435857 - DNA, 438 bp, Homo sapiens
aagacttcgtccttgtttctctatttcccctatcagaaccactgtaacaacacctctttaccctggcagggacagttgattcagcagcaattggttccagtttgcagatttttacagtgcyggaaccagccttatcatttactctcagatacgctaacatcagcctctagcaccctctccaaagactgtgtccaagctccacgggagccttcctctgagcctgtaagctagccctgtccaatgaaataacaggcaagtcacatatgaaattttaaactttctagtaatgacattatagatatttcaatgctattacaagaaagtcatgatttgttttaagtaaaaaagaaataggtgaaataaatacatgtttaacccaatgtatcaaaaaatatcatttcaacatataagcaatctaaaaattattgagatatttta

SEQ ID NO: 435858 - DNA, 469 bp, Homo sapiens
ctacactccagcttgggtgacagagtgagacctcatctcaaaaaagaaaaaaattacataacattcatttaagtgttttgtaaactgtaaagttccatgaaaatgaagcactctatcatgtataattccaaatatttgtttccaaatattttattattttaaaagtagagagagttactaaatatctcaaactaccttcacttgctcctaaattgaatgattttttttttttttacattcttctgtgctcttccataactggttggttacaggctataaaaataagaatttctgacttttttttttcagatrtatgctattcatacaagacatttcaaaccttagagttaattttaacccaggaattttcaattttgttgacagacaaagtattgcatatttgcatactatctactttgctgaatgttcgtgtgttttgcctactgcatattcagtactgattcaagat

SEQ ID NO: 435859 - DNA, 587 bp, Homo sapiens
agtctgagtttattatgtgtgctaaaggtactaggatttgaggctataatgatgaaaatatgtgttcctgtccttacagagtttatagtcaagtggaaagatagataagtgaaaaacaaattcaatacaagatgatgatcctcataatagacaaatgactaaggaagggcagaaataaggagtagaggatgaagagggcaaagaaggaaagaatgaaatgtttattcaaagcagaaagaaaactaacataatgagtatctgctttatgaactgtgctaggttctctgacatatttaatcattgcaaaatattataaaatattactattagtgtcacccagactgaaagcctgagaagataagaggcttttaaaaggtcatgcaartaatgctgagttcatagtaacactgataagctgtatcattgagtcaaacactagctacaaatgtattatctaaaacattatttctatcgaaagaaaaaaaaaacccaggttcctcaaaaacccaggttccacctcttttttattttaaacagaatatcttagcattcctgaaatatcaataggctgaagtccattttggcac

SEQ ID NO: 435860 - DNA, 587 bp, Homo sapiens
agtctgagtttattatgtgtgctaaaggtactaggatttgaggctataatgatgaaaatatgtgttcctgtccttacagagtttatagtcaagtggaaagatagataagtgaaaaacaaattcaatacaagatgatgatcctcataatagacaaatgactaaggaagggcagaaataaggagtagaggatgaagagggcaaagaaggaaagaatgaaatgtttattcaaagcagaaagaaaactaacataatgagtatctgctttatgaactgtgctaggttctctgacatatttaatcattgcaaaatattataaaatattactattagtgtcacccagactgaaagcctgagaagataagaggcttttaaaaggtcatgcaaataatgctgagttcatagtaacactgataagctgtatcattgagtcaaacactagctacaaatgtattatctaaaacrttatttctatcgaaagaaaaaaaaaacccaggttcctcaaaaacccaggttccacctcttttttattttaaacagaatatcttagcattcctgaaatatcaataggctgaagtccattttggcac

SEQ ID NO: 435861 - DNA, 513 bp, Homo sapiens
tataagaattaaagcatttaacaccacgcagcatggtatataatgtcatatggtttaggatacactgtatatttagaacaccccataattattagttccatcctttcccattcctatctcctcacttcccactcccagcctggaggcgagctgggcaagaaccaagccctttagtgttaggatttgattagtcatggagctgaatgagtgagagctctcaacgataygaattaatttacacagtggggaggccaggagaactacattcttagcatctactctgtgcaaggtattttgtaaacattagtggaattaatcttcataacaaacatacaaggtaaacattttcatcttattttataaataaagaatctgaggctctgaaaggttaagtaattcaaggaactcacataagatcattaattgtttcataatcagtaattgtttctcagacgtgcttgattctggaatctctttgcactctatcactttgtcttccttgatgctgcttcc

SEQ ID NO: 435862 - DNA, 513 bp, Homo sapiens
tataagaattaaagcatttaacaccacgcagcatggtatataatgtcatatggtttaggatacactgtatatttagaacaccccataattattagttccatcctttcccattcctatctcctcacttcccactcccagcctggaggcgagctgggcaagaaccaagccctttagtgttaggatttgattagtcatggagctgaatgagtgagagctctcaacgatatgaattaatttacacagtggggaggccaggagaactacattcttagcatctactctgtgcaaggtattttgtaaacattagtggaattaatcttcataacaaacatacaaggtaaacattttcatcttattttataaataaagaatctgaggctctgaaaggttaagtaattcaaggaactcacrtaagatcattaattgtttcataatcagtaattgtttctcagacgtgcttgattctggaatctctttgcactctatcactttgtcttccttgatgctgcttcc

SEQ ID NO: 435863 - DNA, 581 bp, Homo sapiens
ttcctaaaagatttgtttttactctgtctcctaataacttaaaatgcaatttagaataaaccctctagttattgaattgtttcagaaggtctattaaagcaaagtaattagcaggaagacagaggaatagagatactcargcttctgtctgctttactgtatggatctattgaacatttcacaaggaatgttcactgaaaaacttaatatataaatggctgagctcctttctttctttcttttttcccatttttctctccctcttccacccttctttccttcctttgtttcttctttccttctttcctcactccccacttccctttcttccaccgtccctcccttccttctttttttcattcaatagttactgaatctatgtgtgtgtcatttagtcctgcttccagaggtgaagaccagttaagaaatttaacatatatatgagaagaaagaaggtaaataaccattgtaaagcagtttgataaacgcagcgttagaaatatgcatagataccatgggaagaatcttctactcagtctgaatccagtggtatgatgaaaagtaagcattaagattagcaa

SEQ ID NO: 435864 - DNA, 561 bp, Homo sapiens
ttcaaaattttgaaaaggttggaatgattgtactatttaacgtgttaacttaggcccttaacctgtgttaacacatgccccgctataaaagatgaagaaattagtccacttccaattcttctcaccttctaatttttttaattgtatgtgattactttgccaagatttataacatttccctaccgcatttcccactggctcaggccagccataatcaccctyttgttattccctaaccctgccaatatcatttatgccttagattccttttacttgcttctgcttcttcctagcacattctgccccccagatattttccaggctggcatcttctcgtcttccaggtctcagctcaaatgtcatcctctcagagaggcctccctcaccaacggagcctcaaaataaactcaacatattactttgttctaatttctcaagataatttatcaccattagaaatccccttccccagcactttaatttctgtcttcccacactatcgtgtacatttcataacaaaaagaatattttgttcactacttctattcagaactgcaacac

SEQ ID NO: 435865 - DNA, 561 bp, Homo sapiens
ttcaaaattttgaaaaggttggaatgattgtactatttaacgtgttaacttaggcccttaacctgtgttaacacatgccccgctataaaagatgaagaaattagtccacttccaattcttctcaccttctaatttttttaattgtatgtgattactttgccaagatttataacatttccctaccgcatttcccactggctcaggccagccataatcacccttttgttattccctaaccctgccaatatcatttatgccttagattccttttacttgcttctgcttcttcctagcacattctgccccccagatattttccwggctggcatcttctcgtcttccaggtctcagctcaaatgtcatcctctcagagaggcctccctcaccaacggagcctcaaaataaactcaacatattactttgttctaatttctcaagataatttatcaccattagaaatccccttccccagcactttaatttctgtcttcccacactatcgtgtacatttcataacaaaaagaatattttgttcactacttctattcagaactgcaacac

SEQ ID NO: 435866 - DNA, 561 bp, Homo sapiens
ttcaaaattttgaaaaggttggaatgattgtactatttaacgtgttaacttaggcccttaacctgtgttaacacatgccccgctataaaagatgaagaaattagtccacttccaattcttctcaccttctaatttttttaattgtatgtgattactttgccaagatttataacatttccctaccgcatttcccactggctcaggccagccataatcacccttttgttattccctaaccctgccaatatcatttatgccttagattccttttacttgcttctgcttcttcctagcacattctgccccccagatattttccaggctggcatcttctcgtcttccaggtctcagctcaaatgtcatcctctcagagagkcctccctcaccaacggagcctcaaaataaactcaacatattactttgttctaatttctcaagataatttatcaccattagaaatccccttccccagcactttaatttctgtcttcccacactatcgtgtacatttcataacaaaaagaatattttgttcactacttctattcagaactgcaacac

SEQ ID NO: 435867 - DNA, 557 bp, Homo sapiens
cctctcagagaggcctccctcaccaacggagcctcaaaataaactcaacatattactttgttctaatttctcaagataatttatcaccattagaaatccccttccccagcactttaatttctgtcttcccacactatcrtgtacatttcataacaaaaagaatattttgttcactacttctattcagaactgcaacactatagaggagatctgtattttgctctagattaaaggcttgtgtcaggacccagaaactctcttctctcaagctaggcatcaaagatttgggaggtgtgcttactattttgcagcttagggttgtttcactattttcattgcactgcaaatcgttttttaaaagtttacctctattcttctttttgttattattgctttttttgaagtattttgatagaggaaatttaactaaaatccttctacgtcaacattatcaatttgtattccaatgcagtttggcattgaccaaaatgttgttatagtgcacatgattgatatggtaagagtgggtaggagtagcaatggaccagcagtacctg

SEQ ID NO: 435868 - DNA, 557 bp, Homo sapiens
cctctcagagaggcctccctcaccaacggagcctcaaaataaactcaacatattactttgttctaatttctcaagataatttatcaccattagaaatccccttccccagcactttaatttctgtcttcccacactatcgtgtacatttcataacaaaaagaatattttkttcactacttctattcagaactgcaacactatagaggagatctgtattttgctctagattaaaggcttgtgtcaggacccagaaactctcttctctcaagctaggcatcaaagatttgggaggtgtgcttactattttgcagcttagggttgtttcactattttcattgcactgcaaatcgttttttaaaagtttacctctattcttctttttgttattattgctttttttgaagtattttgatagaggaaatttaactaaaatccttctacgtcaacattatcaatttgtattccaatgcagtttggcattgaccaaaatgttgttatagtgcacatgattgatatggtaagagtgggtaggagtagcaatggaccagcagtacctg

SEQ ID NO: 435869 - DNA, 557 bp, Homo sapiens
cctctcagagaggcctccctcaccaacggagcctcaaaataaactcaacatattactttgttctaatttctcaagataatttatcaccattagaaatccccttccccagcactttaatttctgtcttcccacactatcgtgtacatttcataacaaaaagaatattttgttcactacttctattcagaactgcaacactatagaggagatctgtattttgctctagattaaaggcttgtgtcaggacccagaaactctcttctctcaagctaggcatcaaagatttgggaggtgtgcttactattttgcagcttagggttgtttcactattttcattgcactgcaaatcgttttttaaaagtttacctcyattcttctttttgttattattgctttttttgaagtattttgatagaggaaatttaactaaaatccttctacgtcaacattatcaatttgtattccaatgcagtttggcattgaccaaaatgttgttatagtgcacatgattgatatggtaagagtgggtaggagtagcaatggaccagcagtacctg

SEQ ID NO: 435870 - DNA, 586 bp, Homo sapiens
aactctctgaaagccaaaaatactaaaatactcctatatactccctcacacaatggaaaagtgttcagagatgaagatctacttaaaatttctaaacaaggagagaatagaaattttttgaccctgcatattcatagcgccttaagaaagacttttgttgaagtggttgttatattctttacatcaagagtttatcataaacactgcttgaggcaatctcagatcataagggctttcttacacaaaraaaacaaaaattcgtgctgctccactggcacttttataaattctatatttactttacaaatagtaaaatgtcgacaagcaaaagtgtaaaagacagccacaaattaacattatttaacaacattcagaaccagtctaattttataatgattagagaaaggttacaaacatataacacaaagaaaaataagagatctgaaaatgccaaattgaaaccaaagctaacactattggaaatgttactgtgttgttcatttaagcttctaagtcctttgactggcgatataagcttagtgcaaatcaaagcaaaaagtaacatagcatcaaagtttgctcacat

SEQ ID NO: 435871 - DNA, 617 bp, Homo sapiens
ggggccaaacgtgagagaagtaagcttagagaatttggatttttaagagaccagatgttgcgggagtgtacaggagttttggaactgtcagaggggcacatcaggcctctgatagagaaggagaaagggaaatggagtgtgtgaacrgtcttgattgatttcccttgtggaggcaactatcagtacagagctagatagctgccaatcagttatggtatcatctgaatgtaaaggtaaagttttcccaagaacgtctttcaggaaggatattatatgtgtgtatcatggagataagaaattttgtctatttcagtcatttctatactccaaaaacactacctagcatatagtaactgttcaataaatattaataactgttggattaatggataaatgaatgaatgcatgatagattcaaaagaccatattaagaagcttagctccttaattaggaaggtatgccccataaattcaaaagaccatatcaagcttagctccttaataaggaaggtatgccccattgcttacagcgttttctcttgtggagaagggtaagcaaattagggagcagggctgattttctcaagtctgtagaaaaaaagcctgagtgcacctac

SEQ ID NO: 435872 - DNA, 411 bp, Homo sapiens
cctagctgaagaattgtatttcccaaccacatttgtaaatccaagtagtcactgtgatgtaagagacctccagggaaactcttttgcccctggctcttactattattatccctgcctggaatgaagacatgatggctggagctccgtgagtcatcttgtaattttgaggatgctggaacagaaagctattataaggccaggtctctaatgattttctggagctgccataccagctctggaatttccagctccaggcttgaattrtgtggaagaaaaataagtttctatcttgactatgtgactatagttgggtcagttgccagcataatttcagtgttgtactcccgttagatgaagcatgtgtacagctgaatcagtagaagctaaatacgtgtcctttggaggaagaag

SEQ ID NO: 435873 - DNA, 411 bp, Homo sapiens
cctagctgaagaattgtatttcccaaccacatttgtaaatccaagtagtcactgtgatgtaagagacctccagggaaactcttttgcccctggctcttactattattatccctgcctggaatgaagacatgatggctggagctccgtgagtcatcttgtaattttgaggatgctggaacagaaagctattataaggccaggtctctaatgattttctggagctgccataccagctctggaatttccagctccaggcttgaattatgtggaagaaaaataagtttctatcttgactatgtgactatagtygggtcagttgccagcataatttcagtgttgtactcccgttagatgaagcatgtgtacagctgaatcagtagaagctaaatacgtgtcctttggaggaagaag

SEQ ID NO: 435874 - DNA, 588 bp, Homo sapiens
taacttgtctcagctcatgttgaaaaaaagacaagattcagaatatctaataagagaattttcaaatatgataaaaggggtcatgtctggccaacttaaaaaaaaagagaaagaaaaattcgtccttaatcatggtttaaacaccattgttttaggttatgtcagtggtaggggtcacttctagtttctagcccaacctgtaaagagcatgcaagtcatcactcccatcttcacaagaaaaaaaaaaaaaagctgaaaagctgagcaaaatgagaatcaacaactcttcttacatccttcaraaaattgaggtcacaggacaaagcaccatccccaaaatatgaaagacatagagaatcacagcttaccagaaacagaaacctcagctagcaccagcactggttaggagttcttaaagggtagttgactaattgctgaagagtaaacgtggactagcttaagaaagaaaaacttctggcagccttgggggtgccctcacacttttatgagttttaccttgagtagcctcacaagattcttagtgagatatcaatgaaaaacaaaatcaccttatcttccagtaaggga

SEQ ID NO: 435875 - DNA, 588 bp, Homo sapiens
taacttgtctcagctcatgttgaaaaaaagacaagattcagaatatctaataagagaattttcaaatatgataaaaggggtcatgtctggccaacttaaaaaaaaagagaaagaaaaattcgtccttaatcatggtttaaacaccattgttttaggttatgtcagtggtaggggtcacttctagtttctagcccaacctgtaaagagcatgcaagtcatcactcccatcttcacaagaaaaaaaaaaaaaagctgaaaagctgagcaaaatgagaatcaacaactcttcttacatccttcagaaaaytgaggtcacaggacaaagcaccatccccaaaatatgaaagacatagagaatcacagcttaccagaaacagaaacctcagctagcaccagcactggttaggagttcttaaagggtagttgactaattgctgaagagtaaacgtggactagcttaagaaagaaaaacttctggcagccttgggggtgccctcacacttttatgagttttaccttgagtagcctcacaagattcttagtgagatatcaatgaaaaacaaaatcaccttatcttccagtaaggga

SEQ ID NO: 435876 - DNA, 561 bp, Homo sapiens
cttaattaaagaatgaatgattgaatattcagttttaattgatgttgccccatgctattattttgcatgtttatagatgtttcatgtgattctgttatcagaataaycaaagagagagacattgactactgagcctaaaaaagaggagggcatctgcctgatcacattcagccatttaagttcaagaatcatctgaagcgtggtttccatgacaacaagtcactaattgcaaacataaaataaagtaaaaaatcaaccttccttgaatttggcagctacaaagatgatgtctaatttttttaaacagtgaaatggcacttttccttagggaatccctcgagtcatcttcccgaatccaagaaggtactccattgtagggttaattctagtctggcaaaggtgtcagctgcaagctgcccagatgtgccaggctttgattaccaacacctagcttttggtaaagataagaggagatggttacaatgaggaatgaaggatttttgtatttctgagctacagaacagaagagagctgctgaggcagataaattaaccaaagaaa

SEQ ID NO: 435877 - DNA, 489 bp, Homo sapiens
gataaaagtcacctgactatatcaatttcactttagagtctgaaattctaaggakctgtacatgtatccaattgtcagtgatgtgtcattgattgttttttaacaatcttttgtattgatgtgttttgcaaggtgtttttctcctctttaaatcttccttcagggaagctgaaacaagctggtgagcatgtatgtgtgtgaaccttaaaaaaaatcctaggaaggcaacaaaggctgaaatgtgagcacacatgttaagtattctaaaaacgttaatgtttatggaaatttcagcattcttaatttccaaaattattgagtgaagacagtatagcataaaaaggaaagcaatatggtatagcagctagaagtgtaagatttactgtcagatcagtcttcaaatccaggctgtatcatttactatgtgatcttgacaaagtgacttgatcatcctgagtctcagttacctttcctataaaagatggaaaa

SEQ ID NO: 435878 - DNA, 577 bp, Homo sapiens
ttttatgtaaatcttatggtaactacaaagcaaaaaatctatagtagatacacaaaatataaagwgtaaggtatcaaagcatactactagaaaaaaaaatcatctaatcacaaaagaagacagcaagagaggaagaaaggaacaaaagatctacaaaacaattagaaaaaatggcaaattatctgtagtaagtcattacctatcaataattatcttgaatgtaaattgattaaattctctaataaaaagatatagagtggccaaatggatttttaaaaaagacccaactatgtgcttcccataaaagactcatttaacctttaaggacatacatagattgaatattaaaaaatggaaaaatgtattccatccacatggaaaccaaaagagagcaagggtagctatatttgtatcagataaaatagacttgaagtcaaaagctgtaaaacaagaccaaaaaagtcattatataatgataaaggaatcagttcaacaagaagatataacaattataaatatatatgcatcaaatatcagagcacctaaatatatcaagcaaatgttaagagatctgaag

SEQ ID NO: 435879 - DNA, 577 bp, Homo sapiens
ttttatgtaaatcttatggtaactacaaagcaaaaaatctatagtagatacacaaaatataaagtgtaaggtatcaaagcatactactagaaaaaaaaatcatctaatcacaaaagaagacagcaagagaggaagaaaggaacaaaagatctacaaaacaattagaaaaaatggcaaattatctgtagtaagtcattacctatcaataattatcttgaatgtaaattgattaaattctctaataaaaagatatagagtggccaaatggatttttaaaaaagacccaactatgtgcttcccataaaagactcatttaacctttaaggacatacatagattgaatattaaaaaatggaaaaatgtattccatccacatggaaaccaaaagagagcaagggtagctatatttgtatcagataaaakagacttgaagtcaaaagctgtaaaacaagaccaaaaaagtcattatataatgataaaggaatcagttcaacaagaagatataacaattataaatatatatgcatcaaatatcagagcacctaaatatatcaagcaaatgttaagagatctgaag

SEQ ID NO: 435880 - DNA, 621 bp, Homo sapiens
actcatttaacctttaaggacatacatagattgaatattaaaaaatggaaaaatgtattccatccacatggaaaccaaaagagagcaagggtagctatatttgtatcagataaaatagacttgaagtcaaaagctgtaaaacaagaccaaaaaagtcattatataatgataaaggaatcagttcaacaagaagatataacaattataaatatatatgcatcaaatatcagagcacctaaatatatcaagcaaatgttaagagatctgaagagggagacagcaatatatagtaggtgatttaatatcccactttcaacaatggacagatcatctggacagaaaarcaataagaaaacattggacttgaactacactttagactaaatggacttaacagacatatacagaccactgtatccaacagaagaagaatacatattcctctccagagcacatggagcattctgcagaatagataatagttaggccacaaaacaagcctcaacaaatttaagaagaataaaatcatatcaaatattttgtttcagccacaatagtattaacctagaaatcaataataggaggaattttagaaaatttgcaaatatgtggaaattaaac

SEQ ID NO: 435881 - DNA, 621 bp, Homo sapiens
actcatttaacctttaaggacatacatagattgaatattaaaaaatggaaaaatgtattccatccacatggaaaccaaaagagagcaagggtagctatatttgtatcagataaaatagacttgaagtcaaaagctgtaaaacaagaccaaaaaagtcattatataatgataaaggaatcagttcaacaagaagatataacaattataaatatatatgcatcaaatatcagagcacctaaatatatcaagcaaatgttaagagatctgaagagggagacagcaatatatagtaggtgatttaatatcccactttcaacaatggacagatcatctggacagaaaagcaataagraaacattggacttgaactacactttagactaaatggacttaacagacatatacagaccactgtatccaacagaagaagaatacatattcctctccagagcacatggagcattctgcagaatagataatagttaggccacaaaacaagcctcaacaaatttaagaagaataaaatcatatcaaatattttgtttcagccacaatagtattaacctagaaatcaataataggaggaattttagaaaatttgcaaatatgtggaaattaaac

SEQ ID NO: 435882 - DNA, 555 bp, Homo sapiens
  misc_feature (1)...(555): n = A,T,C or G
gattggggttctgctgccacaaaccaaggaattcctgaaagccaggagagaagcctggaacaggtccttcgccagtgccctcagaggttgcataaccctgtggacaccttgatcgtggacttggctgccagaacagtgagacaggacatttctgttgtttcagctgctccatttgtggcattttgttgcggcagccccagccagctagcacagcttgctgaccgggccttgcacttcgcgcccatcttgctggccaccctcactttcgtcccagcccttctgcctctggctactctgagtgatcagctcacctggccaggctgccacacccagatggtgtcctgtcccagcagcactgacatagaaatataacagmgctgttgtcccactgacagaaatataacagagctgttgtccagttgctacttctgtgtttgatacccgagtgaccattcccctcagaggtaacttanggtgagcagggggttggggtgtggctcctcagggagcatctagggaccccccttcctgtgctccaccacttggagtccactg

SEQ ID NO: 435883 - DNA, 596 bp, Homo sapiens
attgttatatcctcttgctgcatttacctatttatcatcatatagcaggaataagtccttctttgtctctttttattatttttgtcttgaaattgattttgtctggtataagtatagctacttctacttttttgctttccatttgcatgaaatatctttttctgtcccttattttcagtctgtgtgtgtctttataggggaagtgtgtttcttgtagtcaatagatcaatgggtcttttgaaaaaatccattcagctgctcactctatgtcttttgtttacagaatttagtccatttacattcaatgtcattattgataagtaaggactyattcctgctattttgttatttgttttctggttgttttgtggtctccttttccttttttccctccttcttgtcttccttttagtgaaggttatttcctctggtagtgtgttctaatttcttgctttttattttttgtgtatctgttgtatgcttttaaatttgaggttgccatgaagattgcaaataatataacctgttactttaagttaaggaagacttaatgctgactgcataaacaaacaaataagtaaagatagaactaataa

SEQ ID NO: 435884 - DNA, 543 bp, Homo sapiens
tataacctgttactttaagttaaggaagacttaatgctgactgcataaacaaacaaataagtaaagatagaactaataaaaacgacactttaactcggccctctactttttaactttttatttctatttatattttattatgctatttatgtcttgaaaagttgttgtagttattatttttgaaaggttcatcttttcgactactcagtatatgaatagtttacacaccaccattacggtgttataatattttgtattttttctgtgtatttaatattatcgttgagttttgaaccttcagacgatttcttattgctcattaatgttcttttctttcacatagaagaactcyatttagcatttcttgtaggacaagcctggtgttgatgaaatcactcagctttagtttgtctggaaaagtatttatttctccttcatgtttgaagaatatttttgctggatatactattctaggataaaaaaagttttattccttcagcactttaaatatgtcatgccactctgagacactccactgagaag

SEQ ID NO: 435885 - DNA, 585 bp, Homo sapiens
gtacattcattcccacgaagtgctccagggacatctaagctcttggatgcttcctcctctgtctgtcctctttgtgtcccaacttgtaggttattgcagctattgctgcaactgctttgcgctcgttcagtaaaaggctgtcctttttaatccagcactaataaaatgtgttctagtttatttgcgtacgtttatttgtatctcatcagtgtagcatgagatgaaatgtaacatttgaaactaaaattgctctactgtgactatggctaatgctaattattattagccactttctggatgtgggaaacatttcctttgcctcaaggtgatatattgaaagagagagtgcgcacccatgatagaggggttaggaattgccagataaatgtcaggcattgcagatagacagacaggtgggtagacagataatatatgtatrcacacacttacgtacattatattatatatgtacataatataatgtaatatattacgtacatatatattatgtacgtacacatatatgtacacattataattttaaatatgtaagatatttacatattacatctataaatatggaga

SEQ ID NO: 435886 - DNA, 606 bp, Homo sapiens
tagtactgtattgatactcagcactgtgtatatttaataaatttccttagaaatttcccttgtttaatagcttcagatgtcactcatgtacagtggattcctgtgtctgcaatttgcatcttggtctctagtcttcatttctctacttcttcactggatatttctrtgtaaatgctgttatatcaagctcattttctcctgaaatcaattacttgcctgtttttgacacattattttcaccttccatccagttaactcccaggtcagattggttattgtttcacctggaacatgtttgtaccttctattatttttatttcattctcttcacttagattgtgactgccttaaaggcaagggcttggtagagttttttcttgatatctccatcactagtcatagtacttagcacattatagatgtgtatatgtacttagtactatgtgctaagtactaagaatgaaaaagaggcctactacatgtgataatctcaagaagggtggcaaaaacgagatggaaaagagatgaagaattgataattttttgactcagaccaattcttaagaaatggataaaaagtttcttaactttcatgtcgagttgaat

SEQ ID NO: 435887 - DNA, 606 bp, Homo sapiens
tagtactgtattgatactcagcactgtgtatatttaataaatttccttagaaatttcccttgtttaatagcttcagatgtcactcatgtacagtggattcctgtgtctgcaatttgcatcttggtctctagtcttcatttctctacttcttcactggatatttctatgtaaatgctgttatatcaakctcattttctcctgaaatcaattacttgcctgtttttgacacattattttcaccttccatccagttaactcccaggtcagattggttattgtttcacctggaacatgtttgtaccttctattatttttatttcattctcttcacttagattgtgactgccttaaaggcaagggcttggtagagttttttcttgatatctccatcactagtcatagtacttagcacattatagatgtgtatatgtacttagtactatgtgctaagtactaagaatgaaaaagaggcctactacatgtgataatctcaagaagggtggcaaaaacgagatggaaaagagatgaagaattgataattttttgactcagaccaattcttaagaaatggataaaaagtttcttaactttcatgtcgagttgaat

SEQ ID NO: 435888 - DNA, 640 bp, Homo sapiens
acgggctcaggtttcaaacaactgcagaggcctgggcttgggacagctccatcccgctctctcacctgaactacggggaacctggggatggatttcaactctctgcagcccagcactcagggtcaaggtgaggcccagtctgtgaccacggaggaattctggaatgtrgtgatgaccaacaggaattttatgagtgtccctctgtggaggagcctgagagaaaggctcatggagggcagagggtggagggcgtgggaccaagttccttagataaggctgtggccccatggtaagggtctggacggggaaggtcagtgttaaccctttgaagggcccccggggagtggatcaggttcagagcccaaggctttcacacataggtgtgttctaaagctggtaaagcctctgatcatcagccagtgtcaggtgtcacagcatagccaagcgaccagacgagcagatgagaccttgttaatctccagtggtgatgagtaaccattctctctatcacatatcacatactgggtgcgttagggggcccttaggactcgctccattctgccttaccccacagtgacttgaaggcacagctcctgttccccaaatgagtctcagtgtgttgttctcattcctgcccttt

SEQ ID NO: 435889 - DNA, 602 bp, Homo sapiens
gcacactgctgtagagagtgaattttcatctttgaggatgatggtttggcaatatcttaaaaaataaaaaaagtatattgtctttgagccatcagtcccattaataagaattagcctttatgtatatagaaggagtccatcaggatgtctgtgcaaagatgttcactacagccttgtgcttcatagtaacaatcagggagaaagattctccatcaaccagagatcacatatataaattattgtatatatgtagcatgctgcctttaaaaagaaaggggaagtctacatggcaagatatctaagatgtattaacatataatatgaaaggttcaygagtggtggtaagagaaatgaaaatgagagcaatctgtgtaatgtcatcctggggaaatgagcttcttatgaactaattaagtctttggggaaaaaaaaagctgcatgtttgtgttcagtacagctgcttgaggataaaaaacaaaaaaactcccaagttagtgatatccacattggtctttgtcctggatgatgtgaacccaggagccccccaaatacaattagtaataaaatgtaaatgtttctgaaagggttttgaagaggaaaat

SEQ ID NO: 435890 - DNA, 521 bp, Homo sapiens
tctttctgtgttaattctcaaagagtgattatataagaaacagacctccctgcggtggcttcacctggtgaacataatcatctttaaactgataggccttatgagatatctttatgattttaagcgctcatcaaaggtgtaagaccggtagaacttcaaagcttaatataggaaggatgcatattaaattgctcttattttttttacaaatgtaaatatgtggcgtgaataaatattcatttatgtgaaggttgacaacaacaaggaaaacacacagatatgtgacaatctacttggctccatttcctttattttctgctttggaaaaatactgaacaaaacttgtattcatccaattacagttcagtaacactgaaattgccttttacaaatgttttgcaatagagaagcataaatatgtgaatgacaattttgattttaactcactaacttttgttggtttaaggctctaaatggaatgataccgtaacatttttrtactgagtgacagtaatgggaaa

SEQ ID NO: 435891 - DNA, 314 bp, Homo sapiens
ttatctggttttctcattatattttccttggtacaaatattaaataacgttaactttttaacctattaaagaaagattttattatttgtgtgggaagaaaaaggggattttcaaaggagatgagtatgtcaaaaaatttataatagccttcaaaactgtatgcttcctgtgttttaaatattatgggttaaattagtcactatctccacttacaaggagtaagattaacttttttctttcyaaattagaattgaggccaaccaagttcctcaaaccaaaactgaagtagacatagtggctggcttaggcgggga

SEQ ID NO: 435892 - DNA, 615 bp, Homo sapiens
caccccacagactcagtggaaaaagtgcccaggacccacgacaattttagggcccccaaaagtgttttctattttacatacaaaaattaaccaggtgtggtggcacatgcctgtagtcccagctactcgggaggctgaagcaggagaatctctacaacacaggaggcagagcttgcagtgagccgagattgcaccactgcactccagcctgtgcgacagagcaagactccgtctcaaaagaaacaaaaacaaaacaaaaagtgttttttattttccattaaaatcagaagaaaatgatgaatataatacaataataataataaacccaccatgaattatatttgtcttatatcaacacagtcataaaaacaatatctattgaatgggtacratgtactgatgtgatagatgtaccgagtccagacttcactactatggcaatatatccatgtaaaaaaattgcactggcaccccttacaaatacaaatatgtatttatttaatgaacagaggaaggagcccatgaaagcaaaattgcctagatcccgggaaagtcaccatgtggccctgtagtgatggctaaatattagctattcaacgcatatgggattttata

SEQ ID NO: 435893 - DNA, 549 bp, Homo sapiens
accttccccttccttttttttggatatagatatccaactcttctagcaccaatttttccagcaccatttgttgaatgccaatttatcttaaattcatttatttgttagagagagggtcttgctctggtggagtgcagtggcgcgatctcggctggagtgcagtagcrcaatctcggctcattgcagcttcgacctcctaggctcaaacgatcctcccacctcagcctcctgagtagctggaatcacagacactgtgtcaccacacctgactaagttttgtattttttgtagggacaaggtttcaccaatttatctttaaagcctgttttgccatgtctattaatcaggtaaagcaataaacacagcagaacagctaagaagacagtgtgagctatgagcagagaggaagacaaaaaggaggaaaaactgtggggaccaatttctatagcaaacaaattatttttcagtggacgaatctggaggcatttgaccaatcacttagtccactgtttcctatgtctgcatttggaagcatcagtgcagacgtac

SEQ ID NO: 435894 - DNA, 549 bp, Homo sapiens
accttccccttccttttttttggatatagatatccaactcttctagcaccaatttttccagcaccatttgttgaatgccaatttatcttaaattcatttatttgttagagagagggtcttgctctggtggagtgcagtggcgcgatctcggctggagtgcagtagcgcaatctcggctcattgcagcttcgacctcctaggctcaaacgatcctcccacctcagcctcctgagtagctggaatcacagacactgtgtcaccacacctgactaagttttgtattttttgtagggacaaggtttcaccaatttatctttaaagcctgttttgccatgtctattaatcaggtaaagcaataaacacagcagaacagctaagaagacagygtgagctatgagcagagaggaagacaaaaaggaggaaaaactgtggggaccaatttctatagcaaacaaattatttttcagtggacgaatctggaggcatttgaccaatcacttagtccactgtttcctatgtctgcatttggaagcatcagtgcagacgtac

SEQ ID NO: 435895 - DNA, 549 bp, Homo sapiens
accttccccttccttttttttggatatagatatccaactcttctagcaccaatttttccagcaccatttgttgaatgccaatttatcttaaattcatttatttgttagagagagggtcttgctctggtggagtgcagtggcgcgatctcggctggagtgcagtagcgcaatctcggctcattgcagcttcgacctcctaggctcaaacgatcctcccacctcagcctcctgagtagctggaatcacagacactgtgtcaccacacctgactaagttttgtattttttgtagggacaaggtttcaccaatttatctttaaagcctgttttgccatgtctattaatcaggtaaagcaataaacacagcagaacagctaagaagacagtgtgagctatgagcagagaggaagacaaaaaggaggaaaaactgtggggaccaatttctatagcaaacaaattatttttcagtggacgaatctggaggcatttgaccaatcacttagtccacygtttcctatgtctgcatttggaagcatcagtgcagacgtac

SEQ ID NO: 435896 - DNA, 545 bp, Homo sapiens
ttgaattaaatttaatttatagattgacytgcgaacaaaaccatagtagaataatactgtttctactgcaatatatattccaatcaccaaattataaagaaactttggaatatcctgtttgttatttgcaaactgtctgtatctgtgcttagatggcctccaaacacctaattgtgacccagacttaaaattcagttttcctcagtgacactctggtctgtctcagtacacatgtgatcaatacacaggttttcttttaaaaagtctctttaaaaaacctgattctcaccagatggtttcatgacatttgggttttagagaattaacagattattcattgaaaggaatagcctgaaaaattgtataatactataaagacaatttaaactctgaagtaggttttccctcttactgtaagagagaataaaacacatgaatacaaattctgagtaacaatttttaaaatttataattgctcagagtacttatattgcacataaattaaatataacaaataatttactcctgatactaatatgaccagt

SEQ ID NO: 435897 - DNA, 545 bp, Homo sapiens
ttgaattaaatttaatttatagattgacctgcraacaaaaccatagtagaataatactgtttctactgcaatatatattccaatcaccaaattataaagaaactttggaatatcctgtttgttatttgcaaactgtctgtatctgtgcttagatggcctccaaacacctaattgtgacccagacttaaaattcagttttcctcagtgacactctggtctgtctcagtacacatgtgatcaatacacaggttttcttttaaaaagtctctttaaaaaacctgattctcaccagatggtttcatgacatttgggttttagagaattaacagattattcattgaaaggaatagcctgaaaaattgtataatactataaagacaatttaaactctgaagtaggttttccctcttactgtaagagagaataaaacacatgaatacaaattctgagtaacaatttttaaaatttataattgctcagagtacttatattgcacataaattaaatataacaaataatttactcctgatactaatatgaccagt

SEQ ID NO: 435898 - DNA, 545 bp, Homo sapiens
ttgaattaaatttaatttatagattgacctgcgaacaaaaccatagtagaataatactgtttctactgcaatatatattccaatcaccaaattataaagaaactttggaatatcctgtttgttatttgcaaactgtctgtatctgtgcttagatggcctccaaacacctaattgtgacccagacttaaaattcagttttcctcagtgacactctggtctrtctcagtacacatgtgatcaatacacaggttttcttttaaaaagtctctttaaaaaacctgattctcaccagatggtttcatgacatttgggttttagagaattaacagattattcattgaaaggaatagcctgaaaaattgtataatactataaagacaatttaaactctgaagtaggttttccctcttactgtaagagagaataaaacacatgaatacaaattctgagtaacaatttttaaaatttataattgctcagagtacttatattgcacataaattaaatataacaaataatttactcctgatactaatatgaccagt

SEQ ID NO: 435899 - DNA, 545 bp, Homo sapiens
ttgaattaaatttaatttatagattgacctgcgaacaaaaccatagtagaataatactgtttctactgcaatatatattccaatcaccaaattataaagaaactttggaatatcctgtttgttatttgcaaactgtctgtatctgtgcttagatggcctccaaacacctaattgtgacccagacttaaaattcagttttcctcagtgacactctggtctgtctcagtacacatgtgatcaatacacaggttttcttttaaaaagtctctttaaaaaacctgattctcaccagatggtttcatgacatttgggttttagagaattaacagattattcattgaaaggaatagcctgaaaaattgtataatactataaagacaatttaaactctgaagtaggttwtccctcttactgtaagagagaataaaacacatgaatacaaattctgagtaacaatttttaaaatttataattgctcagagtacttatattgcacataaattaaatataacaaataatttactcctgatactaatatgaccagt

SEQ ID NO: 435900 - DNA, 609 bp, Homo sapiens
agttacttgaaaagatttccaagatatatcatkaagtgaaaatgcaagttgcgaaaaatgtgtacacatcatatgattcccctctacacaaaccagcacaaaaatgaaaccaatatatttgtatatgtacatatagtatgtcaatacatgacagttgtctgacataatgcacactaaattgttacaagtagttatttcttgggaaaataaagggaatgatgagaagaaggaaagagagcatttcactttttattctccatgcttatatattatttgattttttgaaaatgtgaatgtattcatatatttattgtgaaagtgtgttcagaagagtttttttaaccaaatgttacctttttaacatgcaaggaattaccgaaggataaaagacatagtagacttattaataaattccaaatgactatcccaagaaccatatgtaattccaggtaagttacctttaaaaaacaaaaaaataaacaaaataagtgaagatgagtctctttattatgtgtgttagttagcaacagaaccagacagtagaattaaacatcaccccactttaagataaatgtatgaaaatatcacaggagaaggggggtaggatat

SEQ ID NO: 435901 - DNA, 609 bp, Homo sapiens
agttacttgaaaagatttccaagatatatcattaagtgaaaatgcaagttgcgaaaaatgtgtacacatcatatgattcccctctacacaaaccagcacaaaaatgaaaccaatatatttgtatatgtacatatagtatgtcaatacatgacagttgtctgacataatgcacactaaattgttacaagtagttatttcttgggaaaataaagggaatgatgagaagaaggaaagagagcatttcactttttattctccatgcttatatattatttgattttttgaaaatgtgaatgtattcatatatttattgtgaaagtgtgttcagaagagtttttttaaccaaatgttacctttttaacatgcaaggaattaccgaaggataaaagacatagtagacytattaataaattccaaatgactatcccaagaaccatatgtaattccaggtaagttacctttaaaaaacaaaaaaataaacaaaataagtgaagatgagtctctttattatgtgtgttagttagcaacagaaccagacagtagaattaaacatcaccccactttaagataaatgtatgaaaatatcacaggagaaggggggtaggatat

SEQ ID NO: 435902 - DNA, 609 bp, Homo sapiens
agttacttgaaaagatttccaagatatatcattaagtgaaaatgcaagttgcgaaaaatgtgtacacatcatatgattcccctctacacaaaccagcacaaaaatgaaaccaatatatttgtatatgtacatatagtatgtcaatacatgacagttgtctgacataatgcacactaaattgttacaagtagttatttcttgggaaaataaagggaatgatgagaagaaggaaagagagcatttcactttttattctccatgcttatatattatttgattttttgaaaatgtgaatgtattcatatatttattgtgaaagtgtgttcagaagagtttttttaaccaaatgttacctttttaacatgcaaggaattaccgaaggataaaagacatagtagacttattaataaattccaaatgactatcccaagaaccatatgtaattccaggtaagttacctttaaaaaacaaaamaataaacaaaataagtgaagatgagtctctttattatgtgtgttagttagcaacagaaccagacagtagaattaaacatcaccccactttaagataaatgtatgaaaatatcacaggagaaggggggtaggatat

SEQ ID NO: 435903 - DNA, 580 bp, Homo sapiens
ctggctgctgtgctgaggatagactctagggactcagagatagaagaaaacattatacttggatatcaatggtataaaataactaattaactcatatgcaatagtatcttggtgaagacttctctaattttgagggatcatataaggaacacagagaaagcccttgcccctgaccaggcaccttgttttaaaaaactgctctcatttaatcttgatgtccacactattattatcccaattttatgcattagaaaatggcagtrcagaaggctatgtaacttttctaaattcacacagctagtaagaaagtgattgcagatcactgggatgggaactatttcttattacaaagtgttccctgtaattcaacatcgccacttcttgaatcttaggtgagttgttattccaagcagtggctactttatttatactaattaagtacctgacatatcagagtatacattttgagcctcttttgttaaatgtattcctattttactctttatgatgctattacaaatgggtttgttttcttaatttcatttttggattgttctttgctaatgtatagaagtacaat

SEQ ID NO: 435904 - DNA, 457 bp, Homo sapiens
tccatcagggtatggttacctctttgctatacctcttacaaattatacattaaaatcaggtttttacttttactgtcaaatgtacttccttccctcagtttagcatcaaaccaactaggcattcttaggttacttttctttccgctgtctcctttaagaaagattccttgctttgttatttcaaacaattacaggtttttgttttatagaacaatagaactagaaagttatctttcccacctcattttattcaggtcattaaaaaaagtgtgaatccctgcccagarcccggttttatctgagccatgtacaatgaacgctgagttccattctcttgcagatagatcttcaactccctagacccagaggactctacatgggcagcgtgtgcttctatcatcagctctcagtggtctgtagagctggcaaggacccctcagctgctagacccaaaagc

SEQ ID NO: 435905 - DNA, 560 bp, Homo sapiens
tttttgacaaacatgcaaacagacagagagattcaagaccatttttctaaaggttcttagttaattaggaaaactagaatttgaatataagtaaccaaaccccacatttttctcattgtatcatattagctccaactcttaaaccatctgaagcccatttgctcctcttaatcaccactgtaactagacctgctctgtccaagatggtagccactaactacatgtagtgactgagcactttaaatgtggctagttctaacagaaatgtgctgtatgtgcaaaacacaaccagattgcaaaaaacagtacaaaaataattaaaatatctcaactataacttaaaaatatttgttatatgttgaaatggtaatattttgaatayattgagttaaaatatatcatgaaaattaatttaacctcgtttcactttttaaaatgtggctaatagaaaatctaaaatttcataaataatatattggacagtgctaatcaagaccatttgtacatagctgtataatcacaagaattcacattttatctttcttcatttaaagaccatc

SEQ ID NO: 435906 - DNA, 612 bp, Homo sapiens
cgtggtacagatctgaaaaaccatcatcattggaggactgggcaggctgtctgtgagcatttctaacaggcatagtgactgctgcttttgtggtgatatttatgttgatctgaatttttgaatagttctggttttgtgcaattttactgaatgtgagtcaatgaatgtataattaaatgtgatttaatattaggatttaataaaatgcttcacaatgaaataattattttctagatattgtgaccacatttttggtttatttctataaaagaaaatccttccagtccctrccgtctgtatagtgactagcctggaaggatctcccctactgcaacccccagaggatcaaaagatagccactctatgtgttttgattagaaaatttaattcatttaggtttaagtaattattgataggtgaggacttactgatgccattttgatattttttttctgactgttttgttgtatttttgtttgtttcctctctcttgctgtcttcctttgtggtttgatgttttctgttgtggtggtatgctctgattcctttctcttaatatttttattatctactacaggttttattcttggtgattaccacaaaaattacata

SEQ ID NO: 435907 - DNA, 612 bp, Homo sapiens
cgtggtacagatctgaaaaaccatcatcattggaggactgggcaggctgtctgtgagcatttctaacaggcatagtgactgctgcttttgtggtgatatttatgttgatctgaatttttgaatagttctggttttgtgcaattttactgaatgtgagtcaatgaatgtataattaaatgtgatttaatattaggatttaataaaatgcttcacaatgaaataattattttctagatattgtgaccacatttttggtttatttctataaaagaaaatccttccagtccctaccgtctgtatagtgactagcctggaaggatctcccctactgcaacccccagaggatcaaaagatagccactctatgtgttttgattagaaaatttaattcatttaggtttaagtaattattgataggtgaggacttactgatgccattttgwtattttttttctgactgttttgttgtatttttgtttgtttcctctctcttgctgtcttcctttgtggtttgatgttttctgttgtggtggtatgctctgattcctttctcttaatatttttattatctactacaggttttattcttggtgattaccacaaaaattacata

SEQ ID NO: 435908 - DNA, 585 bp, Homo sapiens
cacctgtagtcccagctactcgggaagctgaggcaggggaattgcttgaacccgggaggcggaggttgcagtgagccgagattgcgccactgcactccagcctggcgacagagcaagactccgtcaaaaacaaacaaacaaacaaaaaaatacacacaaacataaaaacctgtcttcaagttaattgattctttcttctgctcaatctagtatgctgttgaagttctctattgaactccttagtttaatcattattctttatctctagaatttctgtttttaawaaatggattttttttgttgaacttctagatttgttcatgtattttcctaattttgtttagttgtctatcaattttttcttgtttacagaactccttgtagaggattattctgaattctttgtcagtcagttaacagatctttgtttctttagaatcagtcatttgagctttattagtttcatttgatggtgtattgtttccctgattttttatgatccttgtatccttgcactggtgtttgcacatctgaggaagcagctacctcttctagcctttatgggttcactttggcagggataga

SEQ ID NO: 435909 - DNA, 561 bp, Homo sapiens
ttggtgctataaataaatctttatatgttataaactcaataatacattgttacaattgtcatttaataaatttttgtgtttttttatagaaaataagagatgaaaggagagcaagtacatatttatagagttcgttagactggctgtaaagttagactaactttcttctttaccatttctggttctcttcatttgttcctgtggattcaagttaccattcagtgtcatgttcttgctctaatacacctttgtttccactgacctactttgtgctgttattgtcaagtatgttacattcatatacatacaggcataacaataaaattatgtwcatattgttgtaaaccatttcttttaaaatcagttaaaagaaggaggtgtggcaaatcaccatggcacgtgtatacctatgtaacaaagttgcacattctgcacatgtatcccagagcttaaagtaaaattaaaataaataaatagaaggaaggggaagaaatgtgcatttaaactgtattttctaattacataattacatttacttatgttcttcacttttttgaatta

SEQ ID NO: 435910 - DNA, 527 bp, Homo sapiens
atcatgtagtatttgtctttctgtggttatttcacgtagcataatgtcctccaagttcacccagttgtcataaatagcagaattttcttctttttaaaggatgaataatttttcattatataagtacatatacctgtacacatacatatatatgatacaatatgtatgtatatgtacataacacatatgtatgtatacatacataacacatattgtatcatgtatatgtacgtgtacagrtatacatacatgtacaatggaaaattatagtatgtacatacgagagagaaacattttttttatccatcagtggacacttagattgattccatatcttggcaattgtccatgatgttgcaatgaacataggagtgcagatatctcttcaatataacaatttcatttcttttggatgtatatccagaagtgagactgctgggtcatatggtaatttgttttaatttttttgaggaacctctatactgttttccattatggctatactaatttatactcctaccaacagt

SEQ ID NO: 435911 - DNA, 606 bp, Homo sapiens
aagtaccaaaactataagatgtcctttatatggtaactcaagtacatgaaccatagttcaatgaagaatctgaacttaatgaattctagctaaatagcaaaatgaataaaggaactttgtcaaatgttagggttagtgaaaagaaaagactacatgtagtttgatctataagaaaaaattccagacatacttaaatacatagctcccattcaactttctctatatttcccctcatgatttcccttaatagaatacattttcaactatttttctcagctagagagaattaaatatatgcctgtttctgtatctccaaggatatgtggaatgagttgtttttgtcttcattacttatgtccttgtcatatttacttattcaagtgtctggaaaagaaagcttcctttctcctcttgtagcartgataagagatgatggccaattcaggtgaatttttaaaaaatcatgaaattgctgttctggtgttcatcaatggatacttcgttttcatgttaattgcagatttctgcttactttgtatgaaattaaagattgtttgacctcaagaggtttaacaaataaaagggcaaaagaaaaaaacaaaagag

SEQ ID NO: 435912 - DNA, 439 bp, Homo sapiens
ggtccaattttaagtaataaaaatcctgtctctccttccatattccatgtgagtcgctcatgagaaatccttccattgactgtccatttttggtcatctctaagtcattctttacattgccacacagtggtcatttaaaaactcattggtacccaatggttaggagtgttgtctttgagtcagatggcctaagtacattcccctctgtcatttcttacctgggtgatctttggccagtttgttaacttctctgggcttccatttcctcatgttgcaaggatcaaatgagacaagtcacctaatgcactgaatccactgcctggcacagagycatctggctttgcaaggaggatgtgcctcacattccaggaatagatcattccaaccacacacaggttcttccttaattttatgcagctagtaaaacgttttacaaatt

SEQ ID NO: 435913 - DNA, 432 bp, Homo sapiens
gagacaaaaaccccctaaaacaaattggcatatcacatccaatttagcaatatataaaaataaaataataaaacatcactatgggtttatttcaagaactgcaatgttggttggaaagtagaaaatctcatataatttagaatgttaatacattaatarggaaaaatcataatcatctcaacagaggcataaaaacattcagtaaaattcaatacccttcatgaaaaagtcttagcaaacttgcaatatataggacttttaaaatctgaaggtatgtttccaaacactagcactaacattactggtgcttctaattctagaagctttttcatttataattaggaaaaggtcaagatgttcactgttttttttaaaaatatatattgagttggtggtccccacaagtgcattaagatgagagaaataaattaa

SEQ ID NO: 435914 - DNA, 519 bp, Homo sapiens
gacatctcaaataataaattggaggaacttgccctaccagaattaagatttgctatgaagcaatagtgattgtgactttacagtatcaatgaagagaccaatggagcagatcagagaaggcagaaacagacccacgtagacatagaaaagatctgtgacagggaggcagggcatcagtaaggaaagatgggctgatcacaagtgtgctgaaacacttggttagtcatgtgaaaaaaagtgacattggaggcatatcttacacacaactcaaaaatttcagttgactmtaagtttaagtttgaaggaaaataatgtaaaaacttaaaataaaatattgaagtatatcttttttactttgggggtaggaaaacttttcttaaataagacaaaatatacacatacataacataaagccgaagattaatatatttgactacatgataattaataaatcctattagtaagagtgatagagtgatgtcagcaagatgtctgactagaaggccttagcacccattc

SEQ ID NO: 435915 - DNA, 571 bp, Homo sapiens
aaattggatagcactttttacaaatgaacctagcggatatagactaattattccatccaacagcagaaaatacacattcttctcaagtgtacatggaatattctccaggacagatcatatagtaagcaacaaaaaagtcttaatacattttgaaaaatcaaaattatatcaattattgtttctaaccacaawggtatggaactagaaatcagtaactggaggaacttctgaaactacataaatacatagaaattaaacaacatactccttaacaatcaatgggtcaatgagtaaattaaaaggaagattttaaaaatgctagagacaaatcaaaatggaagcacagcataccaaaacttatgagataacagcaaaagcagtaataaaaggagatttctagtaataaatacctccatcaaaaaagaaaaaaatctcaaacgcacagatgaatgttgcacctcaagaactggaaaaacaaaaccaaactaaacccaaaattagtagaaggaaagaaataatacaaatcagatgagaaagcaacaaaatagagacaaaaatacaaaaaaagatc

SEQ ID NO: 435916 - DNA, 637 bp, Homo sapiens
agatcacaaaagatcatatgccactagaaagttgtctgaaagaagaacatacagttgcccagaaacctgcttatgtgagttgaaatgctgtctgcaggggacacacaggcctggggtctatctttgtgtggcagtgatgtagccctctctgcttcctttcaactttcatctctttcttgtaaacaaacccaaagcacaggattctgcacaagtttcttaattttgcattctctactgatgtctttaygtccagttacccattaaaagtattaaaaacctgaaaagatcttttaatgtatttttaatgggcgtggggagaggtgggtatacataattttcagacctttctagaaaggtttgaggcaactggacagttatatatctcattctcagctgatcagactagaaatgaattccctcttccacagtctgttccaaaatataagtgagatgttccggacaaagaatgtaaagtaaaaccatgttactccagctgcatgaaaaaggtgattgagtttgggggacatagggatatggaattatttagtggtgtatgcctctcaaatgtcaatgagttccaaaagctcttgagccagaagatcatgctaagtattaaaccagtgtttttcaagtgtgg

SEQ ID NO: 435917 - DNA, 537 bp, Homo sapiens
ttcaaagaactaaaaatagaactgccctttaatctagcaatctcactactgagtatctacccaaaggaaaaaaaattattatattaaaaagatccttgcactcatacgtttatggcagcactattcataatagcaaagccatggaatcaacctaagtgtccatcagtggatgatgtgtgccatggagtactattcagccattaaaaagaaagaaatcatgtcttttgcagcaacatagatggaactggaggccaatatccttagtgaagtgactcagaaacagaaaattaaaaaccacatgctcwcacttataagtgggagctaaacagtgggtacacacggacatactgagtggaacaatagacattggagacttcagatggcagagggtgggaagggtgagagatgaaataccacctattgggtacagtgttcactattcagctgatgggtacactagaagcccagacttcagcactgcaaaatacatccatgtaacacaactgcacttgtacccctaaatccataaaaattaaa

SEQ ID NO: 435918 - DNA, 614 bp, Homo sapiens
taggaaagaaaccacttgagggtacgactgtaagttgtctgacaagctcaattttttattgtaaaataatactttaaagttttgtaaactatatgtttgttacagaaaacttaagacaaacaaaaaaagtataacagaggaaaaacaacacccacgatccctcattcaacaaaaaatgcagctatcattatggactgtttatctaccatcatctttgcgctcaaactgatgatgcactttaagaccacaacatttctgaacagtattaaagactcttggtacccatsatttttggtggctgcataatgtttcttttacatatagactataatttccttaacccctcccatgttgttgaatgttttgtttccaatttttgttattgtaacttatgctgtcctgaatatctgtgtgcacaaagctttgtttacatttctgtttatttccttgtgagatattcttagaattgtacaactcagggaagagactgagttttttaaatttttatttatttatttattatacgttaagttctgggatacctgtgcagaatgtgcagttttattacacagttatacacgtgccatggtggtttgctgcacctatcaacccgt

SEQ ID NO: 435919 - DNA, 643 bp, Homo sapiens
ctgtgtgtttggctagggcttccacttgcagctccatatcaactttggctgcctgtgaggaaattttagcctttgggtaagaccaccaagacacctgtttttgtcacctatggcaagactttactatttcccagttagataaaagagagtccaatttagtgaggatatgtcccaagagataagggtgtatactttccagtccaattataaggtaagtccagctagccatgagttccacaaacccatagccattcccaaggagaagcgtaagcacctatttttggcaaattatggtaccatcccatccacaggtggtctgttaaaagaagggtctgactacactcttcacgagctaccccttctatatcatggagtttcagtctgagggtcactgttactttgccttttacaacatataagcactttgctcatacttgtatttagacagctgtcatccacccgcgtccatcctgtacagtataacctaaagttaacctggaattcagcatgtctgtaattagatgaaaaaggtgactttttgtctctctgtaggataggaagamgctgaggcccatgagactatagtatatgaggaaagtgggtatgtgtttaccattttcagtttcccgatcataataatgtc

SEQ ID NO: 435920 - DNA, 519 bp, Homo sapiens
aaagccagcatcaccatgataccaaaatctggcaaagacataatgaagaaagaaagttacaggccaatatacctgataaacatagatataaaaaccctcaataaaatactaccaaacgaaacccaatagctcatcaaaaagttaattcaggccaggtgcagtggctcatgcctgtaatctcagcactttgggaggccgaggcaggtagaccacctgaggtcaggagttcgagaccaggygggccaacatggtgaagccccatctctactaaaaatacaaaaattagccagacttcatggcacatgcatatagtcccagtttctcagaaggctgaagcatgggaactgcttgaacctgggaggcagaggttgcagtgaaccaggatctcaccactgcattccagcctgggtgacagagtgagactctatctcaaaaaaaaaaaaaaaaaaaagttaattcactttgatgaagtgggttttacccttgggatgtaaggttggttcaacatatgcaaatcaa

SEQ ID NO: 435921 - DNA, 537 bp, Homo sapiens
gggagaaaatatacacaaattatgcatctgacaatgtctcatatccaacaatgtctaatttataaggaatgtaaaaaaataaacaagcaaaaaacaaataacctccctaaaaagtaggcaaagaacgtgaatagacacttcgcaaaagaagacatacaagaggccaacaaacatgaaaaaatactcaacatcactaatcatcaaagaaatgcaaatcaaaaccaaatgagataccatctcataccagtcaggatggctattattaaaaagtcaaaaaacaatagatgctagtaaggcttcagggaaaagggaatgcttatattcckttggtgggaacgtaaattagttcaaccactgtggaaagcagtgtggagatttctcaaagaactcataacagaactataccatttgactcagcaactccactattgagtatctacccaaaggaaaatagattgttctaccaaaaagacacatgcattcatatattcattgcagcactattcacaatagcaaagacatggagtcaacgtaggt

SEQ ID NO: 435922 - DNA, 488 bp, Homo sapiens
tctttgcaaaccagagtgaacagcctggacagttaaccttgtttactggtttgcagttaccccttttgctttggtggagccctrttggaaagagtagcagagacctgacaacgctggcagctcttcccagtacttttccgcatttctgattgttttttaaaattcatctaaaacagcacttagtctctcccagaggcacattcacttcaggtactttcatttacacatttgcccttctatggacccatacttaatataccttttcccatttacctggatgtttcctaagactgacaaaaagtgctcccaaagcttctatggaggcgtccatctaggctatttcatggatttcatccaggagagaagtcaaggcaatgatcagttgtgatatcttcattgattcctttaaggaacattcttcagcctctaatataatcacaatattatagaggattaaaaaaataagaaaaaccttctgtatttgcggg

SEQ ID NO: 435923 - DNA, 525 bp, Homo sapiens
acaagtatcaggttatttacagctttctttaattatacttcccctattgggctctccttaacaattcattgatttgtggaatttgcttataaaattccttgtagttacagcctatgttccatttacattgtagcatagcttatacaatgttcatgtaaaacttattgtgttcttttgcctatcaggtgtttttttttactgagaaaacatactgaacatttgcattaggagttggtatccttaacatgtcctggcataaagttaacaattctgataattgctcttccaacttgatttgttaaagcacataataatacaaactcatggcttagctccatcrtctaattcttaaggattatgatgcttttctctctccttttttttttttttttttttttgacagagtctcgctttatctcccaggcttgagtacagtggcacgatctcggctcactgcaacctttgcccccaggctccagcaattctcctacctcagcttcccaagtaactgggattacaggtgtg

SEQ ID NO: 435924 - DNA, 587 bp, Homo sapiens
gcagtatatgcaaatccatagagacagaaagcaggttagtggttgccagaagctggggggagagagcaatgtgaaataactggtaaagggtatgaggttttagttttgggtgataaaaatattttgaaactatgtagaggtggtggttgcacaatactgtgtgtgactataccaaatgccactgaaatgcttctgactggaaatgctgtctggaagtcaactgagaactcagctaaattcttaagctaattagtgatcrtggaaaatgtcctacatgagaaataaaattgttcactttgcaagagttaattttatgttatataaatttcacctcgatttttaaaagtgggaaatttgatgggttttagaacagttgttctaagcagtcagaaatcctgatcagatagatatcccaattaccctgatttcatcattacatgttatatgcacatatcaaaatatcacatgtaccctgtaaatatgtgcaattattatgtatcaatcaaaacaataaaaagtggcttcaaagataatggagagtgcacaaggtaagaaaagaaatcctgatcaataactggatatattat

SEQ ID NO: 435925 - DNA, 484 bp, Homo sapiens
tcttttataagggcactaatcccattcattagagtgactctcttataacctaatcacctctcaaaggccgcacctcttaataccactacactgaggtttatgtttcaacctatgaatttggtggtggaaaaaaacattcagataatagtatggtctaatcactccaattaaaaagcaaaggcagtcaarttggattaaacagcaagactcaagtaaatgctgtctacaaaacacctcctttatatacaaagccaatacaaaggtaagtaataggttaaaagtaaaaggatagaaaaagatatgtcatgcaaatattaatcaaaggaaatggagtgactgtatttatattagataaaataggtttcagtacagagaatttaaccaggtataaaactggatatttcataatgataaacagatccatgagaagcaaaatcaagaatatataaaaatcctaaatatttatgttccaaataacaagctt

SEQ ID NO: 435926 - DNA, 577 bp, Homo sapiens
ccctttacaatctcctgcccccttctccacagacaggtgcatcttggacctcgcacccatcccaaacccctctccagggtgtgttcctggtggtggcrccctccctagagcacagcaccagagagagcgcccctgtgaatatcagcagccaattgtacccagtgactaaggaaaccagccttcagcaaatgcggcagtttcctattctttgctttccacaaaattgaaagagagcccctattcaagttgtcagctgagagagctttaaaaacaatcttgtataacaagcacaacgtgctttttggcatacaacttgaaaggagctcaaaaaccagtgacatagcaaatctttttccatttccatctttcattcccatttatgtgaacaagtttgctttagctcataaaaatgaaactagagaaaatctcagtgccgagcctgttttaggagcaccccaagggtctgtgaacccgggcaggggcccatccccagcatcgctgatattgaatttctgagattttaattttataagagtcaattttttaaaaactatttaaattttaatcaattgtatac

SEQ ID NO: 435927 - DNA, 484 bp, Homo sapiens
tcttttataagggcactaatcccattcattagagtgactctcttataacctaatcacctctcaaaggccgcacctcttaataccactacactgaggtttatgtttcaacctatgaatttggtggtggaaaaaaacattcagataatagtatggtctaatcactccaattaaaaagcaaaggcagtcaaattggattaaacagcaagactcaagtaaatgctgtctacaaaacacctcctttatatacaaagccaatacaaaggtaagtaataggttaaaagtaaaaggatagaaaaagatatgtcatgcaaatattaatcaaaggaaatggagtgactgtatttatattagataaaataggtttcagtacagagaatttaaccaggtataaaactggatatttcataatgataaayagatccatgagaagcaaaatcaagaatatataaaaatcctaaatatttatgttccaaataacaagctt

SEQ ID NO: 435928 - DNA, 550 bp, Homo sapiens
aataaataaataaatgaaatgccctaggttcctcacaaaaagcttctgaaacctttggaaggcagctatgctcaccactataccaccaatgcctgcatttctgaaacctttggaatttctaaaagagtcattgtctttggtaagataatgagatgcctggtagctggggtcccctaggtagcttcagaatggggactggttgctacaaagaccaagccttgattagaagcttagaactytcaggcctgtctctcaacctatagaaagggaaaaggggttggagactgtgcgaatcaccattggctgatgatttaatcaatcatacctacataatgaagactccattaaaaccctaaatgacagttgggagggtttccaggttggtgaacacatcaaggtgctgggagggtggcgcatccagagggaacatggaagctcctgccccttcctccataccctgccctgtgcagctctttcatttggcagttcctgaggtgtattctttataataactggtaatttccaccaaattatcaaacctgcagaagga

SEQ ID NO: 435929 - DNA, 550 bp, Homo sapiens
aataaataaataaatgaaatgccctaggttcctcacaaaaagcttctgaaacctttggaaggcagctatgctcaccactataccaccaatgcctgcatttctgaaacctttggaatttctaaaagagtcattgtctttggtaagataatgagatgcctggtagctggggtcccctaggtagcttcagaatggggactggttgctacaaagaccaagccttgattagaagcttagaactctcaggcctgtctctcaacctatagaaagggaaaaggggttggagactgtgcgaatcaccattggctgatgatttaatcaatcatacctacataatgaagmctccattaaaaccctaaatgacagttgggagggtttccaggttggtgaacacatcaaggtgctgggagggtggcgcatccagagggaacatggaagctcctgccccttcctccataccctgccctgtgcagctctttcatttggcagttcctgaggtgtattctttataataactggtaatttccaccaaattatcaaacctgcagaagga

SEQ ID NO: 435930 - DNA, 458 bp, Homo sapiens
catgaacaaaagctccaagaagcttgggattgtgttaagcatccaaacctaagaataattggtgttcccgagaaagaagagaaatctaaaagtctggaaaacatttgagggaaaaatcaaggacagcttgcccagccttgckagagatctagacattcaaatacaagaagctcaaagaacatctgggaagttcatcacaaaaagatcattgcctagacacatagtcatcaagttatctacagtcaagatgaaggaaagaatcttaagagctatgaggcaaaagcatcaggtaacctataaaggaaaacctataagattaacagcagatttctcggcagaaaccctaccagctagaagggatcggggtcctatgtttagcctccttaaagaaaacaattatcagccaagaattttgtatccagtgaaactaaacttcataaatgaaggaaagatacaat

SEQ ID NO: 435931 - DNA, 458 bp, Homo sapiens
catgaacaaaagctccaagaagcttgggattgtgttaagcatccaaacctaagaataattggtgttcccgagaaagaagagaaatctaaaagtctggaaaacatttgagggaaaaatcaaggacagcttgcccagccttgctagagatctagacattcaaatacaagaagctcaaagaacatctgggaagttcatcacaaaaagatcattgcctagacacatagtcatcaagttatctacagtcaagatgaaggaaagaatcttaagagctatgaggcaaaagcatcaggtaacctataaaggaaaacctataagattaacagcagatttctcggcagaaaccctacmagctagaagggatcggggtcctatgtttagcctccttaaagaaaacaattatcagccaagaattttgtatccagtgaaactaaacttcataaatgaaggaaagatacaat

SEQ ID NO: 435932 - DNA, 526 bp, Homo sapiens
atcaggtaacctataaaggaaaacctataagattaacagcagatttctcggcagaaaccctaccagctagaagggatcggggtcctatgtttagcctccttaaagaaaacaattatcagccaagaattttgtatccagtgaaactaaacttcataaatgaaggaaagatacaatcttttccagacaaacaaatgytaagagaatttgccactaccaagccagcactacgagaactgctagaaggagccctaaatcttgaaacaaatcctctaaatacaccaaaatagaaacttcttaaaacataaatctcacagaacctatataacaataacacaacaacaacaaaaaaaacaaaccaaggtattcaggcaacaaatagcacaatgaaaagaatagtacctcacatctcaacactaacattgaatgtaaatggcctaaatgccccacttaaaagatacagagtagcataaacttaagataaagaggtggaaaagatattccatgaaaatgcataccaaaagcaagc

SEQ ID NO: 435933 - DNA, 526 bp, Homo sapiens
atcaggtaacctataaaggaaaacctataagattaacagcagatttctcggcagaaaccctaccagctagaagggatcggggtcctatgtttagcctccttaaagaaaacaattatcagccaagaattttgtatccagtgaaactaaacttcataaatgaaggaaagatacaatcttttccagacaaacaaatgttaagagaatttgccactaccaagccagcactacgagaactgctagaaggagccctaaatcttgaaacaaatcctctaaatacaccaaaatagaaacttcttaaaacataaatctcacagaacctatataacaataacacaacaacaacaaaaaaaacaaaccaaggtattcaggcaacaaatagcacaatgaaaagaatagtacctcacatctcaacactaacattgaatgtaaatrgcctaaatgccccacttaaaagatacagagtagcataaacttaagataaagaggtggaaaagatattccatgaaaatgcataccaaaagcaagc

SEQ ID NO: 435934 - DNA, 626 bp, Homo sapiens
acaattctcaaaagaagatatacaaatggccaacaaacatggaaaaatgcttcaacatcacttattatcagggaaatgcatatcaaaaccacaatgcaatatcatctcactsctgcaataatgcccataatttaaaaaatcaaaaaataatagatgttagcatggatgcagtgaaaagggaacacttttacactgttggtggaaatgtataactagtacaaccactatggaaaacagtgtggagattcctttaagaactaaaagtagatctaccatttgatccagcagtcccactactgggtacctacccagaggaaaagtcattataccaaaaaatacccgcacatgcatgtttatagtagcataatttgcaaatgcaaaaatgtggaaccaccccaaatgcccatcagtcaattagtggataaagcaactgtggtatatataccatggaatactactcagccataaaaagaatgaagtaatggcattcactgcaacctggatggaactggagaccattattcttagtgaagtaactcaagaatggaaaaccaaacatcgtatgttctcactcataattgggagctaagttatgagaacacgaaggcataagaaggattcaacgg

SEQ ID NO: 435935 - DNA, 403 bp, Homo sapiens
cattgcaatgtttaccctattaacttggagataggcatttattgggctaaatcctcacgtagaatgagctttcccaacacaggagctgcgtcctatgcatactcagtcccatgtgcctggcgcagtgtgtggcctgagactgacaccagcatgtgttcacagccgtttcctcaagctgactgaattctcgccttcgctttctttggaaatggttttatagggtttgctccatctgttctacataagacagaagtgagacaccgggttcagggaccaggggcactcatgcmtggctccgctgtgcccacggggcctccaccagagaagtgtgagactccgggttcaggaacgaggggcactcacgcatggctctgctatgcccacggggcctccgccagggacg

SEQ ID NO: 435936 - DNA, 403 bp, Homo sapiens
cattgcaatgtttaccctattaacttggagataggcatttattgggctaaatcctcacgtagaatgagctttcccaacacaggagctgcgtcctatgcatactcagtcccatgtgcctggcgcagtgtgtggcctgagactgacaccagcatgtgttcacagccgtttcctcaagctgactgaattctcgccttcgctttctttggaaatggttttatagggtttgctccatctgttctacataagacagaagtgagacaccgggttcagggaccaggggcactcatgcctggctccgctgtgcccacggggcctccaccagagaagtgtgagactccgggttcaggaacgaggggcactcacgcatggctctgctatgcccacggggsctccgccagggacg

SEQ ID NO: 435937 - DNA, 631 bp, Homo sapiens
ttttagctcaaacatttttattacatagttaagttcacaataatatctgatgtccaaaaaccttctattctagtaggatttataagtgccacttaaagsaagttgaggcccaacatgtatcattaactaagaccatatcatattcaggtggccttcatgtaaccaattttgttttaaacaggatctgctttaagttgacgtacaatgcattaagcatcactcacacagagatattcaattgtttgtgttacagttatagagttattacactgaatattctactattccagtgttttttaaatgtgtattttgcatcatattacctaatttttttaagtagccactgtttactttcaagctttttcattttctcgcaaaataataactcttggtcatcataggccgccaaatatcaagccttaaccatctgtcaactggcttgaattcagcaggcatgctcctgtagttttggttctaattgtgtttaatgccgcactaattatttcaatggggaataattttgtacagtcaaagttgactcattttataaactggaatctcctcagctataaattggcaggtctcatccttcattcctcctaagcgttgtgccaaaggggaataagtatat

SEQ ID NO: 435938 - DNA, 562 bp, Homo sapiens
ttttgtgtgacctggcaaggaagttagaccagtaagggcaagacatggaaagtcttaatcccaaataagaggtacataatctaagttataaaagcaccaccaacaggctgtatgactttggacaagtcaattaacatatcagtactacagtttcctcatctgtaaaataatctctgaaaccactttaaactctcacagtcgatgatcctctcatatatcagaaaaactgcatttataaaagcagatgaatgaaatatagagcgattacaaatgactcaagttttacacttgctaatattgacagcctctgtaaagctgcaagattcaggcttaaaatacaattaattagcctgggctgtcaagaaatgtgcctacctaggaaattaaagcycaaaagaaatcaaagccagagtaaggagttggttaagtatctacagaaattctgatatattagctaaagctgcttcatccaatccttctatttggaaatggtcataacaaattaaaagcaaacaagaaaattgagctgctatccccagcaggagcccaattttttttaagt

SEQ ID NO: 435939 - DNA, 601 bp, Homo sapiens
ataattcctagtatatagaaatgattgatttttataaacaattatttttcagtaaaaataagtgacttttctttatagactgtttctgaaggattctactttatgttcatggaaattacactcttttaatcctgagattttatggattgctgaagtatataattaaattgtgtagtcattataatatgtacaggtggcrgaaacaggttgggaacaaacccaatcaactcttggtaagcatacaaataaaacaggaagagcaaaagtatatcagtgtatcacagtagactactgggctatagggattcagcatggtcatgaaaaaatagagtaaacagaaggtcagtcagttaatctggagagtcagctaagcgaaggtcatttaagagagcttctactgaaagatctacacaaaagagacaagaaggcaatagaaaggcccagttcctatgattgcatttaaacataaaactaatgctatatcttgagaacataagaaacatattttatactcgtcacaatatatctactgaaggagcacttataaagaaggaaaaatagctattacaatcatgtttttgaaaaataatgatggtaggaa

SEQ ID NO: 435940 - DNA, 601 bp, Homo sapiens
ataattcctagtatatagaaatgattgatttttataaacaattatttttcagtaaaaataagtgacttttctttatagactgtttctgaaggattctactttatgttcatggaaattacactcttttaatcctgagattttatggattgctgaagtatataattaaattgtgtagtcattataatatgtacaggtggcagaaacaggttgggaacaaacccaatcaactcttggtaagcatacaaataaaacaggaagagcaaaagtatatcagtgtatcacagtagactactgggctatagggattcagcatggtcatgaaaaaatagagtaaacagaaggtcagtcagttaatctggagagtcagctaagcgaaggtcatttaagagagcttctactgaaagatctacacaaaagagacaagaaggcaatagaaaggcccagttcctatgattgcatttaaacataaaactaatgctatatcttgagaacataagaaacatattttatactcrtcacaatatatctactgaaggagcacttataaagaaggaaaaatagctattacaatcatgtttttgaaaaataatgatggtaggaa

SEQ ID NO: 435941 - DNA, 611 bp, Homo sapiens
cctcatggccgccacttcctgctggacgtccacggggctggggtggtgggcagggagggagagtgaggatggaaaaccaggatgaccagcggctctaaatcccctaagggtggtattcctttttgaggaactggccacccctctacacagcagctgagatgcaggagttcctgtttcaactcccccaccctgctggaggctgtaaggcagggtgtgatcggcttttactggagaacaggaaatagcagsaaacgtcacctacaagggcacattaatcacattagcttggcaaactatcatctgggattcaaagtcacatgtgtgagcacagcatttctaggcagcccgtttccacagccctgctgcccatgccttttgttttagaagaccggtctctgcagctcactgctgctggaaggaaaactcacatgatcacattttgtgtacacatgcatccacatgcatagtgaaaccaggtgagcttaattcattttggctagactgaagtcaagcttctgaaaatataaaatggttgtatttctgggccaatgctgacgctggaggtggcatgttgatgaggccaggaagttattctattttctggtgaggga

SEQ ID NO: 435942 - DNA, 557 bp, Homo sapiens
acatttttgttgggaaactatccttcgcccatttctttgcctttggacctttgtcaaaatcagttgaccactgtgcccctggctggagaaacagccaaattgacccgccccttgagaaaatgtccccaaatcatggagccaccacatgcccatccctgcagctggagatatagcctggtggccccrcccccagtgagccagttctcaagtcagccaacacatcatgcactgcacccctagccagagaaacaacccagcagtcctgcccccatgtgcacatgcatgccccttgcctataagccaatttggtaagcccacctctggctaagccacaacactgccaccacaaactcctgtagcctaggtcactgaggcactcgcaagcgtcactaacataaattatagctgaagacactgcatgaacattgcactaccctatctttccagaaccaaaatcagtgtgccttccccagccaataccctaggatctagctacaggaataagtccttatgaaagctattttataaaactgaaagaggcaactgttccgttagat

SEQ ID NO: 435943 - DNA, 557 bp, Homo sapiens
acatttttgttgggaaactatccttcgcccatttctttgcctttggacctttgtcaaaatcagttgaccactgtgcccctggctggagaaacagccaaattgacccgccccttgagaaaatgtccccaaatcatggagccaccacatgcccatccctgcagctggagatatagcctggtggccccacccccagtgagccagttctcaagtcagccaacacatcatgcactgcacccctagccagagaaacaacccagcagtcctgcccccatgtgcacatgcatgccccttgcctataagccaatttggtaagcccacctctggctaagccacaacactgccaccacaaactcctgtagcctaggtcactgaggcactcgcaagcrtcactaacataaattatagctgaagacactgcatgaacattgcactaccctatctttccagaaccaaaatcagtgtgccttccccagccaataccctaggatctagctacaggaataagtccttatgaaagctattttataaaactgaaagaggcaactgttccgttagat

SEQ ID NO: 435944 - DNA, 436 bp, Homo sapiens
ggtagacttcactgataccgtgacacctgtttaaacaagagtgcctcccaacttgctccaaaacatgctttctgaaccagggtcacaggaggaaaaaaccccaaaacactcccttttaatagtgcttaccagttctaacccygtcccaacaccataatgacccatgaggcctgacatggactagggggacattatgacgaggagagatgggaggtgtcattgagtcacgcagccttccctgtttgggggaggattattcttggacctactctcctaccttattcttgtgagcagtttccctcacgaggccctccagccacaggctgtggtggaatttgaaccttatcagacatggtatcagtgttatcatgggagcccaagaagtcatgttaaaagtgaagagatcagatgattaatgcaattaaggcaagatgtt

SEQ ID NO: 435945 - DNA, 568 bp, Homo sapiens
tatcaaaatgcaatgacattcattacagaaatagaaaaagtaatcctaaaatttgtttggaaccacaaaatactccaggtaaccaaagcaatctgagcaaaaagagcaaaggtggagggatcacactacctgacttcaaaatataygacaaagttatactaactgaaacagcacagtaatgaaataaaaacagacacgtagaccaatggtaaagaatagaggacccagaaataaatgcaaaacaattgtttggtggtctatcttttagcaggttgatgtaggtattattgtttttaatagatttcttactggagttatgagtagattgcagaacacaattacagtattagagtattctgggtttgtcatgtactcaattttaccagtgggttttatatatttacactttttttgtttgtttgtttttgcatgttagtattttttctttcagtttgaagagctctctttagcattttttgtcagatgggtctggtgacaaattctcacagcttttgttgtttgggaaagacttctctgcttcatattagaaggatagctctgttggata

SEQ ID NO: 435946 - DNA, 584 bp, Homo sapiens
  misc_feature (1)...(584): n = A,T,C or G
aggcagttcagacacctgtacctagagctagtgcaaagaacacttccgtccgggcttcaagaatctccgctatcgaacctggggctccttgtagcccacatttgaccttcccatgctgctatattctggaaaccagaytgtatctaagaaatgtaataggtttctacatgttacccagatccaaaacatgaatggccttaaagaattcaaattgcaaaggaagcaatccacagtttacaaacatgttcactgcagcactccttataagactgaaaaactagaaacaacctaactaacaatagggaaaatcatggtacatccttacaatggaatagtatagaactctaagaaaagtcatgactgtaagaggttttagtgatatgggaaatgctatgatcgtgacaagcagaacataaaatgcaagataccaaattatatgtgtatggtgttctcgactatggtaaaaaatatatatatacttaccttaagaaatataagaattttcaacaacctccaccaaaaaaagaaaaaaggaatatgaggattcagccagaggtgagatattttaaaaaagaaagnnnnnn

SEQ ID NO: 435947 - DNA, 584 bp, Homo sapiens
  misc_feature (1)...(584): n = A,T,C or G
aggcagttcagacacctgtacctagagctagtgcaaagaacacttccgtccgggcttcaagaatctccgctatcgaacctggggctccttgtagcccacatttgaccttcccatgctgctatattctggaaaccagattgtatctaagaaatgtaataggtttctacatgttacccagatccaaaacatgaatggccttaaagaattcaaattgcaaaggaagcaatccacagtttacaaacatgttcactgcagcactccttataagactgaaaaactagaaacaacctaactaacaatagggaaaatcatggtacatccttacaatggaatagtatagaactctaagaaaagtcatgactgtaagaggttttagtgatatgggaaatgctatgatcgtgacaagcagaacataaaatgcaagataccaaattatatgtgtatggtgttctcgactatggtaaaaaatatatatatacttaccttaagaaatataagrattttcaacaacctccaccaaaaaaagaaaaaaggaatatgaggattcagccagaggtgagatattttaaaaaagaaagnnnnnn

SEQ ID NO: 435948 - DNA, 562 bp, Homo sapiens
tgaatggctccatttatatgaaatacccagttaaggcaaatctataraaagagaaagcagatcagtagttgccagggactggagatggaagcagggactgactatagacaaataactttctgaggtgatggaaatgttctacaactagattgtggtaatagcacaacttttaaaattcactaaaaatcattctaacttacaagggtacgttttatgtcaaatatacttcaataatcctcaagtccatagcaatattcagaaagaaagaaagagagaaagagagaaagcaagcaagcgggcaagcaagcgggcaagcaagcgaagggtgtaagaaactttgccaccattgtagatgaccattatgctaacttcttactccaaaaattagtcattaaagaaaaagaatcgagcattcaccttgcttttttaaagtcaaaattgtggttaattcctaattaatggagaaagctttcctttacaggagaataccggtaattaatgtgtagaaaagaaataataaaattagaaaaatattattttgccaaacataataaagtaactg

SEQ ID NO: 435949 - DNA, 562 bp, Homo sapiens
tgaatggctccatttatatgaaatacccagttaaggcaaatctatagaaagagaaagcagatcagtagttgccagggactggagatggaagcagggactgactatagacaaataactttctgaggtgatggaaatgttctacaactagattgtggtratagcacaacttttaaaattcactaaaaatcattctaacttacaagggtacgttttatgtcaaatatacttcaataatcctcaagtccatagcaatattcagaaagaaagaaagagagaaagagagaaagcaagcaagcgggcaagcaagcgggcaagcaagcgaagggtgtaagaaactttgccaccattgtagatgaccattatgctaacttcttactccaaaaattagtcattaaagaaaaagaatcgagcattcaccttgcttttttaaagtcaaaattgtggttaattcctaattaatggagaaagctttcctttacaggagaataccggtaattaatgtgtagaaaagaaataataaaattagaaaaatattattttgccaaacataataaagtaactg

SEQ ID NO: 435950 - DNA, 571 bp, Homo sapiens
ttcaaattctattttatccttctctgaaaaccatagtatcaattggacatggccccctaatggaaacacctattgccttgtcatctgaaaatcctgcctctgtcttaggaattctgaatttttataggtgaataaagcaaaattacagattaaaggaattacagtatttcagaatttgaaggattcttgaagactatttaacccaaacatctcattttcctaaattttgaaaataagaggwtaagtaactccctacaggccccagggctcaacaatggccggaggcttacatcgctgtggtctttgaccctttcgtgttttcttgtgcttttccctcaattcctttggtgtctactttgttctggcgatttcaattttacttttccaatatgacaaaccagtcttttaatttttcaagataacttgtctgtgaagaattaccttcactttagcagttacacaaaaacctcacatgggttgaatgtatccttcctttaagatatatatacatacgtatatataaaccatatacataacatatatgtttatacatatatgtataatacatcat

SEQ ID NO: 435951 - DNA, 661 bp, Homo sapiens
ggaaagaggaagaggccaaaggacaagagccaggttcttccctattggctgtttctgcttctcttaccggcaccagctgactgttgacatcttctgtgtggttagtttcctcttactggctctttaatcatctctctggagaatgctgggagagacaaaagatactcccctctgcagatcccttgatttgagggatcaggcttccacttgacctctttcctctcctttgactccagtgaaagacagtccacccggcaacatcttgtagctgggatgcttttgcatggtaggtgaggctctttattgaggtataggtgaaatgaaaaatgttcagcctcccctaggtggtatccacccagctcgtggaaattttattctttctatgaaaacagtggaaatgtaagyagcttctcagccagctctctcaactccaccatctcttcctcactcatttctccaagaccaaacaatacaacacatactcaacaggcctggtgccttaccagctttcagaggaaagatgaccattaatctcttggttaatgaaaagtgagggtttggtgaacctacagaacttagctagaatttcttttagggtctttctcccttagctttgaggagaagcatcaggtatcctcccccatgggaaaagggaggttat

SEQ ID NO: 435952 - DNA, 561 bp, Homo sapiens
cgattcagagcagccacatttcaagtctgcagtagctgctgctggctgttgttgccatattgtacagggctctgcactggggttgccttagagaacaggcagtgaagccatggggccggtgttttaatcacctgtgcctccccacagggcaccgggcccacctgggcaggggcctcctggtgtcctgctctgattatgctttcggggagaggctgcatcctccctcctgtgcatagctgatcagcagcagggagaaccctcccctcccccaggtcccagytccggcaggcctcctttcctagctgtgaaacatgaccactggtcaagccaggattgccggtgcgcctgggagcaagcctcctgtttgcagctctcatgaattgctctttcttttccacggagcacaaaaaccatttccctgcctccctttactctcatcacagcattacaacgacctgcagagggaaggtacacaaggctccctttgtttctcggctgggagtcatacaatgtacctgctttagatgaaagtcttaccctgcaaagccacattttttggtc

SEQ ID NO: 435953 - DNA, 561 bp, Homo sapiens
cgattcagagcagccacatttcaagtctgcagtagctgctgctggctgttgttgccatattgtacagggctctgcactggggttgccttagagaacaggcagtgaagccatggggccggtgttttaatcacctgtgcctccccacagggcaccgggcccacctgggcaggggcctcctggtgtcctgctctgattatgctttcggggagaggctgcatcctccctcctgtgcatagctgatcagcagcagggagaaccctcccctcccccaggtcccagttccggcaggcctcctttccyagctgtgaaacatgaccactggtcaagccaggattgccggtgcgcctgggagcaagcctcctgtttgcagctctcatgaattgctctttcttttccacggagcacaaaaaccatttccctgcctccctttactctcatcacagcattacaacgacctgcagagggaaggtacacaaggctccctttgtttctcggctgggagtcatacaatgtacctgctttagatgaaagtcttaccctgcaaagccacattttttggtc

SEQ ID NO: 435954 - DNA, 613 bp, Homo sapiens
atttacgcatgtaattcatttgagttctatatacctcttctgcccattcaatagatcctccctctgagtaacacagacccctcagcataagagatacgatttatgtagagaagtgagaatgtgttttaattgacatcaagttgaaagggtaggamataaaactgtataaaatctgattacagttatgtgtaatatatgcatgcattctaaaaagattgagagggaaattgttatattactatatatattataaatatgttaacagttccgtgcttgttagttttccccattgaacttgaacatagttaaaatgtaattaaataactgaatttagttgacatgacatgtttgggtgaacataggatgccttcaagttttcacaactttttaaaatattcacaagaaggtgatcaagattggccttaaatttataacacaattgcccacaaagttatctttttcctcttttttcttttttttttttttttgttatgggggtatatgctttgcccagtgttctagagtgttaactgtttgtatgatttatcaaaaaaacaaaaaaagttgacaatgattttgatttcatattctccacttctctcaatgcccttga

SEQ ID NO: 435955 - DNA, 613 bp, Homo sapiens
atttacgcatgtaattcatttgagttctatatacctcttctgcccattcaatagatcctccctctgagtaacacagacccctcagcataagagatacgatttatgtagagaagtgagaatgtgttttaattgacatcaagttgaaagggtaggaaataaaactgtataaaatctgattacagttatgtgtaatatatgcatgcattctaaraagattgagagggaaattgttatattactatatatattataaatatgttaacagttccgtgcttgttagttttccccattgaacttgaacatagttaaaatgtaattaaataactgaatttagttgacatgacatgtttgggtgaacataggatgccttcaagttttcacaactttttaaaatattcacaagaaggtgatcaagattggccttaaatttataacacaattgcccacaaagttatctttttcctcttttttcttttttttttttttttgttatgggggtatatgctttgcccagtgttctagagtgttaactgtttgtatgatttatcaaaaaaacaaaaaaagttgacaatgattttgatttcatattctccacttctctcaatgcccttga

SEQ ID NO: 435956 - DNA, 613 bp, Homo sapiens
atttacgcatgtaattcatttgagttctatatacctcttctgcccattcaatagatcctccctctgagtaacacagacccctcagcataagagatacgatttatgtagagaagtgagaatgtgttttaattgacatcaagttgaaagggtaggaaataaaactgtataaaatctgattacagttatgtgtaatatatgcatgcattctaaaaagattgagagggaaattgttatattactatatatattataaatatgttaacagttccgtgcttgttagttttccccattgaacttgaacatagttaaaatgtaattaaataactgaatttagttgacatgacatgtttgggtgaacataggatgccttcaagttttcacaactttttaaaatattcacaagaaggtgatcaagattggccttaaatttataacacaattgcccacaaagttatctttttcctcttttttcttttttttttttttttgttatgggggtatatgctttgcccagtgttctagagtgttaactgtttgtatgatttatcaaaaaracaaaaaaagttgacaatgattttgatttcatattctccacttctctcaatgcccttga

SEQ ID NO: 435957 - DNA, 567 bp, Homo sapiens
atttgtaaacactgccacctaaacccactgcaaatctacatgacagggaaaaaatattggaaataaaactaaatagagatcccaggtccctcacccagtgaataaaagagaatctaagtctagttagaattttagtaggaagctaatcttacagacaatcactgaggaaaggcacagaaaagcaaccttgtgggggattgcagggggctctgggagtgcatgtagataccagcaagtagcagtgacatcatcttcttctttatatgggaaacaccctcatggtactgaaacccatactagcagacttccaaatgaaayttcttcggagaaacagctgtgggtttcacagagggccatccttcaatctacaggcttgggtatggtggagcttttggccacattgcttctgacaatctgtccatgtccccagccctgaggcttaatgctagaagctacagcctacctcatacacaggacagttccttgcacatgttggcaaagtttctagggtaaagatgttaccactgagtactatttggggaatggaaacaggagatctgagatctg

SEQ ID NO: 435958 - DNA, 633 bp, Homo sapiens
gccaaaacattaggcagatggttatcaaatgattttcacattccctatgtgaagatcactgtgccctgctgatgacaggattacatagggactaaaacaaattaactggaagcagggagragaagggggagaatcctattagtttggaccacacatgtggttaaataaaagcaggaacaatcacagcattgggttttatttagatcagtatgtgctttctcaaagggattgaaagtatttggaatgtgatttgtctttttccactttgattgctttgtaacgtggtgcctcttaagaaacctcatgggtgcataagcccaccacagtgtggcattctctttagaactcccagtgaggtgggttcccaccctgatctcagaatcttgttcagggtatcttttgtgtatttaaaggacacttggtcttctctgactatccctgctcaaagacaggatcactgaaatgactcccagcaaaggataaaaacagacatgatccagtgtgtgtaatgtataacaaacattggcaggtttctcattctgtgtttaactttgacatgaagctagtctgtcatgtttgaagatcaaatgagatttctgccaacccactcctagatagggaggatttatctgc

SEQ ID NO: 435959 - DNA, 416 bp, Homo sapiens
atgtgctgtactatgacctattactatgtttgtgagcacagggctcctagactcagtacaggattagactggaattgacagagctaaaaagctaaaaataaaataaatcacaaaatagcttaataaaatgwttccccaaatcgcctctaaacctgttggctccatgggtcaagatccctgagcactgatcactcctatccacggagctggaagggagttaagccagccccagagcctggggaggtgcaggggatggatgagaagccagctagagccctgggcagaggcaaagagagcagactgtgaggacatctgaatggcttcattttcacttcctcactctgcttttcctctctatttttctctctcggtctctatatctgttttcctctctgattatatttatatctcccctt

SEQ ID NO: 435960 - DNA, 416 bp, Homo sapiens
atgtgctgtactatgacctattactatgtttgtgagcacagggctcctagactcagtacaggattagactggaattgacagagctaaaaagctaaaaataaaataaatcacaaaatagcttaataaaatgattccccaaatcgcctctaaacctgttggctccatgggtcaagatccctgagcactgatcactcctatccacggagctggaagggagttaagccarccccagagcctggggaggtgcaggggatggatgagaagccagctagagccctgggcagaggcaaagagagcagactgtgaggacatctgaatggcttcattttcacttcctcactctgcttttcctctctatttttctctctcggtctctatatctgttttcctctctgattatatttatatctcccctt

SEQ ID NO: 435961 - DNA, 565 bp, Homo sapiens
tttactaatagagaggggaatccaatgagcactcaagttctgggttgatcaatggtaatgaactcaaatctgtgggcccaagttatgaattgttatgccgtctttttccagataaaacttaaatgtactagaggcatgttggaattatgatgaaattaacagccaagttttaaaactgaaggtaagagtaagaagaaggcccatagcaaaagcaataagtttgtatttctctgcaagcacacaagctcagtcagtatgaagtggtarggcagcagacggacctgtcacccttgtcagcaaacgtcatctctaactgtcgcaattcttttatcggactgactgagatcgttcaggggtctaataagttagagagtttggaaaaggttaatgtatttgggggataaatgatcaaggcaaagtgactttggaataaatgagctttttgtatattttgttatttttgacgaaataagtttcatttaagaggattgattatttttccagtgtaaggcttcagtcatttccccataattcttacatttatggcgatgtcgggaaggtctct

SEQ ID NO: 435962 - DNA, 558 bp, Homo sapiens
cttatcaacactgcatttgtaactgcataaatatatttattccattcaaaattttttatagtgtatttataacaaatgctgtatgaacaaggcaggcttagtgctcttccttgtggagtttacatctagttagaagacaatgcartaagtcttttgttgctgcagtattgcctgacttggagctacataacagaggcacctaactcatcttgaagctggtgcagtttctttagatgcaaataagagagagcagaagattaattcctgcagagggatgaccatatgcaaaggtccagtggcaagagagagcatgactctgaactgggaaacagcccatggaaaaaggcatcatgctgtaagtgagggcacttaaattaggcagaaaaaaatccacaccaagagccctgctattttgctgactgatgtaaagaaagaaggtccaagaacagggccatgggctattaaatcaccctatctacacacacatatacacatacaccaccacgaccaccgctaccacacaccacacatccactgcaggacaaggatttcattata

SEQ ID NO: 435963 - DNA, 558 bp, Homo sapiens
cttatcaacactgcatttgtaactgcataaatatatttattccattcaaaattttttatagtgtatttataacaaatgctgtatgaacaaggcaggcttagtgctcttccttgtggagtttacatctagttagaagacaatgcaataagtcttttgttgctgcagtattgcctgacttggagctacataacagaggcacctaactcatcttgaagctggtgcagtttctttagatgcaaataagagagagcagaagattaattcctgcagagggatgaccatatgcaaaggtccagtggcaagagagagcatgactctgaactgggaaacagcccatggaaaaaggcatcatgctgtaagtgagggcacttaaattaggcagaaaaaaatccacaccaagagccctgctattttgctgactgatgtaaaraaagaaggtccaagaacagggccatgggctattaaatcaccctatctacacacacatatacacatacaccaccacgaccaccgctaccacacaccacacatccactgcaggacaaggatttcattata

SEQ ID NO: 435964 - DNA, 623 bp, Homo sapiens
ctcctgccctagtggctcccaatctatttaggggtagtcagaaaaaggggaccttcacaacagctgcttagctgcttgagctcagagaggaaacccataatttgtctgtaatccctaatgccaacagttgttcattaagaaacaaaactaatgtaatcttgattatttgctcagatttctactctatcatgttttgtgcatctggcaggctaatgtaattttcctcagaaacccaaagcaatctggtgctcagacaacaccatgcagatttaggtaaattccaggctcagattagcataatactaactaatcacgaatattatttgcattcattagagtgttggggaaaaattgtttctaaatggcagaaaattgaaagaaggattaagggcaagagcttgaaaatcctgtttggcttgatacgactatattacagatgatttttctcttacaaggcctaatatttaatrtggaagtattaattagagtattggaaaaagattgcatctaattggaagaaaactaagagagattaaggaccgggcatatggacttgcttttgcttgattcaagtgtggaacagataatttcccatgcaatgccaaggagcttaaatgtgtaaa

SEQ ID NO: 435965 - DNA, 548 bp, Homo sapiens
ggagatctaagtttttcaccattgaagttttgatgaaatggagctcaatttagcagtagcaaggaatggtatggttttcactgacagaacttaaggaactaattttgccatattatcttgggtggggaaagtgtgtggagaaagattatcattcatattctgcagaacatgtgtgtctggccaatgacaaagatgcctaaacttccaattaattagcacacaactgacattctaaattatccagaaagtgtctgatttattcctatagtagaaactaggatatgagctctacaagggtagggattttggtctgttttgctgactaatgtcaccaccaacatcagtgtccaacacaagtaagwcctcaagaaacgcttgctgaatgaaacaactcattttaggaaagcaactcatttccaacatttattataaacagaatgtattccatttcctggggtcagtacgtctatgtctttacaccttcattctcattgctctaagtactgatatactgagtatcaacccagaggaagtaatatattgttata

SEQ ID NO: 435966 - DNA, 548 bp, Homo sapiens
ggagatctaagtttttcaccattgaagttttgatgaaatggagctcaatttagcagtagcaaggaatggtatggttttcactgacagaacttaaggaactaattttgccatattatcttgggtggggaaagtgtgtggagaaagattatcattcatattctgcagaacatgtgtgtctggccaatgacaaagatgcctaaacttccaattaattagcacacaactgacattctaaattatccagaaagtgtctgatttattcctatagtagaaactaggatatgagctctacaagggtagggattttggtctgttttgctgactaatgtcaccaccaacatcagtgtccaacacaagtaagacctcaagaaacgcttgctgaatgaaacaactcattttaggaaagcaactcatttcmaacatttattataaacagaatgtattccatttcctggggtcagtacgtctatgtctttacaccttcattctcattgctctaagtactgatatactgagtatcaacccagaggaagtaatatattgttata

SEQ ID NO: 435967 - DNA, 687 bp, Homo sapiens
cacatctcatttaatggttaattaagtccaataattggcatttttgtttcttttgtcttttaccctaacgccgaaggaacaaaagccacctcaacgcaacaggctttactggctgcctcttacaggatggatttcagaatccaaggctgtacggggagtcccctcccaaccactgacagcaccagaatctcccggcttcaggaagtggaaggggcaggagtcattggtaatttgctctttaagctttttgtgcctgttgattactttctggttgcttggattaaacaatcgttgcaaatatgcaaaacagtgagaggagattcatacatattcgttctccaattgttcctcctgacgtcagatcataatttcctggtaattggatggcttgcaccgactaatgctctcgtctgaaattctccacctttccctagsttgcagcagattttgtaccgggagatgggatgaggactttttttttaagaattattttctgttcactgtagttcccgttgtctcccttcttccctatacttaagaacatttattcctgaagtgtgaggatctggagtttatttcctgggagtgtcatttcccagatagttcttgagtagtttgaagaaggttggaatgggccagtaaagatggaggaaatgggtctggtaagggcagaggcagaggtgaggt

SEQ ID NO: 435968 - DNA, 564 bp, Homo sapiens
ctcatttagctgcctttttcatgaagcaccattttaagttgaaagcacaagtgacacacaaaccattcacattagatattttacagatattttcacaaaaatgaaaaaactctgtcacttgaaggaaaataactgactgtatttgttggcaatgataaaataggagggtaaagcaaaaatcatagtttgggaaaaattttatagtacactgtgagcctgatagctttccaatacagtactttaagcttgttcttattatattggtggtgatttcttggtattacaaaatgaaatgggtcaatattcagaagacctgcataactcagtgaatcaacattttccagaggaccaatgcatgatgctagcaaatcttgcatgggtaaaaaactatttaaaccaacttcaagaaattaccagttgtcaactttcaataaagtataacagaaaatattcacaamtacgtgcaaaaactaaaaaaatacttctctcttttctaactatgtttctgtgtgaggctggattttctttatacacctcaacctgatgaacatattaaaacagatt

SEQ ID NO: 435969 - DNA, 567 bp, Homo sapiens
ctttacttctgcaaatttctgcagtccrcttgaatccccctccctgcccaaaaattggtttttcttttctaccacatggttgggctgtaaattttcccaaattgtatgccctgctttctttgtaaatataacttccagtttcaagtcatttctttgctcatgcgtatcagtgtaggtgattagctgcagccacgccacaacttgaatgctttgttgctcagaaatttcttccaccagataacctaaatcatcattaccaagttcaaagttccacagatcactagggcaacaatacaatgcagctaattgctttgctaaggaacaaaagtgaactttgctccagttctcaatgagtttctcatttccaactgaggtctcatcagcctcacctttactgtccatatcactatcatcattttggttataacaatctaacaagtctttaggaagttccaaactttccttcaacttcctgtcttcttctgaggcctccactatttcaaccactgcccattacccagtcccaaagttccttccacattttcaggtatctttatagcaatgcct

SEQ ID NO: 435970 - DNA, 567 bp, Homo sapiens
ctttacttctgcaaatttctgcagtccgcttgaatccccctmcctgcccaaaaattggtttttcttttctaccacatggttgggctgtaaattttcccaaattgtatgccctgctttctttgtaaatataacttccagtttcaagtcatttctttgctcatgcgtatcagtgtaggtgattagctgcagccacgccacaacttgaatgctttgttgctcagaaatttcttccaccagataacctaaatcatcattaccaagttcaaagttccacagatcactagggcaacaatacaatgcagctaattgctttgctaaggaacaaaagtgaactttgctccagttctcaatgagtttctcatttccaactgaggtctcatcagcctcacctttactgtccatatcactatcatcattttggttataacaatctaacaagtctttaggaagttccaaactttccttcaacttcctgtcttcttctgaggcctccactatttcaaccactgcccattacccagtcccaaagttccttccacattttcaggtatctttatagcaatgcct

SEQ ID NO: 435971 - DNA, 567 bp, Homo sapiens
ctttacttctgcaaatttctgcagtccgcttgaatccccctccctgcccaaaaattggtttttcttttctaccacatggttgggctgtaaattttcccaaattgtatgccctgctttctttgtaaatataacttccagtttcaagtcatttctttgctcatgcgtatcagtgtaggtgattagctgcagccacgccacaacttgaatgctttgttgctyagaaatttcttccaccagataacctaaatcatcattaccaagttcaaagttccacagatcactagggcaacaatacaatgcagctaattgctttgctaaggaacaaaagtgaactttgctccagttctcaatgagtttctcatttccaactgaggtctcatcagcctcacctttactgtccatatcactatcatcattttggttataacaatctaacaagtctttaggaagttccaaactttccttcaacttcctgtcttcttctgaggcctccactatttcaaccactgcccattacccagtcccaaagttccttccacattttcaggtatctttatagcaatgcct

SEQ ID NO: 435972 - DNA, 567 bp, Homo sapiens
ctttacttctgcaaatttctgcagtccgcttgaatccccctccctgcccaaaaattggtttttcttttctaccacatggttgggctgtaaattttcccaaattgtatgccctgctttctttgtaaatataacttccagtttcaagtcatttctttgctcatgcgtatcagtgtaggtgattagctgcagccacgccacaacttgaatgctttgttgctcagaaatttcttccaccagataacctaaatcatcattaccaagttcaaagttccacagatcactagggcaacaatacaatgcagctaattgctttgctaaggaacaaaagtgaactttgctccagttctcaatgagtttctcatttccaactgaggtctcatcagcctcacctttactgtccatatcactatyatcattttggttataacaatctaacaagtctttaggaagttccaaactttccttcaacttcctgtcttcttctgaggcctccactatttcaaccactgcccattacccagtcccaaagttccttccacattttcaggtatctttatagcaatgcct

SEQ ID NO: 435973 - DNA, 617 bp, Homo sapiens
gtgtcatcaacatagataagcaggtacatagatagacattactgtatattacatttacttcatttctcaacctttcataaaacaataattttgtgtaattatgaataaattataatttgaactagtttttaaatttacatatgaatatttgtgttatggaacttacatgattcactagagcctcgaatcattttggtaaccattcgtctactgaggaaaaaattttagtaaacatagagaaaaattattaccttacatttaaaataatttaatgatgtatcctttggagtaaatataatcaaaatgttttactagactatttaaactagaagaaactcatttaggactgaaatattttgttagatgtgagctgtgaataccaaaggaaattaacaatacagtgaaggatttttttttaaccttttttgttgttcatacttattggcaaccaaaataaataggaaataaatgtaacattataaatcaaytattgtagtaacaataaatttcacttgattttaggataccaataactagtcctatttgataaagattgatgtctcacatttatgaataataatattcttaaactaatattcttaaaaataaatggattt

SEQ ID NO: 435974 - DNA, 528 bp, Homo sapiens
aataattatacatatatatgcatcttagatcagagaatataaacatataaagcaaacattaacaactaaagagagaaatagacagcaataatgatagagaactttgatactacactttcaataatggatagatcatccagatgaaaattcaataaaggaacattaaatttaagctgtaccttagacctaatcaacatatatagaacattctattcaacagtaatagaayacacattcctcttaagtgcacatgtaatagtctctaggatagatcacgttagaccacaaaacaattcttcacaaatttaagaagatcaaaatcatatcaagaatcttttctgacaatggtatgaaaatagaaatcaataagagtagaaaaatgggaaagttcacaaatatgtgaaaatgaaaccaaatgctttggaaatgagatcaagaaaaaaatcaaaaactatcttgagacaaatgaaaatggaaatacaacataagaaaacttataggatgcagcaaaagcaatctaacaagaaa

SEQ ID NO: 435975 - DNA, 528 bp, Homo sapiens
aataattatacatatatatgcatcttagatcagagaatataaacatataaagcaaacattaacaactaaagagagaaatagacagcaataatgatagagaactttgatactacactttcaataatggatagatcatccagatgaaaattcaataaaggaacattaaatttaagctgtaccttagacctaatcaacatatatagaacattctattcaacagtaatagaacacacattcctcttaagtgcacatgtaatagtctctaggatagatcacgttagaccacaaaacaattcttmacaaatttaagaagatcaaaatcatatcaagaatcttttctgacaatggtatgaaaatagaaatcaataagagtagaaaaatgggaaagttcacaaatatgtgaaaatgaaaccaaatgctttggaaatgagatcaagaaaaaaatcaaaaactatcttgagacaaatgaaaatggaaatacaacataagaaaacttataggatgcagcaaaagcaatctaacaagaaa

SEQ ID NO: 435976 - DNA, 528 bp, Homo sapiens
aataattatacatatatatgcatcttagatcagagaatataaacatataaagcaaacattaacaactaaagagagaaatagacagcaataatgatagagaactttgatactacactttcaataatggatagatcatccagatgaaaattcaataaaggaacattaaatttaagctgtaccttagacctaatcaacatatatagaacattctattcaacagtaatagaacacacattcctcttaagtgcacatgtaatagtctctaggatagatcacgttagaccacaaaacaattcttcacaaatttaagaagatcaaaatcatatcaagaatcttttctgacaatggtatgaaaatagaaatcaataagagtagaaaaatgggaaagttcacaaatatgtgaaaatgaaaccaaatgctttggaaatgagatcaagaaaaaaatcaaaaactatcttgagasaaatgaaaatggaaatacaacataagaaaacttataggatgcagcaaaagcaatctaacaagaaa

SEQ ID NO: 435977 - DNA, 528 bp, Homo sapiens
aataattatacatatatatgcatcttagatcagagaatataaacatataaagcaaacattaacaactaaagagagaaatagacagcaataatgatagagaactttgatactacactttcaataatggatagatcatccagatgaaaattcaataaaggaacattaaatttaagctgtaccttagacctaatcaacatatatagaacattctattcaacagtaatagaacacacattcctcttaagtgcacatgtaatagtctctaggatagatcacgttagaccacaaaacaattcttcacaaatttaagaagatcaaaatcatatcaagaatcttttctgacaatggtatgaaaatagaaatcaataagagtagaaaaatgggaaagttcacaaatatgtgaaaatgaaaccaaatgctttggaaatgagatcaagaaaaaaatcaaaaactatcttgagacaaatgaaaatggaaatacaacrtaagaaaacttataggatgcagcaaaagcaatctaacaagaaa

SEQ ID NO: 435978 - DNA, 589 bp, Homo sapiens
tcaaaaacaacccctgacaaacagtatttaacattaatcaagacttggatcttgaatataaattttatggtattaattaggaaacttatagattcagcccagaactctctctggaatcccagacctctctctggaatctcagacttgtatatccaaatgtctttatgtccaactgctatgtgaaccttcccctcttgaatctcttttaggcattgcaaactttacctcaagtaatgctcttgacagctgtctaacttccctcacatttttgtctctcccagttcttatggtttaggttaaggtaccaccatgtaccyagtttttgaaggtaaaaccctagattgtagagtgagaattagtctttttttttccccacccgttgcatccaatctatcagcagtgacaatatatttgacctcaaaaacaaatcctaaattttcctctgtctctccacctctattaccacctatgtagtccaaacaactattttctcttataccctgggctccaaattgttctccctacctcttcccttgttcccctataatccattctccatactgtagccagagctatgactttcttttaa

SEQ ID NO: 435979 - DNA, 503 bp, Homo sapiens
ttttagtgtttatgctttagcaggacttggtgtcctttttagactcaggatttaaaaccatgtaacttaatattacaaggactttaaaagcacatgaagaaggatacacrtatgtaataaccttaattaaaaaaattaattttagttattttcctaagcaaaccaaaacttaataataatggcataggaattgtttcgataaactgtaaaatcttttaggccagttaccaaagggaaaagaaaaggccttttgcactgtacacaatattatgatggaagaaaatattttctttagagctttaagaaaatattgttagtctcaggcaataacaaacaggacatgaggaaaaaaaattatatgagctgaaaatgtgttgaaggagaagttttgctattttacacccttaaaaggggagagaaaacctaaaacggtgagatgcaatacaagttgaacattgtgttaaaaacaaattaaaatctcatataatttattgagtaaatca

SEQ ID NO: 435980 - DNA, 511 bp, Homo sapiens
ccattgcaaaattgtacctgagacagtaaaaaagatttgatctaactgacttcatcttgattcttgttcattcctcggtattggctgaacaaactaaattaggaggaatttagtttatagtttagctttgaatcaaagatgaagataacattcccttcccaaaacaaaccgtattgcctgtggactagtccacctaaagccacagaattagaagttatggtaatcttactaaatttaagatgtatctatttttattaaactcatrttaatgtcttatttactaaagattatggaagcaaagattattttctcttgggctgggtttaaagtttatagccaaattttgacactgtatagtatttgaaaggaataagtatgaaattacttgaataataaatacaaagaatgtatgctggcaattcttaacacatttttaatattactttaccaataattttaaagctggcttatttattaaagattttacttaagttaaataaacttgaaaaag

SEQ ID NO: 435981 - DNA, 568 bp, Homo sapiens
gccttgttccccataatttggaattttccttcaaattttatcaagtctgatagagttggttaaacccaatgggaaaaagactgaaggaacaataaaaataggaacaaacatacaacaacaacaaaaacagttaaacaaacaaacgacagcaaacaaacacattatgtgattactgaatattgtaatggtaaggagaaattaagaccagctggttcttaaacttagccaagacaaaaccccaatttagctacttacctagggatgggtctcaggctgaagaccgtactctaccagcctagaagctggaaaaaaaactaaaaaacaaaaacctgaactcatcttccctgctgcaaatgagctcaaactccataaaggagttatctgcctttcatcatcatggaaacagaaaatcttgccttccttgttggaagcaagtaaaactccaaaaaagggaagttgtacggcaaaataaactttagatctcgamcaaattttgggagatcagggattctctggacggtatgctcccagacctcagcaaattgtcctattggagccataatgtttg

SEQ ID NO: 435982 - DNA, 648 bp, Homo sapiens
cattcccgtaaacctaagcttaatttagagtagagcctaactttcttcaattctacaaagtctgagagaggtgaggaagatgcagaagaaaatttggaagccagaagaaggtggtttatgaggtttaagtaaggaagccatcttcataacaaaagtgcgaggtgaagcagtaagtgctgatatagaagatacatgtctaacttaattgatgcagtagctacactaaataacagattctcaatgtatatgaaacagctttctaaaagaagataccacctaggaattttatagcaaagaagacatgtaaatgcttgacatcaaaattcaaaagacaggatgactttcttgttaggagctaatgcatctggtgattatgagccttggtaatgagccagtgctcatttacccttctgaaaatcctacggtccttaagaattatgctaaacatgttctgcctatgttctrtaaatggaacaataaagccagcatgacagcatatctatttacagcatggtttactgaatattttaagcccactgttgaggcctactgcttagaaaaaaaagacttctttcaaaatagtacagctcattcacagtatacctagtcactcaagagctttgaaggtgatgtgtaaggagattaatg

SEQ ID NO: 435983 - DNA, 576 bp, Homo sapiens
catcgctgagcgaatcaaaaacgctaccccatttgggactggacttgtgattgcaatgttttttttttttttgagacggagtctcgctctgtcacccagtctggagtgcagtggcrcgatctctgctcactgcaaacttcgcctcctgggttcaccccattctcctacctcagtagctgtgactacaggtgcctgccaccacgcccggctaattttttgtatatttagtagagacggggtttcaccgtgttagccaggatggtctcgatctcctgatcttgtgatccacccaccttggcctcccaaagtgtttggattacaggcatgagccactgcgcccggccatgattgctatttcaagtgaggggcaggcctgtaggacggagcctctaaccttgtagcgtctgacactaattctgaatagtcagtgtcagaattgagtaagcatataagacactaagttggtgtccagagagtttttttgtgtgtgtaaacaaaaaaatcccaaacatttagtgtcagaagtattgtgagtaaagaaacagttttccttttactttatttacttatttgaga

SEQ ID NO: 435984 - DNA, 583 bp, Homo sapiens
ttcttatccgtaacgtagtatggatcagtactttgtttctttttattgctgaataatatttcatcttatgtgtataacacattttatttctctattagttgatggttatttgagttctttcttctttttcactgttgtgaataatactactatgcacatttgtgtgtaagtttttatgtggatatatrttttcatttctcttaagtatataattaggagtagaattgttgatcacatggtaactctaggttaaacattgtgataaactgccaaacatttttttaaagaagatgtatcattttataatcttaccagcaaggatcagacatttattttttccacattcttactaaagtttgtattaactgcctttcttatagccatcttagtgggcataaagtggtaagagatgatgcatatttagaggaattaaaaatgaaagattaaaggaatctaaagaatacaacaggcaaagaaataataagagttaagcgcttgaaaaacaagaacaatcaaagatgactacatggaagcaagcatgcaagtgagcagaataatgcaaagttaagtatagtgttcatga

SEQ ID NO: 435985 - DNA, 583 bp, Homo sapiens
ttcttatccgtaacgtagtatggatcagtactttgtttctttttattgctgaataatatttcatcttatgtgtataacacattttatttctctattagttgatggttatttgagttctttcttctttttcactgttgtgaataatactactatgcacatttgtgtgtaagtttttatgtggatatatattttcatttctcttaagtatataattaggagtagaattgttgatcacatggtaactctaggttaaacattgtgataaactgccaaacwtttttttaaagaagatgtatcattttataatcttaccagcaaggatcagacatttattttttccacattcttactaaagtttgtattaactgcctttcttatagccatcttagtgggcataaagtggtaagagatgatgcatatttagaggaattaaaaatgaaagattaaaggaatctaaagaatacaacaggcaaagaaataataagagttaagcgcttgaaaaacaagaacaatcaaagatgactacatggaagcaagcatgcaagtgagcagaataatgcaaagttaagtatagtgttcatga

SEQ ID NO: 435986 - DNA, 555 bp, Homo sapiens
ctcagttataggtatcactatttaactcacttgaatacttgggactcatttaaatcctctttccttaatgmcctacatgaacatcagttctaacttctttgtatcaatatattatatgtaaattagccaaagtggtaatttaaacataaattattaactccactgtttaaaatcttccttttacatttataattcaaagtatgagtattctcatacttaaagtataccagtcactttttcattgttagagggggcagtggttaattacttgcctttttttccagcatttttttggtccttattgtttgttttttacttctgttggaagcattttaaaatttctgtgcagtaaaattccttttgcggggagtacagttgtgtgagttttaacacatgcatcatttattataattaccagctctcccaggatacagaacaatgccaaagccccagtgaatacctcatagagccttctttgcagtcagactttctccccacccctacacgctggcaaccattgacctgatctctgttcttgcagttttgccttttcca

SEQ ID NO: 435987 - DNA, 555 bp, Homo sapiens
ctcagttataggtatcactatttaactcacttgaatacttgggactcatttaaatcctctttccttaatgacctacatgaacatcagttctaacttctttgtatcaatatattrtatgtaaattagccaaagtggtaatttaaacataaattattaactccactgtttaaaatcttccttttacatttataattcaaagtatgagtattctcatacttaaagtataccagtcactttttcattgttagagggggcagtggttaattacttgcctttttttccagcatttttttggtccttattgtttgttttttacttctgttggaagcattttaaaatttctgtgcagtaaaattccttttgcggggagtacagttgtgtgagttttaacacatgcatcatttattataattaccagctctcccaggatacagaacaatgccaaagccccagtgaatacctcatagagccttctttgcagtcagactttctccccacccctacacgctggcaaccattgacctgatctctgttcttgcagttttgccttttcca

SEQ ID NO: 435988 - DNA, 555 bp, Homo sapiens
ctcagttataggtatcactatttaactcacttgaatacttgggactcatttaaatcctctttccttaatgacctacatgaacatcagttctaacttctttgtatcaatatattatatgtaaattagccaaagtggtaatttaaacataaattattaactccactgtttaaaatcttccttttacatttataattcaaagtatgagtattctcatacttaaagtataccagtcactttttcattgttagagggggcagtggttaattacttgcctttttttccagcatttttttggtccttattgtttgttttttacttctgttggaagcattttaaaatttctgtgcagtaaaattccttttgcgggragtacagttgtgtgagttttaacacatgcatcatttattataattaccagctctcccaggatacagaacaatgccaaagccccagtgaatacctcatagagccttctttgcagtcagactttctccccacccctacacgctggcaaccattgacctgatctctgttcttgcagttttgccttttcca

SEQ ID NO: 435989 - DNA, 555 bp, Homo sapiens
ctcagttataggtatcactatttaactcacttgaatacttgggactcatttaaatcctctttccttaatgacctacatgaacatcagttctaacttctttgtatcaatatattatatgtaaattagccaaagtggtaatttaaacataaattattaactccactgtttaaaatcttccttttacatttataattcaaagtatgagtattctcatacttaaagtataccagtcactttttcattgttagagggggcagtggttaattacttgcctttttttccagcatttttttggtccttattgtttgttttttacttctgttggaagcattttaaaatttctgtgcagtaaaattccttttgcggggagtacagttgtgtgagttttaacacatgcatcatttattataattaccagctctcccaggatacagaacaatgccaaagccccagtgaatacctcatagagccttctttgcagtcagactttctccccacccctacacsctggcaaccattgacctgatctctgttcttgcagttttgccttttcca

SEQ ID NO: 435990 - DNA, 564 bp, Homo sapiens
ctcatttagctgcctttttcatgaagcaccattttaagttgaaagcacaagtgacacacaaaccattcacattagatattttacagatattttcacaaaaatgaaaaaactctgtcacttgaaggaaaataactgactgtatttgytggcaatgataaaataggagggtaaagcaaaaatcatagtttgggaaaaattttatagtacactgtgagcctgatagctttccaatacagtactttaagcttgttcttattatattggtggtgatttcttggtattacaaaatgaaatgggtcaatattcagaagacctgcataactcagtgaatcaacattttccagaggaccaatgcatgatgctagcaaatcttgcatgggtaaaaaactatttaaaccaacttcaagaaattaccagttgtcaactttcaataaagtataacagaaaatattcacaaatacgtgcaaaaactaaaaaaatacttctctcttttctaactatgtttctgtgtgaggctggattttctttatacacctcaacctgatgaacatattaaaacagatt

SEQ ID NO: 435991 - DNA, 534 bp, Homo sapiens
aatacttaggattgggtttatttacagttcaataaaagacaaaactaatcagtatgttatgtcaggtgagcgcttccccatgtgaggagtggtcttcactgggaagaatatgaggagggcttttggagtactgctaatataggatttcttattctagatcatagttacacagatatgttcaattttcgaaaattagttgagatacttacgatttctcatsatttctgtattttctacttcagtaaaatttaaattgtgttccgtgcaggtaggcaaccatcaaaagggacccagttcacaacaaggagataaaccttggtagcctctttatcccttggttccgacactcttctccctcacttagagacgtagaggcagctggcaatagcaatagggggatcccaccacatccctatctcacagagagacatcctgcagccagccctggaaaatcccttccattcttcccaggtaacaccagtatgtaccagtgggagctgcagaggcaccaaatgtactgtaagaccaacataa

SEQ ID NO: 435992 - DNA, 564 bp, Homo sapiens
ctcatttagctgcctttttcatgaagcaccattttaagttgaaagcacaagtgacacacaaaccattcacattagatattttacagatattttcacaaaaatgaaaaaactctgtcacttgaaggaaaataactgactgtatttgttggcaatgataaaataggagggtaaagcaaaaatcatagtttgggaaaaattttatagtacactgtgagcctgatagctttccaatacagtactttaagcttgttcttattatattggtggtgatttcttggtattacaaaatgaaatgggtcaatattcagaagacctgcataactcagtgaatcaacattttccagaggaccaatgcatgatgctagcaaatcttgcatgggtaaaaaamtatttaaaccaacttcaagaaattaccagttgtcaactttcaataaagtataacagaaaatattcacaaatacgtgcaaaaactaaaaaaatacttctctcttttctaactatgtttctgtgtgaggctggattttctttatacacctcaacctgatgaacatattaaaacagatt

SEQ ID NO: 435993 - DNA, 517 bp, Homo sapiens
agcagatcaaggtagacctggggaagttttcaggtgatcctgataggtatatagatgtcctacagggtctagggcaaaccttcaacctcacttggagagatgtcatgctattgttagatcaaaccctggcctttaatgaaaaraatgtggctttagctgcagcccgagagtttggagatatctggtatcttagtcaagtaaatgatagaatgacagctgaagaaagggacaaattccctactggtcagcaagccatccatagtatggatccccactgggacctagactcagatcatggggactggagttgcaaacatctgttgacctgtgttctagaaggactaaggagaattaggaaaaagcccatgaattattcaatgatgtcctcaggaaaaggaagaaaatccttccgccttccttgagtgactacaggaggacttaagaaaatatactcccctgtcacccaactccctcgagggtcaattgatcctaaaagagaagtttattacccaatcag

SEQ ID NO: 435994 - DNA, 517 bp, Homo sapiens
agcagatcaaggtagacctggggaagttttcaggtgatcctgataggtatatagatgtcctacagggtctagggcaaaccttcaacctcacttggagagatgtcatgctattgttagatcaaaccctggcctttaatgaaaagaatgtggctttagctgcagccygagagtttggagatatctggtatcttagtcaagtaaatgatagaatgacagctgaagaaagggacaaattccctactggtcagcaagccatccatagtatggatccccactgggacctagactcagatcatggggactggagttgcaaacatctgttgacctgtgttctagaaggactaaggagaattaggaaaaagcccatgaattattcaatgatgtcctcaggaaaaggaagaaaatccttccgccttccttgagtgactacaggaggacttaagaaaatatactcccctgtcacccaactccctcgagggtcaattgatcctaaaagagaagtttattacccaatcag

SEQ ID NO: 435995 - DNA, 578 bp, Homo sapiens
cctaatatttagtgagtgctttttctgtgccaagtgccgtgcttatcatctactcccttgggagtagctccctagcgtattctcctagctaccctatgaagtcagcagctatcattattatccccatttttatagatgagaatattaaggcccaaggaagttagtcatataacctgcctagggccatgaagcrcattctatgggtggactgcttaaatagattctctccttcccttgcttctccccactcctgcctcagccaaccttggaagagaattgagaaggggacctagcggagtcttttgtggatagtggtgtggacagtccatgtagtaccggtgtttccagaccatgatgtcacctctcacaggtggtagacattatcagcggaaaatcacacctaacctggacatgcatgttgatagctgcagagagctgtgagagaaggtcatgtgggttagggagagtgagggatgagagggaagagcagtgtgtgtcatagtatctggaataatctagcatcagatggatatcatttcaagaaatgcctcagtggcagaatgattgaataaaatggg

SEQ ID NO: 435996 - DNA, 593 bp, Homo sapiens
taaccttgttctctatgcattctgtgtccttcatactgctctgtgggtgctcagaactccccaccacatcatcactgtgacctgggtcatagtgtctctcttacatttatctgtgtttgacagaggagaaaggcactgaatttggaatccaaagaccttggtgtaggcacctgttctgctgcttattaawggcttattaatgtaggccagggttgttcagccttagcaacatcactgacattttgggccagatcatcctgtgctattgggactttcctgtgcattgtagggtatttagcagcatctgtggcttcttgccatagatgtgctggtagtacttcctttccttggattttgacaaccaaaaatgtctctggacactgacagacatcccctgaggaacaaaatcatccccgcctcagaaccatggattaggccaatcatgacaggagtctctatttcctcacaaaccttagagtttccataagcactaaatgtgatagcacatgttgccatagttataaaatctaagtggacataaaatattgattattttttaactcatccagtgcctagcaaggtactcacatccc

SEQ ID NO: 435997 - DNA, 593 bp, Homo sapiens
taaccttgttctctatgcattctgtgtccttcatactgctctgtgggtgctcagaactccccaccacatcatcactgtgacctgggtcatagtgtctctcttacatttatctgtgtttgacagaggagaaaggcactgaatttggaatccaaagaccttggtgtaggcacctgttctgctgcttattaaaggcttattaatgtaggccagggttgttcagccttagcaacatcactgacattttgggccagatcatcctgtgctattgggactttcctgtgcattgtagggtatttagcagcatctgtggcttcttgccatagatgtgctggtagtacttcctttccttggattttgacaaccaaaaatgtctctggacactgacagacatcccctgaggaacaaaatcatccccgcctcagaaccatggattaggccaatcatgacaggagtctctatttyctcacaaaccttagagtttccataagcactaaatgtgatagcacatgttgccatagttataaaatctaagtggacataaaatattgattattttttaactcatccagtgcctagcaaggtactcacatccc

SEQ ID NO: 435998 - DNA, 452 bp, Homo sapiens
gaatttattcccttgccgtttcttgtcaactattgtctgattaagatatgatgtgtcactcatgtaagtagactagtagataaaatatatttgcaacaaggaaagaaaactctgaaagcttcttaaaytataaattgtttttaaatgtaaagttttattttctttgatcgatggtactttttcaatttttttctcgaatgtgttccatttttttcttgaatgtcttcataactttgtcttcattgaatcataagcctgagaaggactttgaacttttctgacccaaatttacaccattccaggctgttgaagctctcagggaacaccatctatgataagaggacccttggggcacttagaaaagttggtggagtcttccactttttaaaatctaaacgaggagccaggtggccagaattccaccttgcagttcttgcagttctgccagaaat

SEQ ID NO: 435999 - DNA, 452 bp, Homo sapiens
gaatttattcccttgccgtttcttgtcaactattgtctgattaagatatgatgtgtcactcatgtaagtagactagtagataaaatatatttgcaacaaggaaagaaaactctgaaagcttcttaaattataaattgtttttaaatgtaaagttttattttctttgatcgatggtactttttcaatttttttctcgaatgtgttccatttttttcttgaatgtcttcataactttgtcttcattgaatcataagcctgagaaggactttgaacttttctgacccaaatttacaccattccaggctgttgaagctctcagggaacaccatctatgataagaggacccttggggcacttagaaaagttggtggrgtcttccactttttaaaatctaaacgaggagccaggtggccagaattccaccttgcagttcttgcagttctgccagaaat

SEQ ID NO: 436000 - DNA, 603 bp, Homo sapiens
aaatttgagtttaaagatctcatttgaggtttttatgaattcattagcttttagcacagttgcattactttgtaaaatttcttcattattaaaactggagttgttccatatacatattagaataagcttgtccatgttggcaataaatgttgctagcattctgataggaattgctttaaccctatagctcaatttgaggagaactgacatattttctattttggaacttccaatccataaacacagtatatctctccattttttaggtattccttaatttctttcatcttcgttttgttatatacatatatatattagagacagaatcctgccccatcacccagrctggagtgcagtggcgcgatctctgcattttgtagtttttcacaaatagatcctatacgtgtgtttttacttgtatactttggcactcaattttcttcacagtgaatctaaatggtcttctattttttaatttgttttccatactgttaatatataaaaatgtgactttttgtgtgtgacaatattgtactgtgcagttttgctgaattcatttattagttgtaggacatttttgtagaaattccttaggatattcta

SEQ ID NO: 436001 - DNA, 423 bp, Homo sapiens
cagttttagcatctgaaaaaaayacgtgtaccctggtatcagttttgccaactctcagagttgtggagatgatcaaaagagacaattaatgcaagtttgtgaatttcaaatgtcacgaagcaccgtattataaagggtgaaccatgctgagtagtgatatgaacaaacctaatagccaacataacaaatgcctaaacaacctctttcataggaagtacatctggtggccagatgaggcataaatagcaataagagctttaagaataagtattaaaacattttttttttcagtaggaggataagaaacactataactgctaaagcctgccggtacagctgtattgcaaagtgaatacagtaatttgtatggggtaaaatactatcactatgaaaagtccaagtccctctggtggtgatatacat

SEQ ID NO: 436002 - DNA, 398 bp, Homo sapiens
tttcatttttaagtcactaactcaacccacacwcattgaagtccagcaatccaattcattctctccagcaaacacttaattttttcccttccaggattaccctcaggtgttctttcttacccatcaaatctctaacctagctcaggtaatcactatgctgatttcactgagcagcaaccactgcaggtcaattacctcactttcataatttccaatcaacttgaatctgtacctatgtcttcttccctactattagtagggatgtgttgtcaaaagccatttctcttttctcattttactcatgctcctgacatctggcatacggttctgctggatttggcagcagtccacctgtggatatttcactgccttcctcgctaatctttcttcatctcctg

SEQ ID NO: 436003 - DNA, 398 bp, Homo sapiens
tttcatttttaagtcactaactcaacccacacacattgaagtccagcaatccaaytcattctctccagcaaacacttaattttttcccttccaggattaccctcaggtgttctttcttacccatcaaatctctaacctagctcaggtaatcactatgctgatttcactgagcagcaaccactgcaggtcaattacctcactttcataatttccaatcaacttgaatctgtacctatgtcttcttccctactattagtagggatgtgttgtcaaaagccatttctcttttctcattttactcatgctcctgacatctggcatacggttctgctggatttggcagcagtccacctgtggatatttcactgccttcctcgctaatctttcttcatctcctg

SEQ ID NO: 436004 - DNA, 497 bp, Homo sapiens
caggattttcaacttccttcttagcatttccattttctcacacaaaacccctcttaagtttgccatgtttaaaatttctcccttaaccggtttcatcccagtcttccccatccttataaatggcatccagtcccttgtcactctcctctgctccttcagtcctctcccccaacacttcgtcaatgcaaatcatcagcaaattcaagactttttatcttcaagttttgtctccratccttctacttcttgtcacttccaccactagcagcacactcgtggccaccaccatctctcacctaacctgctacaagagtctactgctggttatgcttctcccaccctgcatctactcaagcctttccccacagcagccagaggaacttttcaaaagtacaaatgtgatcaagcaagtcactattctatttcaaaccttcaattgcttctcagagcacttaaaatacaaacctttcccagtgcctttctccaactcatcttgt

SEQ ID NO: 436005 - DNA, 624 bp, Homo sapiens
cttgtcactctcctctgctccttcagtcctctcccccaacacttcgtcaatgcaaatcatcagcaaattcaagactttttatcttcaagttttgtctccgatccttctacttcttgtcacttccaccactagcagcacactcgtggccaccaccatctctcacctaacctgctacaagagtctactgctggttatgcttctcycaccctgcatctactcaagcctttccccacagcagccagaggaacttttcaaaagtacaaatgtgatcaagcaagtcactattctatttcaaaccttcaattgcttctcagagcacttaaaatacaaacctttcccagtgcctttctccaactcatcttgtggcacttgtctccctgctgctatgctccagctattctggcttccttgctgtccttcaaacatgccaagctctgtatcaatcagagcccagctgactcagaacacttcactataccattccggcccttcaataaatgtctggcattttctttctttctttctttttttgagatggagtctcactctgtcacccaggctagagtgtggtggtgtgatctcggctcactgcaacctctgcctcccaggttcaagcaattctcc

SEQ ID NO: 436006 - DNA, 624 bp, Homo sapiens
cttgtcactctcctctgctccttcagtcctctcccccaacacttcgtcaatgcaaatcatcagcaaattcaagactttttatcttcaagttttgtctccgatccttctacttcttgtcacttccaccactagcagcacactcgtggccaccaccatctctcacctaacctgctacaagagtctactgctggttatgcttctcccaccctgcatctactcaagcctttccccacagcagccagaggaacttttcaaaagtacaaatgtgatcaagcaagtcactattctatttcaaaccttcaattgcttctcagagcacttaaaatacaaacctttcccagtgcctttctccaactcatcttgtggcacttgtctcccygctgctatgctccagctattctggcttccttgctgtccttcaaacatgccaagctctgtatcaatcagagcccagctgactcagaacacttcactataccattccggcccttcaataaatgtctggcattttctttctttctttctttttttgagatggagtctcactctgtcacccaggctagagtgtggtggtgtgatctcggctcactgcaacctctgcctcccaggttcaagcaattctcc

SEQ ID NO: 436007 - DNA, 624 bp, Homo sapiens
cttgtcactctcctctgctccttcagtcctctcccccaacacttcgtcaatgcaaatcatcagcaaattcaagactttttatcttcaagttttgtctccgatccttctacttcttgtcacttccaccactagcagcacactcgtggccaccaccatctctcacctaacctgctacaagagtctactgctggttatgcttctcccaccctgcatctactcaagcctttccccacagcagccagaggaacttttcaaaagtacaaatgtgatcaagcaagtcactattctatttcaaaccttcaattgcttctcagagcacttaaaatacaaacctttcccagtgcctttctccaactcatcttgtggcacttgtctccctgctgctrtgctccagctattctggcttccttgctgtccttcaaacatgccaagctctgtatcaatcagagcccagctgactcagaacacttcactataccattccggcccttcaataaatgtctggcattttctttctttctttctttttttgagatggagtctcactctgtcacccaggctagagtgtggtggtgtgatctcggctcactgcaacctctgcctcccaggttcaagcaattctcc

SEQ ID NO: 436008 - DNA, 624 bp, Homo sapiens
cttgtcactctcctctgctccttcagtcctctcccccaacacttcgtcaatgcaaatcatcagcaaattcaagactttttatcttcaagttttgtctccgatccttctacttcttgtcacttccaccactagcagcacactcgtggccaccaccatctctcacctaacctgctacaagagtctactgctggttatgcttctcccaccctgcatctactcaagcctttccccacagcagccagaggaacttttcaaaagtacaaatgtgatcaagcaagtcactattctatttcaaaccttcaattgcttctcagagcacttaaaatacaaacctttcccagtgcctttctccaactcatcttgtggcacttgtctccctgctgctatgctccmgctattctggcttccttgctgtccttcaaacatgccaagctctgtatcaatcagagcccagctgactcagaacacttcactataccattccggcccttcaataaatgtctggcattttctttctttctttctttttttgagatggagtctcactctgtcacccaggctagagtgtggtggtgtgatctcggctcactgcaacctctgcctcccaggttcaagcaattctcc

SEQ ID NO: 436009 - DNA, 635 bp, Homo sapiens
ttctcattatttgttattggtctgttcatgttttgtatttctttgtgtttcaattttggtgtgtttcttggccctagtctggtccactcagacctgctccatgctcaccatcaggcagctggtggtcctttttgargagtgagtgcagcagggaccagtggttgggctgaagccccttcacctcatgcggactctccaatactcattgaacttcatggtgagggacagaggacccaccctggctctcagcgggagagcagggaattcttgttcaaggaagcccctggggcagccgcaggaggcagcccttgggaaaaagcgcccaaggcccccctcaaccggccatcctgcctcctctgcaggaccttctcttcccctctttccctccctcctgaggtgaaaaggaggggaggagaccacggagccctctgtgtcagggaaacctggcccttccttttgagcgttcaggggactcgcatgggccttgccccttctccaggacctggaagcttctctctctgaagagccctgagttccagtctcaagtgtctcattccccattgcctcctgcttctcctttcatcccccccaccaccacctggggctcacactccctgcctttgggcttcaaatgt

SEQ ID NO: 436010 - DNA, 635 bp, Homo sapiens
ttctcattatttgttattggtctgttcatgttttgtatttctttgtgtttcaattttggtgtgtttcttggccctagtctggtccactcagacctgctccatgctcaccatcaggcagctggtggtcctttttgaggagtgagtgcagcagggaccagtggttgggctgaagccccttcacctcatgcrgactctccaatactcattgaacttcatggtgagggacagaggacccaccctggctctcagcgggagagcagggaattcttgttcaaggaagcccctggggcagccgcaggaggcagcccttgggaaaaagcgcccaaggcccccctcaaccggccatcctgcctcctctgcaggaccttctcttcccctctttccctccctcctgaggtgaaaaggaggggaggagaccacggagccctctgtgtcagggaaacctggcccttccttttgagcgttcaggggactcgcatgggccttgccccttctccaggacctggaagcttctctctctgaagagccctgagttccagtctcaagtgtctcattccccattgcctcctgcttctcctttcatcccccccaccaccacctggggctcacactccctgcctttgggcttcaaatgt

SEQ ID NO: 436011 - DNA, 635 bp, Homo sapiens
ttctcattatttgttattggtctgttcatgttttgtatttctttgtgtttcaattttggtgtgtttcttggccctagtctggtccactcagacctgctccatgctcaccatcaggcagctggtggtcctttttgaggagtgagtgcagcagggaccagtggttgggctgaagccccttcacctcatgcggactctccaatactcattgaacttcatggtgagggacagaggacccaccctggctctcagcgggagagcagggaattcttgttcaaggaagcccctggggcakccgcaggaggcagcccttgggaaaaagcgcccaaggcccccctcaaccggccatcctgcctcctctgcaggaccttctcttcccctctttccctccctcctgaggtgaaaaggaggggaggagaccacggagccctctgtgtcagggaaacctggcccttccttttgagcgttcaggggactcgcatgggccttgccccttctccaggacctggaagcttctctctctgaagagccctgagttccagtctcaagtgtctcattccccattgcctcctgcttctcctttcatcccccccaccaccacctggggctcacactccctgcctttgggcttcaaatgt

SEQ ID NO: 436012 - DNA, 635 bp, Homo sapiens
ttctcattatttgttattggtctgttcatgttttgtatttctttgtgtttcaattttggtgtgtttcttggccctagtctggtccactcagacctgctccatgctcaccatcaggcagctggtggtcctttttgaggagtgagtgcagcagggaccagtggttgggctgaagccccttcacctcatgcggactctccaatactcattgaacttcatggtgagggacagaggacccaccctggctctcagcgggagagcagggaattcttgttcaaggaagcccctggggcagccgcaggaggcagcccttgggaaaaagcgcccaaggcccccctcaaccggccatcctgcctcctctgcaggaccttcycttcccctctttccctccctcctgaggtgaaaaggaggggaggagaccacggagccctctgtgtcagggaaacctggcccttccttttgagcgttcaggggactcgcatgggccttgccccttctccaggacctggaagcttctctctctgaagagccctgagttccagtctcaagtgtctcattccccattgcctcctgcttctcctttcatcccccccaccaccacctggggctcacactccctgcctttgggcttcaaatgt

SEQ ID NO: 436013 - DNA, 520 bp, Homo sapiens
aagcttctctctctgaagagccctgagttccagtctcaagtgtctcattccccattgcctcctgcttctcctttcatcccccccaccaccacctggggctcacactccctgcctttgggcttcaaatgttgtactatgtgcttgacccactagcctgcttaatcttcaaaatcactctrtcaaaaagacattttaggctgggcattgtggctgaagcctgtaatcccagcactttgggagacccagatgggctgattacttgagtgtatgagttacagaccagcctgggaaacataacaagatcctgtctctacaaaaatagaaaaaaattagtggagtgctgtggcacatgtctgtaatcccaactacttgggaggctgaggtgggaagattgcttgagcctgggatgtcgaggctgcagtgagctgagatcacgtcactgcactccagcctgggtaacagactgagaccctgtctcaaaataaaaataaaaataatttaaaaagcgaaattgccaaaa

SEQ ID NO: 436014 - DNA, 520 bp, Homo sapiens
aagcttctctctctgaagagccctgagttccagtctcaagtgtctcattccccattgcctcctgcttctcctttcatcccccccaccaccacctggggctcacactccctgcctttgggcttcaaatgttgtactatgtgcttgacccactagcctgcttaatcttcaaaatcactctatcaaaaagacattttaggctgggcattgtggctgaagcctgtaatcccagcactttgggagacccagatgggctgattacttgagtgtatgagttacagaccagcctgggaaacataacaagatcctgtctctacaaaaatagaaaaaaattagtggagtgctgtggcacatgtctgtaatcccaactacttgggaggctgaggtgggaagattgcttgagcctgggatrtcgaggctgcagtgagctgagatcacgtcactgcactccagcctgggtaacagactgagaccctgtctcaaaataaaaataaaaataatttaaaaagcgaaattgccaaaa

SEQ ID NO: 436015 - DNA, 603 bp, Homo sapiens
caatattgaattttctaccaaaaatgcatatgctctgtctctgaataaatgtgcaagaaatgaaagttctacatgcccaacaactctttgcttccatttccttacggtcatgaagccacacctgcctggagctactaatctatttcctgagcatcagaaccctcttgctcatttggggaatccatctccctgcagttgacctgtggacctccagcatccctgggcagcctgaggaccctaaaccctgtagttcagtttatgacacgcaggcttggaggaatttccctccataaggctgctgtgaactcccacgccaggagaaattaaaatttgtaatacagcggagatctctgaatgagcttttctccctgatacatgtcagcgaactcagtgtgtctttggaaatccggaaacctccttttctcagttcaggctgcctgcatcatgctggtttgcttcctgcaacaaaacagatcatccagacacctctctgttttccttcgratattccccacactaccacgccattcgtgggcaggacctcagtgcctgaggtcagaatagagacacctctgacatcccatggctgtacccacaaataac

SEQ ID NO: 436016 - DNA, 603 bp, Homo sapiens
caatattgaattttctaccaaaaatgcatatgctctgtctctgaataaatgtgcaagaaatgaaagttctacatgcccaacaactctttgcttccatttccttacggtcatgaagccacacctgcctggagctactaatctatttcctgagcatcagaaccctcttgctcatttggggaatccatctccctgcagttgacctgtggacctccagcatccctgggcagcctgaggaccctaaaccctgtagttcagtttatgacacgcaggcttggaggaatttccctccataaggctgctgtgaactcccacgccaggagaaattaaaatttgtaatacagcggagatctctgaatgagcttttctccctgatacatgtcagcgaactcagtgtgtctttggaaatccggaaacctccttttctcagttcaggctgcctgcatcatgctggtttgcttcctgcaacaaaacagatcatccagacacctctctgttttccttcggatattccccacrctaccacgccattcgtgggcaggacctcagtgcctgaggtcagaatagagacacctctgacatcccatggctgtacccacaaataac

SEQ ID NO: 436017 - DNA, 584 bp, Homo sapiens
actatatatccatcctctatcatccatccatcaatctatccatctatctatatatgtatttatgtattgaatctataacctatgtatcaattatctacctatcacctatccctgtagctatctacctacctacctattgatctatctatccatctaatgtattatctatttatctattgaatctataatctatgtatcaattatctacctatcatctatccrtctagctagctgtctacctatcatctccctagtatctatcgtctactatatatccatcatctatctattatccatccatctatccatctatctatatatgcacttatctattgaatctgtaacctatgtatcaattatctatctacctatcatctatccctgtagccatctatccacctatctatctaatgcattatctgttgaatctataatctatgtatcacttatctacctatcatctctccatctagctagctagctgtctatccacctaccatctctctactatctatagtctactatatatccatcatctatctattatccatccatctatccatctatctatatatgtatttatc

SEQ ID NO: 436018 - DNA, 607 bp, Homo sapiens
tatgtaccctttagaaaatgcctagttcctttgtcttttcatcaattttgtgaataataatgaatggaataaccatgataaacattttacaattttatttaacactaaatatttgatagggagttttgagagacttaagcataaaaaaagataactaatgaaaccaattcattcttcaaagtgatttatttaatcctcacaaaaagtctgctgtggaggcagggcagcaatagtgtcttgcccaagctcagactgccgtagcaaaatatcatacactaggtggcttaaaccacagaatttgattttcttagtgcccttaaggccggacgttccagatcaaggtgctggctagttcagtgcctaatgaggagcctcttcctagtttggagatgactgctctctcaccatgtcctgacatggtaacgggagaaagagtgctccagtctcttagcctttcttcctctcttgtaagaacactcatcccattaaggggaccsgaacttcctaacctcatctcaacctagttacctcccaaacatcccacttccaaatactatcacattggttgttagggctttaatctatgaattttagggaacgtgattca

SEQ ID NO: 436019 - DNA, 538 bp, Homo sapiens
taatcctgtcactctcaaaagagaatagcagattacaaagagcaaatcgaaaagaagcacaccaaaggggagacagaacaagctgagaaagacacccagaattctctaccagttctcaagacaatgaaaaccataataaagaagattaagagcaagagacaaaaattatccagtagttactagatattattagagagtgtaaagaaggtaatttttwaagtaaatatatttttttaaaaaggtgctggggcggggggtggaggcggggatggggattcacacatctcccaaagctttcaggaagaaaaaaaggattatgattaaattttttcaagttaagatttttctcgtgacagcataaactgaaaaaactgaagaaaatgttttcagagtataaaaaagaaaaatttgtaatatgaaacattatactgtgccaagttcttatagccagcctaaaaggaacagtctctttccaacatgtagggtttcaaaaactttataattatttttaaaggatcacaaccaagactctgaaagg

SEQ ID NO: 436020 - DNA, 538 bp, Homo sapiens
taatcctgtcactctcaaaagagaatagcagattacaaagagcaaatcgaaaagaagcacaccaaaggggagacagaacaagctgagaaagacacccagaattctctaccagttctcaagacaatgaaaaccataataaagaagattaagagcaagagacaaaaattatccagtagttactagatattattagagagtgtaaagaaggtaatttttaaagtaaatatatttttttaaaaaggtgctggggcggggggtggaggcggggatggggattcacacatctcccaaagctttcaggaagaaaaaaaggattatgattaaattttttcaagttaagatttttctcgtgacagcataaactgaaaaaactgaagaaaatgttttcagagtataaaaaagaaaaatttgtaatatgaaacattatactgtkccaagttcttatagccagcctaaaaggaacagtctctttccaacatgtagggtttcaaaaactttataattatttttaaaggatcacaaccaagactctgaaagg

SEQ ID NO: 436021 - DNA, 538 bp, Homo sapiens
taatcctgtcactctcaaaagagaatagcagattacaaagagcaaatcgaaaagaagcacaccaaaggggagacagaacaagctgagaaagacacccagaattctctaccagttctcaagacaatgaaaaccataataaagaagattaagagcaagagacaaaaattatccagtagttactagatattattagagagtgtaaagaaggtaatttttaaagtaaatatatttttttaaaaaggtgctggggcggggggtggaggcggggatggggattcacacatctcccaaagctttcaggaagaaaaaaaggattatgattaaattttttcaagttaagatttttctcgtgacagcataaactgaaaaaactgaagaaaatgttttcagagtataaaaaagaaaaatttgtaatatgaaacattatactgtgccaagttcttatagccagcctaaaaggaacagtctctttccracatgtagggtttcaaaaactttataattatttttaaaggatcacaaccaagactctgaaagg

SEQ ID NO: 436022 - DNA, 538 bp, Homo sapiens
taatcctgtcactctcaaaagagaatagcagattacaaagagcaaatcgaaaagaagcacaccaaaggggagacagaacaagctgagaaagacacccagaattctctaccagttctcaagacaatgaaaaccataataaagaagattaagagcaagagacaaaaattatccagtagttactagatattattagagagtgtaaagaaggtaatttttaaagtaaatatatttttttaaaaaggtgctggggcggggggtggaggcggggatggggattcacacatctcccaaagctttcaggaagaaaaaaaggattatgattaaattttttcaagttaagatttttctcgtgacagcataaactgaaaaaactgaagaaaatgttttcagagtataaaaaagaaaaatttgtaatatgaaacattatactgtgccaagttcttatagccagcctaaaaggaacagtctctttccaacatgtagggtttcaaaaackttataattatttttaaaggatcacaaccaagactctgaaagg

SEQ ID NO: 436023 - DNA, 482 bp, Homo sapiens
tttgggaggccaaggcaggtggatcacctgaggtcaggagtttgcgaccagcctaacatgatgaaaccctgtctctactaaatacacacacacacacacacacacacacacacacacacacacacaaaatagccgggtgtggtggcgcatgcctgtaatcygagctacttaggaggctgagacaggagattcacttgtacccggcagacggaggttgcagtgagctgagatcgcgccattgcactccagcctgggcaacaagagtgaaactctgtttaaaaaataaataaaattaaaataaataaaatttcgagtatccatttgttaccgagaaaataattttaaaaaacattattctaatgcaatctacaattgtgtagaatcattgtagaatataccacagcatacggttgagttttatttgctattaagattaagtggggctgcacggccagacaggccctgctcctgaggccgggcag

SEQ ID NO: 436024 - DNA, 482 bp, Homo sapiens
tttgggaggccaaggcaggtggatcacctgaggtcaggagtttgcgaccagcctaacatgatgaaaccctgtctctactaaatacacacacacacacacacacacacacacacacacacacacacaaaatagccgggtgtggtggcgcatgcctgtaatccgagctacttaggaggctgagacaggagattcacttgtacccggcagacggaggttgcagtgagctgagatcgcgccattgcactccagcctgggcaacaagagtgaaactctgtttaaaaaataaataaaattaaaataaataaaatttcgagtrtccatttgttaccgagaaaataattttaaaaaacattattctaatgcaatctacaattgtgtagaatcattgtagaatataccacagcatacggttgagttttatttgctattaagattaagtggggctgcacggccagacaggccctgctcctgaggccgggcag

SEQ ID NO: 436025 - DNA, 482 bp, Homo sapiens
tttgggaggccaaggcaggtggatcacctgaggtcaggagtttgcgaccagcctaacatgatgaaaccctgtctctactaaatacacacacacacacacacacacacacacacacacacacacacaaaatagccgggtgtggtggcgcatgcctgtaatccgagctacttaggaggctgagacaggagattcacttgtacccggcagacggaggttgcagtgagctgagatcgcgccattgcactccagcctgggcaacaagagtgaaactctgtttaaaaaataaataaaattaaaataaataaaatttcgagtatccatttgttaccgagaaaataattttaaaaaacattattctaatgcaatctacaattgtgtagaatcattgtagaatataccacagcatackgttgagttttatttgctattaagattaagtggggctgcacggccagacaggccctgctcctgaggccgggcag

SEQ ID NO: 436026 - DNA, 337 bp, Homo sapiens
tttattgccaggtatttaaaacattaatttttgtgaatataaaacatctttttttatggttctcaatacgttggaatttgttatgatttgatttattgtctaatagatttaaaaactcttgtttatattccatgtatgcttggaaagagtgtatattctttccttcctcctgagtgtgtaatctctctttcttccttagtaggaaccccgtattttagttgaactcactgcaagcyggaataataggtacactttcttgtgttccttgagctcatgcataactatagatttaaagaaaataaaaacagacaaaaatagctaagcgctactggtggca

SEQ ID NO: 436027 - DNA, 520 bp, Homo sapiens
aaaaatcctgcagcttccttatatttttaaccttttgctatagaattataactaaatgagttcattgatttgtgtgtgtaaaagtgcttagtacaatgcctagacttatcatttatcaataaatatcattcttaaaactgaccataaaaatattagaaaagtagaatatctagacaatattttagaaaaagggagcttaaagaatttggaaaatgtcattcatctgtccaaatgtctgccaagctaaggctctcactacagggagaggtatagtttagatgttagagtgtaaacccaattttttaatgtggtcatagttattaattcttyatgccttgcaatttgttgtaattcagtaaaagccttttttcatcctgaaatttaaaaaaattatctagtggtttcttttttgctttcatggattcactgtcttcaaataaacttttgaactttggggaatttatgccatatgaggtttgaggttttgactcaacttttttcccatttagatatacagtta

SEQ ID NO: 436028 - DNA, 520 bp, Homo sapiens
aaaaatcctgcagcttccttatatttttaaccttttgctatagaattataactaaatgagttcattgatttgtgtgtgtaaaagtgcttagtacaatgcctagacttatcatttatcaataaatatcattcttaaaactgaccataaaaatattagaaaagtagaatatctagacaatattttagaaaaagggagcttaaagaatttggaaaatgtcattcatctgtccaaatgtctgccaagctaaggctctcactacagggagaggtatagtttagatgttagagtgtaaacccaattttttaatgtggtcatagttattaattctttatgccttgcaawttgttgtaattcagtaaaagccttttttcatcctgaaatttaaaaaaattatctagtggtttcttttttgctttcatggattcactgtcttcaaataaacttttgaactttggggaatttatgccatatgaggtttgaggttttgactcaacttttttcccatttagatatacagtta

SEQ ID NO: 436029 - DNA, 609 bp, Homo sapiens
cccgccaccacacctggcaaattttggtatttttaatatagatggagtttcttcatgttggccaggctggtcttgaactcctgacctcaggtgatctgcctgcctcagcctcccaaagtgctaggattacaggcatgagccactgcacccagccatgcaagaacttcataacctgccagattgagcttcataaagaaaggaaaataagayatttccagacaagaaaatgctaagggaagtcattacctccagactgactctaaaagaaatgtttaaaggagtttgactagtgaaaataaaagaatgatacttgctaccataaaagcacacgtgaatacaaaatgtacagaacctataaagcaattaaacaattgagactacaaggtaactagctaatgctataaaaggaagaaaacctaacacatcaatattaagcttgaatgtaaatggctgaaatgctccacttaaaagacacagagtggcaaactggataaaaaaacaagacacttctgctgcctttgagagacccatctcatgtgtaatgataccaacaggctcaaagtaaatggatggaaaaagattcatcacataaatgaaaaacaaaaaagg

SEQ ID NO: 436030 - DNA, 609 bp, Homo sapiens
cccgccaccacacctggcaaattttggtatttttaatatagatggagtttcttcatgttggccaggctggtcttgaactcctgacctcaggtgatctgcctgcctcagcctcccaaagtgctaggattacaggcatgagccactgcacccagccatgcaagaacttcataacctgccagattgagcttcataaagaaaggaaaataagatatttccagacaagaaaatgctaagggaagtcattacctccagactgactctaaaagaaatgtttaaaggagtttgactagtgaaaataaaagaatgatacttgctaccataaaagcacacgtgaatacaaaatgtacagaacctataaagcaattaaacaattgagactacaaggtaactagctaatgctataaaaggaagaaaacctaacacatcaatattaagcttgaatgtaaatggctgaaatgctccacttaaaagacacagagtggcaaactggrtaaaaaaacaagacacttctgctgcctttgagagacccatctcatgtgtaatgataccaacaggctcaaagtaaatggatggaaaaagattcatcacataaatgaaaaacaaaaaagg

SEQ ID NO: 436031 - DNA, 563 bp, Homo sapiens
agactgtctttcaaaaaagtaagtaaataaataaataatggggggggagcttcctccatctttattttagagacatgggggattttcaggtaaggtgttagkatatgaaagcaatgtcctcttcccctggggagaggctaaaatagggagagatggggaaggaaatccttgagggagccccaggcattagtccaaccaggagcactaagggccagaaccagaacatgttacttggcctgagtgtgacttctggtgtaagaaaaacagaccctgaaggtctttgtgaaactttagtttctccttctaaagaaatgcctgtttattttacagatgcaaagggtaaccacattaattccaaggcagttttccaaagtattataatgatcccaacaagaaaatggcatttcagttcaaatgttactgagttccagggaaacggttagatacccaggctgtggaactgggttggatgcaggactcaggatccagagacaaggaaggcagcatcataagtcagccacccataaatgcaatattatagtagtcccaatttctttttgagg

SEQ ID NO: 436032 - DNA, 563 bp, Homo sapiens
agactgtctttcaaaaaagtaagtaaataaataaataatggggggggagcttcctccatctttattttagagacatgggggattttcaggtaaggtgttagtatatgaaagcaatgtcctcttcccctggggagaggctaaaatagggagagatggggaaggaaatccttgagggagccccaggcattagyccaaccaggagcactaagggccagaaccagaacatgttacttggcctgagtgtgacttctggtgtaagaaaaacagaccctgaaggtctttgtgaaactttagtttctccttctaaagaaatgcctgtttattttacagatgcaaagggtaaccacattaattccaaggcagttttccaaagtattataatgatcccaacaagaaaatggcatttcagttcaaatgttactgagttccagggaaacggttagatacccaggctgtggaactgggttggatgcaggactcaggatccagagacaaggaaggcagcatcataagtcagccacccataaatgcaatattatagtagtcccaatttctttttgagg

SEQ ID NO: 436033 - DNA, 563 bp, Homo sapiens
agactgtctttcaaaaaagtaagtaaataaataaataatggggggggagcttcctccatctttattttagagacatgggggattttcaggtaaggtgttagtatatgaaagcaatgtcctcttcccctggggagaggctaaaatagggagagatggggaaggaaatccttgagggagccccaggcattagtccaaccaggagcactaagggccagaaccagaacatgttacttggcctgagtgtgacttctggtgtaagaaaaacagaccctgaaggtctttgtgaaactttagtttctccttctaaagaaatgcctgtttattttacagatgcaaarggtaaccacattaattccaaggcagttttccaaagtattataatgatcccaacaagaaaatggcatttcagttcaaatgttactgagttccagggaaacggttagatacccaggctgtggaactgggttggatgcaggactcaggatccagagacaaggaaggcagcatcataagtcagccacccataaatgcaatattatagtagtcccaatttctttttgagg

SEQ ID NO: 436034 - DNA, 538 bp, Homo sapiens
gtgacttctggtgtaagaaaaacagaccctgaaggtctttgtgaaactttagtttctccttctaaagaaatgcctgtttattttacagatgcaaagggtaaccacattaattccaaggcagttttccaaagtattataatgatcccaacaagaaaatggcatttcagttcaaatgttactgagttccagggaaacggttagatacccaggctgtggaactgggttggatgcaggactcaggatccagagacaaggaaggcagcatcataagtcagccacccataaatgcaatattatartagtcccaatttctttttgaggtttgttccaatcaacagcaactgaaacacaactcagagtaagttaggcagagaaagaaaattgttgaactaatataactgtgagatcctatgatggagctgacctcaggattcccaaggacttaagaaatctctagatagatagatagatagatagagacatagatagagaaaaaaatagatatagatagaataaatagatgataaatacataggat

SEQ ID NO: 436035 - DNA, 538 bp, Homo sapiens
gtgacttctggtgtaagaaaaacagaccctgaaggtctttgtgaaactttagtttctccttctaaagaaatgcctgtttattttacagatgcaaagggtaaccacattaattccaaggcagttttccaaagtattataatgatcccaacaagaaaatggcatttcagttcaaatgttactgagttccagggaaacggttagatacccaggctgtggaactgggttggatgcaggactcaggatccagagacaaggaaggcagcatcataagtcagccacccataaatgcaatattatagyagtcccaatttctttttgaggtttgttccaatcaacagcaactgaaacacaactcagagtaagttaggcagagaaagaaaattgttgaactaatataactgtgagatcctatgatggagctgacctcaggattcccaaggacttaagaaatctctagatagatagatagatagatagagacatagatagagaaaaaaatagatatagatagaataaatagatgataaatacataggat

SEQ ID NO: 436036 - DNA, 538 bp, Homo sapiens
gtgacttctggtgtaagaaaaacagaccctgaaggtctttgtgaaactttagtttctccttctaaagaaatgcctgtttattttacagatgcaaagggtaaccacattaattccaaggcagttttccaaagtattataatgatcccaacaagaaaatggcatttcagttcaaatgttactgagttccagggaaacggttagatacccaggctgtggaactgggttggatgcaggactcaggatccagagacaaggaaggcagcatcataagtcagccacccataaatgcaatattatagtagtcccaatttctttttgaggtttgttccaatcaacagcaactgaaacacaactcagagtaagttaggcagagaaagaaaattrttgaactaatataactgtgagatcctatgatggagctgacctcaggattcccaaggacttaagaaatctctagatagatagatagatagatagagacatagatagagaaaaaaatagatatagatagaataaatagatgataaatacataggat

SEQ ID NO: 436037 - DNA, 538 bp, Homo sapiens
gtgacttctggtgtaagaaaaacagaccctgaaggtctttgtgaaactttagtttctccttctaaagaaatgcctgtttattttacagatgcaaagggtaaccacattaattccaaggcagttttccaaagtattataatgatcccaacaagaaaatggcatttcagttcaaatgttactgagttccagggaaacggttagatacccaggctgtggaactgggttggatgcaggactcaggatccagagacaaggaaggcagcatcataagtcagccacccataaatgcaatattatagtagtcccaatttctttttgaggtttgttccaatcaacagcaactgaaacacaactcagagtaagttaggcagagaaagaaaattgttgaaytaatataactgtgagatcctatgatggagctgacctcaggattcccaaggacttaagaaatctctagatagatagatagatagatagagacatagatagagaaaaaaatagatatagatagaataaatagatgataaatacataggat

SEQ ID NO: 436038 - DNA, 474 bp, Homo sapiens
cattctttaaagatactgcttcatatgtattcctgttaaattttacgtatctctccttccttggagacttttgtttcarttgagaaaccaggttcaatacattaggactctctttctgtagactttatgttctgaaatattggggaggggggtgtatttccaggcttattccatcttatatgagccatgtcctagtattttgctgagctgcctttgaattcccaaatccgatgataatctttctatttttctgcccctcttgttactacttcatcattttctgctaatcttgtaagcattttgtaggctgtgttttccctccctccagctttttagttttccaatcttggttttagttatctagcaaacagccttcacttgatgatgaacctgctaatatagtgctgttattagggagagtatgaattgaatagtacaagatagatcttccattggtgaggcacagggaccata

SEQ ID NO: 436039 - DNA, 474 bp, Homo sapiens
cattctttaaagatactgcttcatatgtattcctgttaaattttacgtatctctccttccttggagacttttgtttcagttgagaaaccaggttcaatacattaggactctctttctgtagactttatgttctgaaatattggggaggrgggtgtatttccaggcttattccatcttatatgagccatgtcctagtattttgctgagctgcctttgaattcccaaatccgatgataatctttctatttttctgcccctcttgttactacttcatcattttctgctaatcttgtaagcattttgtaggctgtgttttccctccctccagctttttagttttccaatcttggttttagttatctagcaaacagccttcacttgatgatgaacctgctaatatagtgctgttattagggagagtatgaattgaatagtacaagatagatcttccattggtgaggcacagggaccata

SEQ ID NO: 436040 - DNA, 474 bp, Homo sapiens
cattctttaaagatactgcttcatatgtattcctgttaaattttacgtatctctccttccttggagacttttgtttcagttgagaaaccaggttcaatacattaggactctctttctgtagactttatgttctgaaatattggggaggggggtgtatttccaggcttattccatcttatatgagccatgtcctagtattttgctgagctgcctttgaattcccaaatccgatgataatctttctatttttctgcccctcttgttactacttcatcatttkctgctaatcttgtaagcattttgtaggctgtgttttccctccctccagctttttagttttccaatcttggttttagttatctagcaaacagccttcacttgatgatgaacctgctaatatagtgctgttattagggagagtatgaattgaatagtacaagatagatcttccattggtgaggcacagggaccata

SEQ ID NO: 436041 - DNA, 589 bp, Homo sapiens
atgagagaaataaataagatgccagggcaatatgtgtggtgcmcacacacacacacatactgacaaacagtaactatgttattgtgattcgtagcatgcagagcagcaatttgaaatatatgtgctctctgcagcaaccaactctgacactgtagtgcaacggaagtcatatataatgcccaaacaattcagggaaaggaaaagtcacgtgcctctcattttaactgaaaagctacaaatgattaatcttagtggggaaggaatatcaaaaagtgagaaaggcctaaagctaggcctcttgtaccattcagccaattatgaatgtaaacgaaaaattcttgaataaaattaaaagcactatgtcagtgaacatgaaacaatcttattgctaatatgaagaaagttttagtggtccatatgaaagatcaaaccagccacaacattcccttaagcaaaaagcctaatccacagcaaggctctaaccttcttcagttctatgaaggctgagagaggtgagaaaactgcagaagaaaaactggaagcaagtagaggttggctcatgaggaaaaatgctattgtcataacataa

SEQ ID NO: 436042 - DNA, 589 bp, Homo sapiens
atgagagaaataaataagatgccagggcaatatgtgtggtgcccacacacacacacatactgacaaacagtaactatgtyattgtgattcgtagcatgcagagcagcaatttgaaatatatgtgctctctgcagcaaccaactctgacactgtagtgcaacggaagtcatatataatgcccaaacaattcagggaaaggaaaagtcacgtgcctctcattttaactgaaaagctacaaatgattaatcttagtggggaaggaatatcaaaaagtgagaaaggcctaaagctaggcctcttgtaccattcagccaattatgaatgtaaacgaaaaattcttgaataaaattaaaagcactatgtcagtgaacatgaaacaatcttattgctaatatgaagaaagttttagtggtccatatgaaagatcaaaccagccacaacattcccttaagcaaaaagcctaatccacagcaaggctctaaccttcttcagttctatgaaggctgagagaggtgagaaaactgcagaagaaaaactggaagcaagtagaggttggctcatgaggaaaaatgctattgtcataacataa

SEQ ID NO: 436043 - DNA, 589 bp, Homo sapiens
atgagagaaataaataagatgccagggcaatatgtgtggtgcccacacacacacacatactgacaaacagtaactatgttattgtgattcgtagcatgcagagcagcaatttgaaatatatgtgctctctgcagcaaccaactctgacactgtagtgcaacggaagtcatatataatgcccaaacaattcagggaaaggaaaagtcacgtrcctctcattttaactgaaaagctacaaatgattaatcttagtggggaaggaatatcaaaaagtgagaaaggcctaaagctaggcctcttgtaccattcagccaattatgaatgtaaacgaaaaattcttgaataaaattaaaagcactatgtcagtgaacatgaaacaatcttattgctaatatgaagaaagttttagtggtccatatgaaagatcaaaccagccacaacattcccttaagcaaaaagcctaatccacagcaaggctctaaccttcttcagttctatgaaggctgagagaggtgagaaaactgcagaagaaaaactggaagcaagtagaggttggctcatgaggaaaaatgctattgtcataacataa

SEQ ID NO: 436044 - DNA, 589 bp, Homo sapiens
atgagagaaataaataagatgccagggcaatatgtgtggtgcccacacacacacacatactgacaaacagtaactatgttattgtgattcgtagcatgcagagcagcaatttgaaatatatgtgctctctgcagcaaccaactctgacactgtagtgcaacggaagtcatatataatgcccaaacaattcagggaaaggaaaagtcacgtgcctctcattttaactgaaaagctacaaatgattaatcttagtggggaaggaatatcaaaaagtgagaaaggcctaaagctaggcctcttgtaccaytcagccaattatgaatgtaaacgaaaaattcttgaataaaattaaaagcactatgtcagtgaacatgaaacaatcttattgctaatatgaagaaagttttagtggtccatatgaaagatcaaaccagccacaacattcccttaagcaaaaagcctaatccacagcaaggctctaaccttcttcagttctatgaaggctgagagaggtgagaaaactgcagaagaaaaactggaagcaagtagaggttggctcatgaggaaaaatgctattgtcataacataa

SEQ ID NO: 436045 - DNA, 603 bp, Homo sapiens
tatatgtgctctctgcagcaaccaactctgacactgtagtgcaacggaagtcatatataatgcccaaacaattcagggaaaggaaaagtcacgtgcctctcattttaactgaaaagctacaaatgattaatcttagtggggaaggaatatcaaaaagtgagaaaggcctaaagctaggcctcttgtaccattcagccaattatgaatgtaaacgaaaaattcttgaataaaattaaaagcactatgtcagtgaacatgaaacaatcttattgctaatatgaagaaagttttagtggtccatatgaaagatcaaaccagccacaacattcccttaagcaaaaarcctaatccacagcaaggctctaaccttcttcagttctatgaaggctgagagaggtgagaaaactgcagaagaaaaactggaagcaagtagaggttggctcatgaggaaaaatgctattgtcataacataaaagtggaaagtgaagcagcaagtgctgacatggaagctgtagcaagttatccagaatatatatctaagatcattgctggaggtggctatactaaacaaggtgttttaagtagacaaaagagccttccatt

SEQ ID NO: 436046 - DNA, 603 bp, Homo sapiens
tatatgtgctctctgcagcaaccaactctgacactgtagtgcaacggaagtcatatataatgcccaaacaattcagggaaaggaaaagtcacgtgcctctcattttaactgaaaagctacaaatgattaatcttagtggggaaggaatatcaaaaagtgagaaaggcctaaagctaggcctcttgtaccattcagccaattatgaatgtaaacgaaaaattcttgaataaaattaaaagcactatgtcagtgaacatgaaacaatcttattgctaatatgaagaaagttttagtggtccatatgaaagatcaaaccagccacaacattcccttaagcaaaaagcctaatccacagcaaggctctaascttcttcagttctatgaaggctgagagaggtgagaaaactgcagaagaaaaactggaagcaagtagaggttggctcatgaggaaaaatgctattgtcataacataaaagtggaaagtgaagcagcaagtgctgacatggaagctgtagcaagttatccagaatatatatctaagatcattgctggaggtggctatactaaacaaggtgttttaagtagacaaaagagccttccatt

SEQ ID NO: 436047 - DNA, 603 bp, Homo sapiens
tatatgtgctctctgcagcaaccaactctgacactgtagtgcaacggaagtcatatataatgcccaaacaattcagggaaaggaaaagtcacgtgcctctcattttaactgaaaagctacaaatgattaatcttagtggggaaggaatatcaaaaagtgagaaaggcctaaagctaggcctcttgtaccattcagccaattatgaatgtaaacgaaaaattcttgaataaaattaaaagcactatgtcagtgaacatgaaacaatcttattgctaatatgaagaaagttttagtggtccatatgaaagatcaaaccagccacaacattcccttaagcaaaaagcctaatccacagcaaggctctaaccttcttcagttctatgaaggctgagagaggtgagaaaactgcagaagaaaaactggaagcaagtagargttggctcatgaggaaaaatgctattgtcataacataaaagtggaaagtgaagcagcaagtgctgacatggaagctgtagcaagttatccagaatatatatctaagatcattgctggaggtggctatactaaacaaggtgttttaagtagacaaaagagccttccatt

SEQ ID NO: 436048 - DNA, 560 bp, Homo sapiens
aggccaagtggggacacaggacactcatacccactgagcagtaacgcggcttcctccctctagagtgtgggtggaaaaaaagtggggagcctgagttcaacacccacccaatgataaggacatatccctatccctccctctacagagatatgacagcagaggcctactggagaatccaaactcaaagcactgctcagtgataacttaaccacccctccatcccagtgtcagtggaggccaagtgaaaagcaggaaccttttgagccagggtggtattcacaaaggtataatgcaagtccagagttttcattcctactcagcatttactaggtgtacgtctccatcartgagtcaacaaaggcctactatgaaactggaatcttcacatacacctgggagtagtaacaaggctgtgccccacctccaccccaaaagcaaagtttcagataaatcctactaaaaggggggatttaaataaaatgcagagcttcataacacaacacttaaaatgcaaaggattcaaccaaatataccatgtcataccatactaagaaccagga

SEQ ID NO: 436049 - DNA, 560 bp, Homo sapiens
aggccaagtggggacacaggacactcatacccactgagcagtaacgcggcttcctccctctagagtgtgggtggaaaaaaagtggggagcctgagttcaacacccacccaatgataaggacatatccctatccctccctctacagagatatgacagcagaggcctactggagaatccaaactcaaagcactgctcagtgataacttaaccacccctccatcccagtgtcagtggaggccaagtgaaaagcaggaaccttttgagccagggtggtattcacaaaggtataatgcaagtccagagttttcattcctactcagcatttactaggtgtacgtctccatcagtgagtcaacaaaggcctactatgaaactggaatcttcacatacacctgggagtagtaacaaggctrtgccccacctccaccccaaaagcaaagtttcagataaatcctactaaaaggggggatttaaataaaatgcagagcttcataacacaacacttaaaatgcaaaggattcaaccaaatataccatgtcataccatactaagaaccagga

SEQ ID NO: 436050 - DNA, 560 bp, Homo sapiens
aggccaagtggggacacaggacactcatacccactgagcagtaacgcggcttcctccctctagagtgtgggtggaaaaaaagtggggagcctgagttcaacacccacccaatgataaggacatatccctatccctccctctacagagatatgacagcagaggcctactggagaatccaaactcaaagcactgctcagtgataacttaaccacccctccatcccagtgtcagtggaggccaagtgaaaagcaggaaccttttgagccagggtggtattcacaaaggtataatgcaagtccagagttttcattcctactcagcatttactaggtgtacgtctccatcagtgagtcaacaaaggcctactatgaaactggaatcttcacatacacctgggagtagtaacaaggctgtgccccacctccaccccaaaagcaaagtttcagataaatcctactaaaaggggggatttaaataaaatgcagagcttcataacacaacacttaaaatgcaaaggattcaaccaaatatamcatgtcataccatactaagaaccagga

SEQ ID NO: 436051 - DNA, 605 bp, Homo sapiens
ccaaaacacttctcaggggtggtggtgaatccagtgaaggctttccagatggtttgggatgggttaacttggaagccctaatcatttatctgagctgagaagttgaggatacagttacatgcaygaatctgaagtagagaaaagatgtcaaagccagagatgggaatttaggattttgagtggatgtgtcaagtcctggggctgagtgagatcccctggagagagaaggaagcttatgtttgagccctagttcagcccaacatttagaagaacccctttgggaagaggagaagaacgagcaaaggctaaatgtgactccctgttttagaagaacctccttcagaagaagaatcaataaagcaaaggctgaactcaactttgtctccttttctcccccagacataatttatgttcttttattgggagtttgtttcccactcaacctttcaggttagagctctgaagtcacgtttgatttttccctcaacatcaaagagacacaacagtttgcttctgtggtgactgttttttgtttgtttttgtatttttgtttttttgtttttgtgtgtgtgtttgtgttattttaatttgtttgtttgtttgag

SEQ ID NO: 436052 - DNA, 605 bp, Homo sapiens
ccaaaacacttctcaggggtggtggtgaatccagtgaaggctttccagatggtttgggatgggttaacttggaagccctaatcatttatctgagctgagaagttgaggatacagttacatgcatgaatctgaagtagagaaaagatgtcaaagccagagatgggaatttaggattttgagtggatgtgtcaagtcctggggctgagtgagatcccctggagagagaaggaagcttatgtttgagccctagttcagcccarcatttagaagaacccctttgggaagaggagaagaacgagcaaaggctaaatgtgactccctgttttagaagaacctccttcagaagaagaatcaataaagcaaaggctgaactcaactttgtctccttttctcccccagacataatttatgttcttttattgggagtttgtttcccactcaacctttcaggttagagctctgaagtcacgtttgatttttccctcaacatcaaagagacacaacagtttgcttctgtggtgactgttttttgtttgtttttgtatttttgtttttttgtttttgtgtgtgtgtttgtgttattttaatttgtttgtttgtttgag

SEQ ID NO: 436053 - DNA, 605 bp, Homo sapiens
ccaaaacacttctcaggggtggtggtgaatccagtgaaggctttccagatggtttgggatgggttaacttggaagccctaatcatttatctgagctgagaagttgaggatacagttacatgcatgaatctgaagtagagaaaagatgtcaaagccagagatgggaatttaggattttgagtggatgtgtcaagtcctggggctgagtgagatcccctggagagagaaggaagcttatgtttgagccctagttcagcccaacatttagaagaacccctttgggaagaggagaagaacgagcaaaggctaaatgtgactccctgttttagaagaayctccttcagaagaagaatcaataaagcaaaggctgaactcaactttgtctccttttctcccccagacataatttatgttcttttattgggagtttgtttcccactcaacctttcaggttagagctctgaagtcacgtttgatttttccctcaacatcaaagagacacaacagtttgcttctgtggtgactgttttttgtttgtttttgtatttttgtttttttgtttttgtgtgtgtgtttgtgttattttaatttgtttgtttgtttgag

SEQ ID NO: 436054 - DNA, 539 bp, Homo sapiens
atgtataagcataaatgttgacatgactggtcacaaaatgttggtggtttctcatcaactgcagagaatagttcaggatccttacctaagtgtctgaaatctttcataaattcacacatggaaagatgtggcctctctgtctgtacttcatcacatcacacccagcacctcaatctctgactccatcatcaatttcctagttccctgagtttgcctgcccagccctgagtcattgtaacatctgattcatcttttaaagtttaacaacaacaacaacaaaatcatctgctctgagaagccagcctttctcaggtgcagagattatcccagagatagacatatggttcaagacaggctagttaaccttcccctgaatttgatcagcaaagactgagagggtggtgggagaagctcagactgtgaatctatagctrcagcagctggattttttttttccatcctatattccaagactttttctgagagaatctagtctggaacccagagagaagcagagagttgagagagtcatcagaact

SEQ ID NO: 436055 - DNA, 640 bp, Homo sapiens
gggtaatttataaataaccaaaatttatttcacacagttctgggggctgtgagttcccaatcaaagtaccagcaaggttagtgtttggtgagaagagctttctgcttcaaaattatgccttgttgaatccttcagaggagaagaatgctgcttccttacatggtaaataggaataaaagagctctggcytcccataagccttttttataaggggagcttatcccattcatgaggcccacatggcctcatctcccaaaagcctcacctgttaatagcatttccttgggagctaatttccaatacataaattttggaagaatacatacattcaaaccatagcataaacctagaaaaataaagtaagtgcaaaataagtaaagtaagtaagtgcaaagctagcagaagggatgaaataataaatattagagagcagaggtaaatgaataagaaaacagaaaacattagagaaaatcattgaaatgaaaagttgcttctttgacaacatgacaaacctgtagctaaatggacttagaaaaagtgagagaagactcaacataccaaaatcaaagtgagagtgggattatattagggtcttgaagtgatgtttgtacacccaagttcatagcagcattattcaaca

SEQ ID NO: 436056 - DNA, 624 bp, Homo sapiens
aaaatcaaagtgagagtgggattatattagggtcttgaagtgatgtttgtacacccaagttcatagcagcattattcaacatagctgaaacatggaagcaaaccaagtgtccactgatagctaagtggataatcaaaatgtggtatatatataaacagcacattattcagtcttaaaagggaagaaaattctgacatatgatcccgctggctgttccacttttaggtatttacccaggagaaatgaagacatatatacacacaaagacttgtgcttattatttacagtacctcactttataacagccaagaaatggaaagaatcctcacttccattaacaactgacaggataaagaaattgaggactatctattcaatgaaatattactcagcaatcaaaaagaatgaacacttgatacacgctatatggatgaatccccaaatatggagccagacaaaaaagagtacgtactctgtattttcatttatgtaaaattctaaaaaacacaaacaaatctgtggtaggaaaagrtcaatggttgtttgggatgggaacagggggaagcaggagggagggattacaatagaggataagaaaatttttggatgtgatgaatattttta

SEQ ID NO: 436057 - DNA, 379 bp, Homo sapiens
actttggcaccttatagcgatgggtggagcagctaggacacagggcaccaagtctctagacagcacagagctgggggaccatggtcccagcccacaaaaccatttttccctcataggcctctggacccgtgtgatgggaggggctgcagtgaaggtttctgacatgtcctggagacattttccccattgtcttggtgattaacatttagctcctcgttacttagacaaatttctgcagcaagcttgaattcctcctcagaaagtgggtttttcttttctattgcatcatcaggctgcaaattttctgaaattttatgctctgyttcccttttttaaattttttgaaataagatccaatttttaaccatatctttgtgaa

SEQ ID NO: 436058 - DNA, 647 bp, Homo sapiens
ttccatgacagttaaatggatgagttacaatatcagttagaaaaatatctggacattatgataaatgattttataattcctcagttaaaggaaataatttactctctgaacaatatctttattaccttagggcatttaaatttaggtgggaactaaggtaaatttccttactttccatggaaaagtaagcccactggtagttgtaaatttctatataaatgttaaacaataagagtcggctaaatggctagcaagtgttggaactttataatgcaatgaatttggcatatgaaaaaaaattctacaccccttggaagtgtgttttatgcttgttatagctgcataaaatacagattgaaaataaactgaacattttaactttggcaacaggggagaacrtatccattcctatttttcaaggaaaataataccatgcattattgactcatgcatggaataaaatatataatagtttgaagcagggctcttacaaagaagctatcctttgttccatacagggactcaaggaataaacataaaggaaatattctttatttatccagctcattctttttctcctaacactacttttatgtatcaggagatccttgcaatatatttgctattgttttaaacagttcatcacc

SEQ ID NO: 436059 - DNA, 617 bp, Homo sapiens
cctgtctgttaatcatttactagaaagaatgtgacagttggtttctttcaggtcatacttgcactgcatatttgggctcttttcttaatttacaaggcatctgtctttatcttatttcctgggtgattattctagtatgttcaagttgctgttctgctctgtcttcaaacatctgtgtttctttattttaattaatgtgattttttttcctggtcgtggacttacaatttttgtattgtcttttatttctgatgtcaagagtttctatatataaatagtaatataaggaaaacattaaaacatgtccccctttttatgtgtctattctgtaagagttcaaagcttgcttgctcttactttaacagactacaaatttgtttatacaacacttattaagaagttaccatgctaaaggctactaaggactataaaaaaggaaaccawgtaaagtcattgcatttgttttttaagggctagcataaccagaaaacaaaactttatttgaatataaaacgagagcatgtataattctaagcatatcaagagctactgaaccttatataacaatataagataatgtttggagatatacattgttataaaagacataaatattt

SEQ ID NO: 436060 - DNA, 594 bp, Homo sapiens
tttctttatttgcatatttgcaaattgcagcatctatagaggggcaattatctcccaaaataaaataaacatttttatctctatttccatgggtattgctaaaaatatccctaaactatgctattaaaaaactggtcaagaaatgaagacctagtataatgtagacagagaagaacaagctagttatacagaagcactctaataaagggagttattgacagcaattttactatccaaacaggatgagaatataataagcttatttttaatagtacatgctgtttctttaagtgtttcagtttatataccacattaaaacattttactataatttgaaattctgctgtctgtgattcacttgggcagtaaatgtgttattctttgtttataacatatttattttaagttactctctggtaacttttcctaattggagaagttattttaacagttgtttgtaaaataaactcaattattcatgtatagtaaccagtgaaactaattgwcaatctttctgtcacagttgatttcaaacacctctgtaatgaatcctgtgactaattaaatgcataaatccttagtaaaagtaactgc

SEQ ID NO: 436061 - DNA, 534 bp, Homo sapiens
ctgtttcccacagaaggggtagattttatgattgatttgtctaatataagccattgcaaacactctttataaagatgttaccttccactaattcttaaaccctctgcaacctaatatccatcctcacctttcaayttttttttttttggaggtcaacaaacatggcctgtggacagattattctaacttttgccagtcttctccttgtctgatctgtgtatagcattggtcctatgattgagaatctcctccttgaagatcttttctgagaatttcatagcaaatatcaaagagcagagaattaatgaaggtaataaaatttgtattttaagatataactttggcacaaaacagtttgagtggcaagccttgaggaaaaaatgtaagtgaaaaagctattgaggaaattcttttttcctactaaaattgagaaagatattgaagttaagtccttctcttctatgaaaaaataagataaacatggaattaattaaaatcatacttttccctgaggctagcagaaaaggatggctg

SEQ ID NO: 436062 - DNA, 534 bp, Homo sapiens
ctgtttcccacagaaggggtagattttatgattgatttgtctaatataagccattgcaaacactctttataaagatgttaccttccactaattcttaaaccctctgcaacctaatatccatcctcacctttcaacttttttttttttggaggtcaacaaacatggcctgtggacagattattctaacttttgccagtcttctccttgtctgatctgtgtatagcattggtcctatgattgagaayctcctccttgaagatcttttctgagaatttcatagcaaatatcaaagagcagagaattaatgaaggtaataaaatttgtattttaagatataactttggcacaaaacagtttgagtggcaagccttgaggaaaaaatgtaagtgaaaaagctattgaggaaattcttttttcctactaaaattgagaaagatattgaagttaagtccttctcttctatgaaaaaataagataaacatggaattaattaaaatcatacttttccctgaggctagcagaaaaggatggctg

SEQ ID NO: 436063 - DNA, 487 bp, Homo sapiens
acttacttactagataaaatgaaggtacaggaattgggtaaatacaagcattccaaatgaaagaaattggcccaaacaaaggggctacaggccccatgcaaatctgaaatccagcagagcagtcaaatcttaaagctccaaaatgacctcctttgactccgtgtttcacatccaggtcacaytgatgtaagaggtggagtccgatggccttgggcagttctgcccctgtggctttgcaggatatagccccactcttgtctactttcagggctggcattgagtgtctgtggcttttccaggtgcatggtgcaagctgttggtggatctaccattctggggtctggaggatggtatcccccttcatgcaacttcactaagtggtgccccagtagggactctgtgtgggggctctgatcccacatttcccttctgcactgccctaccagaagttctccatgagggcccctcccctgcagcaaacttctgc

SEQ ID NO: 436064 - DNA, 614 bp, Homo sapiens
caaatgagcacactgcttaatcaagctatttctagacctcagactttaatattataatgctggacagagagaggatagagtacaaagcatgctgagaaatagaatggccactcaagaggcccagaaagttcacgttttagcccttttcataaaatattatgtataatggcataacaagctctaggcaaacaccgaagtggaaatatagccttattccccattacatttctttcacaaaatgatggcccactttctcctgcacaaagatgagaacaagcccaatagcattgcattatctgytgagatttcaccctgaagaacttaagtttaagcatatcccattgattgcctggcattaaaaagcagatataattttaccctttgaaaggaaagacaatcaacaacccagctgtgcatattcatttacgaaatcaataggatgctgagatcagttctcaagcttctatttcacacatttgtagactcaggtgagggtcaggccaagtcccaaaacgtttagctgtatcacctgggaatgaaggattcctcgtgagagtgaggggcaggaaacatcatgggtcaaattaataaaatggttaaaagaaaccacttgg

SEQ ID NO: 436065 - DNA, 561 bp, Homo sapiens
tgcagtttaactagatgaaaagttctggagattggttgcacaacaatgtaaatatacttagcactattgagctgtatattttaaaatggtcaatatggtagatttgggaatgtttatttttatcacaatttaaaatattccacattgtcctaaatgtaatataaaggagacacaaagaagaaagtaatttataatctaataatatgtgtatctaacgtgttaatttccmggcacaattaggcagaactataatgatgtagtcaaatgcgctcatctgataaaataaataagaaatagaggtcattttaaaataagaggtataagaaaaggaaagaacagaggcatatgtaaacacctgaatagaaatagtttaggagaaactaaaaccacactagtttgtatatgataagagaacaagatgaaaacctttaattgaagtagggaaaacatccaagacaaattatgggcattgaagggagaaaatgagttgggcattatttaaaaatgaaggataaaataattctattgtgacacatggtgtggataacagtatctcacata

SEQ ID NO: 436066 - DNA, 609 bp, Homo sapiens
gacaccagtagctatagaagccagcttctcttttatctctggtagggcaagatggttgggttttagttatcccaaaaggactttgtccaggaggaccacatgtggcagtatggcgatccaccagcagaaagatgctaagtaatgggtatcacttaaatcaggggaacagaagtcatagaagcccccagaaaggaagccatcattaggacatctgtcacatgaaaatccccaactrcagattccagtaacacccaccatctacgattcgctcttcaactttagctctccccatccctgtgccttaattgaaggagtcaaaaatagcaacatagccaggtgtggtggtggcatgcacctgtaatcccagctactcaggaggctgaggcaggagaatcacttgaacctgggaggtggagtttgcagtgagccgagatcgtgccattgcactctggcctggacaacaagagcaaaactctgtctcaaaaagaaaaaaaaaatcacaaaagtaaataggggagaaagcggaggacaggagaatgaagaaactgggcatgctgtctgcctaccaccccattagttaattttcagacttgaattataaaggagaga

SEQ ID NO: 436067 - DNA, 581 bp, Homo sapiens
tcataggtgattggaaaaggattgaagaaaaggtgattggcaaaagaaaattagaatggttcttttcctcagcccccaactcacagcataaattacttctcaggaaaacatgacgctgttttatggaaataagaaaaaaagaaaaataagctagaaaaggggaaatggagtatagagttggaaatagaggagaaaaggcatagccctttkgttctagaaaataattcttaactttcattaaagttaaataaaaattaaccatatatcattttctttactaaaggcagaaggccaagtcagggttaaattactcgaatgttgagaaagtggaattaaagcagtagattgaaattgattggtccctaccagcctgcatccccctttaagggaaactgcagtgccacagcccctgttctatgtgaaaggattcctcctccaatcaatgactgactggatcaagaatgggcaccttacccaggtgtagaccatccatggcttttccatgagctccaaccaacccagcaataggaagacaaattaggcaaaacaaagtcttaccatctggagtctgaaatggaaac

SEQ ID NO: 436068 - DNA, 562 bp, Homo sapiens
ttcatggcctgtagatctgaggcaccaagagaaaagaaaggatacatttccctttatcataacaactatcttgataatatatttttaccatctgggtaaaatcaaagccagtggatgtttgcaaagaaaactgatagtttcatcctagttgttatttgacctgactggctccgttgccttaaatgtgcactgatcatatttttaaatactttcactcacaacacagctatccctaattacttaattccacttccacatctcaactgctgcttgtaaatatgacagtgcgcttacagacactcatgcctatcttatgccacttttaaayaccatgctatctttacatctcagtgtcacacagggggagacagcggaaggagttacagggcacatgggcatgcaaagcagagctggaaaaaaaacacttctgtctttttaaaaaaagtcatgtggttttgatataatatgaatattttatataaaaaagaaattacactcctgaaataacctccagccaaatggagtaaaatcatcatgtaccacaacaacagtcttgcatggc

SEQ ID NO: 436069 - DNA, 562 bp, Homo sapiens
ttcatggcctgtagatctgaggcaccaagagaaaagaaaggatacatttccctttatcataacaactatcttgataatatatttttaccatctgggtaaaatcaaagccagtggatgtttgcaaagaaaactgatagtttcatcctagttgttatttgacctgactggctccgttgccttaaatgtgcactgatcatatttttaaatactttcactcacaacacagctatccctaattacttaattccacttccacatctcaactgctgcttgtaaatatgacagtgcgcttacagacactcatgcctatcttatgccacttttaaataccatgctatctttacatctcagtgtcacacrgggggagacagcggaaggagttacagggcacatgggcatgcaaagcagagctggaaaaaaaacacttctgtctttttaaaaaaagtcatgtggttttgatataatatgaatattttatataaaaaagaaattacactcctgaaataacctccagccaaatggagtaaaatcatcatgtaccacaacaacagtcttgcatggc

SEQ ID NO: 436070 - DNA, 630 bp, Homo sapiens
actgcgcatgtgcggccgcggccccttcggccagctgggggattcgtagacagggtctgggggctgtgtcaggtgaaaacctgcagtggctggcaaggcagcgccgttttacctgatcctattgtatctaaagcggttcaaagtatcttctacaggagttccagtatgcaaattaggattgttcctgagcggtctcacgacttgtagtgttaggatgctaattttattatttcccccacaaactgcctgcaaggggagatttgaagctgggatgcagtggtgtcacagcctagagtcactagctcgcagtccatgaaggcagaggtggcttatttgaaaatagtggagcggagagggatgggccacacctttggccgagttgtatttgcattgagggataactttkttttttttctcctggaaactcacttgattgttagtacttgctctttgctgtggctgctgagataagtcttaacgttttcgtttaacacagtgaaaatgtgtgaaaaggaatactgaatggcaaacgtttaaaaaaacaatgaatgttctaccagttctatcagttgctgggcaattgctggttgttaaatcttggcttgcccaaatcccaggagagaaaatatc

SEQ ID NO: 436071 - DNA, 622 bp, Homo sapiens
aatattcatctatatcataaagtaataagtacaaaggaaagctagtgactgtactgattttattgcttttactaagccattttatgttcctcacactcaatgagaagaaataaaacataatctgaagaaaaatatctcattattattcgcaataaaaaatctgcttcattctgcaggcctgggcagattgtacaatagagagcacttaatggctcaaatggatcaatgtaccagtttgattctgatccacggaatagaatctcatccatatttggtggctggactaactccatgggtgctgtgacagactgaactatttttgtggtatccccagatctcactaaataagaaaagaccctacaccagaaaatataacaatcaatccgtccataaattttatctatatgcttgctcttcagtataagttggaaaaagaggccctttcttgaggacatggataaaagtattatggtctaaagattgctggatcgatattgtgttgttataataaagataaggtacacattgaaaccactgtctgatkaagaaacttccacaacttgtctcaattcttcaaataatggagtaagtttcttttctaggctgacaattagttctgtat

SEQ ID NO: 436072 - DNA, 543 bp, Homo sapiens
gctttaggtcatccgccatgatgaacccccttctcttgcaggatcaatctccttgcctggggtttctgggctgcccggttctctccactgtcacttcaggaacagcttcaaagaccacagtctggttttatgctgggtatatggcaaatgcaaagaattggctctctcttggggtaaggaagctgcccttcctaccactgttttatagcctgagggagttcgtgttaggccaagaccttatcatctttcagaaaacagatttcagttttgccgtggttttgaggtcctgaaccaaaatttcactggcggttctaccaaatcamaacctctgagtctctcctttcatatgattcccataacagaatgttttggtggaagttctattaagcagtaaaaccacagccaatcaagaaatcactgggaaagataaagcgaagtctagctttccattaaccaggacagtcagcttctgtaaaatggagtgtcaacactgcgccttctgtcttaggccaagcattttctccttcttggaactcaccagat

SEQ ID NO: 436073 - DNA, 543 bp, Homo sapiens
gctttaggtcatccgccatgatgaacccccttctcttgcaggatcaatctccttgcctggggtttctgggctgcccggttctctccactgtcacttcaggaacagcttcaaagaccacagtctggttttatgctgggtatatggcaaatgcaaagaattggctctctcttggggtaaggaagctgcccttcctaccactgttttatagcctgagggagttcgtgttaggccaagaccttatcatctttcagaaaacagatttcagttttgccgtggttttgaggtcctgaaccaaaatttcactggcggttctaccaaatcacaacctctgagtctctcctttcatatgattcccataacagaatgttttggtggaagttctattaagcagtaaaaccacagccaatcaagaaatcactgggaaagataaagcraagtctagctttccattaaccaggacagtcagcttctgtaaaatggagtgtcaacactgcgccttctgtcttaggccaagcattttctccttcttggaactcaccagat

SEQ ID NO: 436074 - DNA, 589 bp, Homo sapiens
tcattagtggaaacattccaaggtaacagaaatgtcctgtgtcttttttttttttttttttttttttgagacagagtctcgctctgttgcccaggctggagtgcaatggtgcratcttggctcactgcaagctctgcctcccaggttcacgccattctcctgcctcagcctcccgagtagctaggactacaggcgcccgccaccacacccagctaattttttttgtatttttattagagacagggtttcaccgtgttagccaggatggtctcaacctcctgacctcgtgatccgcccgcctcggcctcccaaagtgctgggattacaggagtgagccactgcacccggccgaaatgtcctatgtcttaataagggtgtgggttacccttattaggggtaggtaacatagttggtctacacagaaagatgaaaatttgaactgctttaaatatattaaagaaattgaattcacaatttaaaactttcccaggaaaaatcaccaggcccacatggtttcactggagagctctatcaaacatttaaagaagaaattatacacctactcttaagaatacaaaggagcaaacag

SEQ ID NO: 436075 - DNA, 589 bp, Homo sapiens
tcattagtggaaacattccaaggtaacagaaatgtcctgtgtcttttttttttttttttttttttttgagacagagtctcgctctgttgcccaggctggagtgcaatggtgcgatcttggctcactgcaagctcygcctcccaggttcacgccattctcctgcctcagcctcccgagtagctaggactacaggcgcccgccaccacacccagctaattttttttgtatttttattagagacagggtttcaccgtgttagccaggatggtctcaacctcctgacctcgtgatccgcccgcctcggcctcccaaagtgctgggattacaggagtgagccactgcacccggccgaaatgtcctatgtcttaataagggtgtgggttacccttattaggggtaggtaacatagttggtctacacagaaagatgaaaatttgaactgctttaaatatattaaagaaattgaattcacaatttaaaactttcccaggaaaaatcaccaggcccacatggtttcactggagagctctatcaaacatttaaagaagaaattatacacctactcttaagaatacaaaggagcaaacag

SEQ ID NO: 436076 - DNA, 668 bp, Homo sapiens
agcaccaccctagcaagtgcaaagaaagtatcaggaaagacattctcaaccttaaaaattatggcaaagcccacaaactaactacactaagttcttcctgtgtcgcttcagatattaaaaaccacattttgacaaactcaaccaaaattttccactaaaccatctgcttgtataaatttaaccatcatttgtcctttaaagttgacatcaccaactgtccataaacattccagtcttctgagagtgaaatggatcggactacatcaggaacgacggagctgttttctcagtaggtttaagttttactaagtagataacttatcagtgatgcttaactttaaaataatccagcacaaagccacaactgagatagatcaatagctgtaatcttgagcagcaaagcaaagacaataacaagcaagaagtacttttaagaaragaaaatgtgaagacattctatgcaaaatctcaaacagaatgaaggacaactcagcattctccagtcttctagaaacactggcacttttttgggccagaaatgtttagttataaaattagaacataggtaaaaatcattaaaatatcttcatataatttactaacttaatagacttcttgtagaaaacttaaatttggtctggattggcaagtgttgataagaatgtgaa

SEQ ID NO: 436077 - DNA, 521 bp, Homo sapiens
acaagctcctctaggaaggtggaccatgtcttattcatcattttatctttagtgcttatcacaaagccaggcttatagtgggcactcaaatgtttgttggatgaattaatgaatgaatgaatgcatatttaaatatccaatcatagagtgacaaatacctcccttgttaattcttatcaattttccaaaaatctcttgaagatctcctcagtcactgggagcattttgctaagcaattgatacagttygagtttgtcacttgtggggttacaagtactgatggaggtatacacatatgtaggcttagtggaatttccacaacatttagtaaggcattaatattttggactaataaatgttgtctgtttcagaggtaaaatacacttttggtttctgtcagtgtatatgattagaaatgctaagagccaccagtctagtccatcccactaatttttatatccaaaggtgatctagtttagaatactagacaaggtttatatgatatttagtttttggtccca

SEQ ID NO: 436078 - DNA, 586 bp, Homo sapiens
agtttttaaaattttcctttctgatcattatatacctgtcagatgacaatagataatcttccaaagttgctacytaaaaatcctaggaaagaaactttggtgaacatgactgccattcccattaattgctaatgaaaaacatcaaacttgcttagtagaaaaacacctaatttggtataactttcttgcagtttatccatattatgtgcttgttacttaatgtaattaaaagcattttaaaattctacttttttcgtatccactttttatacttgctacttcctaaatcctccctcactgtttatttcatccatctactcatttcccatcatccaaagttagcctctccttgtataccaggcactgtctgatttccatgtattccttttatttttactgtgggcctttgtgcttagtatacttttacttcatataatgtgattaacaaatgaagtgattatcatatggagtttaaggaaattagatgtatcttgcaattactttgaaatctttgggaaaccttaagaagattgtatctgttttcatttttatttacaacatcttggaatttgttcatgatttccta

SEQ ID NO: 436079 - DNA, 650 bp, Homo sapiens
ctttcacagatacataaatcctcatgatccttcccccaaattcctgactcctttcctgcttggaagtttttctctttattctgcttggcagccaaaaaattctctttatcataagtgataagaataaaaatactattctgatgttaaagaaggaatgccgtagtttctgaagtgaaattggacacaaagtgcttatagtgtcaatttgcaaagccgttgaaagttttcagaacttctgtaatttccacagttcatctgagccatttcttcccccaatctgatttggcctgcttttccagcattcagcatgttcatttcttatttaatagttttattgaatgatgaatktgaattatttcgattttcatcgcatatgtatcttctgtcatctaacatggtaacgtgacactgcttctgcaagaaaatacattctcatctacagatacacaaattttgataaaaatctagttaaaagatctagcaaagtagaggactttggttaataatggtacaattattttaaaaagttatatgtttgtgtataggcacacaaacatgtatggccagcccccgtggagtatttgcagattaagcatgttgtcagccttcacttatctgaaaagtgtttctgcacaatgaaggaatttttc

SEQ ID NO: 436080 - DNA, 611 bp, Homo sapiens
attatttactctggttgagaccaattaccagttattttgttccgttcagcaccatagttaaggacatttctatataatctaattattatactttagtaatcaaaaggcctacagtttataatcggatgtttctaacatcggcccccagaagctctattatgtaaggagcagttagggatggtctttctcgttgtatttcacaaaatatttcctcaaattgtccctaaaaaaaatttctggayacaacatggaaagaagacttaggttcttacgaaatacttaaaaataatgagcttttttatagccaaggatttaggaaaacaagataagatttctgtggaaaatcaatagcaaaaggtaaatttaatgcctctgttttgcatcttcaccccccatcacctccaccaccaggacataacacccaacgccttaagcagtcccttggagtggagttgccaccatgcctcatggatttcctgcctctgtgtcacggatggccgtcatgtcagaaacacagcagcaatgtccagtggcagagagggaggcaaatcaatacacacaacacttggtttggcaaaagtcactctaaaattatgagatgactttccaac

SEQ ID NO: 436081 - DNA, 584 bp, Homo sapiens
gattcaagtgcagtttgaaagtgaaaaaacagaaagctgtaaaagtgctgtttcagccaatgccatccattcagtctgtaagaaactaccagatgaatcctttggtttcacatcaccatcctgagagaaatcacatatataaatagcatagtaacaatacctgttttatataccacgtaattgtattctttatcatgttcaagtccttttattgctcataaaaaggtgaaccctactaaatatattcctacataagaaaccctatcattttgtatcatattgaatccagaaagcatagcataaaatattgtttatgcacaatcccattggtgttccaatacaaaaataaaaattttaagatcctagcattaagaaattaagactgattaaattattaggctgtttgctatactcaaattttatycaacttatagaaacaagactaaggcctcactgtttaagtaaatgttaattaacatgtaatgtgcattagtgggaaatcatcataatgaaatttcccttttgttcccacatcagggtccattcctaaatacccacgctagtgccttaaaacctacatgcca

SEQ ID NO: 436082 - DNA, 658 bp, Homo sapiens
attatacctgtaaatgatttcaatgaatcagtttccaaacacaaaacacaattacataaatttaaaatataaagcctgatgtcatttgctagtatttcatttagaaatattatacacattaaatgggcacacgatttgtttttgacaaacatccttttacataatgaatttacaataaaccctgaagtgacatcttagtccctttgagttgctgtaacaaaataccatcaactrgatagcatacaaatgatagaaatttatttctcacagtttgggaggctgggaagtccaagatgaaggtgctgataggttcaatgtctgctaacagcccacttcctggttcgtagatggtgactttttctgggtccttagacggcaaaaggggtgagggagttttctccagcctcttttataagggcaccggtcccattcatgagggatctgccctcgtgacctgattatcttcaaataccattacactgcacattaggaattaatgtatgaatttggaggggacataaacattcaatccattgatcacataataaaataaacataattcatgctggtatataagattggtggccctcatttttttccattgagcaatattcaagataggtgccactaacctactatacacatcaaaataatgtac

SEQ ID NO: 436083 - DNA, 658 bp, Homo sapiens
attatacctgtaaatgatttcaatgaatcagtttccaaacacaaaacacaattacataaatttaaaatataaagcctgatgtcatttgctagtatttcatttagaaatattatacacattaaatgggcacacgatttgtttttgacaaacatccttttacataatgaatttacaataaaccctgaagtgacatcttagtccctttgagttgctgtaacaaaataccatcaactagatagcatacaaatgatagaaatttatttctcacagtttgggaggctgggaagtccaagatgaaggtgctgataggttcaatgtctgctaacagcccacttcctggttcgtagatggtgactttttctgggtccttagacggcaaaaggggtgagggagttttctccagcctcttttataagggcaccggtcccattcatgagggatctgccctcgtgacctgattatcttcaaataccattacactgcacattaggaattaatgtatgaatttggaggggacataaacattcaatccattgatcacataataaaataaacataattcatgctggtatataagattggtggccctcatttttttccattgagcaatattcaagataggtgccactaacctactawacacatcaaaataatgtac

SEQ ID NO: 436084 - DNA, 611 bp, Homo sapiens
ttttttattttttcctcattaagaaggctaagagtctatactactgggttcggtagctagtggataagcctcctattctactagataacttttttctttccagtagtattgcatgtagttttaggaaccggggaggaaataggattaacaaaagataagacccaatttgcctactaacstgtagtatcttttcttctattgttacccaggtaaacacaattcctgctttgtattctgtattcccatactgtggtcttaccttcattcattccaaaagcatttactaagtcctatgctcaagggtaatgtttgaaaacctggagtcaagaatactacgggatattaggaatgccaaattctgttttatctgttttaagcatttatttatgtactcatattgctagttaaaaaaaagagagagagagagaaagacgacctgtatggattggttgcactacatccgattcgagatgcttccatcttattacaaaatatccagagaagtttttcttagatattttctgctcagttcttttaatggagccatttctctctttgagttcagactcactcaaaagggtcagaagtaatggagaaggaacaaagcctta

SEQ ID NO: 436085 - DNA, 559 bp, Homo sapiens
catgtgccaaccagcaatgacaccaagacaatcctctcaggtataacaacaagggaaaaagtgaatatggggagatttttagcactactgtattacagggttggttttcttttacaactctcattttccaagggtactcaatatatatcaaacaaataatttgaaattttattttgttggttttgaagaattttctatatgtatgtagcaatatttgataaagactttcttcttaaaattaatagtgtttttagagacagaaaaatattagcatgaaaagaatgctatctgttgtaaaatgaccagagcacagaaatttttgtaagtgttgtaccagtcacgtttcccagacccttaagtgggatgcttttaagtcactgccataacctgccactactaccattattaatttctaccracatcaccattaccatcaccaccaccgccatcaccaccatcaccatcaccaccactactatctctattttcatgaccaccaccacctctacaaatatcatcaacatcagctagtttcctagcatgatctctgaaccatgag

SEQ ID NO: 436086 - DNA, 536 bp, Homo sapiens
catatctataatgttaatttgcagmgtacaagcagtctgccagtgctatatcccaaaggtggacaatttgattacagtgtttgaagaagatggcctagaaggacaaaactgtacataaaaacaatcaactctgcacaagatggcttttcataatcatttttagacatgcataaatcagagatgcatttgtgttacctaatcactactaatgaggcttgagcagagaattcaaacttcaatatttcgctaaaatcctgaagtgcagcatctgaattaaattaatacccttgcttggaaagctaagataaagcattttacattttatagatttggtatgaacactcaagattggataacatgactatgccttaacctttagactacagcgaaactgaaacaaagagatgcaaaaccagtcttgccaatactggaaattcaaaataaaaatatattttggctttttttaagggtaaaattatgttatctatatcaacatcattggatttatttatttcaatagtagaaaaataggtaat

SEQ ID NO: 436087 - DNA, 594 bp, Homo sapiens
ccaggtctccaacacaaactgctacccataagctcagtagagatgtacatgggtattcattacagcattgttagaagtatgaaagatagtgacatggttagatattctgagatatattcatacttcagtgtattcagcaaataccatcatttggctctctgaatstttttttgagatggagtctcgctctgtcacccaggctggagttcaatggcacgatctcagctcactgcaacctctacctcctgggttcaagcgattctcctgcctcagcctcccgagtagctgagattacaggcatgcaccaccacgcctggctaattttttgtatttttagtagagacagggtttcaccatgttggtcaggctggtctcgatctcctgacctcgtgatccgcccgcctcggcctcccaaagtgctgggattacaggcgtgagccaccacgcctggccagctctctgaatctttacattcaagtgtctatatattattatttcaatttcatcacatatttcatgttcagaccataatgaacataatgaaatatttatcatttagtgaacagatcatatctgagaacacagggtttggga

SEQ ID NO: 436088 - DNA, 608 bp, Homo sapiens
agtagaagatagtgggtacccctaagtagaatttgatttttctatacttagcagggatgttagtgttaaaagttagaaaattatatacagtgttactgaagccaaagatagcacaagaagctgctttcctttgtttcaatcatttcatcttcccacctatatctttgatatattctttctgactcccattgcaacatatgtataaacttcccttctgtctctgagtcagctctgcttgcttgagttcaccatatcatgtataccgttcccagccttgtttttttcctagaagtttcaaagtttgattatatttcccaactcttcatgtgttctatttgcctattctatgggaagctatctctcaagcattactattcartatgataagaaggagaaagaaggcaggactgtcatcttagcacgtggcacagtcgtctgcttaaatctgtcctgagtcccgtttctctttaattagtctcgtaggaaaagaggagcaagatcatgctgccaaatgggatatttttggaattctcattattcttttataattgtgcccgtggtcattttgaatctttaccttagtagagtttctaatgaaaaccagatgg

SEQ ID NO: 436089 - DNA, 635 bp, Homo sapiens
gacccactgtttatacccagtacacgtgtggcattcaacttcagtgtgaaataaagcagagtacaggrttggtgcaagagctaggtatggactgggaacagcattagtcagtatcaacattgtagctgaaacccaggaattcaactaacttcattaaacccccaatcctggggggaagtattcagtcctacgtttctttatgctgacatctaagggctatgttttcctaatgattacaacttctgttttctttaaccataccttattgttgacttttccaagcagtgatttgcattttagaatgccagaaattgctgtacatgttcccaaataagaactttaagccttaagtttaagaaaatgagaaatcagccttagaaacaaatgtacaaatatatgtggcatgatgtgctgggcatcttgaatgggcattttttcctcataacttataagaagtctcagaaaggaagaaattgggtgtctttaaatggaaatgaatttgaataagagcacagaaatggaactgatagaacatttatttggttatatgatgatttaattgaattactttgtgtggccatttgaattttatttaacatttaacaggacatacacacatacacacacacacacac

SEQ ID NO: 436090 - DNA, 635 bp, Homo sapiens
gacccactgtttatacccagtacacgtgtggcattcaacttcagtgtgaaataaagcagagtacaggattggtgcaagagctaggtatggactgggaacagcattagtcagtatcaacattgtagctgaaacccaggaattcaactaacttcattaaaccccyaatcctggggggaagtattcagtcctacgtttctttatgctgacatctaagggctatgttttcctaatgattacaacttctgttttctttaaccataccttattgttgacttttccaagcagtgatttgcattttagaatgccagaaattgctgtacatgttcccaaataagaactttaagccttaagtttaagaaaatgagaaatcagccttagaaacaaatgtacaaatatatgtggcatgatgtgctgggcatcttgaatgggcattttttcctcataacttataagaagtctcagaaaggaagaaattgggtgtctttaaatggaaatgaatttgaataagagcacagaaatggaactgatagaacatttatttggttatatgatgatttaattgaattactttgtgtggccatttgaattttatttaacatttaacaggacatacacacatacacacacacacacac

SEQ ID NO: 436091 - DNA, 635 bp, Homo sapiens
gacccactgtttatacccagtacacgtgtggcattcaacttcagtgtgaaataaagcagagtacaggattggtgcaagagctaggtatggactgggaacagcattagtcagtatcaacattgtagctgaaacccaggaattcaactaacttcattaaacccccaatcctggggggaagtattcagtcctacgtttctttaygctgacatctaagggctatgttttcctaatgattacaacttctgttttctttaaccataccttattgttgacttttccaagcagtgatttgcattttagaatgccagaaattgctgtacatgttcccaaataagaactttaagccttaagtttaagaaaatgagaaatcagccttagaaacaaatgtacaaatatatgtggcatgatgtgctgggcatcttgaatgggcattttttcctcataacttataagaagtctcagaaaggaagaaattgggtgtctttaaatggaaatgaatttgaataagagcacagaaatggaactgatagaacatttatttggttatatgatgatttaattgaattactttgtgtggccatttgaattttatttaacatttaacaggacatacacacatacacacacacacacac

SEQ ID NO: 436092 - DNA, 635 bp, Homo sapiens
gacccactgtttatacccagtacacgtgtggcattcaacttcagtgtgaaataaagcagagtacaggattggtgcaagagctaggtatggactgggaacagcattagtcagtatcaacattgtagctgaaacccaggaattcaactaacttcattaaacccccaatcctggggggaagtattcagtcctacgtttctttatgctgacatctaagggctatgttttcctaatgattacaacttctgttttctttaaccataccttattgttgacttttccaagcagtgatttgcattttagaatgccagaaattgctgtacatgttcccaaataagaactttaagccttaagtttaagaaaatgasaaatcagccttagaaacaaatgtacaaatatatgtggcatgatgtgctgggcatcttgaatgggcattttttcctcataacttataagaagtctcagaaaggaagaaattgggtgtctttaaatggaaatgaatttgaataagagcacagaaatggaactgatagaacatttatttggttatatgatgatttaattgaattactttgtgtggccatttgaattttatttaacatttaacaggacatacacacatacacacacacacacac

SEQ ID NO: 436093 - DNA, 491 bp, Homo sapiens
ctaggtagaacaataatcggctccaatgaagagaaatcagaagcccagaaaaaacgacctctctggaatgtttgcccagggaggcttgttcaacttaataggaaaagaatgaatagaaaattatcatctctatctagactagttttaattatctttttcaaacaatctttggattgctctgtctgtattaaattttcagataagaaactaaggcacagggcatttttaaaaattgcataagatcaaatagaaagtgagtgcagtgctgagagragaactcaaaacctgttttttctatggattagctattgaagcatgttatcttatggggaagcagttgacagtaattgggatttccttaggagaaaatgcaaggttcaaagctaaatgcaactctattctctcaccagtgaggctactttttttttttgtccctaaatagaccttttaatttatattttgcttttggaaattcctgctctgattcccca

SEQ ID NO: 436094 - DNA, 455 bp, Homo sapiens
atgttggtggtttgatcaatatcctgggagctgtggcagactattcaggggttttaaacatagggtttacattagcatattgtcattctgaaaggatcatggggtgatatggtttggctctgtccccacccagatctcatcttgaattgtagctcccataattcctacctgctatgggagggacctggtgggagatgaytgaattgtggggacagtttctcccataccgtttccatgatagtaactacatctcatgagatctgatagttttaaaaggggaagcccctttcacttggctctcattctctcttgcctgctgccatgtaagacgtgcctttcaccttccaccatgattgtgaggcctccccagccatgtggaagtgtgagtccattaaacctctttttcttcataaatgatccagtctcaggcatgtctttatcagcagcatgaaaaa

SEQ ID NO: 436095 - DNA, 455 bp, Homo sapiens
atgttggtggtttgatcaatatcctgggagctgtggcagactattcaggggttttaaacatagggtttacattagcatattgtcattctgaaaggatcatggggtgatatggtttggctctgtccccacccagatctcatcttgaattgtagctcccataattcctacctgctatgggagggacctggtgggagatgattgaattgtggggacagtttctcccataccgtttycatgatagtaactacatctcatgagatctgatagttttaaaaggggaagcccctttcacttggctctcattctctcttgcctgctgccatgtaagacgtgcctttcaccttccaccatgattgtgaggcctccccagccatgtggaagtgtgagtccattaaacctctttttcttcataaatgatccagtctcaggcatgtctttatcagcagcatgaaaaa

SEQ ID NO: 436096 - DNA, 455 bp, Homo sapiens
atgttggtggtttgatcaatatcctgggagctgtggcagactattcaggggttttaaacatagggtttacattagcatattgtcattctgaaaggatcatggggtgatatggtttggctctgtccccacccagatctcatcttgaattgtagctcccataattcctacctgctatgggagggacctggtgggagatgattgaattgtggggacagtttctcccataccgtttccatgatagtaactacatctcatgagatctgatagttttaaaaggggaagcccctttcacttggctctcattctctcttgcctgctgccatgtaagacgtgcctttcaccttccaccatgattgtgaggcctccccagccatgtggaagtgtgagtccattaaacctctttttctkcataaatgatccagtctcaggcatgtctttatcagcagcatgaaaaa

SEQ ID NO: 436097 - DNA, 555 bp, Homo sapiens
gcagtgttaatgttgtatgcttgtaactaaatagctcataaatccaaattatgaactacttaggactctgtctttggttgttgtatgattatgagatgatgtctcactacattgcccaggatggttttgaactcctgtgctcaagaaattctcctgtctcagcatcccaagtagctgagattacacacagctcagtctcaagtatccgaggttacagccatgcactactgcacccagttctatttaggcctctttaaggttgatgtaagatatgttgaacttattaactatctatataagacatggatggatgtataaactatgagaccttaagtcaagttatttagcccctcagattctcatctataaagtggagataacaatagcacttacctcataaaattgtaatgaggattaagttggataatatgtgagcttagaacagtcatttatataatgaatactatataagttttaactattattattaagtgctttagaatgrttaataatatggctgatcagttttaggtctgtatttagttgtggcataat

SEQ ID NO: 436098 - DNA, 458 bp, Homo sapiens
aaggccatgcgatatgcctaatattggacacatattaggggctcaataggcgttcacctggttagataggttgtattcacattgatactttcttaaatgtgtccctcagtgaagtgccaatwacttaaatcagtagataagattttgataacctagcaagatcaaagcactgtgttgggtgctgtgggacatgtaaagcagaatatgaaattgtcctcgtccatggagaatttacattacaattatagatggggaagtaacacttgaatatttgaaaagtttgagaataattttaagtaaaataacaagggaaatgctaaaagcaaaggatagaaaaagattgttaagtaaatgatggtaataatccaagtctcagaagttaaataaaatgtcaaggctcaggattcagggaagatttggttacaactccaaactcccatattgataatattcaggat

SEQ ID NO: 436099 - DNA, 458 bp, Homo sapiens
aaggccatgcgatatgcctaatattggacacatattaggggctcaataggcgttcacctggttagataggttgtattcacattgatactttcttaaatgtgtccctcagtgaagtgccaattacttaaatcagtrgataagattttgataacctagcaagatcaaagcactgtgttgggtgctgtgggacatgtaaagcagaatatgaaattgtcctcgtccatggagaatttacattacaattatagatggggaagtaacacttgaatatttgaaaagtttgagaataattttaagtaaaataacaagggaaatgctaaaagcaaaggatagaaaaagattgttaagtaaatgatggtaataatccaagtctcagaagttaaataaaatgtcaaggctcaggattcagggaagatttggttacaactccaaactcccatattgataatattcaggat

SEQ ID NO: 436100 - DNA, 458 bp, Homo sapiens
aaggccatgcgatatgcctaatattggacacatattaggggctcaataggcgttcacctggttagataggttgtattcacattgatactttcttaaatgtgtccctcagtgaagtgccaattacttaaatcagtagataagattttgataacctagcaagatcaaagcactgtgytgggtgctgtgggacatgtaaagcagaatatgaaattgtcctcgtccatggagaatttacattacaattatagatggggaagtaacacttgaatatttgaaaagtttgagaataattttaagtaaaataacaagggaaatgctaaaagcaaaggatagaaaaagattgttaagtaaatgatggtaataatccaagtctcagaagttaaataaaatgtcaaggctcaggattcagggaagatttggttacaactccaaactcccatattgataatattcaggat

SEQ ID NO: 436101 - DNA, 458 bp, Homo sapiens
aaggccatgcgatatgcctaatattggacacatattaggggctcaataggcgttcacctggttagataggttgtattcacattgatactttcttaaatgtgtccctcagtgaagtgccaattacttaaatcagtagataagattttgataacctagcaagatcaaagcactgtgttgggtgctgtgggacatgtaaagcagaatatgaaattgtcctcgtccatggagaatttacattacaattatagatggggaagtaacacttgaatatttgaaaartttgagaataattttaagtaaaataacaagggaaatgctaaaagcaaaggatagaaaaagattgttaagtaaatgatggtaataatccaagtctcagaagttaaataaaatgtcaaggctcaggattcagggaagatttggttacaactccaaactcccatattgataatattcaggat

SEQ ID NO: 436102 - DNA, 481 bp, Homo sapiens
aatctccttcagatatctgcaggtcccaagatttccaaagacttacctttattcacaatacaccagctaccacaacctctggtcactagggaggcaaaatagcatagcagtcatggatgtgagagttgtactgtttggagtcaggctgcctgggctcaaatcccacctttcatcagctatgtgacctttgggcaagctacctaactttgctatggcttagttcatcttytgtactccgggaacaacagtagcaactacttcctaagtgctatgaactgaatgtttgtgtccctgaaaaaatgtatatgttgtacccctaaattccactgtgatggtatttggagatagggcctcttggaggaaattcagtcatgagggtggagccctcatagatgggattagtgtccttataagaagaaacaggagagagcttgcttctcgcttagtcttcaccttgtgaggctacaacaaaaaggcaact

SEQ ID NO: 436103 - DNA, 569 bp, Homo sapiens
tgtgagagttgtactgtttggagtcaggctgcctgggctcaaatcccacctttcatcagctatgtgacctttgggcaagctacctaactttgctatggcttagttcatcttctgtactccgggaacaacagtagcaactacttcctaagtgctatgaactgaatgtttgtgtccctgaaaaaatgtatatgttgtacccctaaattccactgtgatggtatttggagatagggcctcttggaggaaattcagtcatgagggtggagccctcatagatgggattagtgtccttataagaagaaacaggagagagcttgcttctcgcttagtcttcaccttgtgaggctacaacaaaaaggcaactatctgcaagccaggaagagaacccctcatgggacactcaatctccccatgccttgatctcagacttcccagcctccagaactgtgagaaataaatgtttgttgtttaagcaccccagtctatggtgttttgctatggctgcccaagcagactaagacartatggtttttgaaggaattcagtgtgttcatagacttaaagtagtt

SEQ ID NO: 436104 - DNA, 495 bp, Homo sapiens
atcttggttaagacacactggtaaaattagtagtcagatggacagacaaaaatatagaagctgagtcctgattcagaaagcagaaaaggggaggaatttacatcactcaccctcccagacacagtaattcatttaacttcaatttctttcagcatatcaaagatattgtatactcttctgcttggctggcataaaggcgtatgtttttttttttttagagttcaataatatcattccctggtaataacagaagtggcaaaaataaaacaagaagtgaaccacataatcagtttttagactcaaagtcttaaaatgtcagtgctcctattcctaaccaccatcctcatgatctgagggttcttctactgtctatagtgactcacagtcaaacagactgcaaatctgacttttctaatgcaaatgagtctctccatccattaaaaaaamctaaatgttttaagttgtaagtagaaagctctgctcctttagcaaacg

SEQ ID NO: 436105 - DNA, 528 bp, Homo sapiens
taataatgtgtactgtaatgtgtctgtaaagtgcttgcaggagaattataaagattttcttctagagagtgagataatcctttttggttgctttggagggttccggccatttcagattaatacacgcagtggttaattaggttgcctctattaacaacattacagcaaagcaaatgtaggcaaagaaaggcagagttgttgagcccctaccgagggctgggtgtttctcagctcagtaaaacattgcacgattttgaaagttaggtgttgctttttagagataaggaaaatgaggctcaaataagtttgataagttgcccacacatctcagaactgctgctgttggtggatttgaatctagattttccctctgtgcctgctgccgcagtgaccagccaagttgcctctgactttcgtgtgtcaaaggaggatgctttcaccaaacaagacaaaacaggtatggaaataccaaggtgtyccatcacaggaggcctagtggccttgatattttgatctgagcaaagagat

SEQ ID NO: 436106 - DNA, 608 bp, Homo sapiens
gtgataatgatgtgacaatgattgtaaccaatgggctactctggcgtgagatattgattgtgggggaggttgcacacgtgggggcaggggacatatgagaactctctgttatttctcctgaaattttctataaacctaaaactgctttaaatataaagtctatttaaaagaataataactggaagtcttgtagatattaagccatagggagaaaaatagaatcagaaagacaatttaagagattatagtaattgtctaggtgagaaataatgttgtcttttataagatagcaagtatgaaggttttaagaagtgttagattctggacctattttgaaaatagaactgatggtatatattttttaataggttgaatgaattgtataagagaaagtaaggtgttaagaatggcttcaaggttgttggcctgagagtcctaaagacttgagatgccatttaycaagagaggagaattgaggagaaaatcagttttagagaggtagatggagtttggttttgagcaaaagtttgagacatggcacacttgagaagcaaaggaaattcctgcaaggtcacccaggtttgtaaatagcaaagctaagactagga

SEQ ID NO: 436107 - DNA, 592 bp, Homo sapiens
ctcacctaaaaccataaccagagaaacctttttaaacctgtatttggggcatggtccttagaggcttaagccttaagtggcttcctattgcctaccaaatgaagtctccaatcttcagcttgacggtggggccstgagtaactgagccctgcctcctggacagccagggtccctctttgctctgctcacttatcacgttggtcttcctatcctggagtgtggctcactctccacaccatcaactgtttaattgctgcccacccttcaaatctcagcatcaacagtgtccttcgatacaggccttttctccctgcactggcaccccgttcataaacacctgccatttctaatcacaccaacctgtgcttctccttttgaagtgttcactccgtgggatacttgttgacattttctccattcgaatatgagctccatgggggcaggcaccatatttgtcttgtggcagatgttagcctctgattgggcagaatatctgatacataattttcaatgctcgttgaatatgtaaataaatttagagaatgcctagataatttcttaatacccaattactgtattttgagatggcttg

SEQ ID NO: 436108 - DNA, 592 bp, Homo sapiens
ctcacctaaaaccataaccagagaaacctttttaaacctgtatttggggcatggtccttagaggcttaagccttaagtggcttcctattgcctaccaaatgaagtctccaatcttcagcttgacggtggggccgtgagtaactgagccctgcctcctggacagccagggtccctctttgctctgctcacttatcacgttggtcttcctatcctggagtgtggctcactctccacaccatcaactgtttaattgctgcccacccttcaaatctcagcatcaacagtgtccttcgatacaggccttttctccctgcactggcaccccgttcataaacacctgccatttctaatcacaccaacctgtgcttctccttttgaagtgttcactccgtgggatacttgttgacattttctccattcgaatatgagctccaygggggcaggcaccatatttgtcttgtggcagatgttagcctctgattgggcagaatatctgatacataattttcaatgctcgttgaatatgtaaataaatttagagaatgcctagataatttcttaatacccaattactgtattttgagatggcttg

SEQ ID NO: 436109 - DNA, 612 bp, Homo sapiens
actggtcagataaagagataattacaaagcttttctgagtattatgaggacaaatataagagcttggaaaggcaggctggcgtagtagctcatgcctgtaatctcagcactttgggagggcaaggcgggcagatcactggaggtcagcagttcgagaccagcctggccaacatagtgaaaactcctctctactaaaaagtacaaaaattacccaggtgtggtggcatgctcctgtaatcccagttactcaggaggctgaggcatgagaattgcttaaacctgggaagcagaggttgtggtgagatgagatcatgccattgcactccagcttgggtgagtgagcgagactctgtctcaaataaacaaacaaaaatagagaatggagggrcaaataaattatgaagagtagggtgcaaatccaggtgtgtcagcatttgtgtttgcaggggtggccaacgcatggtacttgtctgtagtgtggaagaagtggagggcaatgtgcagtagtgatgctacagagagatatgtatgtgattatgcttatggacaaataatgctgttatctggaagatggggcacaggatggaaaacaagtttggggaagaagacaaa

SEQ ID NO: 436110 - DNA, 429 bp, Homo sapiens
agcgactcctttaagcaagcaataagaaacttcctgtgacaacataataaattcaaaaagttctgtaactcagacaatttagatagaagtgaggactttggcctagacagccctgttcactctaaagatggattaaacaakgaaaaagatattgatatcaaaaattcaatcaggaatttgattaaagcatttcattaaatgtgataattgcttagtatattatcttacatatgcaatattcatgtgtgacaaattaaatacaagtaaacatttgagcatattatctgcagcataatttacatatcaatttacatattcagttttgctcacatgaaaacttggatcttctcaatagaaaattgtgaaatctttaattcctcatccccaggaatgtaaataaataaatataaatataagtcagtgattttt

SEQ ID NO: 436111 - DNA, 429 bp, Homo sapiens
agcgactcctttaagcaagcaataagaaacttcctgtgacaacataataaattcaaaaagttctgtaactcagacaatttagatagaagtgaggactttggcctagacagccctgttcactctaaagatggattaaacaaggaaaaagataytgatatcaaaaattcaatcaggaatttgattaaagcatttcattaaatgtgataattgcttagtatattatcttacatatgcaatattcatgtgtgacaaattaaatacaagtaaacatttgagcatattatctgcagcataatttacatatcaatttacatattcagttttgctcacatgaaaacttggatcttctcaatagaaaattgtgaaatctttaattcctcatccccaggaatgtaaataaataaatataaatataagtcagtgattttt

SEQ ID NO: 436112 - DNA, 429 bp, Homo sapiens
agcgactcctttaagcaagcaataagaaacttcctgtgacaacataataaattcaaaaagttctgtaactcagacaatttagatagaagtgaggactttggcctagacagccctgttcactctaaagatggattaaacaaggaaaaagatattgatatcaaaaattcaatcaggaatttgattaaagcatttcattaaatgtgataattgcttagtatattatcttacatatgcaatattcatgtgtgacaaattaaatacaagtaaacrtttgagcatattatctgcagcataatttacatatcaatttacatattcagttttgctcacatgaaaacttggatcttctcaatagaaaattgtgaaatctttaattcctcatccccaggaatgtaaataaataaatataaatataagtcagtgattttt

SEQ ID NO: 436113 - DNA, 429 bp, Homo sapiens
agcgactcctttaagcaagcaataagaaacttcctgtgacaacataataaattcaaaaagttctgtaactcagacaatttagatagaagtgaggactttggcctagacagccctgttcactctaaagatggattaaacaaggaaaaagatattgatatcaaaaattcaatcaggaatttgattaaagcatttcattaaatgtgataattgcttagtatattatcttacatatgcaatattcatgtgtgacaaattaaatacaagtaaacatttgascatattatctgcagcataatttacatatcaatttacatattcagttttgctcacatgaaaacttggatcttctcaatagaaaattgtgaaatctttaattcctcatccccaggaatgtaaataaataaatataaatataagtcagtgattttt

SEQ ID NO: 436114 - DNA, 606 bp, Homo sapiens
  misc_feature (1)...(606): n = A,T,C or G
nnnnnnnaaacagcttttgaaatacctatttaaaactcttaaatttcttaaaaaattctcataattatatagacttagcctttaaattgaaaaaaaaaattatcaatagttggactatgggggatgaaagtgaggattttgaatgataaaattttgaagtaaatgcaagtatacttaatttgaatattggtttaaaatgcaggatagagcgtaaagaggaaaaatacaatgcatttgttaaggaaagaaacattatattgtgaagaatagtatattgttagtgagatgacagcttcatagaatcaggtttcaggccaataggacggttggtggaagagcrgcattgctggtcatcttggtaatgatggaactttgacaggcatatttcatgttagttacagaattacttcatcctagaagacagccttctaccccttcgacaacctaactatacacatatagagaatgacagacagtatgcctggagctggaatactgtactgtaataagaaataggctaactgttttcaaagatattaattcgactatgaggtcaagaaaaaaataaaatcaacagtcactaaaaaaatcactcatatggctgga

SEQ ID NO: 436115 - DNA, 635 bp, Homo sapiens
atacacacatgcatacacacacacacgcacatacactcagaaatgacaaaaaattgattacctatgaagtatacggcacacagttgctttttactacattatattttatcacacatttgaggaagactgaacaaaatgagcacagctcttatcatcagacaacaatctgtttgaaagaaagcttacaataaacttatttgtctttaaatttttattttaagttcagtgggtacaagcataggtttgttatataggtaaactcgtgtcatggctgtttgttgtacagattattttgtcacccagatattaagcctagtacccaatagttagttttccttattctctcactcctcctaacctctaccttccaagaggtcccaatgtctgttgtttccctctttatgtccatgtgttctcatcatttagcttccacttataagtgagaaaatgcagtatttggttttctgttcctgcaytagtttgttaaggataatggcgttcagctccatccatattcctgcaaaggacatgatctcattcttttttatggcttcatagcattctgtggtgtatatgtaccacattttctttatccaatctaccattgatgggcatttagtttgattcactattgt

SEQ ID NO: 436116 - DNA, 581 bp, Homo sapiens
tttcagttacttagagctgggcatatagaggaaagctcaaagtgtgaggaaatggtctacacctgcttctgggaggtaggtggcagactgccagaagggagactgccttgtgacagtcgctagtgcactcagtaactagaggaggaggtctagcttgtacacaaacaaacagagaagcaggctgcataccagtccagatgtagagaaccacagcactccctcaaacttcctctcagcagttattctgcaagatagaaatctgatcactggagagtcattctatcatttaaaacactgactttctacataattgagatacagctttytcctaaatagaaaattacatagcaatcaaatgtagaagatagcagaggaaagtccagctgctcaggggaaagtgggtggttggaggctcaaagtcctttcctcccctctccagctggcctgactgatccccttctaaggacccacagggaccttccagcaagccctaggcttctacgaagctcactttcaaaacctcaaatttatatgtaacttcgttccttgctaaaacacaaatctattcaaaaagggtaagt

SEQ ID NO: 436117 - DNA, 591 bp, Homo sapiens
aatcattccttgtgtataacttttgctagtaaagcaaaataaatttctacctatccatccaaaatattcctgtatcacaaaggttaaggaagggataagcataaatgttccactctcccccttgatggaggagggtggagggagaaaaacaaaacaaaacagagcagaaactaagatgccttgagaaggctctcacgacgttttattgactgagrgccatcacagacaatgccttctccacttatttatttggaccctttgcttaaggagaataaaataaactcttggtatatttccatttttagggttaaattagattttctgtaacaacatacaaatatatgcaattcacagtcatcaaagatgatacctgttggtggtggcgggatggaacagactttaagcttaaagctgtgtgtagactgctcttgaccatgtagtatttccagaagatcttatcaagtaagaggctttgcataattctgtaactgtgtgtttagagcttcccgaggaacaaccacagactgagagactctgggacatgagcacagccatagcttccagtccttcctatgtgtgttatctacaggg

SEQ ID NO: 436118 - DNA, 629 bp, Homo sapiens
ttaactgggtgatagcagtagtaaaatagttgataacagggtgtgttgtcaccagtgaattaaaaaaatgatagaaccwtcagaaatctgttttaaaacaacagaggtaaaaggagaaaaaaaaatgtgcttataccacaggaataccacacttaccctcaatgccttttttctatcattccaaacacatactagagatcacttgtccaaggcagaatagaccagttacgctttagcagaaacctgaggtcattatacagatctaatcaaacctgttaccattgtgatgtacaagacacacacacaaatgccaaactacggaggtgaaagaagaggtgaaatctcaaaatctgaggatctgattgaagaactagctagccttgagaataaatctttgagtaaatggaatattgatacataacatatgagtctgaaattcaagagaacaggtggggatggaaacataaatttcagaacgtaaataggaaagtcattaaaagctacaagaccgaatggaattagcataagagtgagtgcaggcagaaacaagaagaggctcaagaacggagcctttggtggccccatgttataaagataaagacaaaaagagggaaagaaacggagaaaca

SEQ ID NO: 436119 - DNA, 481 bp, Homo sapiens
tgtccactctgaatggccctttgcacaatacctgtgactcttgatagggaagaagctattgtcagtatctattttaactgggtgatagcagtagtaaaatagttgataacagggtgtgttgtcaccagtgaattaaaaaaatgatagaaccatcagaaatctgttttaaaacaacagaggtaaaaggagaaaaaaaaatgtgcttataccacaggaataccacactyaccctcaatgccttttttctatcattccaaacacatactagagatcacttgtccaaggcagaatagaccagttacgctttagcagaaacctgaggtcattatacagatctaatcaaacctgttaccattgtgatgtacaagacacacacacaaatgccaaactacggaggtgaaagaagaggtgaaatctcaaaatctgaggatctgattgaagaactagctagccttgagaataaatctttgagtaaatggaa

SEQ ID NO: 436120 - DNA, 629 bp, Homo sapiens
ttaactgggtgatagcagtagtaaaatagttgataacagggtgtgttgtcaccagtgaattaaaaaaatgatagaaccatcagaaatctgttttaaaacaacagaggtaaaaggagaaaaaaaaatgtgcttataccacaggaataccacacttaccctcaatgccytttttctatcattccaaacacatactagagatcacttgtccaaggcagaatagaccagttacgctttagcagaaacctgaggtcattatacagatctaatcaaacctgttaccattgtgatgtacaagacacacacacaaatgccaaactacggaggtgaaagaagaggtgaaatctcaaaatctgaggatctgattgaagaactagctagccttgagaataaatctttgagtaaatggaatattgatacataacatatgagtctgaaattcaagagaacaggtggggatggaaacataaatttcagaacgtaaataggaaagtcattaaaagctacaagaccgaatggaattagcataagagtgagtgcaggcagaaacaagaagaggctcaagaacggagcctttggtggccccatgttataaagataaagacaaaaagagggaaagaaacggagaaaca

SEQ ID NO: 436121 - DNA, 481 bp, Homo sapiens
tgtccactctgaatggccctttgcacaatacctgtgactcttgatagggaagaagctattgtcagtatctattttaactgggtgatagcagtagtaaaatagttgataacagggtgtgttgtcaccagtgaattaaaaaaatgatagaaccatcagaaatctgttttaaaacaacagaggtaaaaggagaaaaaaaaatgtgcttataccacaggaataccacacttaccctcaatgccttttttctatcattccaaacacatactagagatcacttgtccaaggcagaatagaccagttacgctttagcagaaacctgaggtcattatacagatctaatcaaacctgttaccattgtgatgtacaagacacacacacaaatgccaaactacrgaggtgaaagaagaggtgaaatctcaaaatctgaggatctgattgaagaactagctagccttgagaataaatctttgagtaaatggaa

SEQ ID NO: 436122 - DNA, 481 bp, Homo sapiens
tgtccactctgaatggccctttgcacaatacctgtgactcttgatagggaagaagctattgtcagtatctattttaactgggtgatagcagtagtaaaatagttgataacagggtgtgttgtcaccagtgaattaaaaaaatgatagaaccatcagaaatctgttttaaaacaacagaggtaaaaggagaaaaaaaaatgtgcttataccacaggaataccacacttaccctcaatgccttttttctatcattccaaacacatactagagatcacttgtccaaggcagaatagaccagttacgctttagcagaaacctgaggtcattatacagatctaatcaaacctgttaccattgtgatgtacaagacacacacacaaatgccaaactacggaggtgaaagaagaggtgaaatctcaaaatctgaggatctgaytgaagaactagctagccttgagaataaatctttgagtaaatggaa

SEQ ID NO: 436123 - DNA, 571 bp, Homo sapiens
tcctgtaaggtcaaagggttctagagggagtgaactaggaagatggtgtttggagacaaggatacttgagccttggtcatgaccacaactaggaaatgaccatgggagctgtggctgagttgagtgaggacaagtttatgaaaggagaggatttccaggaactcagaggtccrgttgttgaatggatcacctacgcaagaattcaaattactaagaataatagcaacagagaatgggatctgatagctggtaaatgacagcaacagggagcaggaggaagatgtgtgtgatattcacagcagggttttcatagaagggacagtgtcagaaagcgggaatgagaagtaaggaatcatgcaccttctctctaggtttagtagaagcctgtgaaatagaagcagccccaccatggaaggagacatccatcttccttccattgccgagtgctccatttcctctacagcccccagtccaagttcctgagaaatgaaatgtgattgtccaagcatttgttatgaatcttgccatgccagcttgtgattaatgactcctctgtcatgtcgtcacccac

SEQ ID NO: 436124 - DNA, 571 bp, Homo sapiens
tcctgtaaggtcaaagggttctagagggagtgaactaggaagatggtgtttggagacaaggatacttgagccttggtcatgaccacaactaggaaatgaccatgggagctgtggctgagttgagtgaggacaagtttatgaaaggagaggatttccaggaactcagaggtccggttgttgaatggatcacctacgcaagaattcaaattactaagaataatagcaacagagaatgggatctgatagctggtaaatgacagcaacagggagcaggaggaagatgtgtgtgatattcacagcagggttttcatagaagggacagtgtcagaaagcgggaatgagaagtaaggaatcatgcaccttctctctaggtttagtagaagsctgtgaaatagaagcagccccaccatggaaggagacatccatcttccttccattgccgagtgctccatttcctctacagcccccagtccaagttcctgagaaatgaaatgtgattgtccaagcatttgttatgaatcttgccatgccagcttgtgattaatgactcctctgtcatgtcgtcacccac

SEQ ID NO: 436125 - DNA, 311 bp, Homo sapiens
taggagtggctggaggttgtgatttggttrtgatttggttttgccaactatgaccccatagagactgctgccttgttaattaatgtgaaattcttttcgaaaaaaaatcttgcagttaggaagttatgttgcatgcaaaaacatgaaaaacattctacatgtttttttttttgataaaatatactcatattacaattctgtttttctaccccattggtatctggccaacatgaaagtatcttgctcaacaacaatccagtgagaggcagtgtgtgaaacaagagttctgcggtctttcctgcttcctttgt

SEQ ID NO: 436126 - DNA, 618 bp, Homo sapiens
cacacacacacacacacacaaatgttcacacatgtatgcgcatcctactacacatacacattaaagatttaagtgctaaaaaccaagcaaatcaaaagttacttaattacataattttaagtctactgtacaatacaatgaatcttgaagtccagaatgtaagtttagctacttaatcctcaaaaagagtataatcattcaattttagttgtttaagtaggaaaaagaacaaattgragcaaataagatgaaaacagaatgctgagctgtattaagtcatagtaagttaagcattctgtttctttaacaatactatgtttcaatgcaagatgttgcaggaagactatcataggagctaaactgtgatgagttttaatgaagatattacacggaatgctagctgacttcctcttcatatatttgaacttctttgtggaattacagcttgtaatcagaaactgaacacctgttctggtctgggcttgtagaaaaaattgaacatttattcagtatttctttacagacaaatgaagtatataactggaaagtcaagtgtttgtgtatgtggtgcagctggaaacttagagctgatatatagaagccacataggagtgcagc

SEQ ID NO: 436127 - DNA, 618 bp, Homo sapiens
cacacacacacacacacacaaatgttcacacatgtatgcgcatcctactacacatacacattaaagatttaagtgctaaaaaccaagcaaatcaaaagttacttaattacataattttaagtctactgtacaatacaatgaatcttgaagtccagaatgtaagtttagctacttaatcctcaaaaagagtataatcattcaattttagttgtttaagtaggaaaaagaacaaattggagcaaataagatgaaaacagaatgctgagctgtattaagtcatagtaagttaagcattctgtttctttaacaatactatgtttcaatgcaagatgttgcaggaagactatcataggagctaaactgtgatgagttttaatgaagatattacacggaatgctagctgacttcctcttcatatatttgaacttctttgtggaattacarcttgtaatcagaaactgaacacctgttctggtctgggcttgtagaaaaaattgaacatttattcagtatttctttacagacaaatgaagtatataactggaaagtcaagtgtttgtgtatgtggtgcagctggaaacttagagctgatatatagaagccacataggagtgcagc

SEQ ID NO: 436128 - DNA, 633 bp, Homo sapiens
cttaatacattcttctctccctgyaggatgcttgactgggagcctcaggctctcttccagcaggaagtgaactaggatgcaatatctgttctttgtgctcacctggcatatatcctttgattcttctagttgtagttcagtagtaaacctaagtaaatgcaacctcgaaccaagatcaaattgtcattccccccaaccgtccagcctagataagccatgtgtttgttccttgatgccacttgtgaagcaaatgaaatacacatgcagagcttttgcttattgtactagtggagtttgaactttgtacaagcaagtgcctgacaattgctttaggtgcaattgtataacggtggcctgagaactgtgaaaaagggcagtttgcataatggctttgaacgataacattctgttgaataaggttgggaataagcgtcaagcctctttattcttgtggaagacagcaattggatgttacttttctacttattctctcgcaaatagaattggtgaaataaacatgtggatcacttagtactattcatttacatttgtcatggtggttttagctcatggaatctcattagcatttctcttcatctgccattgggcatttttcttctgctgatatgtaac

SEQ ID NO: 436129 - DNA, 575 bp, Homo sapiens
tactattcatttacatttgtcatggtggttttagctcatggaatctcattagcatttctcttcatctgccattgggcatttttcttctgctgatatgtaacgacaatctttttaatgtatttggtttgtaaacatgggctttctgtcttgtgtctatgctgttgactttcatgttagaccatatgaaataataactagaattgttatatagaataagcaataataactagaattgttatatggagcaataataactagaattgttatatatagaattgttcctttttcattcacgtatttataattgttcattaaaattaaggcaatagttatattcaataaattaaaggctacataacatttcctaatgcaaaacagtgaggtcatcccactaactattacagtcatctgtgraaattttcagactacttggtttcattgaaatgttaataatagctttatatttcttataataacttctcttactgattccttttgttgttcatccaaacaaaccaatatccaaacatcaaggtactttcagacaacaactctgagagtcattccccgaaaaa

SEQ ID NO: 436130 - DNA, 614 bp, Homo sapiens
atgttttcgatatacttacaaagacaaattatcagtatttcttcatcagctgttatatacttttgctaatgtgaatattttagaggacaaaaggaagatggtgcagagacaatttttataactttttccccaccattgccagcagtctatgatttcttttttatgcccatttatttggcaggagttgctgattttattgttgccatttttttttccrtgaagagctggaagataaagctattctttagttttctcatctgcaaatggcatcccatgggtcctcggcaaagcacagaaatgaatttcagatacctgccataattcttctgctgctgtccttaaaataaccttcaaagttgcaaatattctcatccaaaatgggatgcagattgattacctaatcaagagattagttaaataattaaacaattgaaaaaaatcatagctgcagacacagtattatctatataatagaccatttaatcaggaaggaaacaacaacaacaggcatataagaaagcttttgggagctgagctcatgactgtaatctcaacaatttgggagggcaaggcaggaaaattcctggaggctaggagtttgagaccagcctagg

SEQ ID NO: 436131 - DNA, 626 bp, Homo sapiens
agcataactatgtgggatagacactgatgccatcatgtcacaaagaataaagctcatttccaaatgggttaagtgaacaatctcacccagctagtaacaatctgctgggcaggcagagatcttctcattgtatcctgttattccatcacaamgggcaatttattttcatggatctggttttcatttgatcaacacaacccctctattagtcagaaataacaggtatttaaatctaaatgcagatgagttagctaatgtccaaagaggttgagcattttgctcgagatcattatatatgtcttaggaaaaatggtctgtaagctgattttagtgatgtgagtgaggaaaaacagaagaaattggttctggccctataatttctgcaacctaggtgatgagtctgacccagtggacacctctgggcaaacagagtttaaagaagtgacacattgtgttccaagacctcattatagctgccatttggccctttagcttgtcacataaagattcatattataaacaggtctttattccttattactgcccaccaccatgaatattctatttttgcacataaaagtacactgttgtttacttgaatgcagcttctttctcttttatttgtt

SEQ ID NO: 436132 - DNA, 626 bp, Homo sapiens
agcataactatgtgggatagacactgatgccatcatgtcacaaagaataaagctcatttccaaatgggttaagtgaacaatctcacccagctagtaacaatctgctgggcaggcagagatcttctcattgtatcctgttattccatcacaaagggcaatttattttcatggatctggttttcatttgatcaacacaacccctctattagtcagaaataacaggtatttaaatctaaatgcagatgagttagctaatgtccaaagaggttgagcattttgctcgagatcattatatatgtcttaggaaaaatggtctgtaagctgattttagtgatgtgagtgaggaaaaacagaagaaattggttctggccctataatttctgcaaccyaggtgatgagtctgacccagtggacacctctgggcaaacagagtttaaagaagtgacacattgtgttccaagacctcattatagctgccatttggccctttagcttgtcacataaagattcatattataaacaggtctttattccttattactgcccaccaccatgaatattctatttttgcacataaaagtacactgttgtttacttgaatgcagcttctttctcttttatttgtt

SEQ ID NO: 436133 - DNA, 575 bp, Homo sapiens
acaaattcacctttattacaatatatttgaacaagtagaatatttctagttttcaaagtacacattgataacaatactaataaaaataataatggctaagttatcttgagtaattaacataaatcagacattttctaagtaatgtactcctatacaaaaatgttagtaccttgccgtaggtcgcacagctacctaggagtagagctgtagtttaaatgcaggtggtctggcctcagcactggtgtcctttctcaccacaacatactgtatctgctcatcacaggtacttagggacgctaatcattcctgtgggtgcccacagtttggcaagataaagcaccttcaggccttcatgaagccaaacaatgtctactaacagatttkatggaaaatggctgtatcacatagccatagatgaaacaccaatgcattttctgtggtaaaactccctctgaagacagtctttaccatggtattcaatatttctcataaaagatgtgtaaaaaattctatcagattaggcaaaaatgatctcttctgattaatttacttccttttattagaaaaggggagcc

SEQ ID NO: 436134 - DNA, 613 bp, Homo sapiens
ccatggtattcaatatttctcataaaagatgtgtaaaaaattctatcagattaggcaaaaatgatctcttctgattaatttacttccttttattagaaaaggggagccataaaatttctggttttctgtatttactttggctattagaaagctcagagagaagctcagagtgaattgtggtaggtttacagtgttagagttttgttgtgattatttccctctcctattcttcattactgaactctgttattttctttttaatataatacaagcyaaacaaatgcaattgctttaaagtaaacattttaatctcattacttaagtattttaatttgaacacatttgaaaaaaatatggtcttttagacaagcaaccaaactggactttagtggataattttatccactcctctggttgaaggaatgctgtcatttatggtttgcattattcactgtacaggacagacttactgttttctagaattctaatgggtacagatttggttgagaaacaaatataatctgctgtattatttttcacaaacttatatttcaaatttatactgaatatattacatacaatccaaggagataatgtctactatgcagtaata

SEQ ID NO: 436135 - DNA, 608 bp, Homo sapiens
tgtactatatatgtgtatatgtataattggcagtattggtgcaacccttctaaagtcacaggaaactatatatatatatwttttgtactatatatatatatttttgtagtatatatattgtatatacatattgtgtatatatatagtatatatactatatatagtatatatagtatatatactatatattgtatatatagtatatatagtacatatattatatatatactatatagtgtatatatataatatatatagtacatatattatatatatatatatatatacacacaaaaacgggtcaaccctttggtgccataattataaatgtaagcatgtttcctacagaaatagagatatgtaaaaatatgttgcaacagacagatacgatagtgaaaagttgaaacaatgtgaatgcgcaatagcaggagtttactttaatgttctgcatacatatggtggaatatcatgcaaacattgaatacttttaacaaagaagaaaaaagtggagacacagaaaaatactcatatttttgcagaaaagaaatctagaaaaaaattattaagtatggcctatattagttaaagttgcatttgctgctataata

SEQ ID NO: 436136 - DNA, 595 bp, Homo sapiens
tccattttccaagtaaacatttatttttcagtggaattacagaaatgtcagctcctttttctttgggtttttggatataggtattgatgtgttattttatggagaaatgaatctgtatctttctacaactaagtttcgaacaaggctcccagcgtacatttttggcagagaatactgtttaaatcctggctgattcacatatagcattcaaggcccaattttcttgcgtctgttcaatcactgatgaagttaatgtctgaagctatcagggacatgcattttaaagtagrgagaagccaggagtagccgcatggctgaggcagaggactgaaaactcagagctgagaactctgctccctgttcagccggtgacccagggtgtagtctcaggcatgtcacttaaccattattaattacttaattattatatttgtaatagaaggcttagggaaacatgaggtaatatccaacttcagaaagaaacttttgaacccaggtctattctaagaggcatttgggcaatatttttgaggtgagtaaggaattgtacctcctgctgcttttttcgtttctgagtcaatctctgggttggaca

SEQ ID NO: 436137 - DNA, 499 bp, Homo sapiens
tgtcacctagtgggctgtgatttaggagggggacagtgaaatagtacaacagagatgactgttgttgaggccagtgatggggactgattctcgatggtgcttggcagtacctcaattcatttacttatacattatcttatcttccctatcacgcccttcagggtgtctcaaatgtactgcatcgggattagcaaagtgttcattgtgacctcagctagtcaggggcagagctcagactaataccagatcccaygattcagataccttaacttttctaaacttgcttagataacacatacttcacctgtaaggtaatatacagatactttagatccatatggaaatatgttgccttgattatctagatattttaataaaacatgttatctagatattttagtaacatttaattatctagagatttgaacaaaagttaaattatataaatatttaataacatttctttgatttttattgttattgaaaaattgcttcagtt

SEQ ID NO: 436138 - DNA, 625 bp, Homo sapiens
gattctcgatggtgcttggcagtacctcaattcatttacttatacattatcttatcttccctatcacgcccttcagggtgtctcaaatgtactgcatcgggattagcaaagtgttcattgtgacctcagctagtcaggggcagagctcagactaataccagatcccacgattcagataccttaacttttctaaacttgcttagataacacatacttcacctgtaaggtaatatacagatactttagatccatatggaaatatgttgccttgattatctagatattttaataaaacatgttatctagatattttagtaacatttaattatctagagatttgaacaaaagttaaattatataaatatttaataacatttctttgatttttattgttattgaaaaattgcttcagttctcaaaattctgtattaaacaaaatgaaaaaaatgagcaaagaaaactagataaataaattttagtattgcactctagataacctacactaagccagataaatggggtggaattaagayagcaaaccatcaagactaaatatatctttggataagttatttgaagcaattaaatgatcttcaagaaatagcatcaacttaaagatataatt

SEQ ID NO: 436139 - DNA, 604 bp, Homo sapiens
aatgatcttcaagaaatagcatcaacttaaagatataattaacaccaggagataaatacataacttctccaatacttattttcccagtcaccttgacaaaagccacttttacagtatagtcagaggagtggagagggccagagctgggtgtaggcctayggggagacatggactggagagtttttagacttgcatagactgatgagctttcagagattttgcgagatttcataaaatctttctgggcctaagttttctcacctgtaaaatgagggtagagatgaaacaactacataaagcaccaacccacagcagatgctcagtcagcactacccacacactgaccattgaaagcccaggttttgcaattggtgggacagaaaggtatttccccctctgatcttgaagcctttctctggtacattatcatgcttggtcttgatttacagttaactaatttctcatcatgccttttgataagctggtaaacttgttcatgtcagcgccgcatcgtcatcatttttgtttttgtttttatattcctgtagcaattcactggtgcaatcagtgacttatagtatatgctcaataaactgttgtatgg

SEQ ID NO: 436140 - DNA, 604 bp, Homo sapiens
aatgatcttcaagaaatagcatcaacttaaagatataattaacaccaggagataaatacataacttctccaatacttattttcccagtcaccttgacaaaagccacttttacagtatagtcagaggagtggagagggccagagctgggtgtaggcctacggggagacatggactggagagtttttagacttgcatagactgatgagctttcagagattttgcgagatttcataaaatctttctgggcctaagttttctcacctgtaaaatgagggtagagatgaaacaactacataaagcaccaacccacagcagatgctcagtcagcactacccacacactgaccattgaaagcccaggttttgcaattggtgggacagaaaggtatttccccctctgatcttgaagcctttctctggtacattatcatgcttggtcttgatttacagttaactaatttctcatcatgccttttgataagctggtaaacttgttcatgtcagcgccgcatcktcatcatttttgtttttgtttttatattcctgtagcaattcactggtgcaatcagtgacttatagtatatgctcaataaactgttgtatgg

SEQ ID NO: 436141 - DNA, 592 bp, Homo sapiens
gccaggctgatggcagctcttgcattccggctctaccatgcttgagtctgtttccttgagtaaatcaactccaacctttggcctgtatccttcctctttaaaacgtagtggattatacctaattggctgggaaataatctaggtagagggcctactagcataatgcctgcgatgttataggctcttaataaataccagtttacttttactaagtcaatttcctgttgtttatgctacaacctctgcttataattaggattgatttcggagtgtgaaagtgacctagacctctgaggggtctagaccagaacawcacctgggaatctcacagtaatttatggaactcattaaagtcactaataaacataaagacctcaccccccaaaaaagtccaataacttcttgttttaaattaaaatgtagattcatgtaaaatataattcaaacctatgacctgataagatgagaatattaatttgcatcattttcaatacaaagctgtcacaagaatttgagttgtaagatagcttgcaagttttagtggaaaaagtacagatgttgaagttacgggttcacagtcccgaacctataa

SEQ ID NO: 436142 - DNA, 552 bp, Homo sapiens
gcaactccccggccacttcacatagcgacatgacatgacatgactcatgcttgggaatgggaaaagtcattcattgcaaaacccaaaatgagtgcttccctcttcagtgtaaataataacttgtttctccatccagtggcttacctgcaggatgtatatccaatcatcttagaggttgcacattcccatacacagccatctgtctttaatttctgtttgaactgaaagctactagtgggcaaagattgtgtttattaagtagtcacttactttagatgaccgattagctgccagaattgcctggctctaccgtgcaaaaataacatgctgtatttgattcctcctggtgctgtgatggatttactggagaaaacagtagctsaacattgtacaataccatgtatgatgtgttatttccctaaatattttagctctgggttcagaaaaacattttacccggacacaatccattttcttaaaatataattgtttactgagtggcaaaatcactagtctctctatatatttggtaacctagacatggattactga

SEQ ID NO: 436143 - DNA, 583 bp, Homo sapiens
ttggtatgttagagaattttgtacagagaagttgttgcccacacacaagaagtaagagtcttgctgggaatacaccaaaacttccccagaaagatcctyctgggtaatgcagaaaactctgtatccctctcttgaggccaccccaggatctcactggcctcagacagcctccagggattatcttctccaaaaatgcaaactcaaccaaatgtaattctgctcactttgcacacaacgacaaatcttacaaaacaagtagagcacggaaacatagttgaccaggatatgcctttaactgacagtcaagacccaagctttccacccagcttccaagtcagcaaatgttatgaagtcaaaaatagactggtaaagatggagagaggatgcagaacagagtttgcttttactgtctgggaaggtatgacagaaacgtaaccgaaaagagcagagggctctgggacaagaatgtttctctcttctccctcccttttcctgctctaattattaaccttgttcttttcatgttaagtcaatttgtaaaattcctgtctcctgactccccgctttcccttcctgttttaag

SEQ ID NO: 436144 - DNA, 570 bp, Homo sapiens
caaactcaaccaaatgtaattctgctcactttgcacacaacgacaaatcttacraaacaagtagagcacggaaacatagttgaccaggatatgcctttaactgacagtcaagacccaagctttccacccagcttccaagtcagcaaatgttatgaagtcaaaaatagactggtaaagatggagagaggatgcagaacagagtttgcttttactgtctgggaaggtatgacagaaacgtaaccgaaaagagcagagggctctgggacaagaatgtttctctcttctccctcccttttcctgctctaattattaaccttgttcttttcatgttaagtcaatttgtaaaattcctgtctcctgactccccgctttcccttcctgttttaagctctgtggattaatgcactggcggtcagatcttggccaccagcaaccgcaggtggctctagcttgtaaacagaaaggcaaggtggttttcttgtttatatgcaagtcactgagtagatcagtggatggattaacttgaaaccttttcttcctgggaaaggctggactggttccttgcaggct

SEQ ID NO: 436145 - DNA, 570 bp, Homo sapiens
caaactcaaccaaatgtaattctgctcactttgcacacaacgacaaatcttacaaaacaagtagagcacggaaacatagttgaccaggatatgcctttaactgacagtcaagacccaagctttccacccagcttccaagtcagcaaatgttatgaagtcaaaaatagactggtaaagatggagagaggatgcagaacagagtttgcttttactgtctgggaaggtatgacagaaacgtaaccgaaaagagcagagggctctgggacaagaatgtttctctcttctccctcccttttcctgctctaattattaaccttgttcttttcatgttaagtcaatttgtaaaattcctgtctcctgactccccgctttcccttcctgtyttaagctctgtggattaatgcactggcggtcagatcttggccaccagcaaccgcaggtggctctagcttgtaaacagaaaggcaaggtggttttcttgtttatatgcaagtcactgagtagatcagtggatggattaacttgaaaccttttcttcctgggaaaggctggactggttccttgcaggct

SEQ ID NO: 436146 - DNA, 453 bp, Homo sapiens
atacctttatagccataattctcaaactttaagacatcgtttaaaatgtcaacttcytaaattgaagatttcaagaattgtgatttagtgactcagtatacagccgagaaatctacattttaaataaacatttcaggtgtatgtcagcagtgaaggctgtctgcagaccacatgtacaataaaaaatgaaactgctttatggtaccggctatagcttacttctctctagtctcaaattcttacctatttgtgctgaaaatatctgatttttccggcctgtgttgtcttccagagcctcaccctcgattacctgctttctgccagccttcctaactctgttggacttttgtttctggtcatacctgaggaacaaagttgtcttatacttcagaacaaataaatattggtactttccttcatgctgtatagacaagttagcaaataggaaaaggg

SEQ ID NO: 436147 - DNA, 453 bp, Homo sapiens
atacctttatagccataattctcaaactttaagacatcgtttaaaatgtcaacttcctaaattgaagatttcaagaattgtgatttagtgactcagtatacagccgagaaatctacattttaaataaacatttcaggtgtatgtcagcagtgaaggctgtctgcagaccacatgtacaataaaaaatgaaactgctttatggtaccggctatagcttacttctctctagtctcaaattcttacctatttgtgctgaaaatatctgatttttccggcctgtgttgtcttccagagcctcaccctcgattacctgctttctgccagccttcctaactctgttggacttttgtttctggtcatacytgaggaacaaagttgtcttatacttcagaacaaataaatattggtactttccttcatgctgtatagacaagttagcaaataggaaaaggg

SEQ ID NO: 436148 - DNA, 546 bp, Homo sapiens
tcaagaagtgaagtaaaattccccaattcctgggtgtcagctacatgtagtgacctccttccataatacactgtggcaagcggttaagaaaagagcacctgtacagtcaagaaacctgacaaactctatctcagccaggtgattaaagtcaatgccaacagcatttgttgatattacgtatccttggtgtaatgtgatagcccagtctaattatgaaagaaaaagacaaattctaattgagggacaatctacaatatatctgaccagttcccaccaaaacagtcaaggtcattaaaaatgaaatgaattagagaaactgccacaggcaaggggagtccaaggaggcacaacaactaaagtgtcatgtggtaycctagatgtgaaggcagaacagaaaaggacaataagtgaaaacttaggaagtctgcaccaaatatgaactttagttaaaaataatgttgaaatattgatttatcattagtaagcaacatatcatcctaatataacatgctaatattagaagatattgggtgtggggaatatgac

SEQ ID NO: 436149 - DNA, 647 bp, Homo sapiens
ggggaatatgacagttctctgttctatcttcgaatttctctgtaaatctaaaattgttctaaataataaggtttatttaaaaatggtaagaaaagagtctttaaaatatgttacaacaaaaatagcatttaggtatattctatctaaatcatttataggaaacttgataaattcttattcayccatagtttatcactttagaaattttgaatgtgatagattttaatttttccagcagagaggaattagactgcaatcccactagacaattttcttccacagcctcttttctccgaatacatgctttgaatattttttttctatttgacacttccccttatttttgctgccttattcttttgttataaacttttaaagccaaaatctgaacctctcaacagtacacgtaataatttaagcttcaccaaatagatgtggattgaatttttatctcctagttacacgagataatttaagtgacacaaattactttagctcatttcagaggcaagtcatgatcatcttcataagccagaagatttgagatatatcagaacgatgtaaaagttgaatcttgctctaatgtactagtttactaaaactcactttgcatcaacagtcaggacgctgcttttaagagagacaaa

SEQ ID NO: 436150 - DNA, 647 bp, Homo sapiens
ggggaatatgacagttctctgttctatcttcgaatttctctgtaaatctaaaattgttctaaataataaggtttatttaaaaatggtaagaaaagagtctttaaaatatgttacaacaaaaatagcatttaggtatattctatctaaatcatttataggaaacttgataaattcttattcacccatagtttatcactttagaaattttgaatgtgatagattttaatttttccagcagagaggaattagactgcaatcccactagacaattttcttccacagcctcttttctccgaatacatgctttgaatattttttttctatttgacacttccccttatttttgctgccttattcttttgttataaacttttaaagccaaaatctgaacctctcaacagtacacgtaataatttaagcttcaccaaatagatgtggattgaatttttatctcctagttacacgagataatttaagtgacacaaattactttagctcatttcrgaggcaagtcatgatcatcttcataagccagaagatttgagatatatcagaacgatgtaaaagttgaatcttgctctaatgtactagtttactaaaactcactttgcatcaacagtcaggacgctgcttttaagagagacaaa

SEQ ID NO: 436151 - DNA, 571 bp, Homo sapiens
ttgctctaatgtactagtttactaaaactcactttgcatcaacagtcaggacgctgcttttaagagagacaaaaatgtttttaataaacttattatgcatacatttaatgattctactctctagtgtacatttttatattataagtgcttttctattaaagagtccaaaacattgttgaattgtttttaatgtagaattacagcaacgtgtaagaatctatttttagaaaaaatgttttattttgctataaattgttcacatcatatatacaaaattaaagtggtttcttctttctttttttaaaatgtaccaagttaaagctagagaggaggttatgattatttgctgattactcccagatccccatatctagtgtcaaactttgactcagttgcccagaggcacttctatttaggtatctcatcatcacttctttctaactcagtgttttttgagaagattgcacccaatctaacttgtcttctcatttctattgagagttccattctgcttgtcttcttattcatgatyccttcctcccactttgaaggtcatatgttcacggccaat

SEQ ID NO: 436152 - DNA, 559 bp, Homo sapiens
gttccatagctctttgttgaataaaaatagccatagtggcagagattgcagggaatgagggcattgttagtggtgaaatagtggctgaaaggattgaccctaagatctagatactgatatccaaatactagataaatgctgtatcaaracaaggcttataggctaagagaataagcagaggcagtagaaatggtgataccacttaggtcaatgcagacatggtgcatgtggggagtgagtgaggtagtgaagtaaataggaagctgtgcctcaaaaagcaaatttcagaatttaaaacatcctaccattttaggtcaagacaaataattaaatgtatgtatgagagtgggttacttcaatgaggtatgcatagataaagtaacagtaaaagatgacaagaatgtttgaagctagacatgttggtgggcatctaccacataaaacatttagaaagaatgtgagttttgtgtgaacactttggtgcatagaagtctatgggctgaaaattagcaaggtgacaagacacaatatgggaataacaatatctgcccgtacaaag

SEQ ID NO: 436153 - DNA, 559 bp, Homo sapiens
gttccatagctctttgttgaataaaaatagccatagtggcagagattgcagggaatgagggcattgttagtggtgaaatagtggctgaaaggattgaccctaagatctagatactgatatccaaatactagataaatgctgtatcaaaacaaggcttataggctaagagaataagcagaggcagtagaaatggtgataccacttaggtcaatgcagacatggtgcatgtggggagtgagtgaggtagtgaagtaaataggaagctgtgcctcaaaaagcaaatttcagaatttaaaacatcctaccattttaggtcaagacaaataattaaatgtatgtatgagagtgggttacttcaatgaggtatgcatagataaagtaacagtaaaagatgacaagaatgtttgaagctagacatgttggtgggcatctaccacataaaacatttagaaagaatgtgagttttgtgtgaacacyttggtgcatagaagtctatgggctgaaaattagcaaggtgacaagacacaatatgggaataacaatatctgcccgtacaaag

SEQ ID NO: 436154 - DNA, 550 bp, Homo sapiens
ttactgtgttgctcaaactcctgggctcaagcagtcctcccactttggcctctcaaagtgctaaaattacaggtgtgagtcaccacaacygatagatatgcaggttttcctatttcaagcttatcattattttcctcattgccaaaacttttaggtacttaattcaaggttatctcaatctaatcccccttcttctctaggactgatgcacaatcctggagacttactaatggcaacaatattaggtggtgaatgtctgaccttgttatcggctcacactggcgtcctcacagttgacactgccctgtctggtcttgtgagcatccactgcgatgactttgcatatgaaatctggcctacggcccacactgtcatctgcaaacagatttcttcatcccaaccccatggcctctctaagtctgctgcccttcactcatctaagtgcatgtccttcctgtggacatgggaaatgttggctgctttgcaggtgctctttggagcaccagtgaattttgtgaggcaatctcagccccccactgtcttgacacca

SEQ ID NO: 436155 - DNA, 557 bp, Homo sapiens
cttattgggaggggcagttggagcaagagctagccctcgttcacggtaaatgtatagtatgcagggtattgggttggaatagagcactgtttctcaacattggttgcatattataattatctagggaacttaatatatgccctagtctcacttctagagawtctactttaattgatctgggaaagaatctggatattaagatttgtgaaattcgccaggtgattccattgtgcagccaatgttgagaagcatggctggcaaggctggaaggaagccacagtaaaagcattagcgatagtaacaggggaactaggaaggaaatgcaaatacaactttcagcacaacttgccccaataagttttccttgagtagcaagctgagctggaaacctttggtgatgatttttacacactttctgtataactttcatgtaacgaaactcatacaaagatagtagttgggaaaaagttaaaggttttaacccatgagctgctgcagcaaggtgatagtgtttaatggtgttacatgggaactatcatggcctaatgatttggttt

SEQ ID NO: 436156 - DNA, 557 bp, Homo sapiens
cttattgggaggggcagttggagcaagagctagccctcgttcacggtaaatgtatagtatgcagggtattgggttggaatagagcactgtttctcaacattggttgcatattataattatctagggaacttaatatatgccctagtctcacttctagagaatctactttaattgatctgggaaagaatctggatattaagatttgtgaaattcgccaggtgattccattgtgcagccaatgttgagaagcatggctggcaaggcyggaaggaagccacagtaaaagcattagcgatagtaacaggggaactaggaaggaaatgcaaatacaactttcagcacaacttgccccaataagttttccttgagtagcaagctgagctggaaacctttggtgatgatttttacacactttctgtataactttcatgtaacgaaactcatacaaagatagtagttgggaaaaagttaaaggttttaacccatgagctgctgcagcaaggtgatagtgtttaatggtgttacatgggaactatcatggcctaatgatttggttt

SEQ ID NO: 436157 - DNA, 576 bp, Homo sapiens
cctgacactaatttttgcgagtcccggaaacaatatcttgtcatctttttcgtgtcaccagtttgtcttcctgagctatcttgaattgaacttaaatattttggttttgttacatgtagctaacaagtgtatccataactatcattgtatctagaaataatagcacattgaagcgatctttacaaataaaatagggtttatctcgcatatattttaaaatcttcaaaatgcacattttcagctcaaatttctcttgattccagactcatttgtctgactgctatcaycgaatatattcttgaatgtctcctaagcatctccagtttattatgtccaaagctcacttttttaaaaacataaaagatatcatttatttaatgcctcctaacttccaagtactgcatgccaggtgccggagatatgcaaaactcactcttgatcatctctccaaacctgctcagaccctgttcttttttttcttagtatatgacattacagtctatccagttgcccctgtcagaaaccaaggagtcatctttgacagttttctgtcccttatctccgtgtctagcctat

SEQ ID NO: 436158 - DNA, 493 bp, Homo sapiens
gaccacagcagagaaccactgatgtagattgtaagcaccaggctgcagggatcccatctgtcttacctactgctgattcccatcagctatacaaggcacagagtggccaccactcaggataaacaaaaaagcaagctggtatatttatgtatttccatattacttagcaataaaaataaagtaactactaatacattatacaaacaaaccttttcatatggccttttaaaacccagttctacattgcttatctttacctctggttttagccttcttatgcctgcctcctctttagtcactaagccccggcaccaacatcttccttttggttactcataagactcatgatatkcagagaaatgtgaattaaaatcacaaggaaatatcatcttacaccagtcaaaatggttattattaaaacatcaaaaaataatagatattggcgaggatgcagagagaaggggaagcttatatactattagtaggaatgtaa

SEQ ID NO: 436159 - DNA, 533 bp, Homo sapiens
ccagccctagccagacaggaaactgagatcccagtggttggagcttgagtttgtgcaaacctcaccactgtaggctaaagtgccctagggccctaataaattgtccaaatatagtaatgttcaggaatccaaaatagtaatgttcaggaaactcaaaggaattcaagatagcacagagaaataagtcacaattctatcacataaatttaccaaagagattgaaataagtttaaaaaatcagcagaaattctggagctgaaaagtgcaattggcatattgagtaaagcatcaaaatrttttaatagcagaattgatcaaacaagaaagaattagtgagcctgaagacagactatttgaaaatacacagtcagaggagacaaatgaaaaaagagtaaaaaaaaaaaaaaatgaagcatgcctacatctagaaaatagcctcagatgggcaaatctaagagttattggccttaaagaggagatagaaaaagagatgggggtagaaagcttattgaaagagataataacaaagaatt

SEQ ID NO: 436160 - DNA, 555 bp, Homo sapiens
agaaatctagagttagagcctgggtcatctgctcttgtcccagctctttctgttttgtggcacagtctcctcaaaggggcagatcctcagcaaaattcttattacttttgttcccagttgctgccagttttcctatcagtgggcaccaccaggaaaaataaggcagcagggcagcctcgtgtrcaaggtttttctattttaccaacagattgctctcatgcttttggggaaagagtaaccttaaaatgatgaatgcttgtcctattaaaagctcttccagcacaggcattattgatagtgtgcaaaaaggacatccattttagtgcaaatgaaaattgaaatggagagaacatcatgtcttttttttcgaatatatgatgctggctcacgtacagtgtgattggtgtgagctgaaaacagctgtccagagtccttacgacctttgcctacctcccactggtgataacaaggacagctgatcagtaagaaagctagtttcctaacatctatataataaatgtacagccttagcagggcactcaagcaccctcatga

SEQ ID NO: 436161 - DNA, 599 bp, Homo sapiens
ctcaacaaatgtcatggtatgagtgaatgtttttcattctattccttgtttcttcaattctggactcagcctgataaaactactgtacatctttgggcctggtgggtaccaaagttattataagaaaggcaacagatgaaaattttaattttataataaactgatcaaattaatttacatcaacataatgctcactacttacatttcagatgaatattactaatcctcatttagggatgatttggtagtaaaaataagaaattcactcaataatgccaaatataaacgttatattttaggaataccggaaaattccttagaaycaaatgcagaataaagacttttacttcataggactgaaaagtcctcaggcaatcttactttcttattcttttttggaattaaaaagtatatatttgcccttcctgatcatgtcatgactttgtttcataactgtttcctcagtgagcctttttttttgagacggagtctcactctgtcacgcaggctgaagtgcagtggtaccatgtcagctcactgcaacctccgcccttcagtgagattttaattacttcctctcataattgtgacttgcatag

SEQ ID NO: 436162 - DNA, 584 bp, Homo sapiens
tgatctcctttgactccagttctcacacccaggtcacactgatgcaagaggtgggctttcacagccttgggcagctccacccctgtggctttgcagggtatagcccccatcctggctgcttttatgggctggcaatgagtgtcygcagcttttccaggcacacagtgcaagctgtcagtggatctaccattctgggctctggaggatgatggccctcttctcatagctccactaggcagtgccccagtaagggccctgtgtgggggctccaaccacacatttcccttctgcactgccttatcagaggttctccatgagggccccacccctgcagcaaatatctgcctgggcatccacgtgtttccatcctctgaaatctaggtggaagtacttaaactccaattcttgacttctgtgcacttgcaggctcaacaccacatggaagctgccaaggcttggggcttgcaccctctgaagcaacagcccaagctgtatgttggcccctttcagacccggctagagtggctgggacacagggcaccaaatctctaggctgcacaaagctcagggaccctgggcccagc

SEQ ID NO: 436163 - DNA, 661 bp, Homo sapiens
gggacaatgcaagctgaaattgttaattgtctttcccgtcacgtggagacagcctcygtgaaaatgaaggcaatataaatggaagtacaggcaacaagaaagaaaccagtggtgcctgaagtgtgagtgcctggtttcagtcatgcctgaagtgaaccgtgaacattgtataccctcatagatattctagttttataagccaatatgctttttttccaagctggtttgtactggatatctactctactttcattcagaagcattctgtccagtaaacatatcatgttttcttttgcctggaatgcctgtatgtttctgtgcatctaggaagtgctattttatttttgaattcctcagtagaactttcctgaaccatttcctttattgcatcccggctaacttagtgactccaccctttgttcatgcccctgcccaatcccaactatgttagctgtcttaagtatgtgatttcctcacagactattaactcccccaggatagggactgtgtcttactcaactttataatttcagaatcttgcagagcacctaacacctagtaggagactaatgatatctattttacagtttaactaaaggaaacataagtcacttgcagttttcaaacgcagagtcaaaattttatcttctccttggcacac

SEQ ID NO: 436164 - DNA, 562 bp, Homo sapiens
tccaattatccccattttagagatgagaaaactgagatttaggaaagtaacatcactgaaatgacctcctttgaagttgtgaccataggaggacacagccttataatacacaaaatccaatttaagtattatcatttaagtatagtaaaacctaaattaatataaattttggtatgatgcatttgttaagtgtgccctgtcctcacatggggagggctaatattctcatcaggacagggaggcaaaggcactagcattgggaatcagggagcaacatccagtgatgctggccccggcgtctccagtgttgtccttctcagtatacttcaaccaccccagcaagtgggtgtaactgactggaaaatttttgaaatccctgctactgtccttggagtcccgccagctacaggcccagaatcacccctgtcaactgggcattgcctccaggtagcatcagactccagcctgggttgagatttgggtctggcagccacaaccacatactcagctgtgttgyttcaccaccagcccccaaccaacacttcattcactgtgcaattaa

SEQ ID NO: 436165 - DNA, 582 bp, Homo sapiens
ttcccacctccttttccagatcagcacacattcccaagacagtactgaaagcaggaacctccttatcctttagatacctcttgagagcatccttccctctctctgcatcctactatgcttgtccaacctaccatcacctctctcctggataacggtaagagccttctgactcagtttgcctacatccagtcttgaccccctacaatctgtttcccatactgcaactaatgaaattttaaaagtgcaactctctctgctggccacamtgactttcgttcttttaggtcctctcaccacaaggcctttgcacctctggctagaagggttttattttcccttcccacttcttgtaagtagctcctactcatcttccgatctcagctcagtcttcatcactttggagatactgtctctgaccacaggaaaatttgccattcttggctccacacacctctctttcatagcagtcatcactgcaaccatgttatttaaaggatatttgagtgttggcctctgtcattagaatgtaagcaccctgagggcagagacctctgttgtggcccactgctgtattccctgagt

SEQ ID NO: 436166 - DNA, 599 bp, Homo sapiens
cttactaagtctcatgcagagcattgattacaacatttacttctttttgtttacctgagtccctccatgtctttaatgagttctggcttctatgactctactttccaattctaagtaaaaytcttctcctgggtaccttaaataagaccgttatagattaaggagtcaatgctaccccagggaacatatagtacattttagaacttaggtattcttccagtcagagcaatatagtcagtaactggatcatttttacctctctgatgtggatactagaccaatgccttagaaataataggtgcttaatgcatgatcgttagaatatatttgtaaacgtattcatctctttattttggggggattacttgccacttgagggaagggactatatcttatgtttaagttcctcacgatgtcttgttcatattaggcacttggtaaacatttaatttcaatttagcaagtaagtctatgttcaaattgaagagggttagcacctggggatgagatgtgactagtgagcctccatctgcttttgattctgatgaattagtgccaatgaaatgtccagaagcaacatctcagtgaacgatttattt

SEQ ID NO: 436167 - DNA, 599 bp, Homo sapiens
cttactaagtctcatgcagagcattgattacaacatttacttctttttgtttacctgagtccctccatgtctttaatgagttctggcttctatgactctactttccaattctaagtaaaactcttctcctgggtaccttaaataagaccgttatagatkaaggagtcaatgctaccccagggaacatatagtacattttagaacttaggtattcttccagtcagagcaatatagtcagtaactggatcatttttacctctctgatgtggatactagaccaatgccttagaaataataggtgcttaatgcatgatcgttagaatatatttgtaaacgtattcatctctttattttggggggattacttgccacttgagggaagggactatatcttatgtttaagttcctcacgatgtcttgttcatattaggcacttggtaaacatttaatttcaatttagcaagtaagtctatgttcaaattgaagagggttagcacctggggatgagatgtgactagtgagcctccatctgcttttgattctgatgaattagtgccaatgaaatgtccagaagcaacatctcagtgaacgatttattt

SEQ ID NO: 436168 - DNA, 599 bp, Homo sapiens
cttactaagtctcatgcagagcattgattacaacatttacttctttttgtttacctgagtccctccatgtctttaatgagttctggcttctatgactctactttccaattctaagtaaaactcttctcctgggtaccttaaataagaccgttatagattaaggagtcaatgctaccccagggaacatatagtacattttagaacttaggtattcttccagtcagagcaatatagtcagtaactggatcatttttacctctctgatgtggatactagaccaatgccttagaaataataggtgcttaatgcatgatcgttagaatatatttgtaaacgtattcatctctttattttgsggggattacttgccacttgagggaagggactatatcttatgtttaagttcctcacgatgtcttgttcatattaggcacttggtaaacatttaatttcaatttagcaagtaagtctatgttcaaattgaagagggttagcacctggggatgagatgtgactagtgagcctccatctgcttttgattctgatgaattagtgccaatgaaatgtccagaagcaacatctcagtgaacgatttattt

SEQ ID NO: 436169 - DNA, 599 bp, Homo sapiens
cttactaagtctcatgcagagcattgattacaacatttacttctttttgtttacctgagtccctccatgtctttaatgagttctggcttctatgactctactttccaattctaagtaaaactcttctcctgggtaccttaaataagaccgttatagattaaggagtcaatgctaccccagggaacatatagtacattttagaacttaggtattcttccagtcagagcaatatagtcagtaactggatcatttttacctctctgatgtggatactagaccaatgccttagaaataataggtgcttaatgcatgatcgttagaatatatttgtaaacgtattcatctctttattttggggggattacttgccayttgagggaagggactatatcttatgtttaagttcctcacgatgtcttgttcatattaggcacttggtaaacatttaatttcaatttagcaagtaagtctatgttcaaattgaagagggttagcacctggggatgagatgtgactagtgagcctccatctgcttttgattctgatgaattagtgccaatgaaatgtccagaagcaacatctcagtgaacgatttattt

SEQ ID NO: 436170 - DNA, 581 bp, Homo sapiens
ttcatctatgaaagtttatgctcaggcatagagatatctaaggaggaggagtacacatgtatgtgtgtgtgtgtatgtacataawcatatatacaggaagcagagggattaccttttcctttgtttcaaaacatatttgaacacaatagaataatggtggttaggtggtcagttttatttattgtactgtgtgttgtttatagttttcaaaatgatttcatggctagtatttcattgattttacaataactctccaaattaggtaatgtagttgtttctgttttatagaaggagaacagagggtctcaatggctttcccaagttcattcttcaaggaagggatagaaagaactcaatgtatttctaaccagtgacactcacacttggatgcgagttgtgatattttttatttagtttagattaaacctagttcagttctccttccaccaaggttggcaggcagtacagcaatagtcatctttcaaggttgctttccctttctttggataaaacaaagactcctgagatagggtcatgacattttgccatagtggtcactaatgccattgccagttgcccag

SEQ ID NO: 436171 - DNA, 414 bp, Homo sapiens
acactcacacttggatgcgagttgtgatattttttatttagtttagattaaacctagttcagttctccttccaccaaggttggcaggcagtacagcaayagtcatctttcaaggttgctttccctttctttggataaaacaaagactcctgagatagggtcatgacattttgccatagtggtcactaatgccattgccagttgcccaggcttcgtgatcttgagggcaggaagctcccttggtacaccattccctcctgcattagttcagacatgggaactgtttgcctgatctctcgaggcctttcctcagtggccactatcacagacttccacataggttatctattgctgtcaaacaaactaccccaaaacttgcttctgctgagatgactcaaatggctggagttggaac

SEQ ID NO: 436172 - DNA, 524 bp, Homo sapiens
tatattgtctatattcattgagaaccatatcggtaagattataagttttgcttcaattgttgaacataattcagaacactcaagaggagaaggacaatccattacatttacccatattttaactcttttcattgttatttctttatttctaatgtttcaagtttccttctttttatttttttttrgacgaagtcttgctatgtcatacaggctggagtgtagtggcatgatcttggctcactgcaatctccgcctcctgggttcaagcgattctcctgcctcagcctcctgagtagctgggactacaggctcatgccaccatgcccacctactttttgtacttttagtagagatcaggtttcgccatgttggccaggctagtctcaaactcctgacctcaggtgatccaccaactttggcctcccaaagtgctgggattacaggtatgagccaccacacccagccttcaagttttcttctttaatcatttctttctgtttcaagatattctttaggaattcttt

SEQ ID NO: 436173 - DNA, 561 bp, Homo sapiens
ggaagttacctgactgtacacatactgaaagctgaggtcctctaacacttttttccagttagttctcagaatgcagactgccatactttgagttccaggcaaggggtttgaaatacttctctctgagaaacctgacaagtctaatgatattgactcaataatctagtgctctctaataaaccactgaaaaactcaggggcttaatatamcaacttattattcatcataattctgtatgtggacagaagagttctttagcccctcttggcattgactcgggtactggatggatggaatcatgtgaagcctcagctgaggctgtgagttaaaggtctcagttcttctccacgtagctctgtctgcatgactgcctcggctgccttacatcatggagactaacttccaagtaatgtttcaataggcaggagttcaaaagggaagatcaggactggcacagtatcactgccaccatatttcattgattaaatgaggcagaagcccagcccacagtcagtgtaaatattcatgaattctgagaggcataaggcattggaggtcacc

SEQ ID NO: 436174 - DNA, 518 bp, Homo sapiens
tttggtctttgatgctggtgacctacccatggggttttggtgtggatgtcctttttgttgaagttgatgctattcctttctttctgtttgttagttttccttctaagagtcaggtccctcagctgcaggtctgttggagtttgctggagttccactccagaccctgtttgcctgggtgtcaccagcggaggctgcagaacagcaaatattgcagaacwgcaaatattgctgcctgatccttcctctggaagcttcgtcccggaggggcacccacctgtatgaggtgtcagtcagctcctcctgggaggtgtctcctagttaggctacacaggggtcagggacccacttgaggaggcagtctgtctgtcctcagagctcaaacactgtgctgggagaaccattgctctcttcagagctgtcagacagggacgtttaagtctgcagaagtttctgctgccttttcttcagctatgccctgcccccagggcgtggggtctacagaggcagcaggccttgca

SEQ ID NO: 436175 - DNA, 518 bp, Homo sapiens
tttggtctttgatgctggtgacctacccatggggttttggtgtggatgtcctttttgttgaagttgatgctattcctttctttctgtttgttagttttccttctaagagtcaggtccctcagctgcaggtctgttggagtttgctggagttccactccagaccctgtttgcctgggtgtcaccagcggaggctgcagaacagcaaatattgcagaactgcaaatattgctgcctgatccttcctctggaagcttcgtcccggaggggcacccacctgtatgaggtgtcagtcagctcctcctgggaggtgtctcctagttaggctacacaggggtcagggacccacttgaggaggcagtctgtctgtcctcagagctcaaacactgtgctgggagaaccaytgctctcttcagagctgtcagacagggacgtttaagtctgcagaagtttctgctgccttttcttcagctatgccctgcccccagggcgtggggtctacagaggcagcaggccttgca

SEQ ID NO: 436176 - DNA, 558 bp, Homo sapiens
aatgactaatacaatttttactcaggctatataaagaaccctcaccaaatcaataagataaaagaacttaaaaaatgaacaggcaattcagaggagaaaacctgaactgaattgctaactagtatgtgaaaagatgctcaatagcactagtaatcaggagaatgcaaattaaacaacaatgaggcaatgcttcacactcatcagataggcccacattaaaaatatattaagatcaactgaaggggaggatgtgctaaaagataaactgtcgcttactgttagaggaatggtaaattggttgcaaccatatgggaagatacacattacataaagtgaaagctgtgcatacctaggacacaagtatgaactccggataaatcttttcccatatactcaaggcatgtacaaagatgttcaccagagtttattgtaatatggaatatttaacaaaacccagaaattgtaataggaggacatacataaataaattacactsttcgtattcagtgaaattccatgtaaatattaaaatgaattgataaaataaacatgtaccag

SEQ ID NO: 436177 - DNA, 558 bp, Homo sapiens
aatgactaatacaatttttactcaggctatataaagaaccctcaccaaatcaataagataaaagaacttaaaaaatgaacaggcaattcagaggagaaaacctgaactgaattgctaactagtatgtgaaaagatgctcaatagcactagtaatcaggagaatgcaaattaaacaacaatgaggcaatgcttcacactcatcagataggcccacattaaaaatatattaagatcaactgaaggggaggatgtgctaaaagataaactgtcgcttactgttagaggaatggtaaattggttgcaaccatatgggaagatacacattacataaagtgaaagctgtgcatacctaggacacaagtatgaactccggataaatcttttcccatatactcaaggcatgtacaaagatgttcaccagagtttattgtaatatggaatatttaacaaaacccagaaattgtaataggaggacatacataaataaattacactcttygtattcagtgaaattccatgtaaatattaaaatgaattgataaaataaacatgtaccag

SEQ ID NO: 436178 - DNA, 600 bp, Homo sapiens
atcatgccagtgtgcctttcaaacctcctgttttgcgaacttgcaactggaagactgttagtttccatgtgttaatgaatgcagaacagcctgattttggcatgtggtacatttttcctttttttatctgtcagtcttttagtcagctcactcgtttgggcaatgacgcactacagcgcatcatatattcacatgatctggcttcacttggtgttgtaagttggtttctcaggagcagactctgagatgcacgttaattagcaggatgcttagtagggagagctctgggaatttaacagtgaggatggaaagggagcaggattgggcagaggcagctgtgatgctgtcctaatgagactcagctccccatcagagggtgttctggagactgggatcactgttcaaagttrtgctgagtcgaagtaagagagccaggactttttacacccacatagatcagtctttgggtaagtgcttttcctagaaggaagctgaccttggaccaggccgttttcttcaactgaagcgatcttcaaagatggtggcagcagctgaggttcatcttctggtagcactctcaacagctggaagaaaaatttc

SEQ ID NO: 436179 - DNA, 567 bp, Homo sapiens
cagctgtgatgctgtcctaatgagactcagctccccatcagagggtgttctggagactgggatcactgttcaaagttatgctgagtcgaagtaagagagccaggactttttacacccacatagatcagtctttgggtaagtgcttttcctagaaggaagctgaccttggaccaggccgttttcttcaactgaagcgatcttcaaagatggtggcagcagctgaggttcatcttctggtagcactctcaacagctggaagaaaaatttcctcattcctgcggatctgtgtggtccattacagcacctaccacacactttaaacatcattcagtttaccaggtttctctgaatcaatagaatattaactttaaaaaatacttttttcccratcaatatcttacacaaaatctgtaaatatacataaaatataaaagagataaaaccatcttatttaccagagtaccaaatatatgactccacagatatctccacagatactcacatacttagggcttcttggaacacatttgaaaacctgctagatggaaagttgtagaaattcgctga

SEQ ID NO: 436180 - DNA, 491 bp, Homo sapiens
agttattttacccaaatctgggtcagtggtgtgccttgcattctttcatcccacataattctgctccctacaaaggattgtgcatttgattactttcacaggcttcaaacacctagactatctagtactgctggagagtatctttccatttccagactcttatgcagtcttgctatttgcctcatctttggtgagcccttgaggtgcacactcatggttctgtgaggtatcctgggtgatgggatgctgatggaggctttcaaatgctgattaattagaccttcataatttaggcatttcattggctcagagaaagaaggtcagcccctaaaggaggctcytaaagacaggcactgaaagccctcgcttctctggacaacatcttattatatttctcatggcatgttggttgttatggtgatagcaaaggagaggaggctgagcatgtatggttcaatggaggttttgctttaaggagagggaagtagtag

SEQ ID NO: 436181 - DNA, 439 bp, Homo sapiens
ctttcaggagattttgtttccaaaagaactttagaaaatactagcatagatgtttcattaaactaagatgtgataaaggccggaatccttctaaaattaccgattataaatcttcagaaaaacggatggcttatacatatcgaatctgtgcttgaaaacatcatattgccagaaggcwgcgactcaaattcagagtagaaaaagagatgcaaaatgtctatcaggaatgtttaaaaataatcaggctttttggcagaaaagtaaaactggtcactgaattttggcttctctagtatacaacaataccaaccttagatgctgaaaaaagactcttacagaatgaatggttcctagctaaagagaaattcgattgttttaaaatatactgacatttacataatctgttttgcttaaaatggcagtgccttgttttaaaata

SEQ ID NO: 436182 - DNA, 519 bp, Homo sapiens
aaattcttgttggctaagagtgtggcaaatagcagaagaacrtgatgtgacatcttttctcttcaagcacaggctgtggcccagaatgagagagagatgctccataatgtcacaagagctctcctttctcttaggcattgttctttcctttagactttcattttgttcaagacaaaagcagacacccttgagtaacgccagtatttcacattcctacctgttttattctgctgtcagtaatgagttggctggaacgcgtgggttattcccagcagccagtttctgtttatccgttaggggatagaatagttttagaacagcaattttttcatagtggtgccactcgtttcttcccagcatcctgggatcagtggaatcaaggccaacctttagagcatatgcaatgagtacagcattttagaagattggactgagaccggggctggtgggatgtctctgctgggagccctgggaagcttgaacccaggtcctgcagaatctgcagactgtggtttgctt

SEQ ID NO: 436183 - DNA, 544 bp, Homo sapiens
agcattttttaaaactttctctgcttgcacaagttattaagcaaaaagaaggcaaacatttcaactttgcttaatagctgtttaaaagataagtggcttttcaaattcttttctcaaatcaataatattaccagttgttcattcatcacaaatatttattgatatgcccattatgtgccaggcacttatctagaggctggggatactgcatggaagataacaaagttccaagtctcatggagcttaagttttatactgttagctgctattcagttatctatttctccataacaaaccatctcaaaacctagcagcttaaaacaattcattattatctctcatgattctgcagattgaagaaccattgaagctcagctagatggttttcccttgggatctctcatgtagttgcagctggggctgttgtcgtctgaaggctcacctgggcgggacattcaagatagcctactcttatggcagcatttgatamtgtttgttggctgagagttcagctaaggctatagactggagcatctataggcag

SEQ ID NO: 436184 - DNA, 625 bp, Homo sapiens
tgtgtttataaagtctacagtggtgtacattaatatcccagactttcacgttcacttaccactcactcattgacagagtaatcttccatcctgcaagctccattcatggtaagtgctctatatggggtaccattttttctcttttacaccatatttttactgtacctacgtttagatatataaatgcttacagttgtgcyacaattgcctacagtattcaatacagtaacatgctttacaggtttgtagcccagagacaatagcctacaccataatatagcctaggtgtagagcaggcttaccatctaggcttgtgtaagtgcacactatgacgttaacacaatgaagaaattgcctcatgactcacttctcagaacatttatgtgtacatgttttcttataacactctctaaatctcatgctctatgatagtatggtattatccactaagatgaatctctaagtagtaggctaaagactagtgtattttagtcttggaagttatagtttatttgttatagtttggtaggcaaagagtgggaaagaataggtcctggggaataagagcagaaagaaaataaataaagaccaaaaacagatgtctttcactataatagataaattt

SEQ ID NO: 436185 - DNA, 460 bp, Homo sapiens
aatttaaattccatgataagtggcctaaacatgaaagaaaattttcaaaataggctactgtgagacatcttcacattcagtgggttactcatcagtttttaaaagagaatttatatctttaaaacttgcattaatttgttttaaaataccaattctgattccactggaaatgtgttttgaagcagtaatggggcaggagaggatatagtaaaagaaaatattaaaaggaagtaataaaattcctcarttaagtctacttttaaaagatggagaaaatgaagagccatctctccgcctgtgcagtatagcatccctttcccttatggaggtaagagaacttcactcttccttgggggaagtcctccttccccatttcacataccctgtcctccccacctctcttctccctgtctcagcacagtgagaggttcatgacctagacttgaccaattagattctc

SEQ ID NO: 436186 - DNA, 589 bp, Homo sapiens
tgtcaggtacattaatctacattatactactgtaaaatagtgatgaactttctgtgaaaattgatcccacacaaagttctaagattagaaactaaaaatttgatgtatcaccaagtgttcaatttaaattccatgataagtggcctaaacatgaaagaaaattttcaaaataggctactgtgagacatcttcacattcagtgggttactcatcagtttttaaaagagaatttatatctttaaaacttgcattaatttgttttaaaataccaattctgattccactggaaatgtgttttgaagcagtaatggggcaggagaggatatagtaaaagaaaatattaaaaggaagtaataaaattcctcaattaagtctacttttaaaagatggagaaaatgaagagccatctctccgcctgtgcagtatagcatccctttcccttatggaggtaagagaacttcactcttccttgggggaagtcctccttccccatttcacataccctgtcctccccacctctcttctccctgtctcagcacagtgagagrttcatgacctagacttgaccaattagattctcctgggaatt

SEQ ID NO: 436187 - DNA, 452 bp, Homo sapiens
tcttttcttctgttaatctgtattttgcccattcaattcaaaggccccagtgaaaacatgagagaatagaagaaatatttctttcctcctctacacttatttaaccaaaacatatgatttatgacccagattatatactatttattctttccttcctacacktttatagtgctatttttttggtgctcatcataaaggaactgtttttccatctaaaaattatgtgtggtgaaatataatcaacctatggaaaaatgcataaaacacaaatatgcaacctaataaactactgtaataggaacaaccctgaaccctttctagagtcaaaaacataacaacaaccttaggagaaccctatgtatactttatataagcacttttcacatgctgttttatctgccttattaaattgcaaggattttgaagacgggcatattagccaagattcttat

SEQ ID NO: 436188 - DNA, 452 bp, Homo sapiens
tcttttcttctgttaatctgtattttgcccattcaattcaaaggccccagtgaaaacatgagagaatagaagaaatatttctttcctcctctacacttatttaaccaaaacatatgatttatgacccagattatatactatttattctttccttcctacacgtttatagtgctatttttttggtgctcatcataaargaactgtttttccatctaaaaattatgtgtggtgaaatataatcaacctatggaaaaatgcataaaacacaaatatgcaacctaataaactactgtaataggaacaaccctgaaccctttctagagtcaaaaacataacaacaaccttaggagaaccctatgtatactttatataagcacttttcacatgctgttttatctgccttattaaattgcaaggattttgaagacgggcatattagccaagattcttat

SEQ ID NO: 436189 - DNA, 452 bp, Homo sapiens
tcttttcttctgttaatctgtattttgcccattcaattcaaaggccccagtgaaaacatgagagaatagaagaaatatttctttcctcctctacacttatttaaccaaaacatatgatttatgacccagattatatactatttattctttccttcctacacgtttatagtgctatttttttggtgctcatcataaaggaactgtttttccatctaaaaattatgtgtggtgaaatataatcaacctatggaaaaatgcataaaacacaaatatgcaacctaataaactactgtaatargaacaaccctgaaccctttctagagtcaaaaacataacaacaaccttaggagaaccctatgtatactttatataagcacttttcacatgctgttttatctgccttattaaattgcaaggattttgaagacgggcatattagccaagattcttat

SEQ ID NO: 436190 - DNA, 555 bp, Homo sapiens
tacataccttttagggtttttgagcaaagcttcttggttaacttctttctctcaattgacttagctcagtctatgttattaaagcatttgaaaaatattttaggcaaattcttttctgtggaaacttctaaggatcttccttggggaggctggtgcagaagggacatgattctgtattctagctgttacctttctcctaaaatgaggcatctttacatcttcctactttatacaatataaaacaaaacaaaaacaaatgcgtaggtaactttagagagagaacatttgtaggcatttaaagaagcctgaagtttagatcagagtaagagtttcaactgaaaattatttgagaatcaattaaatctatcccatgtatttggtatggtatttggttgaggctgtctggtgcaggattttttgttcaagttgatcctgggaggatgtggatacaaagggagttggggtgtaggcataacatccattgtcttcaagagggaaaaatgttcaggtaagtgggcttttgtartaagatccattcttttcatcattgtaact

SEQ ID NO: 436191 - DNA, 581 bp, Homo sapiens
ttttctcattttttgcgtaataaattatgttaattaccaaatatttaatgctctcattgtgagggcatactcttaatatttattgagctccctgacttttcaagattgccatagaatatcttttgttttattttaatttggtttaggcatatttcataagtgcatgtcagcatgactgagcacatctgtacctttattatggtgaaagagttaatttgttattttaggcacatataccaacttttaaatwggtcatattaccccttgggaaatgtcctgaatccctcaactgagttttactttccaagttaggtgtttagttcattcttctcatgcgatagtgaaagtaaaagctttcctgacccttaagactgacattttctcgttagggaaagagactcgatagcagggtagactaacagtagttcccaaataaaggcacacaggagaaaatgaatcaatagaatctaattaaaattactactccagggaataagaagtattgaggatttattttattttgaattggttttaagtatggaataattgtctttacagttataaaaagtaattagtggtgt

SEQ ID NO: 436192 - DNA, 581 bp, Homo sapiens
ttttctcattttttgcgtaataaattatgttaattaccaaatatttaatgctctcattgtgagggcatactcttaatatttattgagctccctgacttttcaagattgccatagaatatcttttgttttattttaatttggtttaggcatatttcataagtgcatgtcagcatgactgagcacatctgtacctttattatggtgaaagagttaatttgttattttaggcacatataccaacttttaaattggtcatattaccccttgggaaatgtcctgaatccctcaactgagttttactttccaagttaggtgtttagttcattcttcwcatgcgatagtgaaagtaaaagctttcctgacccttaagactgacattttctcgttagggaaagagactcgatagcagggtagactaacagtagttcccaaataaaggcacacaggagaaaatgaatcaatagaatctaattaaaattactactccagggaataagaagtattgaggatttattttattttgaattggttttaagtatggaataattgtctttacagttataaaaagtaattagtggtgt

SEQ ID NO: 436193 - DNA, 551 bp, Homo sapiens
atttgttggatgatgggtagtgagtggatatgagttaagaagcaggaagatacaaaacagctgtaggtaccattgagattaaattataaatttcagtagaagaatttggagaaatactttcagaaaaagttgaggcaaaataatgggaagctataaatgctaatccaaagtcttcgtacttaagtcaggaggcacaagtgacacttattctttctttttaggagggttgaccttcttaatgggttggaggaagggtcattgaaattgtccaggattgccgggcgcaatggtccgtgcctatagtcctagctactcagagactgaggtgggaggatggcttcagcccaggggttctgggctgtagtgtgctacgctgattgggkgtctgcactaagttcagcattaatatggtcacctcccgggaacagggaaccaccaggttgcctaggtggggtgaaccagcccaggtcagaaatggagcaggtaaaaactcccatgatgatcagttgtgggattgcatctataaatagccaatgcactccagcctgggc

SEQ ID NO: 436194 - DNA, 613 bp, Homo sapiens
attgaggttgctgcagacctgtacacactcgctgctagtaacccagataaccgtaytgcaccccaacctctctctaagaagtcacccactcctcctctcgcttttagcccacacacttctgggatccagggtggagcatgttgtctggcccaaacagattggttaattttctgttacttacaacggaaagagcccttccagcatgttaaaaacaaaaaggactggaagtggggtagtataagagatgaattaagaagatggaattggcaaagtcgtggtgaaaataacaaggactttctgtcttgggcagggaagctggcaatccttgctaaggagtagtgaaatatttacttgtatcttgggactgagaccatgtgcttcctgaagcttcctcaatacaagacttgataggaaaacaaatgggagctcagagtgttatttgttatggccttcagtaaggtcctaccaagaaaatattggatttagattgaaattggcccatctgaaaagagaaaagaaggaaaattacaaatatgctagtagagaccatttctgttgagggtccacaatctgagatggctaaaaatccaatgaaatgaaacctggggtagaa

SEQ ID NO: 436195 - DNA, 606 bp, Homo sapiens
gtcaatggaggaagtcattcacaaaagattaagtagtaagactttagccaggatgccagtgggcgagtcaagttgcacagcatgaagacaatcagagcacatggtatattatagaacaagggcagaggagrtgtgagggcaacaaaggtatattttcttcaaatgacaatagagagagatctgaaggcataaaagaactacgtaaaaccagataacttcagcccctacctttaagccagctctgcaccccattaacttcctgaggcctttacacactggcatcattcttgtaaagtccatttcttaaggtttataaattcttaggtcatttcccaaattctctcatctacccttgatgtgcacttgtgttgtaatagattttattattatttctgtgtggtaaggccaacacatcaggagatgagtgccattgaaaagacagtttatactactaacagttcgcaagaaagagtacatgttacgccataggaggctatactgggatctgtcacagggcagaaagagaaggggaactgtgggctgaagcttctattgtgcattgctcaggggtgaggcagggtatgcagacttgggattggttagtgt

SEQ ID NO: 436196 - DNA, 606 bp, Homo sapiens
gtcaatggaggaagtcattcacaaaagattaagtagtaagactttagccaggatgccagtgggcgagtcaagttgcacagcatgaagacaatcagagcacatggtatattatagaacaagggcagaggagatgtgagggcaacaaaggtawattttcttcaaatgacaatagagagagatctgaaggcataaaagaactacgtaaaaccagataacttcagcccctacctttaagccagctctgcaccccattaacttcctgaggcctttacacactggcatcattcttgtaaagtccatttcttaaggtttataaattcttaggtcatttcccaaattctctcatctacccttgatgtgcacttgtgttgtaatagattttattattatttctgtgtggtaaggccaacacatcaggagatgagtgccattgaaaagacagtttatactactaacagttcgcaagaaagagtacatgttacgccataggaggctatactgggatctgtcacagggcagaaagagaaggggaactgtgggctgaagcttctattgtgcattgctcaggggtgaggcagggtatgcagacttgggattggttagtgt

SEQ ID NO: 436197 - DNA, 606 bp, Homo sapiens
gtcaatggaggaagtcattcacaaaagattaagtagtaagactttagccaggatgccagtgggcgagtcaagttgcacagcatgaagacaatcagagcacatggtatattatagaacaagggcagaggagatgtgagggcaacaaaggtatattttcttcaaatgacaatagagagagatctgaaggcataaaagaactaygtaaaaccagataacttcagcccctacctttaagccagctctgcaccccattaacttcctgaggcctttacacactggcatcattcttgtaaagtccatttcttaaggtttataaattcttaggtcatttcccaaattctctcatctacccttgatgtgcacttgtgttgtaatagattttattattatttctgtgtggtaaggccaacacatcaggagatgagtgccattgaaaagacagtttatactactaacagttcgcaagaaagagtacatgttacgccataggaggctatactgggatctgtcacagggcagaaagagaaggggaactgtgggctgaagcttctattgtgcattgctcaggggtgaggcagggtatgcagacttgggattggttagtgt

SEQ ID NO: 436198 - DNA, 568 bp, Homo sapiens
  misc_feature (1)...(568): n = A,T,C or G
gataagcatccaggctacagaaagggtcaaatttccatgaggctctgcttctgagaatcaggacttcatgaccagagccacgggcctccagatctcctgagatcccatggtcaagctagcattcctgagaaaggaggtatttggcattcagttaataaagacctgagtaggaacttcaccagcctgagtccctcctcactacctaaatcttttctgcctttctgatggtcatcatgtctgaaaattttcccaggaataacctagcacaaagaaactaccattgtttgtattatttagatctcaaaagtcttctgttgcactggcctccagaagctgcatgcctgcctggcctgcctagatttcaccctacactcagaccttctctgaagatataagggccaataatgcttaacagggatcttgaattcatttcttgtgtctcttgcttgcaaatgagaaacacattactttaggtcacaawgtggatatgcatgttttacctatgtcagaaattgtgcggtggcactgctgcaaattaccagcgctgagtagtaatgtgnnnnnnnnn

SEQ ID NO: 436199 - DNA, 613 bp, Homo sapiens
tgtaaaaacagtctcgatttcttaaataaattgggtgttggttaccattgataaaagagcaatagactattgtctttgtatatgcaacattcaataaaatattaagtttgaacttttcatgatcatatttagttataaagtttgctatcctcaaatgcatcagcaataatacacagaaatgcacacacacattttcacccattttctgccatcttgtgtgtgtgtgtgtgtgtgtgtgtgtgtgtgaatatcaaattgaattatataaaaataaagatatggccaggtgtggtggctcacacttgtaatcccaacactttgggaggctgaggtgggcagatcacgaggtcaggagttcaagaccagcctggccaacatagtgaaaccccgtctctactaaaaatacaaaaaattagccgggtgtggtggcaggcgcttgtaatcccagctactcgggaggctaaggcaggagaatcacttgaamctcggaggcagaggttgcagtgaaatgagatcacgccattgcactctagcctgggtgacagtgcgagactccatctcaaacaaacaaacaaacaaaaaaagtaaagacattggattatattagatgaca

SEQ ID NO: 436200 - DNA, 389 bp, Homo sapiens
aggaaagtaaaatggttcaaccaccatggataaaagtatggtatgttctcaaaaaattagaaatagaatggctatatgattcagcaattccacctttggatatatatccaaaagaattgaaagcagggtccagaagtgatatttgtgtacggatgattataacagcattattcacaatagccaagatgtgaaaacaatataaatgtccattggtcgatgaatggataaacaaaatgtggtrtatatatatatatatatatatatatatatatatatatatatatatacatacaatgggatattactcagctttaacaaagaaggaaattctacaacatggatgctacatggatgaaccctgtggacactgtgctaagaaagataagcca

SEQ ID NO: 436201 - DNA, 638 bp, Homo sapiens
tcgggtgaattagatatgtcatcaaatccccagtgaactcaacaaggctcatttattttactatgaaattgatcaatttgattaccttaagaayaaaatccagttatgacagatatcaagttaaagtaagtgcctttcattgtggtcctttttatcttttttagcttctacagcatacaagtatttttgagtagactattcagtgttgatatttttaattactccatccctaagtaaattaaagagtaccaatattcttgaaaaaatatgagatctttgaattgtcccaactaaatatatttgattggcacaccttgccaggttgctgataaaaagcctttgtaactatttaaaatttcaatttgatggcatttccttatgaattgcttagatactttattcaatctcattcaatagaaggttgaaatggctaccaagaactataccataaatttggtttatccaccaaagctgctgatttgatggaggtttttcatgacacagtgcataaattgctttctttttggtttctctatgaatatctacatagtttcttcaaactaaattcatagcagaaacaggttatagtatatttctttgtcttccgcagcacttaacatggttataagcatatggta

SEQ ID NO: 436202 - DNA, 638 bp, Homo sapiens
tcgggtgaattagatatgtcatcaaatccccagtgaactcaacaaggctcatttattttactatgaaattgatcaatttgattaccttaagaataaaatccagttatgacagatatcaagttaaagtaagtgcctttcattgtggtcctttttatcttttttagcttctacagcatacaagtatttttgagtagactattcagtgttgatatttttaattactccatccctaagtaaattaaagagtaccaatattcttgaaaaaatatgagatctttgaattgtcccaactaaatatatttgattggcacacyttgccaggttgctgataaaaagcctttgtaactatttaaaatttcaatttgatggcatttccttatgaattgcttagatactttattcaatctcattcaatagaaggttgaaatggctaccaagaactataccataaatttggtttatccaccaaagctgctgatttgatggaggtttttcatgacacagtgcataaattgctttctttttggtttctctatgaatatctacatagtttcttcaaactaaattcatagcagaaacaggttatagtatatttctttgtcttccgcagcacttaacatggttataagcatatggta

SEQ ID NO: 436203 - DNA, 563 bp, Homo sapiens
aacatagttttcagaggtacctaactcctaaatggggagaaggttcagtaacaagacaatcttaaaatgtttccattagtattcaaatgtaacttcgtgggtaagcaaccagagaaccacatatttgtagagcagaaaggggttttgggattatttggttcagccttgccagtttatacaagtataaagctgggacctacagaagctaagtgacttgccttaggtcatccagctaataagaagtggaaatgacactagaacacacttcctttccatttcaattcagtcccaatcataaaaagtaaattctccctagaactctgctagtcttttcgtagtttcctgtttctatcartttcaagcttctttgatatatatcaatgcattgatgagagtgctgatttgggggaaaatgcatatgatggacttacctctgtggcaagtctcctcccggctacaaaggtagggaataggcatatgcccagatgtttgcaaagtgcacattgctgaccacacaggctgagctctttttgtgttctcggccagttgtctatgtcgctgac

SEQ ID NO: 436204 - DNA, 561 bp, Homo sapiens
tttattattaggactatttttcattgaggaatctactatctcattctggaaaatctttctagaataaaattaggcatwctaatccaggaatttacagtctagttattataaagatcaattactggtttaataaaacacgtggtatatacccatgcgatttactgctttaattaaataacaaatatttgcatatccatatatacctttaaaaataaaaggaatcatatcatcatttagataggttttctacatttcttgggctcaatggaagcccagactagttcaaagtaggactgggaaatattagaaaaggagaaagaaagagaagcaacagagtatgtgttcattgttttgtgaatgtaccacagtgataatgtggttcaaattgtttgatatctgaccctgaggtctgggtgctattacaaacttctttttccaagtgaggaaactaaggcatagagaataattatatccaggctgtcagctcccagagattttagtcgcaacactgtggtaactctgttgtatgctacctccacaaattgtttggactgagtagaa

SEQ ID NO: 436205 - DNA, 561 bp, Homo sapiens
tttattattaggactatttttcattgaggaatctactatctcattctggaaaatctttctagaataaaattaggcatactaatccaggaatttacagtctagttattataaagatcaattactggtttaataaaacacgtggtatatacccatgcgatttactgctttaattaaataacaaatatttgcatatccatatatacctttaaaaataaaaggaatcatatcatcatttagataggttttctacatttcttgggctcartggaagcccagactagttcaaagtaggactgggaaatattagaaaaggagaaagaaagagaagcaacagagtatgtgttcattgttttgtgaatgtaccacagtgataatgtggttcaaattgtttgatatctgaccctgaggtctgggtgctattacaaacttctttttccaagtgaggaaactaaggcatagagaataattatatccaggctgtcagctcccagagattttagtcgcaacactgtggtaactctgttgtatgctacctccacaaattgtttggactgagtagaa

SEQ ID NO: 436206 - DNA, 595 bp, Homo sapiens
ttatgtccattttactgagaccagttttttaatgaattgtttgctcctaaagaaatagtgaataaaatcacgatcatcaaggcataacttatttggagttctaagctttaaatacacaggagaccaaccagatcatccagtatgacctaatttcctgaccctggttccctcttgctgactttccatacttggaaactgagtgcaaatttaaaagaggaaagaaaagaaatccactcaagagctgttaaaaatgtatctatgcactcaatctatgtaccactgtgtaattataataacataaacaactccactgtaaggacattcacatcagacctaatttcatgctgaagtattataatgcaattaacagcctcatagtcctgttttaattaagctctgttgtgaaatatgcagcatttgaacctgttccggcctgttttgtctaccattgaattaccgtccttaacttgtttttctgctgaacgatgaatttcatttaargattactgttcgtgggtctggcagtttgtggaatcttacaggttttgtgcctccagatggaggtcagcttcagcccctcaaatgtgtcctatat

SEQ ID NO: 436207 - DNA, 565 bp, Homo sapiens
acagtctctgaatgggagagagaagctttggagggggcagggaacgatgaaacttatcacacagtataaaaagaaaattgaaagcaaacttcaccacttgaagcaaaggatgccaaagtctgtttgccttttcgcaaatatattttttgaaattcaatgtgtgttgtatgtrtctgttttagaatgttaattttgccatctgaaaataacattttccttaacattccctagtaaatactgggtgcaatatttgaatgcagttatttttccaagagaaattttcttagagtcaaaaatgaataaatataggggcagtgctttatgataattaagatgtacgaaaactaaggacaacaattgtccctgacttaacaacaatagcaaagcgggaagcagaaatggatgacttttgtcacagttattatcacagcttaccttctggcttcgggaagtgacttagctttgcagctagtctgttagaaagaaggagaacatttaccttgctggtatttgcctggcctaattagttaaaatgtttacaaagcacttcataagtgaaaatagc

SEQ ID NO: 436208 - DNA, 512 bp, Homo sapiens
tcaaaggaatcatagatcatgcacctcatagaactgaactagaatgtcagaaattatgatcaagataggaaagagaagtaatgagaagctgacctattttgctgtgaatttactgtggatggaagatctcaaggaagtttttactttcttaactaaaataataataataaaaaataccctgtaaaatatttaaataatggtcccatttccataaatagtttggcatcttcaaagttatatttaaatagtatttttataatttacctgcatatttaagaaaatgagtttttaaaacatatcatgaaatcaayataaagaagctataactggtgtgataattctagaatttcaccctgaaacaaaaatatcatcataatttgcaaaatcctttgttaatttaattccgtgtatgtactcctatatttcaacaaaggtgctattttttttcacctggggctccgatatatataaataacagcaaatctcttatttttaaatgtaactcattagtt

SEQ ID NO: 436209 - DNA, 581 bp, Homo sapiens
atataaactttaaaagaaaactgaaggtttaaagaactgcattctttgtaaacattcttaaaaaacaaacttattgacatggctcatttccttctaaagacaaaaataaacacgctgttcacaatttttaagttttatatgtgactgagacaattagaagaatctcagaaagagaatatcaggaaaatgcaaaaagccaagggtttcaaggcaacttagaaagaccaaccctctggatagggtagaacttatttatttcataaattataatacatttaacaaaaaaattaacagaaatatccttttcatatcaagaaattaaaaataaccacgtatgtaaagcaaagggacagatgagtcatagactgacctggtgacaggctggagcgtgaaatgagagcttgtccaacagcttgcctgagaagaagccaagggaccagccaggaaaccaggaacgaaatatagatggcrgcatgtgtcacttggcacaccgcatggtgactccagtcctgccaaatgtacagcagggacagtcacagcagcttagctgtattttaggacctaatcaaggcataaaccac

SEQ ID NO: 436210 - DNA, 550 bp, Homo sapiens
tttacctataaatttagtttgcctattaatctcagaaaattttctcatagtcatttcagttttctccccaagttctaggtagaacttctaatctttatcttccattcttcttccctttcaatttttgactttacagtctgctatgggtaatttttgcactagttcactaaattcccgggaactgtggttttggaatggacacagaaaatacgataccagtaagacagaagttggaatttkgtagtagagttttgaaatgaccccaaacacagcagaaagtaggcccccttcatttacactgtggtggtctgtattttgtgtgagtcagtctgagtctcattatgcatatgtttgcacatgagtgattttttgtgatggggtggggaagggaggaggtaaattttttggtttttttttttttttttttttttggtaaattcttaattttctctgctttgcttagttctactgtttccaaggtcaaagaatggtttgactactgaatttttgttttatgtatatagtggaactatgtgaagttcagaaaatt

SEQ ID NO: 436211 - DNA, 603 bp, Homo sapiens
cagacctccactgcaggtcaagatgatgaatatttgatggcacgtaaaacactactcagatgtgattgtggaattggattgagttggatagacacctctaaggataatttagacatttcaatgaataagcagctcttaatggcggaagggtgaactgtgtattaaacagagtacatgaaacaatatacttcccaagaggtaaaagtattagagctttaaaataagcaatttatagagttcaatgctcaggcaagccagattattgactgaatgagttacttcttttttattaaaattttcaatggctccccattgcctgtgataaatacatggtcccyactattgggcaatttccagtttttagtccacctctcctgcagatcttcaccctcctgcccattgttctagccaacacaaattacttttagttttcaaacttgccttggtatttcccatcagtatacctctattcgctgtttccttttgcatggaaaagtctaagtccatcccaaatttccatcaacatgcctccattttatctgcatggctacaatgttgcccttcatgactctaatcaaagcttttctccccaccctgactgta

SEQ ID NO: 436212 - DNA, 336 bp, Homo sapiens
gagatggtgccactgcactccagcctgggcaacagagtgagaccttgactcaaaaaaaaaaataaataataaaaaagtgggcatccttgtcttgttccagttctcaggggaatgctttcaacttttcctcattcagtattatgttggctgtgtgtttgtcataratggcttatgttacactgaggtatgttccttgtgtgccaattttgctgagagttctaatcataaagtgatgctggattttgtcaaatacttcttctgcatctattgagatgatcatgtgatttctgtttttaattctgttgatgtggtgtatcacatttatcgacttgcata

SEQ ID NO: 436213 - DNA, 492 bp, Homo sapiens
gcctctcattgactcaagttcatgtttttctagataatcgagcatttcatcaacattttgctaatattttatttcatcctaaataaaatattagcaaataagacccagtgttgttaagaatatcaaaatcaagaaattttatgtcaacgtatcaaatcccaaaatttcaaattttcacatttattgttatttagttgtacatagaattctcttactgttttaaaatctcttttatatccagaattatatggcaatkttttcattcctctctctgtttcactatatcaaaatcatggtcatttcaaagaatcagtttttcattgtattgatcaatattattattattgttattttctgagacaaggtctcactctgttgcccaggctggagtgcaatggcatgagcatagctcagtataaccttgaactcccaggctcaagtgaccctcccacctcagcctcctgagtacctgggactacagtcatgcaccac

SEQ ID NO: 436214 - DNA, 492 bp, Homo sapiens
gcctctcattgactcaagttcatgtttttctagataatcgagcatttcatcaacattttgctaatattttatttcatcctaaataaaatattagcaaataagacccagtgttgttaagaatatcaaaatcaagaaattttatgtcaacgtatcaaatcccaaaatttcaaattttcacatttattgttatttagttgtacatagaattctcttactgttttaaaatctcttttatatccagaattatatggcaatgttttcattcctctctctgtttcactatatcaaaatcatggtcatttcaaagaatcagtttttcattgtattgatcaatattattattattgttattttctgagacaaggtctcactctgttgcccaggctggagtgcaatggcatgagcatagctcagtataaccttgaastcccaggctcaagtgaccctcccacctcagcctcctgagtacctgggactacagtcatgcaccac

SEQ ID NO: 436215 - DNA, 545 bp, Homo sapiens
aggctgtggtctcctttttcttctcttcgtatctccttctcctcctcccagtaaggagaagcaggaattgagttttaacacatgaagcacatccagtctgtaccagatggttcaggttggtaacttcagagaagctgggttgttcagcttccaggcttggcctccaaacaccagcattgcgaagccactgtgaagatatgtggtagatcgtgccatcaggcttctctagacgggctgggaaagtcaaatctctgtaatggtaactactctggtcctttgtaaactcctgttgaacccctcatgccctttccttggtctgttaggctcttaatgctactttcaacagcccaaakcccccaaccccagaaaagattcccccttcacagcactcccctccaatccaacttcccactgagcaaatgctgaaatccaggcactcttgcagattattagatcaaaataaaccatcctaaggtgtgagtgagattgagggggtaaaacccagggaagccattgatgttttaagtaaggaacttcctaatcca

SEQ ID NO: 436216 - DNA, 588 bp, Homo sapiens
ctctgctctatggcatatagtacctggaagaaatggtcaaactcccattttttttctcattggcataatggattttctgtttctcatctgtcatagtttagaatgagtcactaattaatgaaaattgtcactttccrtaattaattttgttgctttagaaatattatcaaattttatttctaaatcatgaatgactaaacatgacaaagttaaagagattcatgctacccaaatagtaattaaatcacctaagttttttaatactaggattctactttttgtgtttgagcaatatgaactgtagtactcatagttggggataccatacctttcaggatgtagactcctgacattgaaatcagagattactttgcctgataatgctcaaccgaagtgtcagactgcagagaaatgttgtctagcctgtcacttgtcaatcagtgagcaagtacttcacccataaaaaaagtcagtgtgaaaaaggcatccaaatgcgtttgtgttccaaaatggtgctcctcgttcatccaaattttattacggatttttatgtttattttggcatcttcattccagagataatcatct

SEQ ID NO: 436217 - DNA, 588 bp, Homo sapiens
ctctgctctatggcatatagtacctggaagaaatggtcaaactcccattttttttctcattggcataatggattttctgtttctcatctgtcatagtttagaatgagtcactaattaatgaaaattgtcactttccgtaattaattttgttgctttagaaatattatcaaattttatttctaaatcatgaatgactaaacatgacaaagttaaagagattcatgctacccaaatagtaattaaatcacctaagttttttaatactaggattctactttttgtgtttgagcaatatgaactgtagtactcatagttggggataccatacctttcaggatgtagactcctgacattgaaatcagagattactttgcctgataatgstcaaccgaagtgtcagactgcagagaaatgttgtctagcctgtcacttgtcaatcagtgagcaagtacttcacccataaaaaaagtcagtgtgaaaaaggcatccaaatgcgtttgtgttccaaaatggtgctcctcgttcatccaaattttattacggatttttatgtttattttggcatcttcattccagagataatcatct

SEQ ID NO: 436218 - DNA, 595 bp, Homo sapiens
cttttgggaagttatcaatggggaaaataccaagagactgttcacgtttttgtgtgtcagtggaatttgtattggatattgtgaagaataaatgagcaatggcttgggagcaggagaatagataatasatttctaataaaaatttgactttcctgtttaaaggatgtttaataagggtccctacattacttgattagctgaggcaaaggcataaatgaatgctaactgcagatgaaaaaaaaaatgttgtatggcttcaaattatgtaactatatattcctagtagagatgtggcaaaagcgtgtttctctgcaaatatacatcaaaatgaccaaaggtatgagaaagtcaccagaaacctagacattttagaaaccgaagtgtagtctgtaatccctagggcctgtcattctgtgcagtggtcactattgttttctcctgctgctccagagatttccatctaaagctgaagggtgtcaaacccttatcatttgtctctataagacctgccaaaagaacgtaattgatctcagtggtttgtattccagcatgatttagacataattggaatgtcaagtgagaaaaaagacatatc

SEQ ID NO: 436219 - DNA, 575 bp, Homo sapiens
atgcatgggcctgttggaagatgaataaggcasggccctagctatcaagaactttataatgaggactaaaacatagacacaagtgcagataactagaaggtcatgtgtgctttgataaaggcacaaaaggtcacaagagcacagagggtaaaataaatgcgtggcgcattcttcacgagaatcctatcaatggaacagtgtatgttaatatccacaaaaatggcaatagaatgactctatttttcctcttccccttttccatcaaaaactggatctaagctgagggtcagcctggatgactgagaggagctaatatttgaccctcccttatataactcaactcagacaaagaattaatctaaataagattgaagaaaattggtaaaagggacaaattcattgaaacagtgtggcagtgttttgtgtgtgtgtgtgtgtgtgtctgtgtctgttaaatttatatacactaataaaattaatccaataagattactttacgtatacataagtatatatattaatccctaatccctataattatctgtgtgtatatatatgcttaaaatttaagtgaa

SEQ ID NO: 436220 - DNA, 575 bp, Homo sapiens
atgcatgggcctgttggaagatgaataaggcagggccctagctatcaagwactttataatgaggactaaaacatagacacaagtgcagataactagaaggtcatgtgtgctttgataaaggcacaaaaggtcacaagagcacagagggtaaaataaatgcgtggcgcattcttcacgagaatcctatcaatggaacagtgtatgttaatatccacaaaaatggcaatagaatgactctatttttcctcttccccttttccatcaaaaactggatctaagctgagggtcagcctggatgactgagaggagctaatatttgaccctcccttatataactcaactcagacaaagaattaatctaaataagattgaagaaaattggtaaaagggacaaattcattgaaacagtgtggcagtgttttgtgtgtgtgtgtgtgtgtgtctgtgtctgttaaatttatatacactaataaaattaatccaataagattactttacgtatacataagtatatatattaatccctaatccctataattatctgtgtgtatatatatgcttaaaatttaagtgaa

SEQ ID NO: 436221 - DNA, 574 bp, Homo sapiens
atttgaccctcccttatataactcaactcagacaaagaattaatctaaataagrttgaagaaaattggtaaaagggacaaattcattgaaacagtgtggcagtgttttgtgtgtgtgtgtgtgtgtgtctgtgtctgttaaatttatatacactaataaaattaatccaataagattactttacgtatacataagtatatatattaatccctaatccctataattatctgtgtgtatatatatgcttaaaatttaagtgaagacttaaagatagaactgataatataacttttcaaatcaatcaatcacttaggtattttttgaatgcttgttttaggtactatgggtgctatgaaaagtagtataactttcctcaagagatgtacacataatcttatttgaactagtatactaacaaataatttttcaattagatgttattattgaattctgggaaggcagaaggaagcataggttggagtaaatggagaaagtgtcatggagaaaataccacggcagtttttgcctctgtagtatatataaagacatagatatattgccacctgtgttattg

SEQ ID NO: 436222 - DNA, 575 bp, Homo sapiens
atgcatgggcctgttggaagatgaataaggcagggccctagctatcaagaactttataatgaggactaaaacatagacacaagtgcagataactagaaggtcatgtgtgctttgataaaggcacaaaaggtcacaagagcacagagggtaaaataaatgcgtggcgcattcttcacgagaatcctatcaatggaacagtgtatgttaatatccacaaaaatggcaatagaatgactctatttttcctcttccccttttccatcaaaaactggatctaagctgagggtcagcctggatgactgagaggagctaatatttgaccctcccttatataactcaactcagacaaagaattaatctaaataagattgaagaaaattggtaaaagggacaaattcattgaaacagtgtggcagtgttttgtgtgtgtgtgtgtgtgtgtstgtgtctgttaaatttatatacactaataaaattaatccaataagattactttacgtatacataagtatatatattaatccctaatccctataattatctgtgtgtatatatatgcttaaaatttaagtgaa

SEQ ID NO: 436223 - DNA, 575 bp, Homo sapiens
atgcatgggcctgttggaagatgaataaggcagggccctagctatcaagaactttataatgaggactaaaacatagacacaagtgcagataactagaaggtcatgtgtgctttgataaaggcacaaaaggtcacaagagcacagagggtaaaataaatgcgtggcgcattcttcacgagaatcctatcaatggaacagtgtatgttaatatccacaaaaatggcaatagaatgactctatttttcctcttccccttttccatcaaaaactggatctaagctgagggtcagcctggatgactgagaggagctaatatttgaccctcccttatataactcaactcagacaaagaattaatctaaataagattgaagaaaattggtaaaagggacaaattcattgaaacagtgtggcagtgttttgtgtgtgtgtgtgtgtgtgtctgtgtctgttaaatttatatacactaataaaattaatccaataagattactttacgtatacataagtatatatattaatccctaatccctataattatctgtgtgtatawatatgcttaaaatttaagtgaa

SEQ ID NO: 436224 - DNA, 565 bp, Homo sapiens
ggtagttgccagttagactcagttggtaagtataattaatggaaaatgtgaatttcttcttaaactccaagaaattaaccacagaagtcttcatttcctttataatttcctaacagtatcactccctatgactgttgttttatctctatctcttctgacattcaaccacatcagaaattagttactccctattatttatcatcctaaagataccatataggacagcttgacggcactattgggatactactaggagggaatgagcatttatttaggttccaagcaccatgctaggcattttcatatatactatctcttttaatactcacaaaaacccttcaagatagggattattttcttccttttatacagttgatgaaatggcacctccaagaggttaagcctttgccttaaatccaattagtggsacagctgggtgcaaacctaggctgacataattccaaaatactttctcctttcatcctacacatggaagcattatctcatttttttaaaaaggctcccctaaagtttggttaccttggagagtttgagggtcattatt

SEQ ID NO: 436225 - DNA, 583 bp, Homo sapiens
atgtagttgatttgttattgggcatattaattgagtatctcttctgtgccaggcaccgtttaggtgctgggaatggagcagtgaaccacactgacaacaactccctgccttcatagaacctgccttctagaaagggaagacagagcaaaagtaagtaaaacatatgatctgccagacagtgaaaagttctctgccacatgggttcttcctcctatctacttctctttctctgtcctcattgtcagcctttgttcagtctgtggcatctactattacactcctttttttgctagtcttcttgattctggtcctgtccatccctcctttcattctagtctctgtgcagctgttcaggccatcttccatgcctgattatatcactctccatattagracgtttaaagtggccttcattccctatgacataaagctaaaaattcttagcagggcattcaaagactgctgatgtcacactcccaaaactttaaaaaaattatttttatttcaatagtttttggagtacaggtggcctttggttacatggataagttctatagtggtgatttctgagattttagtgcac

SEQ ID NO: 436226 - DNA, 571 bp, Homo sapiens
actagtgggccaaatccagcgtgccatcatctgtttttgtaagtaaagstttattgcaacatagtcatgctcattctttatgtgatgtctctggctgctttcacactgtaaccacagagttgagtagttacaagagtccatctggcctgaaaacagaaaatatttgctatttgaccctttatagaaaaaaatttgctgatgcctggtttagactttaaaatagacttctggaaaaaatattgttcatggttatttcaatctcattccatggacttttgcattaatttgctccaggaagcactttttagatttcacttcttttcacaggcaaaaatctcctttccctgcagctttacgctaggacactgttctcaaagtatggtcctgggaccagcaacaatagcatcacttggaaacttccttgaaatgtacattctcaggtcttattctagacctgctgatcagaagctctggaggtggggtccagcagtgtgggtgttttaatagctcctccttcagggaattctgatgcatgctaaaattgagagacatttgaagtggagatttctac

SEQ ID NO: 436227 - DNA, 589 bp, Homo sapiens
atgcctcatcatctcatttctggatgaggcattcatttataagagagaaaagtagaagggatttatttccagcaccatcaaggatatgctagaacatgaaaaaaagaattaatttatattttccccttataagatttatgcaggtgctgctgtattgctgctgttttcctttgcttaatgatctaatccttccctggagcttcatttccatgtagctagagaaagaaatagctctgataatgaacagctgtgatttagacggagcgagaaacttgatcccaggaaaccagggaggggcaacggtgagccttggcccttttaagccagaaagacaagaagcaatgaataaactcaggtccctttttaaatatttgagatttgtatctatatttaaaagctaccagaaaccagtttgagaccctaaggtatgagcaaggtagagtgactgtatatactgatttgttcaggatyaaataactctagtttatacctttcatcccagagtaattattaataatgaccccttcacttgcaagtatgtcctaattgtatgataaattctgtggtcacctcagtgagagacaactca

SEQ ID NO: 436228 - DNA, 563 bp, Homo sapiens
tataacataaaccaccaattaacacatattttgtatattatatactgtattcttacaataaagtaagctaaaggaaatcatattaagaaaataataaggaagaggaaaagaaaatatattactattcactaagtagaagtgggtcatcatgaaggtcttcatcctcatcatcttcatacygagtaggctgagaagaaagaagaagaggagggttggtcttgctgtctcatgaagtggcagaggtagaagaaaatctacatataagtggccccatgcagttcaaacccatgttgttcaagggtcaactatatctctatcagaaggttgttgagcagattgagtaagatatgcaacccacctggctgagtgcctgacacccggcaggtgctcagcaatggctacttccccttagggagagagaataatattaattcatccagaataattactctgggatgacaggtataaactatctacattcaactggcccagtggacttcattacattaaatcatccactacaacccagaaattcacaagcaactttgttttagttccatttg

SEQ ID NO: 436229 - DNA, 574 bp, Homo sapiens
gaaggcaacatctgacttttgatgtgggttttgcacagagcagagactaagactagagctttgtttgggagagttttcttgtagacttagatcgattacattaaaagattcagccttcaaacaatggctccaaagaaaataatgttggcttttcccttttatgaaaataatacttgtcttacagcccaagggattggccatcctttttctattgaaattattcagaggaatgctgcttggatgtcctggtaatgtattgacattaatagcrgaatatttcaatcagagccatctggccacaagggaataacagctcccattgattatgtaaaaagctaagttatcgtctgggtatataatacacttggagttggtttatgggttttgttatttagcatttacatctccttccaacccacagaactcgaaagacttaacaagctggttgatgaataaggagaggcccctgggggaagacgttcggggcgtgatgcaaaaggccacctatcccaaagcaggaagagttagccttttggacacacgagaagggaattggataatttggcatattatc

SEQ ID NO: 436230 - DNA, 574 bp, Homo sapiens
gaaggcaacatctgacttttgatgtgggttttgcacagagcagagactaagactagagctttgtttgggagagttttcttgtagacttagatcgattacattaaaagattcagccttcaaacaatggctccaaagaaaataatgttggcttttcccttttatgaaaataatacttgtcttacagcccaagggattggccatcctttttctattgaaattattcagaggaatgctgcttggatgtcctggtaatgtattgacattaatagcggaatatttcaatcagagccatctggccacaagggaataacagctcccattgattatgtaaaaagctaagttatcgtctgggtatataatacacttggagttggtttatgggttttgttatttagcatttacatctccttccaacccacagaactcgaaagacttaacaagctggttgatgaataaggagaggcccctgggggaagaygttcggggcgtgatgcaaaaggccacctatcccaaagcaggaagagttagccttttggacacacgagaagggaattggataatttggcatattatc

SEQ ID NO: 436231 - DNA, 582 bp, Homo sapiens
gtttagggaatgaggacaaagaaaaatgtctgtatgtattcagtayaggaataattttttttcagaatatttttgatcttttgttagttgaggccacagatgtagaacccacggatgcagaaggccaactgtatactttttatgtatcaacatatgtcaagatgcatttctgcccttctaggatgtgaatggctccagcttatatgtcgttagctttgtaaagtccagcaaggctgtgggggtttacagtagcagggagataaaatagatagagcagcacatgctgagagtgaatcagggaaagtgggagtcgacgggagccagcaggcacatggggaaaaagacaatcatggacctagaaagcagaaactgagaatgagaatacagaagattctgcccagatgcaaacaggcagcccaaagcctaaggaaaagcctcctccgagagagtgagactagccaaggcttccagagtgcaggatggagatgggagtggtgaggggcaaagcccttcaggaaggcccactgcaatcaagcaagtcttggggtccatgttgccaggaagggagcaggcaaaaggcca

SEQ ID NO: 436232 - DNA, 582 bp, Homo sapiens
gtttagggaatgaggacaaagaaaaatgtctgtatgtattcagtataggaataattttttttcagaatatttttgatcttttgttagttgaggccacagatgtagaacccacggatgcagaaggccaactgtatactttttatgtatcaacatatgtcaagatgcatttctgcccttctaggatgtgaatggctccagcttatatgtcgttagctttgtaaagtccagcaaggctgtgggggtttacagtagcagggagataaaatagatagagcagcacatgctgagagtgaatcagggaaagtgggagtcgacgggagccagcaggcacatggggaaaaagacaatcatggacctagaaagcagaaactgagaatgagaatacagaagattctgcccagatgcaaacaggcagcccaaagcctaaggaaaagcctcctccgagagagtgagactagccaaggcttccagagtgcaggatggagrtgggagtggtgaggggcaaagcccttcaggaaggcccactgcaatcaagcaagtcttggggtccatgttgccaggaagggagcaggcaaaaggcca

SEQ ID NO: 436233 - DNA, 453 bp, Homo sapiens
ctctctctgccctgggtcttagacctttggaaagacctgatttaagcccttcattatcagggtgaagtttcttgataaaccacacaggtgactccttttctctttacgtgagagatggagagtagcttcccatatagtaaacagtcttcccacacgatcatgagttatgctggmaaggaagcccctcctgacactaaacagggtattgggactgcactcagcattgacctgaatagttcatcttaaagtcccacttaaaaaaaaaaatctgctatcccaaattctcatatgaaggaccctcaagtccaagtacagacgctgctccaattatgatggggttatgtccaatcaaacgattttaagttgaaaacacagctaatacacaacttgccaaacatcgtagcacagcctagcttacttaaatgtacccagagcgtttacatgagccaacac

SEQ ID NO: 436234 - DNA, 528 bp, Homo sapiens
ctccttttctctttacgtgagagatggagagtagcttcccatatagtaaacagtcttcccacacgatcatgagttatgctggaaaggaagcccctcctgacactaaacagggtattgggactgcactcagcattgacctgaatagttcatcttaaagtcccacttaaaaaaaaaaatctgctatcccaaattctcatatgaaggaccctcaagtccaagtacagacgctgctccaattatgatggggttatgtccaatcaaacgattttaagttgaaaacacagctaatacacaacttgccaaacatcgtagcacagcctagcttacttaaatgtacccagagcgtttacatgagccaacacatgggtacaatcatctaacacaaagtctattatataacaaagtgttgaatatttcatgtaatttattgaaaatgaaagacgaatggtrgtatgagtactagaagtatgatttctactaaatatgtatcacttttgcatcactgcaaagttgaaaaattgcaagttg

SEQ ID NO: 436235 - DNA, 579 bp, Homo sapiens
ttgtttttgttgcatttgctttcgtgttcttgtcgtgaagtctttgcctgagccaatgtctagaagggtttttccgatgttatctcctagaactgttgtggtttcaggtctgagatttaagtccttgattcatcttgagttgatttttgtataaggtaagagatgagaatccagtttcattcttctacatgtgattgccaattatcccatcatcatttgttgaatagaatgtcctttccccattttatgcttttgtttgctttgttaaagatcaattggctttatttctgggttctctatcatgttccaytggtttatgtgccatttttatgccagtaccatgctgttttggtgactatggcattagagtatagtttgaagtcaggtaatgtgatgcctccagatttgttctttttgcttagtcttgccttggctatgcaagctcttttttcattccacatgaattttaagattgttttttctaggtctgtgaagaatgatggtggtatgcaatgggaattgcattgaatttttagggctgctttagactgctttggcagtatgttcatttcacaatat

SEQ ID NO: 436236 - DNA, 579 bp, Homo sapiens
ttaaggatttcatggaaaagggagattattctggatcatctgcacaggccctatggaagctcaagggtccttataaaagggagttaggaggctcagcgtcagagggaagacatgaggaccggccagggggttggaggcgagaagatgctgccggccttaaggagagggaggaaacgaggggagggagcccatggcctctgacctctgcctcgaggcaagttagtcagagacccctgccattcacagaagacaagaggcagccccctgggctccagctgctctttggtgaagcctggmaggggtaagagaggcggtgccctggacaccctggagaacccacgcttttcaggcttgagcctggggtggatccacagcacgctggtgaccttgttttttaacttccagccatggggattgaggcccccactgggggcagggagggaggaaggaacaaggggaagggatctgaggccatctgtgaccctgccctgcagggagcccacaggagcaaggtctgtggacagggacccgccctggccctgtggggggccctagagctgccagaaaccaccgccaaat

SEQ ID NO: 436237 - DNA, 572 bp, Homo sapiens
ctccctaccatacaaacattgggcctggccgtattaacttcctttggccaatgaaatataattgtaagttatttatatcatatcttaggagaaaattaagagcactgagtgtttcagcattttcaattttccctctgacctaagacaaagatagggctgttcttcagcctggaacactgagtaagacacatttaacagtgccccaaaaccacagacaacttgtagctaacatgggagctagaaacacatctttactgtaggaaggcactacaatttgagggttgttacagcagccttacttcggaaaagctagtccagaaactggtaataggagtacgttattgccataacaaacatgtaacataygtgacacctgcaattgcgactgagtagcaagtaactgttactgaaggctggaaacaatgatgacctatataatgcaatggtaacactgcatttgcctgagaaaactgagaaagcagataatacgattaatgaacttgttgatttatacaaagaggttgggaaacagtatgttgctagccctggatgctattagctacacttaaaat

SEQ ID NO: 436238 - DNA, 562 bp, Homo sapiens
attttttaatctcttacattgtgtttttactgcaccatttctatgtttagatatgtttggatatacaagtacttaacattgtataattgctaacagtattcagtacagtaccatgctgtacaggwttgcagcccaggagcaacaggctataccgtgaagcctaggtatgtaggaagcctataccatctagtttgtgtaagtacactctatgatatttgcacaataaaattgcctcatgacacatttctcagaacatatccctgttgttaagcaacacgactgtatatataaattatgtgggcagactggaaatccataaacaagatcaattcaacagacacttgtgggaagcacatgggtaaacatatcacaagaatagaagtagagacaaaggaaaaagaacatatattttaatgggttgaattgtgtcccccttaaaagatatgttgaagtcctaacttctggtacctgtgaacgggacgggaccttctttggaaataggggttttgcagatgtaattaaggcctaagttaagatgacgtcatgctggagtagagtgggc

SEQ ID NO: 436239 - DNA, 603 bp, Homo sapiens
gaaagttgaagcacaaagaggtcaagtgacttggctaaaatcatgcagctgtatttgaatagtaagtggcagcaccaggattgagtgcaggctgtttgacaccagtgctcttacccacgccactcttgcccctatgctggtcccaaatatatctgtctgcctctgtagactacattttgatctattaagaatctcctgataattaatctgcatatttttagatcagcagtctggctaaggctttggaatttgaagggtttcctttgttttcacaaaatccttatagattctacatgtaccactaggccaatccgattatagtcttctttctcagaagaytgaatggtgaccttttttcatctttgtaatgccagctattcagcattccctctgagaccctccagtgatgaggtttcccagcatttggagagtatcaagtccctgcctcagtcacttttccttatctctgaccacctgtggtagctgaagttctctttccagcacctggaacagtggcagccatagagcaggcacacataaactgtttcactgcctttgattagtgcatattttggagttgcctggaaacagtgttcaaggcac

SEQ ID NO: 436240 - DNA, 571 bp, Homo sapiens
tgttgggcatctttttatgtgcttgttagcgatttctgtttcttctttgggaaagtatctgttctaattctttgaccagttaaaaaattgaattatttttaaaattattaatttataattgtttatatattctggatacaagtcccttgtaagatgtatgatttgcaaatatatattctcttattctgtggattgtcttttactttctttctttcttttttttgagatgaagttttgctcttgtcccccaggctggagtgtgatggtgcgatcttgctcactgcaacctccgcctcctgggttcaagtgattctcctgcytccaagcgattctcctgcctccaagcgattctcctgcctcggcacccaccgcccccctaccccgagtagctgggattacaggtgcctgtcaccatgcccggctaatttttgtatttttagtagaaacgggatttcaccatgttggccaggctggtctagaactcctgacctcaggtgatccacccgcctcgacctcccaaagtgctgggattacaggcgtgagccaccgcaaaccggcatgtcttttactt

SEQ ID NO: 436241 - DNA, 616 bp, Homo sapiens
catatttgccgccaaaatgagataagtataattactatttcttcatttaaaaatatgaatgaataatatatattgatggttgttgactatgttaaatttcctaagctattttcccactaaacaagttcttcatatgaagattaaaacgatggcccagaccgggcgcggtggctcacgcctgtaatcccagcactttggaaggctgaggtgggtggatcacgaggtcaagagatcaagaccatcctggccaacatggtgaaaccgtgtcccactaaaaatacaaaaaaaaagaaattagccragcatggcggcatgcacctatactcccagctactcgggaagctgaggcaggagaatcacttgaacccgggaggcagaggttgcagtgagccaagattgtgccactggactccagcctggtgacagagtgagactccatctcaaaaaatcaaaaaaaaaaaaaaggccaaatatgattatatgcagttgcttagacaatttttccaataaaactagacagttaagaagtattaaatgaaacatcagtggggacaaaacagtgatctggggtacttagtagcagctgattcattatttgtagattttttttccaagc

SEQ ID NO: 436242 - DNA, 632 bp, Homo sapiens
gtgaaaatgagcacaaaagaacgagtggagaaaatatatacaggtcttcagtaggcaagcataatgtttatttccagctctgccacctaattgttgtatgatttgaacaagaaatttgccactttgagcctcagactccttgtctatgatgtaataattttgatcaactatctttctgaagactgtttgagaaataatttgccataaaagttaactgagtgtgcagtagcctctttgacacttagtaggcacttattaaattttggtttagatcctaccttcttcaatgttttgactaacctcagaactcaaatttccaattgattttaatttagttctagcttaaaagcatattattacaaaaggcatgctcactacagccaaacagccaacactgcaattctgcaggagacactaagaagagccacaggagacaagtctttctaggttataatatagtctaaaataaacaaaaaaacattttacagaaaatatgtaaaagacaaatatctgtatgactttatcagagaagattgtactaawttggcttggaaaagcaattctttattggatatgttattgttttcccagtgcagcatcttcttccctatacaaagagcgtgccagtttaa

SEQ ID NO: 436243 - DNA, 549 bp, Homo sapiens
tttgtgttctgcctcataaaagttatctcttaactaacaattctaaacctaaaaagatatgctgtagtttgaatgttcccataggaacaagttataattgccaacttatatagcaaacaatgtgaggaaaagtctatgtaaatatatatgtataaatgctgatcaaagtttcaacccttttactctagctccatttgtaactgaaataggatagagaatatatatatacacacatataaatatacacacacacgcttacatacttttatgcacacactcagtttaaattttagttctacatagttcagcatttcttgtagattatattttttgggatattgatgaaattattccacagatattaaaaatakttattgattttggctattttatgtcaactacccttagttattataactcttgttataacctatttcaaacaactattagaaaagtgaataaatcaaatgagaaaaatattatagtttcatattcctacctacctggtcagataaactgagaatcttggaatatgcctgcttctttatc

SEQ ID NO: 436244 - DNA, 546 bp, Homo sapiens
ttcaacaaatcagataaaatatgattgacgaattttttaaatactagtttatgtttagtgaccacttactataaaccagtcatttttctaagcatttgacctgtcattaccctattttgcctttacaaaaacatcacaatggaaattattttacgcatttgaaaayagtgaaacaattttaaagtaaagaaataggccttttgttatgcagccatggtttatattcagctttctttgactccacagcatcttatataacagagacgaaataacacaataagattaaagtttagggttaaaaatctcttaaatatctgcattctcagggttatgccctagacctcattcagtaccaagatactattcaggaattctgcaacctatctattgcccaataaagaacgctttcatcattgacttatctttgtccaccatttttactgtgttttgttaattttgactgcaacttattttattggtttttctcatccttttcatgaagacagcaaccacccaacttgtttaggtcattaatacctgtggtct

SEQ ID NO: 436245 - DNA, 556 bp, Homo sapiens
gttttcaagagataccatcaagaaagtagaaagacaacccatagaatagacaaaacattgcaaatcatayacataagttacttgtattcggaatatataaagaccttttacaacttagtaatgaaaacatgaattaaaggataggcatatgatctgaataaccatttcttctaggaggatatacgaatggacagtatacacgtgaaaagctgcttaacataattagacatcagggaaatgcaaatcaaaaacatgataagatatcatttcatacccattaagatggctaaaattttatagtaagttattaacaagtactggtgtgtatttagagaaattggaactctgacacacttctggcgggtatgtaaaatattacagctactttggaaaacagtctgatagtttctttaatggttacacatagtttcattttgtgatccagcaattctactgctaggtatatatctaagaaaaatgaaagtgtatgttcacacaagaccttgtatatgaatgtttctaagagtgttatcataatagccaaaatgtggaaaca

SEQ ID NO: 436246 - DNA, 556 bp, Homo sapiens
gttttcaagagataccatcaagaaagtagaaagacaacccatagaatagacaaaacattgcaaatcatatacataagttacttgtattcrgaatatataaagaccttttacaacttagtaatgaaaacatgaattaaaggataggcatatgatctgaataaccatttcttctaggaggatatacgaatggacagtatacacgtgaaaagctgcttaacataattagacatcagggaaatgcaaatcaaaaacatgataagatatcatttcatacccattaagatggctaaaattttatagtaagttattaacaagtactggtgtgtatttagagaaattggaactctgacacacttctggcgggtatgtaaaatattacagctactttggaaaacagtctgatagtttctttaatggttacacatagtttcattttgtgatccagcaattctactgctaggtatatatctaagaaaaatgaaagtgtatgttcacacaagaccttgtatatgaatgtttctaagagtgttatcataatagccaaaatgtggaaaca

SEQ ID NO: 436247 - DNA, 556 bp, Homo sapiens
gttttcaagagataccatcaagaaagtagaaagacaacccatagaatagacaaaacattgcaaatcatatacataagttacttgtattcggaatatataaagaccttttacaacttagtaatgaaaacatgaattaaaggataggcrtatgatctgaataaccatttcttctaggaggatatacgaatggacagtatacacgtgaaaagctgcttaacataattagacatcagggaaatgcaaatcaaaaacatgataagatatcatttcatacccattaagatggctaaaattttatagtaagttattaacaagtactggtgtgtatttagagaaattggaactctgacacacttctggcgggtatgtaaaatattacagctactttggaaaacagtctgatagtttctttaatggttacacatagtttcattttgtgatccagcaattctactgctaggtatatatctaagaaaaatgaaagtgtatgttcacacaagaccttgtatatgaatgtttctaagagtgttatcataatagccaaaatgtggaaaca

SEQ ID NO: 436248 - DNA, 556 bp, Homo sapiens
gttttcaagagataccatcaagaaagtagaaagacaacccatagaatagacaaaacattgcaaatcatatacataagttacttgtattcggaatatataaagaccttttacaacttagtaatgaaaacatgaattaaaggataggcatatgatctgaataaccatttcttctaggaggatatacgaatggacagtatacacgtgaaaagctgcttaacataattagacatcagggaaatgcaaatcaaaaacatgataagatatcatttcatacccattaagatgsctaaaattttatagtaagttattaacaagtactggtgtgtatttagagaaattggaactctgacacacttctggcgggtatgtaaaatattacagctactttggaaaacagtctgatagtttctttaatggttacacatagtttcattttgtgatccagcaattctactgctaggtatatatctaagaaaaatgaaagtgtatgttcacacaagaccttgtatatgaatgtttctaagagtgttatcataatagccaaaatgtggaaaca

SEQ ID NO: 436249 - DNA, 367 bp, Homo sapiens
attttggccattaaccatccataccttttcccctaacttcctgctacccctcacagcatctgataaccatyattctactctttatctctattcgttcaatagttttatgttttagtgctcacatatgagtaagaacatgcaaaatgtgtcattttgtggcttgtttctttcacttaacataatgtcctccagttctattcatgttgttgtaaataacagaatttcattattttttatggctgaataatattccattttgtctatgtaccacattttctttatccattcatctgctgatggacataggttcgttccaaatcttggctattgtgaatagtgctgcaataaacatgaaaatgcacatatt

SEQ ID NO: 436250 - DNA, 587 bp, Homo sapiens
actatagctctataatataatttgaagacaagtaatgtgattccttcagttttgttctttttgctcaggatggctttggctattctgggtcttttgtgttttcatatacattttaggattttttttctatttctgtgaaaaatgtcattgatattttgatagggattgcattgaatctttttaytgcttttagtatatgaacattttaacaaccttaattcttccaatttatgaacatgaaatgtctttccattttttatgtccttttcaatttttttcatcaatgttttatggtttttactgtagagatatttcatttatttggttaaatttattgctaggtattttatattctttgtagctatcagaaatggggttactctcttcatttgtttttcagtttgtttgcaattgttatatagaaatgctgctgattattatatgtttattttctatcctgcaacttgactgaatttgtttatgaattctaacagttttttttggtggagtcttttgctttctctaaatacaggattatattgtctacaaacaagaataatttgatttcttccattaaaatttgtatg

SEQ ID NO: 436251 - DNA, 547 bp, Homo sapiens
atgtaatcatactgaatatattcatttgtatctggtttcttttgctcagcataatgtttgtgaaacttatccatgttgtgtgtaagtggtttgttcctttttattactgagtagtattacagtgtgtggatataccattgtttgtttacaccatcaggtgttgataaaaatttaggatattttcaatttctggttattctgaataaagctgcagtaaacttttggtacaagtttttktaggagcatatgtccttatttttctagatcagatacatagaagtagaattgctggatcatttggcaatgatcacacattttatttacaagaaactgccagactgttttccaaagtggttgttcaccttagggtcccaccagcagtgtgtgaaagtctccatatcctcgccaacacttagtaaattttagccattcttactggtgtgtagagataattcggtggttttaatttgctttttcctaataactaaggatgctgagcacattttcatgtatttattgaccatttatacattttcttttgtgacat

SEQ ID NO: 436252 - DNA, 547 bp, Homo sapiens
atgtaatcatactgaatatattcatttgtatctggtttcttttgctcagcataatgtttgtgaaacttatccatgttgtgtgtaagtggtttgttcctttttattactgagtagtattacagtgtgtggatataccattgtttgtttacaccatcaggtgttgataaaaatttaggatattttcaatttctggttattctgaataaagctgcagtaaacttttggtacaagtttttgtaggagcatatgtccttatttttctagatcagatacatagaagtagaattgctggatcatttggcaatgatcacacattttatttacmagaaactgccagactgttttccaaagtggttgttcaccttagggtcccaccagcagtgtgtgaaagtctccatatcctcgccaacacttagtaaattttagccattcttactggtgtgtagagataattcggtggttttaatttgctttttcctaataactaaggatgctgagcacattttcatgtatttattgaccatttatacattttcttttgtgacat

SEQ ID NO: 436253 - DNA, 409 bp, Homo sapiens
agagaagcttccactagtggtgcaattaattaaatggtagtaaataataatttgagaagttgaatatgtggttgaytttacaacttttaaaataatgtgagtggtggcaaaaagaaaaaaaaacttcaacatcccaaaccacaaatcacattttggttgaggttgttgttccctacaaaataaaaaaggtttggaaaagaccatttgaattacttttttccccacaaagtttgaaattctccctctttaaatgatccctggacaattcacatgcctgtctaagttggaattaacatttctacatgaagacttactttgataatattaatgttaatttatgttaaaaaacactgtatagttatcagagcaatttcatagatatgatctcgttctatcccattgctggctg

SEQ ID NO: 436254 - DNA, 546 bp, Homo sapiens
tgtatgctgcccaagagacaccacaggataaggagaatctggcacaggcctataattagaagctcttctgtagacaataaactgataaacaattgcatttgagatttgctaggatatgtatgttctatgataccaggactacagctgaattgttttgactaatgtttttgaagcaaaaaatatggtcccagcactcattttatgatgaattgtaaaatgccttgcctgtttctttcccttgttacttctttctaccaagtaaacatagtaggcatgtcagtggttgctctggggaagcagatgccctgaccaggatgcttcccttgtgttgctaagagaacctcttccaagaggttcctgggggttggggatgatcatagtaggtccccatgtcactggagcagtcctagttaataatatgctattgtcccagcatacagattagtaactcccctttcactctcaaaggtgtcttggtttggaccgggtgtrttgtacccccatcagtgtgggcacttcataaatgtggaatgggactggcatttc

SEQ ID NO: 436255 - DNA, 557 bp, Homo sapiens
tactaaaatgggcagcttctcctttcttccaccgtctctctctctcaacttgccyaggtattaatattttttatttgctatttaatgtcactccaagtaaagaaaaataaaaactttaacttattagcatgaattgtactgtttatctttatattacagaatgccagttttaaccacaaatataacagcatttagctcatataaagaaatgatatagctgagtgcagtggctcacgcctataatcccaggagtttgggaggccaaggcgggtggatcacctgaggtcaggatttcaaggtcagcccatctccagtaaaaatacaaaaaaattagccagatatggtggcgtgtgcctgtaatcccagctactcgggagactgaagcaggagaatcgcttgaacctgggaggcagaggctgcagtgagccgagattgtgccactgcactccagcctggatgacagagtcacgctccatctaaaaaaaaaaaaaaattacccaactcctatgtcatagttcatgcacgcacatgcatgtcactcttactagaatagcgaa

SEQ ID NO: 436256 - DNA, 557 bp, Homo sapiens
tactaaaatgggcagcttctcctttcttccaccgtctctctctctcaacttgcccaggtattaatattttttatttgctatttaatgtcactccaagtaaagaaaaataaaaactttaacttattagcatgaattgtactgtttatctttatattacagaatgccagttttaaccacaaatataacagcatttagctcatataaagaaatgatatagctgagtgcagtggctcacgcctataatcccaggagtttgggaggccaaggcgggtggatcacctgaggtcaggatttcaaggtcagcccatctccagtaaaamtacaaaaaaattagccagatatggtggcgtgtgcctgtaatcccagctactcgggagactgaagcaggagaatcgcttgaacctgggaggcagaggctgcagtgagccgagattgtgccactgcactccagcctggatgacagagtcacgctccatctaaaaaaaaaaaaaaattacccaactcctatgtcatagttcatgcacgcacatgcatgtcactcttactagaatagcgaa

SEQ ID NO: 436257 - DNA, 557 bp, Homo sapiens
tactaaaatgggcagcttctcctttcttccaccgtctctctctctcaacttgcccaggtattaatattttttatttgctatttaatgtcactccaagtaaagaaaaataaaaactttaacttattagcatgaattgtactgtttatctttatattacagaatgccagttttaaccacaaatataacagcatttagctcatataaagaaatgatatagctgagtgcagtggctcacgcctataatcccaggagtttgggaggccaaggcgggtggatcacctgaggtcaggatttcaaggtcagcccatctccagtaaaaatacaaaaaaattagccagatatggtggcgtgtgcctgtaatcccagctactcgggagactgaagcaggagaatcgcttgaacctgggaggcagaggctgcagtgagccgagattgtgccactgcactccagcctggatgacagagtcacrctccatctaaaaaaaaaaaaaaattacccaactcctatgtcatagttcatgcacgcacatgcatgtcactcttactagaatagcgaa

SEQ ID NO: 436258 - DNA, 557 bp, Homo sapiens
tactaaaatgggcagcttctcctttcttccaccgtctctctctctcaacttgcccaggtattaatattttttatttgctatttaatgtcactccaagtaaagaaaaataaaaactttaacttattagcatgaattgtactgtttatctttatattacagaatgccagttttaaccacaaatataacagcatttagctcatataaagaaatgatatagctgagtgcagtggctcacgcctataatcccaggagtttgggaggccaaggcgggtggatcacctgaggtcaggatttcaaggtcagcccatctccagtaaaaatacaaaaaaattagccagatatggtggcgtgtgcctgtaatcccagctactcgggagactgaagcaggagaatcgcttgaacctgggaggcagaggctgcagtgagccgagattgtgccactgcactccagcctggatgacagagtcacgctccatctaaaaaaaaaaaaaaattacccaactcctatgtcatasttcatgcacgcacatgcatgtcactcttactagaatagcgaa

SEQ ID NO: 436259 - DNA, 593 bp, Homo sapiens
ttaaggattctttccacctctttggggattcgctccttaaacataaacagtggtagatgaacaggaagctaaatgaggactcagaatattcaggtttaaatcccagctgcttccctttacctttctgccccccagtttcctatctgtcccaatggtgataagcctcatcctgttccctcacagggttgtgttgtgagtgttacataaaatagtatgcaaaggagttttgttaactatgaaaagtgtatgattatttggcaatctgttgttattaattacatcagaagggtctgaaccacctacatgtgtaatcaatttttttcagactatcmctaaaaaagcacaggatacataatgctagttgctatataacaaataatcctcaaatctcagtggcttaacacaaatatatttatttattacctgtcttagtctgatgtaggccagatggctctccttggtgactctcctccacactgtgactcaggaacccaggttccttccatcatgtgatgactctattctaacatgtatcctccacaaatgctatagcatgggaagagaagtggtatggaggttcatgcaggagactt

SEQ ID NO: 436260 - DNA, 571 bp, Homo sapiens
cagactcttaaatgtgaatgagtaaatgtttgatgaaagaataaataaatgaactcatacattaaatgaacaagtgcatagamacgttaatttttcttctggcaggggaggacttacaagttttctaaatattttaaatgaaaggaaatctgagagatttagactaacttccttataatgggatattattcccttcatcctgaccctgtccctataacatacacatacacacacacacacacacacacacacactcgtcaccacatattgtttccctaatcatataaatcattcatgtggaaagccctcatgtattccagatatttcaacattgtttatgttgggctgaatttaggtgttatctttctttcctcactttttctttttggcatccaaatacttctctttagagataagctattattcaacaaatagagcttcaaataaaaacctgcccagttattctaaggtcaactgcctctgactcaagcagttgctaaattgttttgagactggagctgtactcctcagtcttccaaacattgcagaaagaggaaaaatggaaaaacaa

SEQ ID NO: 436261 - DNA, 485 bp, Homo sapiens
ccctctaggcgtccctcaacccagtcaagttgacacctaaaattaaccatcccaaagtatatgtagtttctttagctgtaaacaaaatttctacttcttggttgttttgaggcttaaagagatatggatgtaaaatcttccaagcacaatgtttggtgcataagagccactcaataaatacatgatgaatgagttaatattactatgcacatagggacwtgtgctcaagccacccctgacttacaaaccctcagttgagctcagtccctgcacatgaacacgatgactgtagggatccagcctcttcctttggcctttcctattgctgctgcctacagtcctggccaccatgcagccattccatctggtttcatggaactactggaatgtcaagaactactggaggtggggcagcttacccccatttactcaacttgagagggtgagatcccctcttcctgctggggcaacattgggaatggata

SEQ ID NO: 436262 - DNA, 443 bp, Homo sapiens
agaacagacttaaagtcatttatccattttattgttattgtcttgagtttctcgtgggaaggggtcagctgacattgagagtaggtggttgacwtcctcatggacccctgcattttcccaccctatgcctggctccacagctgggaacatctgggctgcatcccaaggtaagctgtccagaaagctgtgggatggccaagatgtgccttggttgaggcgggctggggggacgttccagctgccgtgacttcaactccccctggatagccctccccttactccaagcagcaatatttctccaaggatgatgctttcatctttttcccttcactcaaagaaagggcatgtttcccctttgcagaacatgttgatgaccatttcctcttggaaacatctgtgcctctaggctccaagctatgtctgcctttcttattttgccccaa

SEQ ID NO: 436263 - DNA, 493 bp, Homo sapiens
tgtgtctctctgcagaattgcaggaatttcactcaaactcagttttttctagatcacaaagacctgtatttctcactccaagaccccaaataaaggccatggtaaccttatctcgttggctattccttgggggaggagataattgataatactgagaacccaaccaggataagccagccagagcacaggggaagagtggaaaagacactggtttagggtcagttagtgtccccamagccacctgaaggcactgggtccctacgactgaacacaatgttctaacagaatttcagaagtttgcaaaatcctcagaggttataggactatatccttgctacatgggatgccctttgacttcacttccgtccctaattccgaatcctttaggttgattgtctcagccatctgcctggtaaaaccccaaccctctctttcctgtgctcctggccaccagggcagaggcggccagaggatatcagcttcaaagctgtgg

SEQ ID NO: 436264 - DNA, 636 bp, Homo sapiens
cgttaaaaccgctgaaggaagatatcctgaagaaattctggactctaagcaatagtaaattgtaataaactgaactgtgttcattattattattagattgatgcaaaagtaattgcagtttctgccactgaaagtaatacaattttaggatatataaattatgattgacattatctttactgagtatgctatctttattgctttagtttaatagatataaaaatatttataagggttactggtgacattggtctgcaaactgtgttttcccaaaagccctgacttcttcaattctgaattctcccctcacgtacattaccttctgggtaagaagcaaatactgcactttcttttcatacaggagtagtttcacagatgaagattgagtcagctctttttaagtaggtctttgaaaaatatgatagcagacgctgctgaggatcccaaacagggacaaggtgctgacctgtgttcaggcagctgaccagccagcagggacttgcctcattggcaatgctctgtttgttctgtgctttgttttatgtctktacacaatggcagccactggtgtaagtcagtctgtgatctgtgccagaggagaggtgcagaatataggggcgacgggatgtcagagaa

SEQ ID NO: 436265 - DNA, 548 bp, Homo sapiens
ttggtctgcaaactgtgttttcccaaaagccctgacttcttcaattctgaattctcccctcacgtacattaccttctgggtaagaagcaaatactgcactttcttttcatacaggagtagtttcacagatgaagattgagtcagctctttttaagtaggtctttgaaaaatatgatagcagacgctgctgaggatcccaaacagggacaaggtgctgacctgtgttcaggcagctgaccagccagcagggacttgcctcattggcaatgctctgtttgttctgtgctttgttttatgtctttacacaatggcagccactggtgtaagtcagtctgtgatctgtgccagaggagaggtgcagaatataggggcgacgggatgtcagagaatgaagtgatcattttggttttgatgttgggggagaggggacggtttcccaaataaagcttcccaaagaagctagcytaaggttcagatagatgcaggtgatttcaggagcttggagagattcctggctggaaaaaggagtctgagggaatggctcacac

SEQ ID NO: 436266 - DNA, 587 bp, Homo sapiens
gtaatttctcagacaatatgagccattaatgattagttaattcaattmagactaccagagtaacaggtacactccacagaatgcaatggaataccagcattctaacctgagcagacaacagggtaaactatgccaagttcaaagagacgaaagctatgaagataacatattttatagccttttgtttggattaacagcaagtttgattcttaaacctctgaggaaatctgaaaaaccaacagaccaattaatcttggatttggctaacaatgacaaagagtattgtgaagaatataacattttcaatattgcatacattctcaaatggagtaaagtcatgaatttgaacaatgatagcattgtagaataggctcaatgctgtactgtacacattgcaggcatacaggctgaacggttagcaggcactctctcctattctctctgtctctctacatttatggacaaatataaccttcctaggacttatgcttttcagtctaataatcatagataaaactctacactatatttcatgacaaagatttagattattgttttctccctgtaactggcatcatccattattt

SEQ ID NO: 436267 - DNA, 587 bp, Homo sapiens
gtaatttctcagacaatatgagccattaatgattagttaattcaattcagactaccagagtaacaggtacactccacagaatgcaatggaataccagcattctaacctgagcagacaacagggtaaactatgccaagttcaaagagacgaaagctatgaagataacatattttatagccttttgtttggattaacagcaagtttgattcttaaacctctgaggaaatctgaaaaaccaacagaccaattaatcttggatttggctaacaatgacaaagagtattgtgaagaatataacattttcaatattgcawacattctcaaatggagtaaagtcatgaatttgaacaatgatagcattgtagaataggctcaatgctgtactgtacacattgcaggcatacaggctgaacggttagcaggcactctctcctattctctctgtctctctacatttatggacaaatataaccttcctaggacttatgcttttcagtctaataatcatagataaaactctacactatatttcatgacaaagatttagattattgttttctccctgtaactggcatcatccattattt

SEQ ID NO: 436268 - DNA, 593 bp, Homo sapiens
ttttagcatcatctatgtgccaggccctgttctaagcactttaaatgtattacctcatttatgcctcacaccatactatgaaagtaagtactggccaggcatggtggctcacgcctgtaaccccagcactttgggaggccaaggcaggcagagtacgaggtcaagagatcgagaycatcctggccaacatggtgaaaccccgcctctactaaaaatacaaaaattagctgggtgtggtggtgcatgcctgtagtcccagctactcaggaggctgaggcagaagaatcacttgaacctgggaggcagaggttgcagtgagcaagtgagcagagatcacaccactgcactccagcctggtgatagagcaagactccgtctcaagaaaaaaaaaaaaggaaagaaaaagaaaaaggaaaagaaagtaagtactatgactatcattccccactttaaggataaagaaattgagacacagggatgttgaggaaatttcacaaagtcatacaactagtaagtggtatagctgggattcagattcaactagtctagctgcaaggttcatggtttactcactgacaatatgctgtgtttaa

SEQ ID NO: 436269 - DNA, 507 bp, Homo sapiens
aacaaaatgaagaggtgacttagattctggagtatgtcatatggtattgttatagaagtaactataatcttatcaagttgctcaagtttacaaaatcaagtagcactaatattctctaacaaaatataatagaattcaaaaggaagcatttgagttaaatatatagtaatatataacatggaaatataaatcagattttgcttttatggaaatgttatgtcaacatatttataagaactagatgcctatgtttggcctgataattcattatggacttggtgaaataaaagagctgatgacttctgctgtgaagaagcttayagctgaggaggagagatgcagtcaattgacaactctgaagtaacctgttaagttgtaaagcacaagttctggcttctataaactcagtttcctgtgtgtaggccttgctctgaaaggttccatttagactgtaaattacattactcttgaaagaaaggcagagtatcaagtatattaatctcccag

SEQ ID NO: 436270 - DNA, 566 bp, Homo sapiens
ttggtgagacgaactttgtttgtgtggttcacccttttctgcctctcattattttgtataacagctgcctgtagggagcacaaaattggttggttctctataccatgagtgggagacctcagtttgttcttctagttgagaattctaatcctgggattctgtgttgaaacccattgctggtacatgaataagccacatcctcttctttagcttttatcagttatgaaggtgatgttttgatctctaattgcttgatttattatgtgtttctctcaattgatcctaaacttttgaggagaaaagtgtgttatttattggtagcttcaaacygaaatatctacgtgcttttgtcagggcccacctgcttaaatactaaagtcaaaataaataaaggtacacgaggaaggtggggtttagaaacagcatatgagaaaaagacatggatctttcacttatttaaattatgtgctctcagtaatgctgttgcaattttagcctattagtagaagtaaatcatctagaaaatattctttgtgctagtcagttcatagtggaactatttttgc

SEQ ID NO: 436271 - DNA, 628 bp, Homo sapiens
aaatctctaaaatctcttcaaaccctgaactttttaatcttttaattctatgatttagactatgtgatacagtctagggtgctgtggaaatgcaggcatagcacatatcaagatagtgagtaatgctaatggaggtttcctcagctatcccaaggaagaggactcacgatggaacattacctttgacatccaccctagtctaagcctcagttctgcatagcaggaaacatgattttatcattctgtcagggtatatcagactcaaaagagcttacgcactctaatgaagttgacatgagactgatatatgcaacctgaatgccaatktattcatttatgaatagaaataaatctgttaatggaatttatattccattcctctggccaaaatttctccttgtatacacaatacgatagaagccaaattaaagtaagactactgtttggtgagcatgggatagaaggaaatgagataactctaggaagttaaggtttgatcattcaaaccatcagcttgattatccttctgtataatagtggtataaactgcctcctggatatagcaggtcttcttgtattattgcagcctttcccttagtctgcatttactggaactgcccgtgcttct

SEQ ID NO: 436272 - DNA, 628 bp, Homo sapiens
aaatctctaaaatctcttcaaaccctgaactttttaatcttttaattctatgatttagactatgtgatacagtctagggtgctgtggaaatgcaggcatagcacatatcaagatagtgagtaatgctaatggaggtttcctcagctatcccaaggaagaggactcacgatggaacattacctttgacatccaccctagtctaagcctcagttctgcatagcaggaaacatgattttatcattctgtcagggtatatcagactcaaaagagcttacgcactctaatgaagttgacatgagactgatatatgcaacctgaatgccaatttattcatttatgaatagaaataaayctgttaatggaatttatattccattcctctggccaaaatttctccttgtatacacaatacgatagaagccaaattaaagtaagactactgtttggtgagcatgggatagaaggaaatgagataactctaggaagttaaggtttgatcattcaaaccatcagcttgattatccttctgtataatagtggtataaactgcctcctggatatagcaggtcttcttgtattattgcagcctttcccttagtctgcatttactggaactgcccgtgcttct

SEQ ID NO: 436273 - DNA, 575 bp, Homo sapiens
tttggtgagcatgggatagaaggaaatgagataactctaggaagttaaggtttgatcattcaaaccatcagcttgattatccttctgtataatagtggtataaactgcctcctggatatagcaggtcttcttgtattattgcagcctttcccttagtctgcatttactggaactgcccgtgcttctcattcagctattctttttcctaggcttcctggaatgagcagttgcttttatctttccttaatggttaagaatacaggctgtctgtgtactaacccaggctctaacacttactgctgaggtttcttkggcaagttgcttaacatttttattgttgtcacatctataaaggcataataatagggtccatctctcaggattgttgtaatgattaaatgagagaatatgtataaaagagcttcgaataattcctgtcatacattaagcactcaaatattagtgatcattattattaacattattattactgaaatttcagccaagttacagttaagtgattttgttctgagggacatagggtttattttgcaaaaatattttgtgtttttgtg

SEQ ID NO: 436274 - DNA, 575 bp, Homo sapiens
tttggtgagcatgggatagaaggaaatgagataactctaggaagttaaggtttgatcattcaaaccatcagcttgattatccttctgtataatagtggtataaactgcctcctggatatagcaggtcttcttgtattattgcagcctttcccttagtctgcatttactggaactgcccgtgcttctcattcagctattctttttcctaggcttcctggaatgagcagttgcttttatctttccttaatggttaagaatacaggctgtctgtgtactaacccaggctctaacacttactgctgaggtttctttggcaagttgcttaacatttttattgttgtcacatctataaaggcataataatagggtccatctctcaggattgttgtaatgattaaatgagagaatatgtataaaagagcttcgaataattcctgtcatacattaagcactcaaatattagtgatcattatkattaacattattattactgaaatttcagccaagttacagttaagtgattttgttctgagggacatagggtttattttgcaaaaatattttgtgtttttgtg

SEQ ID NO: 436275 - DNA, 558 bp, Homo sapiens
ttcttttggagggccagagggaaaaactatcctatgcatctttactattttctggtggttgcccgaaatcactggtattccttgacatttcaatctctgccttcatcctcacatcaccttcttctctttgtctctcctctgtgtgtcactgtggcctctttgtttcttgcaaggacaccagtcattggatttaggacctcctctacatcctggatgagttcatctcaagatccttaactaatttttttttttttttttgagatggagtctcactctgtcactcaggctggagtgcagtggcacgatctcggctctctgcaacctctgccttctgggttaaagtggttctcctgccttagcctcccgagtagcagggattacagacatgmgccaccatgcccaactaatttttgcatttttagtagagatggggttttgtcatgttggccacactggtctcaaacccctgacctcaggtgatccacccacctcagcctcccaaagtgctaggattacaggcgtgagccaccacgcctggctgatccttaactaatttta

SEQ ID NO: 436276 - DNA, 558 bp, Homo sapiens
ttcttttggagggccagagggaaaaactatcctatgcatctttactattttctggtggttgcccgaaatcactggtattccttgacatttcaatctctgccttcatcctcacatcaccttcttctctttgtctctcctctgtgtgtcactgtggcctctttgtttcttgcaaggacaccagtcattggatttaggacctcctctacatcctggatgagttcatctcaagatccttaactaatttttttttttttttttgagatggagtctcactctgtcactcaggctggagtgcagtggcacgatctcggctctctgcaacctctgccttctgggttaaagtggttctcctgccttagcctcccgagtagcagggattacagacatgarccaccatgcccaactaatttttgcatttttagtagagatggggttttgtcatgttggccacactggtctcaaacccctgacctcaggtgatccacccacctcagcctcccaaagtgctaggattacaggcgtgagccaccacgcctggctgatccttaactaatttta

SEQ ID NO: 436277 - DNA, 558 bp, Homo sapiens
ttcttttggagggccagagggaaaaactatcctatgcatctttactattttctggtggttgcccgaaatcactggtattccttgacatttcaatctctgccttcatcctcacatcaccttcttctctttgtctctcctctgtgtgtcactgtggcctctttgtttcttgcaaggacaccagtcattggatttaggacctcctctacatcctggatgagttcatctcaagatccttaactaatttttttttttttttttgagatggagtctcactctgtcactcaggctggagtgcagtggcacgatctcggctctctgcaacctctgccttctgggttaaagtggttctcctgccttagcctcccgagtagcagggattacagacatgagccaccatgcccaactaatttttgcatttttagtagagatggggttttgtcatgttggccacactggtctcaaacccctracctcaggtgatccacccacctcagcctcccaaagtgctaggattacaggcgtgagccaccacgcctggctgatccttaactaatttta

SEQ ID NO: 436278 - DNA, 491 bp, Homo sapiens
atgacctatttacctcctaaaggtccccatttgttaattcaattgcattagggattaagtgtcaacatgtctttgcagggggatacaaacattaagcatggcacaggataaatgaaatttaggatgaggaatgaattacccagaaaaagtgtaaaataaraaaatgaggcatgagaaagttccgtgaggaacaccaacatttatggaataatttgagcaagaggaatacataaaagagtcttaggaaaagctagacaagtagaaaaataaaagaaagaatctgaatttagagaagctaagaaaaggacagatttttggaaacaaaatgaatggccaacagtatacaatattactgatgtcaatgagataaggcctggaatagatttctgtagtcagcaacgaggctgggctctttgtgtaagcaaagtcatcacagtggagggaaaagaaaccacagttcaatgaatcagattttaacaaatcgaaggcat

SEQ ID NO: 436279 - DNA, 543 bp, Homo sapiens
tccttttaaatatccaaatttaccatgggaaaagagcaataagtgtagtcttattgggcattcacactttaattggtgacatcattaaatctttttctgagatagagtatgtcttttggaaatgctaaggaacatgggaatgaaggaggaataacatgtgcagaaatagtatacaccggatrttaaagataaattcaattagataacaaagagtagcatagttctttgtgtaaggctcttttttaaatgttctgcaaatattaacacatccattcctcataacaatcatatgaggtagatactattattatcattcccatattacagatgaggaaaatgaagcgtagagcaattaagaaacttatccaagactgcacagctgactaggctggagtctatcttaggctaattgagaagctgctgagcataatggttaactaatgccattcccagcatattcactcattctgatggttaatcagtcttgggcttctaagcaatgtataagggatgatgcagaggactatttaaaagaaccaatag

SEQ ID NO: 436280 - DNA, 543 bp, Homo sapiens
tccttttaaatatccaaatttaccatgggaaaagagcaataagtgtagtcttattgggcattcacactttaattggtgacatcattaaatctttttctgagatagagtatgtcttttggaaatgctaaggaacatgggaatgaaggaggaataacatgtgcagaaatagtatacaccggatgttaaagataaattcaattagataacaaagagtagcatagttctttgtgtaaggctcttttttaaatgttctgcaaatattaacacatccattcctcataacaatcatatgaggtagatactattattatcattcccatattacagatgaggaaaatgaagcgtagagcaattaagaaacttatccaagactgcacagctgactaggctggagtctatcttaggctaattgagaagctgctgagcataatggttaacwaatgccattcccagcatattcactcattctgatggttaatcagtcttgggcttctaagcaatgtataagggatgatgcagaggactatttaaaagaaccaatag

SEQ ID NO: 436281 - DNA, 587 bp, Homo sapiens
agtggaaagttgacaattcaggaacagctcaatggaagagatgtataggccaagggagggggattactgaccttctgtgctctctgaggggggcaccatcatcccagcatctcattcaccaatctggaagctcctcaaatcatttttaatatattggcatacatgaaatcccaatgagtaatttgtcaagtagaacagatcactattaactgaaacattaaactaattttaatgtaaarttacctatgattagtacacaccataagcaataaattttaaataacctggttccatattttatggaatattcatgggttgattagtttccatacaaaacagatgttctgatgagagaatgaaaatgaggaagtttttctttaatgtacaaaagcatcagagcatggaaagaaataaaaagagtatttttcccaagtactgatctgctaataaatgtttgatgtagtctagttagcctacttcttataatgagagtatgattttatttttaaaagttttggatgtcttttccttcaagtcttcatacaaaaatatccctttgaacttaattatagctacaaataaagtgg

SEQ ID NO: 436282 - DNA, 497 bp, Homo sapiens
atgaaacaatatatccaatacctctttttattggacaatcttattgaagatgaaagggcactagtccttttgctgtgttacctggaaaatctatacctaatgatagtaaggtattccagatagctgctccagtcttctctcttggcccttcttataactaatccactactcttctgcagctgaatttaatccattttgctacaaaggtgaacaaattatgttcccttctttccaatgcacatccagaaaagctccatattgaatatcagaagattgtgtaagtgaattataacacagataagaataatttaaatctggattccaaatattacagctctcaatgtcccttcacagatggaatccttcttggctgactacacaacatmcgacatgatgtcataatttatctttcacaaagtagagtttctttttaccctgtccctatttctcccttgtagactaacagacattcatctccctagctgctgttggattca

SEQ ID NO: 436283 - DNA, 580 bp, Homo sapiens
gagaaatcaagtcctccccaaacaaaagtgaaagaaacattgcagtggtatttggaagacctactatagatttgtgacctcggaatccaaggttcaattcggcaatgacagtggggatgaatgtcttcagtaagtcccgctgactggtcaaaaagaccaatattgttcttgcttttcctttgagaaactgatccttgggtgacaagatttcatgttcaatatttactgaataacaaaaaattcattcctctgactccccatttctatcctgcagccagggactaatttaagttgtgctttatagaattgaaaaatrcttggaaaggtacactccttaaaaaggaaaaaaaaaattagatcctaaagctttccattgtaggctgatcaagttcatgagcattatttttggacagaatagaagttggttgggttacatctttttcttctctcctagggaatatatttttaagctttagagtttctatttagtaatgtgatgacccaatgatagtggtttgttaaccaaattaaggggtttcttttcataaaatttagtgaaattcttttatgctaggcactt

SEQ ID NO: 436284 - DNA, 541 bp, Homo sapiens
atgctttacacaaaattttcttacaagtattatttcatttaattctccaaatagtccataaggcgataattatcttcattttgcagataagtaaactgaggctcagtgaggataactggctaatcctggatttcaaactaaggaatgtggaagagaaaactaaaataataatattaattgaatattatgagaagagccaagcagatggtttttgaatggtcaagaattgtgaagggtctgatattttaccctacttacaagctaacaagttagcctgctacagttctatgaatgctggtagaatatgagtctcttgggtcagagacaaaagatagtttattacagcaatagcagtagcyagaatgtcagcatttgcactggttccccaagctccaattcccacaaagtgacataaagaggctcaggtgacatctgcacatggagtaggctgtattacagaagaaaaaaaactgaagttagtgaaaccaagccttttaaaatgaacactaatagagcctattctttgctccagagggagata

SEQ ID NO: 436285 - DNA, 527 bp, Homo sapiens
gatcttatataatcaaactctaactactacttgctggtgacatttctggatccacaagcatcattatttgaccgctctgatttatgtaactggtctaacttcagattttatctctgtaggcctctgggaatacttttagagattcacagtgaaaaatcagagtcaactcatgaatttctactttattgcataaaaacaaggggactataaaatgtgttcaaagggtataggatggaaatatacagaaatatagatcacacataacctgaatcagttgattcatctaaattatagtaatatctaaacaattgatgttacattgacgatccctttatttttatttttatttttttgagacaaagtcttgctctcatgcccaggctggagtgcagtggcrcgatcttggctccctgcaacctctgcctcccaggtaggagtgagtctcctgcctcagtttcccaagtggctgcgattacaggcacctgccaccaagcccggctaatttttgtattttttttttttttcag

SEQ ID NO: 436286 - DNA, 570 bp, Homo sapiens
gcattcaaacttgtaattaaaataaaaccttcctcaaattgctccactccrtttcaacatttcttgtagtttgattagtaaaacactatgatggtgtctgatgttttaagtaagaagtttctgcactgttggggaaaaacaaacaaaggcaatgcagtgatttctagagtaaaagtcctctgctacaaaaaagagatgaagggcaataagataaaaagttaggtgcagggatgaataagtagagcataaaggatttttagggcaatgcaactattctttgtgatactttaatgatggctacatgtcattatacatttctccaaacctatggaatgcaaaacaccaagagtgaacactaaatgtaaaccatggactttgaatgatgatgtttcagtgtagactcatcaactgtataaaacaaaacaaaacaaaaaaccaaaaaaccatgtaccactctggggggggatgtcaataataggggaggctgtgggtgtgtgggacagatgctacatggaaactctctgtaccttcctctcaattttcttcctaaaattgctctaaaaattaagc

SEQ ID NO: 436287 - DNA, 570 bp, Homo sapiens
gcattcaaacttgtaattaaaataaaaccttcctcaaattgctccactccatttcaacatttcttgtagttwgattagtaaaacactatgatggtgtctgatgttttaagtaagaagtttctgcactgttggggaaaaacaaacaaaggcaatgcagtgatttctagagtaaaagtcctctgctacaaaaaagagatgaagggcaataagataaaaagttaggtgcagggatgaataagtagagcataaaggatttttagggcaatgcaactattctttgtgatactttaatgatggctacatgtcattatacatttctccaaacctatggaatgcaaaacaccaagagtgaacactaaatgtaaaccatggactttgaatgatgatgtttcagtgtagactcatcaactgtataaaacaaaacaaaacaaaaaaccaaaaaaccatgtaccactctggggggggatgtcaataataggggaggctgtgggtgtgtgggacagatgctacatggaaactctctgtaccttcctctcaattttcttcctaaaattgctctaaaaattaagc

SEQ ID NO: 436288 - DNA, 656 bp, Homo sapiens
ccatgtgttgaggaccccacctgtgccaagtgttccttggattaaggatggaggggaagaggttgttgttcaggcagytgcacccacaattcaggactaatgcaccttgctgggtaaatatctgaagagagccaattattagaaatgaactgtgactattagttacccagggaggttaattactcatggtgacccatataaagttttaaagcctattcaactacagcagcactttttctccttaaagacagtgttgcatggtggacagggtggatggagaggagccccaagttttcctttgaattgcgctcctcaatcatttttttctaacccaaaacttgagcatctgacacatggccatcagtgaaaatgaatctcagtggcagtagtttctagtaggaaagaaattatactctctcggataagtgaatcagattctgagggaggtatatgtagtttgaaaaagttccttcctgccgggggggattctgatgcaccatgcctccctctaatttagtaggaatcctgccttaattttgtccacagtaacaacaacaacaaaaaaaattcgaacataaggaaggtggagaacataaataaaataaaatccctattatcatattctgagttatcctggatactaaaactgagatgaa

SEQ ID NO: 436289 - DNA, 656 bp, Homo sapiens
ccatgtgttgaggaccccacctgtgccaagtgttccttggattaaggatggaggggaagaggttgttgttcaggcagctgcacccacaattcaggactaatgcaccttgctgggtaaatatctgaagagagccaattattagaaatgaactgtgactattarttacccagggaggttaattactcatggtgacccatataaagttttaaagcctattcaactacagcagcactttttctccttaaagacagtgttgcatggtggacagggtggatggagaggagccccaagttttcctttgaattgcgctcctcaatcatttttttctaacccaaaacttgagcatctgacacatggccatcagtgaaaatgaatctcagtggcagtagtttctagtaggaaagaaattatactctctcggataagtgaatcagattctgagggaggtatatgtagtttgaaaaagttccttcctgccgggggggattctgatgcaccatgcctccctctaatttagtaggaatcctgccttaattttgtccacagtaacaacaacaacaaaaaaaattcgaacataaggaaggtggagaacataaataaaataaaatccctattatcatattctgagttatcctggatactaaaactgagatgaa

SEQ ID NO: 436290 - DNA, 656 bp, Homo sapiens
ccatgtgttgaggaccccacctgtgccaagtgttccttggattaaggatggaggggaagaggttgttgttcaggcagctgcacccacaattcaggactaatgcaccttgctgggtaaatatctgaagagagccaattattagaaatgaactgtgactattagttacccagggaggttaattactcatggtgacccatataaagttttaaagcctattcaactacagcagcactttttctccttaaagacagtgtygcatggtggacagggtggatggagaggagccccaagttttcctttgaattgcgctcctcaatcatttttttctaacccaaaacttgagcatctgacacatggccatcagtgaaaatgaatctcagtggcagtagtttctagtaggaaagaaattatactctctcggataagtgaatcagattctgagggaggtatatgtagtttgaaaaagttccttcctgccgggggggattctgatgcaccatgcctccctctaatttagtaggaatcctgccttaattttgtccacagtaacaacaacaacaaaaaaaattcgaacataaggaaggtggagaacataaataaaataaaatccctattatcatattctgagttatcctggatactaaaactgagatgaa

SEQ ID NO: 436291 - DNA, 656 bp, Homo sapiens
ccatgtgttgaggaccccacctgtgccaagtgttccttggattaaggatggaggggaagaggttgttgttcaggcagctgcacccacaattcaggactaatgcaccttgctgggtaaatatctgaagagagccaattattagaaatgaactgtgactattagttacccagggaggttaattactcatggtgacccatataaagttttaaagcctattcaactacagcagcactttttctccttaaagacagtgttgcatggtggacagggtggatggagaggagccccaagttttcctttgaattgcgctcctcaatcatttttttctaacccaaaacttgagcatctgacacatggccatcagtgaaaatgaatctcagtggcagtagtttctagtaggaaagaaattatactctctcggataagtgaatcagattctgagggaggtatatgtagtttgaaaaagttccttcctgccgggggggattctgatgcaccatgcctccctctaatttagtaggaatcctgccttaattttgtccacagtaacaacaacaacaaaaaaaattcgaacataaggaaggtggagaacataaataaaataaaatccytattatcatattctgagttatcctggatactaaaactgagatgaa

SEQ ID NO: 436292 - DNA, 575 bp, Homo sapiens
tcaggagcagactctcccccagttgggcctggagatgactgcagcctggctgacaccttgatagaagcctcatgggagacccgaagtcagaaatacacagcaaatctgctcccggatttcttacccacagaaacagtgaaataatagatgtttgctgtacccaactgcaaagtttgggagtaccaaatttgttgggtagcagtagataactgatagatggtgctctggtagagcatttgattttggctccatttgtgcatcattttgaaaggattactaatgtgaaaagatagctcaaggccgggcgtggtggctcatgcctgtaatcccagcactttggaaggccgaggagggaggatcacctgaggtcaggagtttgagaccagcctggctaacacggtgaaaccctgtctctactaaaaataataataataataataatmataatcataataaaaaatagccggaagtggtggcgggcacctgaggcaggagaattgcttcaacccaggaggtggaggtttacagtgagccgaagtcgtgccattgcactccagcctaggcgacaagagcga

SEQ ID NO: 436293 - DNA, 476 bp, Homo sapiens
agtcattcgttactgcaaagaagaattacaatcttagatcaaatttgtgataccattccagtgttttatttactttatactaactttgtataaagttagaggaagactaagatggttctgaggactaaatgaggtgttctatataaagcacttagcatagtgctcttacatggtaaacagtaaaagttactgctgactctacaacttctacttcctctactactgctgctacttctaactcttattctaacacagyactttcctatatttctaaggcttgaatacatttactaattatgactcatagcaatgtacatctttgcctttatgattttttaaatataacttgcttatttttataccaagtcttgataaaagctcacccttaaagaaagactgcttctatttttatgcattttatacatcccaggaagtggtaaggaggaaatgctgcatgtttgtatagaaagattgtg

SEQ ID NO: 436294 - DNA, 552 bp, Homo sapiens
ttcaaggggtaagtgaggccagatcacttaaggccctaaaggactttagcttttacccttgaagaaacaggaaaccattggagggatgtgggcaaaggagaaacatggtctgtctttaaagttttaataggattattctagtttctgtattataataaaaaaaaccatgaaaatagatgacagagtaggcacaggaagaccagttaggcccatacagcaatcaaggtaagagatgatagtggcctggaacarcacgtagccatataggtgactatatttatattttgagggtgatccaaaaggatattatgacacatcagatgtgatgtataatagtaatagaagacttaagaataattctaaggtttttgctctgagcaactgggagtttggaaggttttgttttgtgttgagggctccaatagagcctaaagtctaatcatagcattctcaatccaaaatcaatcatttccatatctctacataatttctgtctgtgtctatctcttcactaatttctaagctcctgtgatgtcagaggctgtacctatt

SEQ ID NO: 436295 - DNA, 550 bp, Homo sapiens
agtaattggcctaataaaaggcagaaacaagaatttattacaccttgggcagcacttaaaacaaactttattctcaggaacagcagttatgtctacttgctgctttatattttgatatttcctctaaatacttaagtctgaatatattcaaagtcaaattgcaaatcactcaatttccctgctcccttcctggttccccaggttgcrtcttgtgatactccatgtaaacactgtatttggaaagatacatagatcagcatccctagagtcacatgatcaccatcaatctgtgaaaatagcatgacttaaaaataaaagtctcttagtactctgccaacaggctttggcataatcttggcaatcacttagatttttttttttttttttttttttttttgctgttgtaatttttcccaagtggaaatagtctcatattttgcagaagttgtccaagctagtgaacatcaatccatcttcctgggaactaaattcgtcagctgaatgtactcagtccacacagaaatcagtaaagtgagtgtgaaactgcttg

SEQ ID NO: 436296 - DNA, 457 bp, Homo sapiens
taatagttgtgagaaatttaataaatatactaggaacagatatagcccagaattagtaatctcatggattggcaggatatattttctgtaggagatcaatagagaaaaataaaacctataatatatttcattatttagaattcactataaaacatattacatttggtctcttgattgtgytagtcctccaacaaatacagaactttaccatacatacagtgccctctaactgttggaatcatgggctagaagcacatctaacctaattatggatcttacctgatattcataatcatgctccatcttcatgtcattttgaaccaaaattgtggtagctaataaacaagctaggtggttaacaaatatcactgagctcttcttcagtgtgctcaaccttgcacttaaccccgcaaagaaaataaaagaaatataaaggatgatttctgctcttatgaag

SEQ ID NO: 436297 - DNA, 570 bp, Homo sapiens
gctcttcttcagtgtgctcaaccttgcacttaaccccgcaaagaaaataaaagaaatataaaggatgatttctgctcttatgaagtttaaatctggctgggaygataaaatatctataagaaatgatctaatattaatgtcattaaaatgcccttatcaattccattgagcttaaccaatatctgttgtatgccaggcaccctgctatattttatggttgtaactaactgtcctaaaggagtacctggtttggcagaaaataaatggaaaataaacacacaaacacatattatgatatagtataaaaaaaatctacaaaaaacgtatttacaaattactggggaaactcacatgatagtataaataattacttttgggaagattaagggagattataaaaaagagattgtatttgagcaaaggcattcatcaggcagatacttgtagaaaagccattataaatggggaaactgcatcagtaaagacaaggagatgtgaaagtgtactgtattggttattaagcaattgtcttttaactctaaatccacccttctgatgttgaggccagaa

SEQ ID NO: 436298 - DNA, 585 bp, Homo sapiens
cagaaaataaatggaaaataaacacacaaacacatattatgatatagtataaaaaaaatctacaaaaaacrtatttacaaattactggggaaactcacatgatagtataaataattacttttgggaagattaagggagattataaaaaagagattgtatttgagcaaaggcattcatcaggcagatacttgtagaaaagccattataaatggggaaactgcatcagtaaagacaaggagatgtgaaagtgtactgtattggttattaagcaattgtcttttaactctaaatccacccttctgatgttgaggccagaactctgcaagttgtctgctggatcccaccaacagggggcactagagggagcagagaaagtaggaggcatggaagatcctgtttccttgactctgtttgatggtgctctaacagtactgcccagcaacggcccttcacatcaacagcaacatgtggttccagtgttgagctttattcataaccagcttcatcacaccgttagaggttcctacaccagcctggtggcactccttccctagaggtttaagcctcagctccaaggaggctcta

SEQ ID NO: 436299 - DNA, 514 bp, Homo sapiens
tgaccctagggagtagccattctattcttactcatctaatattaaagcacctgttatgagagtgacactttcttttgccaaaccatagaaaaaactgcttaaaacaccattaaagagcctcactcatttagaaggagaccattctgcagttcacagtatcctggctagcatgaaagaggtgacaggtgactctgatgcaggagcaggaggccctgcccaaacatccctaaaatttttggcctttgcaacctgaaaaaaagcctttgctgatatcgagaaagaattaattyactgagaatcctacaagctgaaggctgggcacctctcccaaagtgatcattaatgatgtattgaaatcctatttaggtcaacaccttcagacacagacacagacaaggttctcataaaaatggtgctgagaagtcacagactttctcatcaggtatcagaaaatgcacttgtctagtttaataagagttgcaacctctactcttagctgaaggtgaaagatgga

SEQ ID NO: 436300 - DNA, 592 bp, Homo sapiens
gtgttgtgcttcatttctgcagaagaattattaattcatcagtatattgatttatatgacacaacactccaaatatataattccatggacctaagacctggcattccagtatggccttatggagaaagattttatgacagagtatctggtaataatggtccttctaagcacaaatgtcatccaacttggggaytgaggtcttgcatcacgttacataagcaacaatattgcattgcatagccagacaaaggtctttgtggacaaacatgaaaccaaatggaaacactagctctgacttccctacttgctacccaatactttaacctactttcagagtcaaggattaaataagatgtagtgtggtatctgcagccacatcaaaggctattctaaaatccagctaggagtattgataagcgagcaggcctaccaagggttctacttgattctggtgggagctctgagagaggcatggctgatttatctgagtgggagtaatcctccaatactacagtctctgggattaggcatggacctacaagagactccaaaatcagatagcatgagacagaacttgctcatgctgtgtaca

SEQ ID NO: 436301 - DNA, 628 bp, Homo sapiens
gctatttatgcatgctatttcctcctttgggtattaattagtgaagtgacatggggtctgcttattgggccacagtttgatgtttatttatctaaatttttgacaggtttgaggaattggtcagagtgattttttttttttggtaaaaagacacaggatatttggcttgaattgcatcatttgcatccttggaatgaaagcccrttgtttccgttaacatcttaggcctatgagaatgggtagggactatgtctcagcagtgtctactttacggcagggtctctcctctgcatgcaagtaaacactgtccttgtgagctggtaatctgagtataacttgcttgtgcaaagtatgcatgggtgcaatagttgttgattctgagaaataaattcactgcacacagagggcagtgaacaaacatttgttcctgataaatgataaacagatagtgagagagaattggtaagccttgtcagtcactgcttgcttttatcctaaagtctctttctctgttgtgtggtattgtttgtgtttaccaacactcccattaatgagtactgagggctgttttcatttcactgaaagcaaactgatcctgtagctgggctgtggtccaatattagaacac

SEQ ID NO: 436302 - DNA, 428 bp, Homo sapiens
aataattcataacaattaactgagttatgagtttctctttcaataygtttccaaacatgaatagattaaatggtaattgccatcaaattttatgttctctttcatgtgcccaatagaagtttatcttttggagctcactttgtatttccttttgatatattcataaccaaatgcaatatactatattaaaatatttattattaacctatcaaatattaaccacttttaaattgtagggatgaaagaaaacaaataggctacttgtttaagttttcatggtttttcttattttaatatgatttggattcgtagaatacataaaaattgatggcgtgagatactatttgagttcctgccccttatataaaatgttccaaggtgtatgtatgcccttgacttcccagccaccattattttataaacacaaa

SEQ ID NO: 436303 - DNA, 428 bp, Homo sapiens
aataattcataacaattaactgagttatgagtttctctttcaatatgtttccaaacatgaatagattaaatggtaattgccatcaaattttatgttctctttcatgtgcccaatagaagtttatcttttggagctcactttgtatttccttttgatatattcataaccaaatgcaatatactatattaaaatatttattattaacctatcaaatattaaccacttttaaattgtagggatgaaagaaaacaaataggctacttgtttaagttttcatggtttttcttattttaatatgatttggattcgtagaatacataaaaattgatggcgtgagatactatwtgagttcctgccccttatataaaatgttccaaggtgtatgtatgcccttgacttcccagccaccattattttataaacacaaa

SEQ ID NO: 436304 - DNA, 532 bp, Homo sapiens
aatgtttaaattttccaattttcctctgaacaatgtatcctctaaatggtctagtggtctacaatatgctctcacaatacctttcttatacagtctgtggtcttgattgaaacatatttcactatctctaccctgtaatgcacaatgcacatctatacctgcttgacatacattactcctctcgaatccttttaaatatttcttttgaatatgttttaycattgcatatctttttccccagcatgagttgcattctgtcttcataacacctgcatatttatctctgacatgaaactttgacattctttattattattatgataagcacaatataatgtgttctcaaagatgtctacatcctgatccccagagcctcttacctcacttggcaaaagagactttatagatgtgattaaattaaagatcttgaaaaggagagattatcctagattacatgtgtgggcccaatctattcacatggttccttaaaaatggaaagcctttcccacttgcgctcagaaaaggatgtgat

SEQ ID NO: 436305 - DNA, 532 bp, Homo sapiens
aatgtttaaattttccaattttcctctgaacaatgtatcctctaaatggtctagtggtctacaatatgctctcacaatacctttcttatacagtctgtggtcttgattgaaacatatttcactatctctaccctgtaatgcacaatgcacatctatacctgcttgacatacattactcctctcgaatccttttaaatatttcttttgaatatgttttatcattgcatatctttttccccagcaygagttgcattctgtcttcataacacctgcatatttatctctgacatgaaactttgacattctttattattattatgataagcacaatataatgtgttctcaaagatgtctacatcctgatccccagagcctcttacctcacttggcaaaagagactttatagatgtgattaaattaaagatcttgaaaaggagagattatcctagattacatgtgtgggcccaatctattcacatggttccttaaaaatggaaagcctttcccacttgcgctcagaaaaggatgtgat

SEQ ID NO: 436306 - DNA, 532 bp, Homo sapiens
aatgtttaaattttccaattttcctctgaacaatgtatcctctaaatggtctagtggtctacaatatgctctcacaatacctttcttatacagtctgtggtcttgattgaaacatatttcactatctctaccctgtaatgcacaatgcacatctatacctgcttgacatacattactcctctcgaatccttttaaatatttcttttgaatatgttttatcattgcatatctttttccccagcatgagttgcattctgtcttcataacacctgcatatttatctctgacatgaaactttgacattctttattattattatgataagcacaatataatgtgttctcaaagatgtctacatcctgatccccagarcctcttacctcacttggcaaaagagactttatagatgtgattaaattaaagatcttgaaaaggagagattatcctagattacatgtgtgggcccaatctattcacatggttccttaaaaatggaaagcctttcccacttgcgctcagaaaaggatgtgat

SEQ ID NO: 436307 - DNA, 580 bp, Homo sapiens
acatgcctctgctcatcattctaatggcttcacatcttattcagaataaaagaggagttcattcattctctagtgacctggcccctgtcctccctgggggctcattgctagcactcrcctcctaattcatggcacagtgcctccatgttgctcttcaaacacaccaagcacttcccagggcctttgcacttgctggtctggaatacccccagacatctccattatttgcttccccatttctttttaaaatatcttctcaaagaaaattctctgaccatttaatctgagataatagccccacccacattccctaatccctcaatttcctaatcttgtttatattttttcatagaatttataatattcaaaaagtatatgcaaaaataatttctccctctctgagtgtaaatattcaagggcagactgtgtctgttttgtgcacaattataactacagaacttaagatattgcctggcatacactaagcactgaaaaaatattgtcaaatgaatgaatgaatgatgatcctgagaccccttcctttggggaacagaggaagatagagaaaagttatgtttaa

SEQ ID NO: 436308 - DNA, 578 bp, Homo sapiens
gacattatcattgcctgggttcaccatgacattctgtgtcatgataaactattcgacatatacaccatttagactatttttgttgaactaattaggcatcctagaacataagtcagtcccaatagtcagccattcagcagcatttgggcctatctcagagtcatcttgaacacatatacctttaaaagttgtagycttctcagcatttgttacctttttgatgatatcagcttgttaatggcagagatttctctctatgtttgcctgccatttcttttccaattattcatgaagagttgcttgtgaaaatagccaaaacagaacagagcctgatgttctttgcagatgctgacaagataaattatggctgcatagaactggcctctgctacaaagtgcacctttcgctaaaatttcagaatttaagaactttgctcaactgtgctgcttctcaatagattcatttgaactcattatccacattctaagaaagtgcaactggtattacataatgatatttctgaaagtgttttgtcctgtgactctcacagacagcacagcaaaataattaaatgggcc

SEQ ID NO: 436309 - DNA, 586 bp, Homo sapiens
gaaatagataccaagtggctatgctactgtaaacaggtattatcatgttgtttcctccataattagattatagcgcattcttccaagacaagagacttgcactataactttgcttttttaaatatttgttagaaaagctgacctgatagagccaacagaaatgttgctctstttcgctgtgttctcatacatatatccacaaaggcaaaggcaatcttgatgatatctatgaaaatttatgaatgaagaaagaatgtaataattttccacatctgtactcaggtgttattaaataaatacatatttggtaacatgtaggcaaaatatgtaagtcaattgactgaatgttgcttttcacttgagcattttgatgatgggtagatattgaatggtagatattgaattaataggacaagcctacttgatctgtgatgatcagctttgaaaaactataaatttgtgttttgaggaaattaatattgtctgtattcccagaaattgttttatttaataaagctttcaaagtattggtgtggttttacataaaaatgtatttgtattattagtatcagattaagacaatctt

SEQ ID NO: 436310 - DNA, 586 bp, Homo sapiens
gaaatagataccaagtggctatgctactgtaaacaggtattatcatgttgtttcctccataattagattatagcgcattcttccaagacaagagacttgcactataactttgcttttttaaatatttgttagaaaagctgacctgatagagccaacagaaatgttgctctctttcgctstgttctcatacatatatccacaaaggcaaaggcaatcttgatgatatctatgaaaatttatgaatgaagaaagaatgtaataattttccacatctgtactcaggtgttattaaataaatacatatttggtaacatgtaggcaaaatatgtaagtcaattgactgaatgttgcttttcacttgagcattttgatgatgggtagatattgaatggtagatattgaattaataggacaagcctacttgatctgtgatgatcagctttgaaaaactataaatttgtgttttgaggaaattaatattgtctgtattcccagaaattgttttatttaataaagctttcaaagtattggtgtggttttacataaaaatgtatttgtattattagtatcagattaagacaatctt

SEQ ID NO: 436311 - DNA, 586 bp, Homo sapiens
gaaatagataccaagtggctatgctactgtaaacaggtattatcatgttgtttcctccataattagattatagcgcattcttccaagacaagagacttgcactataactttgcttttttaaatatttgttagaaaagctgacctgatagagccaacagaaatgttgctctctttcgctgtgttctcatacatatatccacaaaggcaaaggcaatcttgatgatatctatgaaaatttatgaatgaagaaagaatgtaataattttccacatctgtactcaggtgttattaaataaatacatatttggtaacatgtaggcaaaataygtaagtcaattgactgaatgttgcttttcacttgagcattttgatgatgggtagatattgaatggtagatattgaattaataggacaagcctacttgatctgtgatgatcagctttgaaaaactataaatttgtgttttgaggaaattaatattgtctgtattcccagaaattgttttatttaataaagctttcaaagtattggtgtggttttacataaaaatgtatttgtattattagtatcagattaagacaatctt

SEQ ID NO: 436312 - DNA, 505 bp, Homo sapiens
gactttgtatgaacaagattcaggcttcctatctgtaaagtagtgatgtatatctgtaggcaggtggcaggatattatacattctaacattaagaagtttgggaacctaaagacatcaaatcaagaatattaagcattgaatgtaccatgtactgttttctgtttacatcctcttgaataaggcataaaratgagcacttgaagttttgttttagggatagtctcgcacaaagtaggcatttaataaattactgttgaatgaatgaacaaaggagtgaaaaagcaaatgcaagtccctagctgtatatagaacattagcaatggtagatactaattaaatcagcctgtagaatcatattgaatgatatttgctgacccaagaagtggctagaaggagaaatatgttcagaaattttaagatgacagagaagtagagtaacttataattgtaagcaagactactaaatatggttgttttatattagtagctactttaaattttact

SEQ ID NO: 436313 - DNA, 505 bp, Homo sapiens
gactttgtatgaacaagattcaggcttcctatctgtaaagtagtgatgtatatctgtaggcaggtggcaggatattatacattctaacattaagaagtttgggaacctaaagacatcaaatcaagaatattaagcattgaatgtaccatgtactgttttctgtttacatcctcttgaataaggcataaagatgagcacttgaagttttgttttagggatagtctmgcacaaagtaggcatttaataaattactgttgaatgaatgaacaaaggagtgaaaaagcaaatgcaagtccctagctgtatatagaacattagcaatggtagatactaattaaatcagcctgtagaatcatattgaatgatatttgctgacccaagaagtggctagaaggagaaatatgttcagaaattttaagatgacagagaagtagagtaacttataattgtaagcaagactactaaatatggttgttttatattagtagctactttaaattttact

SEQ ID NO: 436314 - DNA, 489 bp, Homo sapiens
tagtaattgaaataaaagccttaatggacatattacatggcatatcagacacagttgtgtaggaaattgaggagaaatctgaagaaattgctcaargagcagttaagagagattaagaagttaaaaataaaacagaaaatggagtgatgagatacaaatacatttaatagaaggagagaatagagataattgtagaaaagcaatattcaaataaacaatgcctgagaactttccagattctataataaaactaatcttcagagtcaagaagcatatattaaaattaatcaacacctggatgcattgtaatgaaaccagaagacattaaagacaaatattaaaactgagagaaaagacagattatctataaaaggttgattattagacccagctaacaacagaaataatagaagcaacaagagtttccacttctggtaactgttgaatagctcctattggaccaatactcccacacataactataacttg

SEQ ID NO: 436315 - DNA, 468 bp, Homo sapiens
tgaactattgaagatcagtttatttgtgaaagcaaagttatgtaagaaactatttgaatgattagaatgggtataatttaccttcaacattaattgctgtttattaggattttacaaagttgtgattttaaaaatgtaatccataggataaaaatatttgaatattaataatcaaagaaatgttctgactagaaagatgatttttgatacagtttgagtattcctcatttgaaaatctgacatctgaaatgctctaaagtccaaactttttaagcactgacatgaygctcaaaggaaatgctcattggagcacatacgattttagatttttggattagggatgtggaatgtaattcaaatattctaatttttttaaatccaaaatgtgaaacatctctagtcccaaggattgcagataagggatgctcaacctgtagataactcttaacctggaagggcaaaatagta

SEQ ID NO: 436316 - DNA, 558 bp, Homo sapiens
tgttggctcttgctcctgtaaaagatcttggagtcatgattttagaaccaggaggaacttaacagtgatctagtgcaamctcttcatttgacttgtgaaaattgaaggcagtttcgagccttgaggtgaaatgcagagattattcccagtgttccctctgaggctgcaatgcctagagctctaggtagtccctgcctccgggtcctctcatgaagccgccctgggacctctcttctcagtccccacgtgacctgatcccctgcatccatggtccttgtagactcttcccttcgtcttaaaattttcctcccttggcctttgcaatactattcccagtttctttccatctctctggtttcctttccatctccttggctggatgttcctctccatgccccataaatacactgctccctatggcatgggcgggccctgtctccctactcactctacatattccttcccttgattacaatcgctgcctacatatgcataatttagaaatatgcatcttcaacccacagctagatggttgtactccagacccatagatccaat

SEQ ID NO: 436317 - DNA, 558 bp, Homo sapiens
tgttggctcttgctcctgtaaaagatcttggagtcatgattttagaaccaggaggaacttaacagtgatctagtgcaacctcttcatttgacttgtgaaaattgaaggcagtttcgagccttgaggtgaaatgcagagattattcccagtgttccctctgaggctgcaatgcctagagctctaggtagtccctgcytccgggtcctctcatgaagccgccctgggacctctcttctcagtccccacgtgacctgatcccctgcatccatggtccttgtagactcttcccttcgtcttaaaattttcctcccttggcctttgcaatactattcccagtttctttccatctctctggtttcctttccatctccttggctggatgttcctctccatgccccataaatacactgctccctatggcatgggcgggccctgtctccctactcactctacatattccttcccttgattacaatcgctgcctacatatgcataatttagaaatatgcatcttcaacccacagctagatggttgtactccagacccatagatccaat

SEQ ID NO: 436318 - DNA, 558 bp, Homo sapiens
tgttggctcttgctcctgtaaaagatcttggagtcatgattttagaaccaggaggaacttaacagtgatctagtgcaacctcttcatttgacttgtgaaaattgaaggcagtttcgagccttgaggtgaaatgcagagattattcccagtgttccctctgaggctgcaatgcctagagctctaggtagtccctgcctccgggtcctctcatgaagccgccctgggacctctcttctcagtccccacgtgacctgatcccctgcatccatggtccttgtagactcttcccttsgtcttaaaattttcctcccttggcctttgcaatactattcccagtttctttccatctctctggtttcctttccatctccttggctggatgttcctctccatgccccataaatacactgctccctatggcatgggcgggccctgtctccctactcactctacatattccttcccttgattacaatcgctgcctacatatgcataatttagaaatatgcatcttcaacccacagctagatggttgtactccagacccatagatccaat

SEQ ID NO: 436319 - DNA, 453 bp, Homo sapiens
aggtgttttcagatgtaacaaaacaccataatgaattcatgtattgctgacctttccatatctttatctgcgaggggggtgtgtgtgcatgcgagtgcccagtgccctwgactgataatttaaagtttataccagccacagaaaggaatggaacatacgcatatgtatcttatattttacagatttaataaagcagagagaaaaatatgctttcattgtctaaaaactaaaaattagctcaaaaaggacagtagtagtttttttttttattttttatagttttagagatggggtcttgctctgtcacccaggatggagtgcagcgatgccatcataacccattgcagccttgaactcctgggctgaagtgatcctccaaagtgctgggattacaggtgtgagccactgcttctggttgacactagtagcttctaaaaataaaatttacaacat

SEQ ID NO: 436320 - DNA, 453 bp, Homo sapiens
aggtgttttcagatgtaacaaaacaccataatgaattcatgtattgctgacctttccatatctttatctgcgaggggggtgtgtgtgcatgcgagtgcccagtgccctagactgataatttaaagtttataccagccacagaaaggaatggaacatacgcatatgtatcttatattttacagatttaataaagcagagagaaaaatatgmtttcattgtctaaaaactaaaaattagctcaaaaaggacagtagtagtttttttttttattttttatagttttagagatggggtcttgctctgtcacccaggatggagtgcagcgatgccatcataacccattgcagccttgaactcctgggctgaagtgatcctccaaagtgctgggattacaggtgtgagccactgcttctggttgacactagtagcttctaaaaataaaatttacaacat

SEQ ID NO: 436321 - DNA, 613 bp, Homo sapiens
aggagctttccctttttgtgtatttattttttaagaaggatatctgtatcctgatggaagggtctgatagataaatgaagtttgaatttgcataattgagaggggataattgctgaagcgatgtatttgagcacaggaaaagaaataagattctgtgggtaggtgaactggtgggctttggagaagagcacaggcccagttcacacagcaagaggagataaggatattggtgcaagtagactagtaggtgtggtggggaatgtttgtagatagtctcctatgatttagccccattgctggagtattcttttctacccaaactctaaacactggagagccccaaggctcaggtattagcttgctgcctctcctatactcatttgctgagatgatatcatttagtctcatggcttcaaatatactactcatttccagatgtttttctcatgctccaacttytccccaaactccagactcagacccaactgcttacctgatatcggtttaatatctaatgagcaccttaagcttaatgtgtctagaactgaataactgatttcttaccttccttcccaaatcagctgctcatccttaaccgtgtatgtataacacc

SEQ ID NO: 436322 - DNA, 613 bp, Homo sapiens
aggagctttccctttttgtgtatttattttttaagaaggatatctgtatcctgatggaagggtctgatagataaatgaagtttgaatttgcataattgagaggggataattgctgaagcgatgtatttgagcacaggaaaagaaataagattctgtgggtaggtgaactggtgggctttggagaagagcacaggcccagttcacacagcaagaggagataaggatattggtgcaagtagactagtaggtgtggtggggaatgtttgtagatagtctcctatgatttagccccattgctggagtattcttttctacccaaactctaaacactggagagccccaaggctcaggtattagcttgctgcctctcctatactcatttgctgagatgatatcatttagtctcatggcttcaaatatactactcatttccagatgtttttctcatgctccaacttttccccaaactccagactcagacccaactgcttacctgatatyggtttaatatctaatgagcaccttaagcttaatgtgtctagaactgaataactgatttcttaccttccttcccaaatcagctgctcatccttaaccgtgtatgtataacacc

SEQ ID NO: 436323 - DNA, 617 bp, Homo sapiens
cagcaagtctgcaaacttattttytgctttagatttataagctacttgacagctgagctctagtattccttttcttaaattttattttaacaaaaactcatatagcactgatcaagcagtgttctaaatgttttacagtcattcattttaattaccaaaacaatctcataaaatatgtactataattatactcataagaaaagcatcattcaattcttatagttggtgacacataagagatgtccattaaatgttgaactagacttcagtcatttacttaatgaaaaagcatttatttaatgtcaatgttcttgggactccactagagtatatggatgaaaaagatgattaatctcgttctcatcttcacaattaagtctgggagaatggtacaaatgggataatgaccactttcactagagggaggaatatatcaagatatgatcaagaatgaagattgtgtatgaattggtatatcataatacacagacattcaacagactgctaataggaagtcaagcattttaaccaaagaagaaaaagagagttgtggcatacttggagaactacaaagtttgttgaggccaggccattgaatgatgtacatgagtaggaca

SEQ ID NO: 436324 - DNA, 617 bp, Homo sapiens
cagcaagtctgcaaacttattttctgctttagatttataagctacttgacagctgagctctagtattccttttcttaaattttattttaacaaaaactcatatagcactgatcaagcagtgttctaaatgttttacagtcattcattttaattaccaaaacaatctcataaaatatgtactataattatactcataagaaaagcatcattyaattcttatagttggtgacacataagagatgtccattaaatgttgaactagacttcagtcatttacttaatgaaaaagcatttatttaatgtcaatgttcttgggactccactagagtatatggatgaaaaagatgattaatctcgttctcatcttcacaattaagtctgggagaatggtacaaatgggataatgaccactttcactagagggaggaatatatcaagatatgatcaagaatgaagattgtgtatgaattggtatatcataatacacagacattcaacagactgctaataggaagtcaagcattttaaccaaagaagaaaaagagagttgtggcatacttggagaactacaaagtttgttgaggccaggccattgaatgatgtacatgagtaggaca

SEQ ID NO: 436325 - DNA, 586 bp, Homo sapiens
agttctttaccatcctatgtcaggtggccgctgagagaagacttgaaaggagatgagcatagatgtatggacgctctttgttgcaccagtgtgataggtgatggagggacctattagatgrgacatgggcaggggcactcctttattgcttaaaatgcaagactaaattggtgatgcctttctagaaaggaagtatgaagatacaaaaatccatcattcctcccaattttgtactgggtgaacagtaattggaagcattctagaaggaactgtccattgtgaaatcttagttgcatactttagatgaaaaacaatgaattggagatacctctgttttagtcacagttgtgccacgtgtcagttctatgactgatggcaagacatcttccttgccctgtgtatttagtttatcaatgtaataaggctgttattctaactttattattatatatagatttgtaattattattcccttggccagtttaacagtgagaaaaaagttgttttcacacaattagctgtactttgtttctctctccccagtatgtcagccacctccagatgtcctgcatgctgagcgtaccca

SEQ ID NO: 436326 - DNA, 586 bp, Homo sapiens
agttctttaccatcctatgtcaggtggccgctgagagaagacttgaaaggagatgagcatagatgtatggacgctctttgttgcaccagtgtgataggtgatggagggacctattagatgagacatgggcaggggcactcctttattgcttaaaatgcaagactaaattggtgatgcctttctagaaaggaagtatgaagatacaaaaatccatcattcctcccaattttgtactgggtgaacagtaattggaagcattctagaaggaactgtccattgtgaaatcttagttgcatactttagatgaaaaacaatgaattggagatacctctgttttagtcacagttgtgccaygtgtcagttctatgactgatggcaagacatcttccttgccctgtgtatttagtttatcaatgtaataaggctgttattctaactttattattatatatagatttgtaattattattcccttggccagtttaacagtgagaaaaaagttgttttcacacaattagctgtactttgtttctctctccccagtatgtcagccacctccagatgtcctgcatgctgagcgtaccca

SEQ ID NO: 436327 - DNA, 509 bp, Homo sapiens
tgttgcaccagtgtgataggtgatggagggacctattagatgagacatgggcaggggcactcctttattgcttaaaatgcaagactaaattggtgatgcctttctagaaaggaagtatgaagatacaaaaatccatcattcctcccaattttgtactgggtgaacagtaattggaagcattctagaaggaactgtccattgtgaaatcttagttgcatactttagatgaaaaacaatgaattggagatacctctgttttagtcacagttgtgccacgtgtcagttctatgactgatggcaagacatcttccttgcccygtgtatttagtttatcaatgtaataaggctgttattctaactttattattatatatagatttgtaattattattcccttggccagtttaacagtgagaaaaaagttgttttcacacaattagctgtactttgtttctctctccccagtatgtcagccacctccagatgtcctgcatgctgagcgtacccaa

SEQ ID NO: 436328 - DNA, 509 bp, Homo sapiens
tgttgcaccagtgtgataggtgatggagggacctattagatgagacatgggcaggggcactcctttattgcttaaaatgcaagactaaattggtgatgcctttctagaaaggaagtatgaagatacaaaaatccatcattcctcccaattttgtactgggtgaacagtaattggaagcattctagaaggaactgtccattgtgaaatcttagttgcatactttagatgaaaaacaatgaattggagatacctctgttttagtcacagttgtgccacgtgtcagttctatgactgatggcaagacatcttccttgccctgtgtatttagtttatcaatgtaataaggctgttattctaactttattattatatatagattygtaattattattcccttggccagtttaacagtgagaaaaaagttgttttcacacaattagctgtactttgtttctctctccccagtatgtcagccacctccagatgtcctgcatgctgagcgtacccaa

SEQ ID NO: 436329 - DNA, 605 bp, Homo sapiens
caatgatagatggttctaaggtaggtcaacacataagatccttatgacctttgcagatggagggactgatgaaaaaagagggaggcggtgagtggtgggaaagtccttcattagaatcatatgaattaaaaacagatgcctgtgaatctccttattgaaatgtttggtttagaaatctgacctagaaaatcggtggctccttctgccaggaaacgtcttgagttcccgcccatgcttgacagcctctcattggagttttgatgacttgaagtacaaggaaaccagacaggaaaggtggaacctgggcagaaaaactctttctggcttcctaaaaatgtgaaaaattaaatgggagctatctttacattaaattatatgagcattagctgagcgtggtggcaattgcctgtggtcccagctactcgagaggctgagatgggagtatcccttaagcctgggaggcagaggttgcagtgagccaagattgtgccactgcactccagcctgggtgacagagcragaccctatctcaaaaacaataaaaataggcattaggaggccaaggctggtggatcactagaggtcaggagttccagaccagcccg

SEQ ID NO: 436330 - DNA, 606 bp, Homo sapiens
  misc_feature (1)...(606): n = A,T,C or G
ttgctctgttgcccaggctggagtgcagtggaaggatcatagctcactgcagttttgaagtcctcgtctcaagggatccttccactttaacatgtcataacacttcttgattagcattaagtactgcagcatttcttgttgcaatgtcaattatttattcatatgttaaagagctgataaaaatcaatacaaagttacatttttttgtggcgattgttgatatatattcattaaacaaattcatatatttccctaaagttttcctatatgatgtatgtttgaacaggattttgcaactatcattaaaaagaatgcagtatttcaacagtaatattgattctttgttaaaaatttagacacaattgtattacataaagattaaacaacttagaatttttgaaaatgcatacacattntatatactactcttttttwaaaaaaaattttcattccattccaggggtacatgtgcaggtttgttatataggtaaactcgtgtcacaggggtttgttgtacagattatttcatcacccagatattaagcctagtacccaagagttatttttttctgctccccttcctccttgtaccctctaccctcaggt

SEQ ID NO: 436331 - DNA, 588 bp, Homo sapiens
acaaaaatcttgtatttcttttaagctttcaaacaaaataattttatttaaaaatagtttcttatttaagaaaattactaaattatgaagaatataagcaattgtttttcatgatrtatcagccttgtgcttaatttgccattaggaggaaacaataatctctaagaaagctaatttagtattgtagctttttaaaatggattggattatattcccccagtgacatgttaaagtctcaacttccaataactcagaatgtgatgttatttataaatagagttattagagatgtaattagttaaggtgagattgagactgaatccattatgactggtgttcttctaaaaaggtgatgtgaagacacacggggagaatacatgtaacgggaggcagacattggagtgatgcagctacaagtcaagaaacatcaaagcttgaccaccaccaaggaagctaggagggggcatggagggattctcccctgtaggtttctgaggaagcatgaccctgctgatactgttttttagtacagctagactccagaattgtgagacaataaatctctgctgttttgagacaatcagtttc

SEQ ID NO: 436332 - DNA, 588 bp, Homo sapiens
acaaaaatcttgtatttcttttaagctttcaaacaaaataattttatttaaaaatagtttcttatttaagaaaattactaaattatgaagaatataagcaattgtttttcatgatgtatcagccttgtgcttaatttgccattaggaggaaacaataatctctaagaaagctaatttagtattgtagctttttaaaatggattggattatattcccccagtgacatgttaaagtctcaacttccaataactcagaatgtgatgttatttataaatagagttattagagatgtaattagttaaggtgagattgagactgaatccattatgactggtgttcttctaaaaaggtgatgtgaagacacacggggagaayacatgtaacgggaggcagacattggagtgatgcagctacaagtcaagaaacatcaaagcttgaccaccaccaaggaagctaggagggggcatggagggattctcccctgtaggtttctgaggaagcatgaccctgctgatactgttttttagtacagctagactccagaattgtgagacaataaatctctgctgttttgagacaatcagtttc

SEQ ID NO: 436333 - DNA, 547 bp, Homo sapiens
aggtaaaattcagaaagtctactatccaataaaaaaattagcagtcatgtgcagaagcaagaaaatacagtccacaatgaggggataaatccatcatttgaaacctactcagactggcacagatgttggagtgagcagataaggayattacacagttatgaccataggttgtatgttctaaaaggtaagtaaaggcatggaaagtacaaaaaaaagatctaagttgaacttttggaagtgaaaactacaacattcaaaatgaaaaatacactagataggattaacagtggattagacatttcgggaaaaaagatgagcaaacatgaagacatagtaatagaaagtatccaaaatgaaacatagaaagaagagaaaaaaggacagagcatcagtgagctgtaggataatttcaagtggttgaatatatatatggaattggagtcctcaaagataaggagagggaagggaagacagaaaaaaaaactatttaaagaaataatggccaaatattttactaatttgttgtaaaccataacacacagaccaa

SEQ ID NO: 436334 - DNA, 554 bp, Homo sapiens
ggagtacagggtaatctatgtaaattatttcaattatctttaactgggatgctaattttaattattctatatctttcggttaaaaagctatcaaaattcttttctacttctctacaagaactgctttcaagtatagcttattctcagctttaattttttatttatttatttttgaggacggagtctcrctccgtcacccaggctggagtgcagtggcgcaatctcagctcactgcaaactccacctcccgggttcacgcctttctcctgcctcagcctcccgagtagctgggactacgggcgcctgccaccacgcccagctatattttttgtatttttagtagagatggggtttcaccatgttagccaggatggtctcgatctcctgacctggtgatctgcccctctaggcctcccaaagtgctgggattacaggcgtgagccactgcgcctggcctctcagctttaaaggtacatccaaaatatgtgtggactctgcctcccatatcaggattatattacaattctgacctttggtttgttaacaatataagt

SEQ ID NO: 436335 - DNA, 554 bp, Homo sapiens
ggagtacagggtaatctatgtaaattatttcaattatctttaactgggatgctaattttaattattctatatctttcggttaaaaagctatcaaaattcttttctacttctctacaagaactgctttcaagtatagcttattctcagctttaattttttatttatttatttttgaggacggagtctcactccgtcacccaggctggagtgcagtggcgcaatctcagctcactgcaaactccacctcccrggttcacgcctttctcctgcctcagcctcccgagtagctgggactacgggcgcctgccaccacgcccagctatattttttgtatttttagtagagatggggtttcaccatgttagccaggatggtctcgatctcctgacctggtgatctgcccctctaggcctcccaaagtgctgggattacaggcgtgagccactgcgcctggcctctcagctttaaaggtacatccaaaatatgtgtggactctgcctcccatatcaggattatattacaattctgacctttggtttgttaacaatataagt

SEQ ID NO: 436336 - DNA, 554 bp, Homo sapiens
ggagtacagggtaatctatgtaaattatttcaattatctttaactgggatgctaattttaattattctatatctttcggttaaaaagctatcaaaattcttttctacttctctacaagaactgctttcaagtatagcttattctcagctttaattttttatttatttatttttgaggacggagtctcactccgtcacccaggctggagtgcagtggcgcaatctcagctcactgcaaactccacctcccgggttcacgccwttctcctgcctcagcctcccgagtagctgggactacgggcgcctgccaccacgcccagctatattttttgtatttttagtagagatggggtttcaccatgttagccaggatggtctcgatctcctgacctggtgatctgcccctctaggcctcccaaagtgctgggattacaggcgtgagccactgcgcctggcctctcagctttaaaggtacatccaaaatatgtgtggactctgcctcccatatcaggattatattacaattctgacctttggtttgttaacaatataagt

SEQ ID NO: 436337 - DNA, 499 bp, Homo sapiens
ttgtaaattttcccaaaagttttttttttaattccaaattaccagaagtaaatattgaaaatactattctcatctactatttgctaakgtacagacatgttcttacagttttaaaatattataagttctgctctactcagttaagtttatttcactaaatgtgtccatgtattattagagtccacttttttttttttttttttaacagatcctcactctgttccccaggctggagtgcagtggcgtgatcttggctcactgcagcccttgcctcccaggttcaagcgattttcctgcctcagcctcctgagtagctgggatttcaggcatgcgccaccaaactcggctaacttttgtatttttagtagaggcggggtttcattatgttggccagggtggtctcaaactactgacctcaagtgatctgcccacctcagcctcctaatgtgctgggattacaggtatgagccactgtgcctagcctatagtctatgttttt

SEQ ID NO: 436338 - DNA, 588 bp, Homo sapiens
cgcaatctatttcataggtaggcaataaatactgcagtagggttaagcaaaattaggctgaggaaagagcacttattttgacaatgaagacggtaatcatcagagaaaatcctgtaccctgatggcccaggggaagggggagggggccatctatactgccatggattaaggtgaggaaggaagaggttaataaagagagaagagaaaatcagccttrggaaagagagttgaagattacaatatgattaatctgtgttatttgaggaaagtgggaaaaaaaggcaaagaaagaaatgaaagatttgacacctcataataggaagaataaataataaaagagattaaaagagaagaaaacaaagcacaggtgattttcctagaggaaatagtaaacacagaagtaaggaaatgcaaagagcttaaatttacagcctgtacaattttttagaacacaatggtttttagtgttcagcattttccaaagtcaggcataagatgattctaaaaaagcaataaaacactctgttttatgtactctccatctttatacttgcacattgttttatttttaatttttttctgaaaaat

SEQ ID NO: 436339 - DNA, 495 bp, Homo sapiens
ctctacttttataatttctttctaygtatatatgaaccaacaacaaccaagtatttttaagcaaaaaaactgatttaataataatataaagtggttaacaacttattcaaaaaataagctaactggatttcattaatcacatatttataaatttaaaaaatataattgtcagagtattttgctcaaaaggtctctattttttctggaaaatatacctaattagaatatcattcagaagacaagagagtgttcttaagaagctcatatactatacggagaaaaatttacattcatactgatagatcagtttatatatatttagatattaatatttcaaacggtacatgatttgaattaacattcattgtctttttttctccttattttcaacttttcttctacttctttattgaccagtttcccaatttcttaatttctcaatgataataattgttaccatttttataaccttaagggcaggtagagtctgggaaa

SEQ ID NO: 436340 - DNA, 350 bp, Homo sapiens
agcaactccacgatgcagagataccagtgtccccattttacagaagagcaaacagactcaggtgtgctaagttgcctcacagttaagtttctaggaccagaactcaggtttgtcggatccccaagtyccctttcactaggatcaacgccacgtcttggctatagccagccgaggctgtgaatacacaaaggcaaggaatttcgtgcggcacccgctcagcatctgcgccttccactgcgctcgtcacgacttaagcccctgcacctgggaactccacgcttacccagaagcaccgagggtctccagtgcgcagaaggatcctacacccgccgccctgccgggtcgcgcgc

SEQ ID NO: 436341 - DNA, 350 bp, Homo sapiens
agcaactccacgatgcagagataccagtgtccccattttacagaagagcaaacagactcaggtgtgctaagttgcctcacagttaagtttctaggaccagaactcaggtttgtcggatccccaagttccctttcrctaggatcaacgccacgtcttggctatagccagccgaggctgtgaatacacaaaggcaaggaatttcgtgcggcacccgctcagcatctgcgccttccactgcgctcgtcacgacttaagcccctgcacctgggaactccacgcttacccagaagcaccgagggtctccagtgcgcagaaggatcctacacccgccgccctgccgggtcgcgcgc

SEQ ID NO: 436342 - DNA, 350 bp, Homo sapiens
agcaactccacgatgcagagataccagtgtccccattttacagaagagcaaacagactcaggtgtgctaagttgcctcacagttaagtttctaggaccagaactcaggtttgtcggatccccaagttccctttcactaggatcracgccacgtcttggctatagccagccgaggctgtgaatacacaaaggcaaggaatttcgtgcggcacccgctcagcatctgcgccttccactgcgctcgtcacgacttaagcccctgcacctgggaactccacgcttacccagaagcaccgagggtctccagtgcgcagaaggatcctacacccgccgccctgccgggtcgcgcgc

SEQ ID NO: 436343 - DNA, 350 bp, Homo sapiens
agcaactccacgatgcagagataccagtgtccccattttacagaagagcaaacagactcaggtgtgctaagttgcctcacagttaagtttctaggaccagaactcaggtttgtcggatccccaagttccctttcactaggatcaacgccacgtcttggctatagccagccgaggctgtgaatacacaaaggcaaggaatttcgtgcggcacccgctcagcatctgcgccttccactgcgctcgtcacgacttaagcccctgcacstgggaactccacgcttacccagaagcaccgagggtctccagtgcgcagaaggatcctacacccgccgccctgccgggtcgcgcgc

SEQ ID NO: 436344 - DNA, 494 bp, Homo sapiens
tatttgaaattagttatcctgaatttatccaccagtgcaacctgccatgtggctctatctcagtgcttaggtaaggaaagcagaaagtaacaatgattgaggtttgggattttctaaacagttgccataaggaagcaggcaaaggagtttgttactggcaggagtgctgttgaacttgtggtatagacttttgactgattaaggaaggaactgaagaaagagtgggcaartagattagaataaggggaaaggcgacagaaagttctcatgaagtcaaacgaaggtcaagcagtttgacactgaaataggtaagctgaatgcagtggagattgtatgtagacagcaggatgtctgaattagagattttggaagtggtgccatattaggacatgacaaagtctagggtgttaccaagggggtattttgttggaagtatctgcttgaaatcatgttaaatttaaacctcactctccaaagtcagtataattacactt

SEQ ID NO: 436345 - DNA, 531 bp, Homo sapiens
atataattttgtgatcagtaaaatgatattttaaagagtgatcttaaaaatatgacctggtcattgcacaacgtttgcatttgaaatgaatttktgtactatagggtggatatggagttattcagtgcaagtgtgtgcttaatatcaaaccctatgcaaggagctatgtctagatttttggtccaaatttgcctccttcaagcctactagtgtgagatggaaaaaaatcgattgctcttttaatattatttccattttgaaattctcgacacttgaatgaaggcagtagaggcctctttttggatttctcttctaataacaaaactttatttagggaaggtttccctgtgctatcgtaagtttgttttgagcactgcattcactttaaaattctggaggaacaaaggctgggcacataatcacaaagcccaggccacacaataattcggggttgtattttctaagaactatgtattgtttttagcttatagttaatattgtatttacttggaaaaatgtgaataaagttaa

SEQ ID NO: 436346 - DNA, 600 bp, Homo sapiens
tgttatcagaaatgtgtttttttaaactattatgaatgaattctatgttctgttatttgtagaatttttcagactttctcttccgttggtatctggagaaaggaaagcgaggcaaattattatctcagcccatttctcagcatggacagttggcaaattttttgcaagctcatgaacatctcagctggttacatgaaattaatagccaagaattagaaaaggtaagaaggatttttctatggagcagatgtgtgcaatttatttaggtagttttaattagttttgtttttagtaattaaaatactgtttactgtcatayacctgagaaggggttactatccaaaatatataagggagctgggcatggtggcttatacctgtaatcccagtactttgggaggctgaggcaggtggatctcttgagtgcaggagttcaagaccagcctaggaaacataaataacaaaaacattagccaggtgtggtgacacacacctgtagtcccagctacttgagaggctgaggcaggaggatcacttgagctctggaggttgaggctgcagtgagctgagattgcaccattgcactccagcctaggcaac

SEQ ID NO: 436347 - DNA, 451 bp, Homo sapiens
attttaaaaaaccaatacagtataacagctatttacttagcatttacgttgtatgaggtattataatctagaggtgatttaaggtatatgggaggatgtatgtgggttatgtgcaagtaactaccgtttttatataarggagttgagctttttggtattcctatgggtcctagaaccagttgtcagcagatactgaggcatgatgctattattttttagaaccaaggagagaggagtacaaatatagaaagacagtgaagcaaaaactctgtattattgaatttgaattggaaataccagatagaatctgatttttaaaaacaatatattttcttgcttgaggtgatgggtatgctaattaccctgtgatcattacacaacatatacatgtattgaagcatcacattgtaccccataaatatgtataattattatgcgtcaattaaaaaaa

SEQ ID NO: 436348 - DNA, 212 bp, Homo sapiens
aatgcctgaacaggaatttccaattaagtcggtcagaatcctgaacagaggatatgatgaatatattacggtataactattagtggtatctgtcagatgactttaattttaggaatagcatgatcactgtgtataatcttatacagaagagaactgaataatagtttatsttcctgaaacggtcataggcatttgagtaaaatgcagtatat

SEQ ID NO: 436349 - DNA, 507 bp, Homo sapiens
gcagctcctggctcacctcttccttggccaccagagaaggatggactcttcccccaataaactgtaggcggggggaaactggggaaaggctctgattgacttacttgggtcatrtgcccatatccacccaaacactggtcaggaggtgaagtactttcattgattcttcttgggtcacgcgcccagcttcagagccctcctaaaatcatacccctggaggcagggaagagagactctccttcagagaagggagggattactctctgaagatagaaataaaacaatgtggccaggcgtggtggctcatgcctgcaatccagcactttgggaggccgaggcgggcggatcatgaggtcaggagatcgagaccatcctggctaacactgtgaaaccccgtctctactaaaaatacaaaaaattgtgagccgaaattgcaccactgcactccagcctgggtgacagagtaagactccgtctcaaaaaaaaaaaaaaaaaaaaaaagaaata

SEQ ID NO: 436350 - DNA, 599 bp, Homo sapiens
gaggtgtgggggacgcaggagttaaatcctagtggctctccaaacaccagctgcagcctttcatgggggagtttccatcctgggctgatgcctgcggcggcttcaagagaagaaggagactctgggctcccagagtgagtgtttcacytcctctccctctccctccttgaggctgaggaaggaacaaaacagaactctgcaccagaggcactgggaggcggaggctgcagaaaaggggggtcacctgccttcttgctgaagggtaactcaaggcaggctacctcgaaggacactgggccctactcttagacacacagagagctggcccccatgcccataaagcctgtcatgtacctgtgaagggcacccctagtttgagcaaactcgcacaaaagaggggagccatgtaacactccgggagcactgagaccaaaaggcatggcagagcaggtgaggactgctgagccagaaatcaaacacgggtccatacattggatgttcattccaccagtgaggatggggactgagtgaatgtgatctggttggggcaggtggtgggcacaagagtctcatgtgacccaaaatttctcccatcaaca

SEQ ID NO: 436351 - DNA, 529 bp, Homo sapiens
aggtgaggactgctgagccagaaatcaaacacgggtccatacattggatgttcattccaccagtgaggatggggactgagtgaatgtgatctggttggggcaggtggtgggcacaagagtctcatgtgacccaaaatttctcccatcaacaacttgctatggtgtttaaaaaccacaatcaccaggttattcctgggggtaggactttatttccaagaatttcctcattcaacataaaccaacgtaaacataggaggggagacatattagcccatacacacttattgtacatttggcacagaagggattctttgacaagctagccatgtgctatcagagaccaggaacctggaaggaacaggcaatgagctgggtacactgcctcagtggtaggcagtgtggtgcaacagttaaaagggctttgcaggctgactgcctggattccgartccaactcacccacaccctcactgtaccatctgagacaagttatttcatctccctgtgccttggttttcctcctccataag

SEQ ID NO: 436352 - DNA, 367 bp, Homo sapiens
gaataactgggaagcttttgagggctccctcataagacaatacattttgttatttatggaatactcatagagagtccaataggctgtgggggtgttgattgatgtaaaaaggtaactagctgtgattattaggtaatgagactgttttttttktgtgtgtgtggctccttggctagctccaaatgaataaatgactgaaacatcaggcctcgggactccttcagaatgcatggtgaatgaagaaaggcaagatgatcaggtccctgtgtttggtcaaggttttgtgaacaagcaaggtcttggagttgaaagtaatacaatcagtattaaataaaatgatatgagagagcacctaaacagatagcag

SEQ ID NO: 436353 - DNA, 550 bp, Homo sapiens
tatagcacaatccatttaccagaagtctttctggaatgcctctctgggccattgctaggcactggcaatgcagcactaaagaagacaacacaagtccctsccttcatggggcttacactctagagataaccaaatgaatatgataatcgtgtttgaaagataccaagaagacaataaacagcacctgaaatagactggaaagtgcctattttaagggtgcatggggacagaggttctgaccaaggggattaggaagtttggcacaatgaggcttctgctttgcctgactcagacagctttcacgcctaatcatccatgtaagctggtccctgtcagggccagggtcttaaactatggacagatcctcaatgggcagagcctggtgtttcagggaggtaggggaagacagtataagtaattcagttcctgcaaaatacacctgatctgccactctgccccttcctatgtgcattgggactgtttacttaacctctctgtggctcagcttcttcataggattgtgttgacacacgtaaattactaaatggtg

SEQ ID NO: 436354 - DNA, 365 bp, Homo sapiens
cggggtgtgcaaagagaatctcagaatagcaacatggaaggccarggggatgtggctcaggacctcaggcacaggctttctgaaggtacactgacacctgggaaatgatgtgagggttcaggggtcagcgtaacacaaggttccccatcttaagcccatccaattgggagaggaggaattcgaggcctctccccaaaaaggaatagatatgagggctaggctggcagaggagccagggccatccagtagagaggggtctggggccaacggaagcagaaggatgagaaaggaggcctcaacacagggtgggtggaggaggaagagttaaggtgataattctatagcagaaaagaagaagggagaaa

SEQ ID NO: 436355 - DNA, 576 bp, Homo sapiens
gagtagaatggaatagaacaaatcatgtagacatgggcaccacatctatgatttatttagtgtctccaagaagataccctcccaccccttcccttccctcgccagagttcattgactaaattccgtgggaggtaatcatcatctttgaagagtgatgtctaagcaaagatctaaaaaactgagggagttttcacatggaaggcagaaagagcattcagatgagtacattgtgagtgaatttcctcrtctattacatggaagaataacagttcctaccttgggtgggtgatatgaaaatttaatctgttaatccagagaaagcacttgaaattcacctggcccgtaataagtgccattaagttaatagtaattacaaaattactattccaggcaaaaaagacagcatgtgcaaaaccttgatatgtaaggaagtatggtatgtccaagggatgaaagaagattggcatgactggagcatggtgaatgaagaggaaagggtggtaagaaattactggaaaggtaataagggccccagcaggcaaagctttgtgagcatgacaaggagtttgggtttat

SEQ ID NO: 436356 - DNA, 576 bp, Homo sapiens
gagtagaatggaatagaacaaatcatgtagacatgggcaccacatctatgatttatttagtgtctccaagaagataccctcccaccccttcccttccctcgccagagttcattgactaaattccgtgggaggtaatcatcatctttgaagagtgatgtctaagcaaagatctaaaaaactgagggagttttcacatggaaggcagaaagagcattcagatgagtacattgtgagtgaatttcctcgtctattacatggaagaataacagttcctaccttgggtgggtgatatgaaaatttaatctgttaatccagagaaagyacttgaaattcacctggcccgtaataagtgccattaagttaatagtaattacaaaattactattccaggcaaaaaagacagcatgtgcaaaaccttgatatgtaaggaagtatggtatgtccaagggatgaaagaagattggcatgactggagcatggtgaatgaagaggaaagggtggtaagaaattactggaaaggtaataagggccccagcaggcaaagctttgtgagcatgacaaggagtttgggtttat

SEQ ID NO: 436357 - DNA, 627 bp, Homo sapiens
cagactgtagcatagagtaagaccaaaagaaaaaaaaaagatcaattaggaagtggttgtactatcccaggtagaaaatgaaataagccaagattaaggatagcaatggacatagcaaggtctattgcagaatttgaatggataggctctgttaatgaatatgatgttgaggtgttgggagaggagttgggaaatagataccatgatggtactcttygtaccttggtgataccaagcagacaattggatttataaatctagaactcagaggagaggcctagattgaaaatataaatattggagacatcaatgtaaaagctgtatttaaatacatggaacttgagtagatcagctaggaggagaatctggagaaaaaaagattgaagaactaagaacaagctctaatgaattagaggttgggtggagaagaaagaatcagccaaggagaccaggggatatgatcaatgaagtcaaagtaccaggaaaaaaaatattattatggaagataagaacaaagagtgtttcaaagagaaggaaatcatcaacattgcccccaagctgttgagagttcaaacaagatgagaggaaagaatcaaccattggatttggtaacttggagatcattgg

SEQ ID NO: 436358 - DNA, 579 bp, Homo sapiens
ccccgcaacctgtaagcctactctagatctaacaccccagaaacactcacccatgatggtatagggacatggaaaagaatggtcctcacggtgttgattgtagcagcaaagccttgagccaacaatggtgcctgttactggggctgtaagaatcacatggtggatacactctggacacgatacaacagaattacccagatgcacattcgccaaatggataaatcctggaaaattatgccaaatggaaacagtaaaaagcaaatatacatatatatgcrtatatatttactgaaataccatttatataaacttaaatgtcatacattttaatggcatattctcaacacattagtatgcatgtttataatatatcaagggagagaataggcattgggattggggcatgaaaggggaaaatatgaaaatgaactaacacatgggcaagaccatgagcaggtagatgccacaagctccttaggatgatgacttcaatttgtacctgagatccacactaaagaaaaaagggagaaagtggctctggatgaaggtctgaggagatcacctttgagttaagagcat

SEQ ID NO: 436359 - DNA, 495 bp, Homo sapiens
ctaggcacagaacagatgttcagtaggtccttgttgaatgagtgagtgagttacaagccatatctccatggaagaacaactytctggcaattggtataagtcccttgcgaattcctagaggctgggaccaagcctgactcatctttgtaactgtggtgccttgtattatgctgaaacgctgtagtcagtgaactcaaagatggggtgcagaggaagggagagcgtgaggtgggatttcccaacaccaggccctccccactacccaaccccagaagaccagataaatttcacctactgaaggacatctttcctctccaatgcagccccaaacttcctcttctcgactcctacaggccttaatgtgtgtgcttttcggttagcccttgtcacacccggtcttttcatgtccctcatgagctccttgaaaacagaaactgcagctccttttctttattctcttggctcctaattccttgtgcagagccagtgctcaat

SEQ ID NO: 436360 - DNA, 544 bp, Homo sapiens
ctactccagtgcctttaaaaattaatttgatttagaaaatgtcaatgtatctgcaactcgtcagtaatatacctgttgctcaaagcaaatgaggctggatcccgactcacagttttaattgatgtgtattattaggatgactaacgccatctgtgggcttggggttggtttgttgttgttgtttgcaaagagaagcagctgaaaaattaaataaagaaatcatgactctaaggctctcattggttcttacttaattcatgggcatttatccaaatactcaaagaagtggaatgaaatcttgaagcacaaaactcaaattattttcactccaggacaatgaggttttctcatgaycccaaatcatgattgtagaacaccaaaacaatgaaaaacagtgattatcttttacattccaaaatgagcccttaaaactcagagacaagttttaaaagtcaaggccttggatttctaagaaccagtttggggaaacacaaaaattagctaaaattttctagccaaaagtctggatgtattgacataggat

SEQ ID NO: 436361 - DNA, 536 bp, Homo sapiens
actaaactcagtgcttgctttgttgagcatgacagtagccactggtattccatgaattctcttaacgggaggaggacatgaggacacaggcatccgacatctgtgccttcctctttggtctgcaatctcctcccctaaagtgctttatttcttggacaggacctcccctacgccattgctcccatgggcacaaagcctcatggcctaatgttggtgttagaagggatgcaggaagagaaactgacttggcaatgacacatattgagaagtatgttttaatcatcattcctgtcctatacaggtatcaagaacaaaaaatctatagtcagatctggtaggcccaaaaaaaacagtcmagatcttattagattgcaaattaacaataaaagacactgtaataaagtacagttgagctttgaacaatgtggacatgatgggcactgagccctgcaaagtcaaaaatccacatatgatttttgactccccaaaaactcagctgctgatagcccactgttgactggaagccttattgataa

SEQ ID NO: 436362 - DNA, 578 bp, Homo sapiens
actaaactcagtgcttgctttgttgagcatgacagtagccactggtattccatgaattctcttaacgggaggaggacatgaggacacaggcatccgacatctgtgccttcctctttggtctgcaatctcctcccctaaagtgctttatttcttggacaggacctcccctacgccattgctcccatgggcacaaagcctcatggcctaatgttggtgttagaagggatgcaggaagagaaactgacttggcaatgacacatattgagaagtatgttttaatcatcattcctgtcctatacaggtatcaagaacaaaaaatctatagtcagatctggtaggcccaaaaaaaacagtccagatcttattagattgcaaattaacaataaaagacactgtaataaagtacagttgagctttgaacaatgtggacatgatgggcactgagccctgcaaagtcaaaaatccacatatgatttttgactccccaaaaactcagctgctgatagcccactgttgactggaagccttattgataayataaacagtcaattaacacatattgtatatgttatatgtat

SEQ ID NO: 436363 - DNA, 576 bp, Homo sapiens
agctattcacacttgatcacacaataaaaccattattagaaagacttcagggaagagaccaccaatgtactttcttcctctgtaaaaatcagccagagacaagcatttgctataaaattatctgggtttaattattatcaayatcagaactatagaacattaacgtactaaacctgtatttacaattacatgtacaaaaaaaaatgttctttgtgaggagcaattttcagcaaatctgacaaacagcaagagtcattcctattttgggtttgaaaagagaaatggaaatttccaagacgcccccctcctccctctcactccagtgaccctctgaacatcaatttgcaaaggcctgaggtagaaagggaggtattaacaatatcaggcactcattcttcccctcttatgaaagggatgaatttttaggaaccgttttccatcatttattatactgatgtgccatccatctgcatcattaggttcagtagttaccatgacaatatgatgcctacagcaatctaacttgatagccacatgccagaatgtgaaaaaataggaccagctaagaaagtgaga

SEQ ID NO: 436364 - DNA, 576 bp, Homo sapiens
agctattcacacttgatcacacaataaaaccattattagaaagacttcagggaagagaccaccaatgtactttcttcctctgtaaaaatcagccagagacaagcatttgctataaaattatctgggtttaattattatcaatatcagaactatagaayattaacgtactaaacctgtatttacaattacatgtacaaaaaaaaatgttctttgtgaggagcaattttcagcaaatctgacaaacagcaagagtcattcctattttgggtttgaaaagagaaatggaaatttccaagacgcccccctcctccctctcactccagtgaccctctgaacatcaatttgcaaaggcctgaggtagaaagggaggtattaacaatatcaggcactcattcttcccctcttatgaaagggatgaatttttaggaaccgttttccatcatttattatactgatgtgccatccatctgcatcattaggttcagtagttaccatgacaatatgatgcctacagcaatctaacttgatagccacatgccagaatgtgaaaaaataggaccagctaagaaagtgaga

SEQ ID NO: 436365 - DNA, 554 bp, Homo sapiens
ggacttacgaggcccgttgacctggatgcctcctgaaagagttttagttttggaattactaaagatgtaggaacagaagtctgctacttgttgcacaaattcggggtccagctcttcatcttgtagtttctcgagctgggcaagcttcctgcggtgaacgggccgatcaaagacaaagcattttttctttgggaagaatttccggatacagagtctgggcaggttaaaagtttcatctttttgactggtacctagaaaaacatttaaaaaattataaaattgcctaatataagtgtttctgtaaagggccaaatagtaaatattttaggctcttcaggctggatggtctcttttccaagtattcaactctgttattgaagcatgacaacagctttagacaayatgtaaatgaatgggcatagcattattccaaaaaaaccttatttacaaagacagctggcaggcaggatttgccatgatttgtcttgggctgtagtttgccaatgcttggactagcacacggttcatgttttagtctatgttctttaaataaa

SEQ ID NO: 436366 - DNA, 564 bp, Homo sapiens
acatataagattggtactattagttgctattttattgaataattaatatacacctgwaatgtattatcttattaaatattcaaaataatactatatggccaacataggtcttttccatacattttaaagattagaatgctgaggcgaaaataagtcaattttctcaggctactgaattagtgacagaatttaaatttaaatacaaagtcacatggctttagcacccaaattcttaactaaagttctgtgcaggataagacttatgacactgggattatttgtgctccctttatgcatctgtgttaacccacacatattacagcctgtagttaatagttaataaacaattaaccgctgcataaaatattcagagaggaggggcttactccacaactggatccttgagtctcaccttctctacatctcccagaccctcggtgtccagcagaactaggatgtggcctggcttcttggggtggggcacacaccacatccagattcctttagtgtgagactgcaccgtggagcccagagagaagcctgcaagggagagaggagaccagc

SEQ ID NO: 436367 - DNA, 564 bp, Homo sapiens
acatataagattggtactattagttgctattttattgaataattaatatacacctgtaatgtattatcttattaaatattcaaaataatactatatggccaacataggtcttttccatacattttaaagattagaatgctgaggcgaaaataagtcaattttctcaggctactgaattagtgacagaatttaaatttaaatacaaagtcacrtggctttagcacccaaattcttaactaaagttctgtgcaggataagacttatgacactgggattatttgtgctccctttatgcatctgtgttaacccacacatattacagcctgtagttaatagttaataaacaattaaccgctgcataaaatattcagagaggaggggcttactccacaactggatccttgagtctcaccttctctacatctcccagaccctcggtgtccagcagaactaggatgtggcctggcttcttggggtggggcacacaccacatccagattcctttagtgtgagactgcaccgtggagcccagagagaagcctgcaagggagagaggagaccagc

SEQ ID NO: 436368 - DNA, 478 bp, Homo sapiens
tttgacaaactgacagaagtaggcttcagaaggtaggtagtaacaaactcctctgagctaaaggagcatgttctaacccaatgcaaggaagctaagaaccttgataaaaggttatgggaactgctagctagaatattcagtttagagaagaatataaatgacctgatggagctgaaaaacacagcacgagaacttcctgaagcatacaaaagtatcaatagccaaatcaatagtggaagaaaggatatcagagatttaagattaacttactaaaataaggtgtgaagtcaagattagagaaaaaagaataaaaaggaaggaacaaagcctccaagaaatatggractgtgaaaagaccaaatctacgattcattgatctacccaaaagtgatggggagaatgaaaccaagttggaaaacacacttcaggatattatccaggagaacagcaagacaggccaacattcaagttcaggaaa

SEQ ID NO: 436369 - DNA, 573 bp, Homo sapiens
gagtctaggaatttgagaccagcctgagcaayaaagcaagaccccatttctacaaaaaattaaaaaataaaaaaaaattatctagaaatgatggcatgtgcctatagtcctagctactcaggaggctgaggcaggaggattacttgagcccaggagtttgaggctacattgagctatgattgcaacactgtactccagcctaggcaacagagcaagaccctgtctcaaaaaaaaaaaaaaaaaaagaaaaaaaaaagaaatatggtcaatattggtccaaaaggaaaggaaattttcatttctgagaaaaaaaaatatacgtatatatttttgagacggagtttcgctcttgttgcccagctggagtgcaatggtgcgatcttagctcaccacaacctctgcctccagggtaggaaggaagttatggcaaccagctggtaaatgcatttccaagttaaatgtcaataaaacatagcacctatgaacaatttttggaattttaaacatgttagatcaggaagcagtctttaacacacagcatgtagcctttccaccatctgacttacttttgtc

SEQ ID NO: 436370 - DNA, 561 bp, Homo sapiens
ctttgttttcttctctagttgattttccattttcatgttttctaaaataggtagtcattttaaaataaaactgttttagaaaaagcttcagaagaaatggggatacttgaatacttgtatgttactatttctatgagaggagagcactccaagcttgtggaaagctgacaaagttctgcaggacaaatcatttaaaatcatttaaaagctggtagcttttcccattctggttaataaaaagtaaccatgtgtaccatatccagaaaaaccaattctcaagcactaggatgtctgacactagaagatgtttaatgcaatttaatatccttttgataatttgaaaggcaattcacaatctcatggttcctcattgtcatcataaaaaacaaattctcactgactatgagtctaagataagcctggttatttgagttttcatttttgtgttcttcctgamagggacttagctttatatgtttaacaatttatatgagcacatgtggatgcagatggtaagattgtgacatcaatccttagctctcttataccaaagttacatag

SEQ ID NO: 436371 - DNA, 543 bp, Homo sapiens
gaatttgcaacttcttcctcattcccccatattcccaatgagaaatggagagttcatgacagtaactctctggctgcattgaaatctgagtgcattttaaaatacttgaaatgaatgtagaatgggaagaacrgtaaagatatcagacttaaaatattcagtagaattcaacactttctaggcctcattgagtcgaaagacattaaccaaccatcttcattatttatacccctattctatccccactcctttcactaatagtttttattcacaaatctttaaaatccttttagacagcaatctgtggttttcaattttccttttgaaaggagttgaagtcatttctattttaacatgtaaacattttttcttagctagggatagaaaagattgaatacggtaccagcagctgggccttaccttcttagaatcctaaaccccgatctggaagggacattagaaatgatttatccttatttgtcccgccctcatctcctctgacacccacaatcaattaatgcatttggcttgattaattctaag

SEQ ID NO: 436372 - DNA, 543 bp, Homo sapiens
gaatttgcaacttcttcctcattcccccatattcccaatgagaaatggagagttcatgacagtaactctctggctgcattgaaatctgagtgcattttaaaatacttgaaatgaatgtagaatgggaagaacagtaaagatatcagacttaaaatattcagtagaattcaacactttctaggcctcattgagtcgaaagacattaaccaaccatcttcattatttatacccctattctatccccactcctttcactaatagtttttattcacaaatctttaaaatccttttagacagcaatctgtggttttcaattttccttttgaaaggagttgaagtcatttctattttaayatgtaaacattttttcttagctagggatagaaaagattgaatacggtaccagcagctgggccttaccttcttagaatcctaaaccccgatctggaagggacattagaaatgatttatccttatttgtcccgccctcatctcctctgacacccacaatcaattaatgcatttggcttgattaattctaag

SEQ ID NO: 436373 - DNA, 543 bp, Homo sapiens
gaatttgcaacttcttcctcattcccccatattcccaatgagaaatggagagttcatgacagtaactctctggctgcattgaaatctgagtgcattttaaaatacttgaaatgaatgtagaatgggaagaacagtaaagatatcagacttaaaatattcagtagaattcaacactttctaggcctcattgagtcgaaagacattaaccaaccatcttcattatttatacccctattctatccccactcctttcactaatagtttttattcacaaatctttaaaatccttttagacagcaatctgtggttttcaattttccttttgaaaggagttgaagtcatttctattttaacatgtaaacattttttcttagctagggatagaaaagattgaatacggtaccagcagctgggccttaccttcttagaatcctaaaccccgatctggaagggacattagaaatgatttatccttatttgtcccgccctcatytcctctgacacccacaatcaattaatgcatttggcttgattaattctaag

SEQ ID NO: 436374 - DNA, 583 bp, Homo sapiens
gaatgtgttatgcaagccgaaaggaaatctagaaatattacttagtatctttagtcttccttttcaaatatggtatctatctgaaagtgaaaagccgccatctgctacaaggctctacaaacgagtctattgcactagacactggagactcaaggctagtgaggaatgaagtacaatgatcaagtcattgagttaattatcattaarctttgactctcatcttaagattcaaatgtatactttgttgtagtaatttaatcatttctattatttttttaacactgtccaaatccttttagtaaaaactcaaaatgggactgagttctctaaaaaaagattgagagctataaaaggagggagaataaatagtgtgttcccaaccatataaatggaaggaaaggagaattgacactgttgacttgtcatcttgggatatggaaaatcatctttctagccatagttgggccctctgtaatataatcttgcttactagttagccaaccctaatactagaggtgggattatcacagagaagttctagccctattgtgtcaatcacagctctttgctagttaaggaacaa

SEQ ID NO: 436375 - DNA, 471 bp, Homo sapiens
tagataaattcgtttttgtttgaaagaagtagtacagaatccaaacaatgtcttatgcaatgattatcaccttcaatgcaaagaaggaatatttaccagctgcctctttaaaaaataagatataattcacatatcctaaatgttactatgtaaaagcatgcaattcagtgctttttagtatattcaaagatttgtgtgaccaycatcacaatctaactggaaaacattttcatcaccccaaaagaaaccccatagcagtaacttcccactgtcctaattccccagcccctgaaaaccatgaatctactttctgtctgtattctttgtggaagtgtctactcagaatatttcatataagtggaatcatacaatatgtgacttctcgtgcctgacttctttcacttagcataatatgttcaaggtttcttcatgctgtagtatgtatcaatacttcatttttatggctgagta

SEQ ID NO: 436376 - DNA, 594 bp, Homo sapiens
tgtcacgcacttatcctccatttaaagcatctttccctaggcctcctactatgatttggtggctacaaaatcagagttccaagaaagacaaataatttactttcatcgtttataaaatccatttcttttattctttaaatccattctattggctctcacagaacacgagtaatacagaaaaataatacctcgtttgtgattgaactgtagcaaaatttcacagtaaaatttcaaaaagcaaaaatttcaaaacaaaaattgtcattatcacttacttaatgactatgttactgaatactcttttggagaatctaattcatgtacacagacacacacatacatatatatataattytcctgtgaagagctatgctatataaagagatttgtaattattgtaatagaaggtaagatatcttaaaaaaaaaaatagtcccataaacgaggcttgctactgacctcagtcagtaaccaggaggctttcatgtggcatctactaggtgcttgacactaaataatgcaaaaatgcaaaacgtaaacatttgctttggctatatccagtctaaggctgggcacacgacagtgaccggcagg

SEQ ID NO: 436377 - DNA, 496 bp, Homo sapiens
ctgccctctaattgaggggattctaccatctaattgagtttaccctcaattagacttagagacatgaattcaataacaactactacatactgaatactaatgctggcagccactgttcaaaatgtctgatatgtattaaatcgctaaatgctcacaacaatctataaggcagataagtcttagtatccctattttacagataaagaaagcgaggctcagagaatttaagctattttatccaagtcatatagctagtaaatgctggaggcagaatttgattccaagtactctgacccccaatcctctgtatttacctaggccatgttgcctcccataaaaacaataaagaaatgctaaatgtcatgtggcactatggacaccagtactatatggttgggaaagcaaagaaggttactttcagaaaataacatttcacctgggcttggactttttwtttttaacatagaatttattttttagagcagttttaggtgga

SEQ ID NO: 436378 - DNA, 554 bp, Homo sapiens
tgttaaaatcgagaacttgaggtaatgagagcacaagccagaaatggtggctccataattaatcccaatttaaaaagtcatttgcttattagaaaacagcatgatgcagtgaaaagagtttggaattagtctggttttgctttccaacttttgtatgatgaaacggattgaaagcaaagcctaatgaaaacaaaggtcttctatgatgcagtttaagtgccttctgaatctcactttcctcttctgtgaagttgacatcaacactttcwttggaataaatgttctaggcacagaagatggcagagggtatttgataaacattatcctatagaagcaggattgttgatactgttacagaaaaaatcatgaagactgtcaggaattcccaaattcacaaacacagaaatgtatctttgggctcctgaatttctccattcatatgcttctaaagttacacatttcctatgcacagattcacagagaaattgtctaaatttgtacctttcaataaatttttaaaaatatatatatgggtagcaacttttgcagtagct

SEQ ID NO: 436379 - DNA, 591 bp, Homo sapiens
ttaggtgagtaaagagaaattagaaattttaaggaacactaaatattagtttcaaagtgtccttccaatgtgatgtacaacattaaatactgtgtaaaatactttgggacagtgggtctattttcagtaattcaccaataaaaatattttactatagtaattttaaatgttctaagaccacggtgttaaataacttatactcagtaaaaggaggttccatgctggagtagtagaagtgtttgggacaaaaawataaaataaaataaaaaagattactcattcaatttagcctagttctagctcagatttcagacaattcaaaataagattagaaatgagaagctaatttatcactcaagggacagaagcctgtttgtggacactcaattataggatcgggactttgcatgtgaacgccttctacatagcttcttgcccagatctcaggctgaagtattctctggtgatgaaaacaattccaaaaacaatgaatgcctttgttctggacacacctcttccattcagttgtgttctctatcactccctcagtatcagatcttcttttcatttttctcccatctatgcccaggg

SEQ ID NO: 436380 - DNA, 542 bp, Homo sapiens
taaatcttctgatgtttccaaacttgtgcctctggcctcctgacagtcccataaacttgggaagatgaatggagtgtctgttttaaagtcatctttaacattttatgcatgggcatgaacttcaaattccagagaccgagttcatttgctgctacattaaggatccaggtggaggagaataagtcaccgagattcaatcatcttctgaaatattgcttacctgagagtcccttcaagatagagtaactgctggagacccccatgtgcctctaacagctggactttggtccttcaaagcctaaatgatccatttggctacattttattttyttcaactcttttcactcttccagatggtaaaatgcaaaaatcttaatattctgcaatggccaagtagctgccacacagtttcatgacccatcactcactctctgattatcctgtctttatgtatgaatgagctcctacataatgccatcagagtacacgacactgcacatcagtatctagcagagtacctacaggaccaaaacaggccagta

SEQ ID NO: 436381 - DNA, 542 bp, Homo sapiens
taaatcttctgatgtttccaaacttgtgcctctggcctcctgacagtcccataaacttgggaagatgaatggagtgtctgttttaaagtcatctttaacattttatgcatgggcatgaacttcaaattccagagaccgagttcatttgctgctacattaaggatccaggtggaggagaataagtcaccgagattcaatcatcttctgaaatattgcttacctgagagtcccttcaagatagagtaactgctggagacccccatgtgcctctaacagctggactttggtccttcaaagcctaaatgatccatttggctacattttattttcttcaactcttttcactcttccagatggtaaaatgcaaaaatcttaatattctgcaatggccaagtagctgccacacagtttcatgacccatcactcactctctgattatcctgtmtttatgtatgaatgagctcctacataatgccatcagagtacacgacactgcacatcagtatctagcagagtacctacaggaccaaaacaggccagta

SEQ ID NO: 436382 - DNA, 599 bp, Homo sapiens
catatgcacgcacacaccacacacactcacacactaacatgtgaagtcaacagacaaaagtaatctggtctagacaaacatacttgacgaaatgaaaaaatggtagaaacagtggactaatttggggtacaagaaagcatccagaaagcagttagtggatttttgcctctgaaaagtatttaatccctaaatgccctttatattttgtagcagcccacacataatttaatgtcatgtttatttatgtaaaatcctctgcatggcactgaaattgagtgaaacagccactgcataccccttgaggaaattaaaaggcaagccaaccaacagtgttgcagacagagctagggacatacagataaccgaatcaacattagacacagcaaattgtagcacatggagagccctcgtgragagcaaaaaactttttgtaaatttgctataccctcctgactctgtttctccacagagccagaggtcatttgtagctaagacataaaatctgcacctgagttgcaggactcttcctgtgccaggagctgccatgtgagaaatactgcagctctcactcaagggaactcatgggttttctccctttg

SEQ ID NO: 436383 - DNA, 558 bp, Homo sapiens
aaatgcaggcaaaactacctggggtcaggggagtcaactgagcctctatacaagggaacagaatttacttgtctatagctaaaaattattttgcactgctatcattcatctacaatttaaataattataaaatagctttcatagaatcagataactaccagaagggtatgctacagacaaaatgcatatttttctgctgaggcacatttttctccctataccagtgaattatttgagctcaaccttggcccctaggatccttaraaatcagttataaccacacatgaaagtcaaatgcacaagttctctcagacattatcctgaccaccacttgcctttcgtcgtaccaaaaaaatcagaagcatattgttttcagccctacaattttcccatttgcaaatgaggcatcccaatgatatcacagcaggcaagaaaagtgctgatcattctggatgatatgaccagagtgtgtcgcctgcataatgtgattagtgctggtactctttgggaagatgagacagcccaatttgtaagagacttaaactcaatgtttccaat

SEQ ID NO: 436384 - DNA, 599 bp, Homo sapiens
aagtatgttagagtcaggtaggcttagtcttgatacctaattctatcatttcaaactgttataggcaattgataaagtatcttccctaagagttaaaatatctttcaatgaaatttcaaactttttcactagcctgatcaattatttacatggcttcctgaagttccatattaaccacattttgctttggtttaagcaaatatcatcttctactttacgtgattggtggaagctgtgttttataaatactttatattaagatttttaaataagatgtagtgatttaaaaaccagagaaatgatattgtcrcaaacatggaagcagaatagctctgccaactcctacttgtggagatcgctctgatctccaatattgagcaattaacatttgagttatctttccatgagaagttttgatgaaattttaacggccctctccctcatttccaggatggaggaggattgcaggggctgaagggaaggaatacggaggtttcagaacccacaagcaagtggttcttggcataccctctgccatatgcaaaatttgggcatctcttctctcttctatttaggatgttcatttcttccaaagaact

SEQ ID NO: 436385 - DNA, 584 bp, Homo sapiens
tctgcctcgctgagcaggccgaactccatggagggagggctctggaggcgagagaagacacagaccagggtaatgggggtaaaatctccggcttagctaggtcccagcagcgtttcctcgtaaattccctggcgcctttctcaaccccagccgtaaagctggggctgcgtggggctccttaggataaaatcgggaaatagcatcctaaggacgcataggtgcatgctgagaggttctctgcatagatatataaactagacttcgtttcgtttactgctgggaactagaactgtgccaggtatacagttggggtycaatatttattgaattaataaaaatgtagactataggccgggcgcagtggctcacgcctgtaatcccagcactttgggaggcccaggcgggtggatcacctgaggtcaggagttcgagaccagcctggccaacatggtaaaatcccgtccctactaaaaatacaaaaattgctgggcggggtggcacgtgcctgtaatctcagctactcgggaggctgaggcaggagaatcgcttgaacctgggaggcggaggttgcagcgagccgagat

SEQ ID NO: 436386 - DNA, 599 bp, Homo sapiens
cttcctttcacaggtcaaaatgtccttgtccattgaatcagccaatgaggatcaggagaccgagggcggagcgaggctggaggaggtgttcctggctcctcgcctgccacttagagttggcctttactgcagacctgggctcctctcaggctctagagagttgccctcctcaggtgctggaagccaccccctcctcttcacccgcccatccagggtccayggaggcattctgcaattgctagccccagacccactttccacatttcggtagtttgtgagtaagccgtttgttttctgggggcgatcttggctgacacagagtgacatgcaagtcccaatttcccctacaaaatgcaaacccctaagacagggcagtggaatagaaaagtgaggggacaccaaaggcagaaagaagacactagtccaccttcctgagtgaaccttttgggagaaatctgtgtgcaaagtcaacttgacctagtgaagaaatcaaaggactggactcaggccaccagggaatcaactttcactctcagctctcctggctcctcaactcccagggcagtgtggtgtggctctgtctgtctgtccgtctctcc

SEQ ID NO: 436387 - DNA, 623 bp, Homo sapiens
ttgattgcatgtagtttccayttcacaataatctttaatctgggtatttcctcagtctgtctttcaagactttatgcttttgaggactgctggccagttattttatataatgttccctatttcagcttgcctcacatttcctcatgactgaatttcagtattatattggtgacaaaagagatgtattcttgacacattgcactggtgatgttaactttttagatcatttgattaatgtagtttttggcttgtttttctaatggtcaggaaatctgcctttacaatgtaattctaattaaaatgtggagaaggaatgatagaaatagaaaatcatttggtagacaccataggtggtggtgtctgcaggtcatccccatcaagagagaagtctggatcttcagtagaattcccaactgatgaacatagaaggaatgataaaaaatagaaaatgcagtgggggggactccacagtaattattgtttcaagcaaaaatcatcactggatgcttaaagtagcacccgaaatgtgagaaacaaggcatgtacaacctcaaagtatctctctacatgatatgtattaattacaaaggggaaatagtaactttacagcaaaaaacttagca

SEQ ID NO: 436388 - DNA, 453 bp, Homo sapiens
gaccccgggaaacggtgctgaggctgtcagggcttgtggatgcctagagaagatgaggggtctcactcagtgaactgaaaatgctggaactgccatggcagaggaaaagagaagaacaaagcttcagaagagtgatgtgctgtggagagccagccaatgatgatctgggaaccaagtgtcagaagtaggagtggcccctcatcaccctcttcactgacctggggagctacrttccagtcctgtggcttgggctctggaggtccggagactctaggctcagagggctgtttccaccggaagaggctctcgctccttctgaagtcatggatttccccccccagtgcctcatgccaagattccaggaggaaaggaatcgtgaccccgcgggggacctggccccagtgtttagctacagaggccctgacagagaggcgtgctgggcaactgccacca

SEQ ID NO: 436389 - DNA, 543 bp, Homo sapiens
actgggacttctgtgttgctagcttgcctgccccctgcctctcttctctctttctgtttctctmtctcagtcctcccctccacttatctcttccgaaatgcttgccttgacagatgcagctagaaagctcacatgacaaaaggctgagggcagcctccagccagtccccaactaagaccctcagctcaatgccctcaagaaagtgaagcctgacgaagctacattagtgagcccagaggtggccctctccagtggagcactgaggtgacaccagcctggatgacaacctggtcccagcctgggaaaggctctgagcccaaggaccacctaagtcatggccagatttctgatccatgagaactggggtaatatgtgttgttcgagccactttacacactgaattgtgtcccccctgaattcctatgtgaaagacctacccctcaatgggactgtatttgagatagtgtgtttaaggaggtagttaaggttaaatgcagtcatgagggtggagccctgatgcagtggagctggtgtctttataag

SEQ ID NO: 436390 - DNA, 543 bp, Homo sapiens
actgggacttctgtgttgctagcttgcctgccccctgcctctcttctctctttctgtttctctatctcagtcctcccctccacttatctcttccgaaatgcttgccttgacagatgcagctagaaagctcacatgacaaaaggctgagggcagcctccagccagtccccarctaagaccctcagctcaatgccctcaagaaagtgaagcctgacgaagctacattagtgagcccagaggtggccctctccagtggagcactgaggtgacaccagcctggatgacaacctggtcccagcctgggaaaggctctgagcccaaggaccacctaagtcatggccagatttctgatccatgagaactggggtaatatgtgttgttcgagccactttacacactgaattgtgtcccccctgaattcctatgtgaaagacctacccctcaatgggactgtatttgagatagtgtgtttaaggaggtagttaaggttaaatgcagtcatgagggtggagccctgatgcagtggagctggtgtctttataag

SEQ ID NO: 436391 - DNA, 604 bp, Homo sapiens
gatgtatctttctaatactgtgtgactcgggttatttcatttatttatttcatcaattttgttcttttgttttcctagagatttctaggaatgacaaactgatcatggtttaatacaaactgtgaatcttgtcctctcctgtgtgtgacttacggggtaatgaatggcgggggtggggtaatattttgcagacactctccggctttctgtcttcaggcagtgttctgtttgatggatcagctgcaggtcacacatccatttccgtttagtggtgcagwcggcctgcgtagttccgtgtctgtgggtctactctctggcactgctctgttaagtaacacagaaaaaggcccgtaattgaaagttggccaaaagggttagggtttccctctttttatttcccttttttttcctaccaattccttcaaggccaagttctagtcaaatctcacttatgattcccccttttttttttttggctttgctgatcaatattaacaagtgttatattctattagtggaatagtttatagattataaattacttggtttaaatgtaattatctttcttgtggttgattatttcagctacctggtgagaaaggta

SEQ ID NO: 436392 - DNA, 662 bp, Homo sapiens
atatggtttggctctgaccccacccaaatctcatcatgaattgtagctcccataatttttacataattctcacgtgtcatgggagggacccaatgggaagtaatttaatcatgggggtgggtctttcccatgctgttctcatgatagtgaataaatctcacgagatctgatgattttataaaggggagtttccctacacatgccctcttgcctgccactatgtaagacatccctttacccttccttcatcttctgccttgattgcgaggccccccagccatctagaactgtgagtccattaagcctctttcctttataaattactcagtcctagatatgtctttattagcagcatgagaactggctaatacaatacttactaagcagttaggtttaaacatcttaataagtgcttatatcctaaaatgtggtagtcatttaaaaaataatatagatatattgaatgaaaaaatatttatttcacttttaaataattagtaagatcatatgtatatctgttgggaacttcataatyggacaaatcttggatcagattgaacacaacacctttaattcctattcacactgtcgttcatgtgggacttgcttttcatcacagtaatagtaaaaaatccagttttttaccaagatatgatgtcatc

SEQ ID NO: 436393 - DNA, 511 bp, Homo sapiens
tgtgactgtgggattcatgggctctctcacataccacagctcccacaaggctgctggcctgacagagcaacagggtggccctttgaaggcagacctaaggtgcaagcttgtgataccatgtgacaatggatgccatcctccactatatgttatgtaccccaaatcaaacaccactaggcaggaaggtcaaacttcattcatcgctgagctgactgcaccaaaatggtggctcagagctgtytgctgtgccctcaataggtagaatgcttggggccatgaataatggtgtggaaactggagtggctctgccaatcccccagtgattcacctggaaaatgtatttttcttgtagctaaaatttgagactctgtggatctataggcaaaatatatccacaatgatacacagcaagagtcccattaactttcaattatgcctctcgttcagtcacttcaagctccttgtgccaagagagcagcagcaaggagaagagctacccatcctagctaag

SEQ ID NO: 436394 - DNA, 511 bp, Homo sapiens
tgtgactgtgggattcatgggctctctcacataccacagctcccacaaggctgctggcctgacagagcaacagggtggccctttgaaggcagacctaaggtgcaagcttgtgataccatgtgacaatggatgccatcctccactatatgttatgtaccccaaatcaaacaccactaggcaggaaggtcaaacttcattcatcgctgagctgactgcaccaaaatggtggctcagagctgtttgctgtgccctcaataggtagaatgcttggggccatgaataatggtgtggaaactrgagtggctctgccaatcccccagtgattcacctggaaaatgtatttttcttgtagctaaaatttgagactctgtggatctataggcaaaatatatccacaatgatacacagcaagagtcccattaactttcaattatgcctctcgttcagtcacttcaagctccttgtgccaagagagcagcagcaaggagaagagctacccatcctagctaag

SEQ ID NO: 436395 - DNA, 511 bp, Homo sapiens
tgtgactgtgggattcatgggctctctcacataccacagctcccacaaggctgctggcctgacagagcaacagggtggccctttgaaggcagacctaaggtgcaagcttgtgataccatgtgacaatggatgccatcctccactatatgttatgtaccccaaatcaaacaccactaggcaggaaggtcaaacttcattcatcgctgagctgactgcaccaaaatggtggctcagagctgtttgctgtgccctcaataggtagaatgcttggggccatgaataatggtgtggaaactggagtggctctgccaatcccccagtgattcacctggaaaatgtatttttcttgtagctaaaatttgagactctgtggatctataggcaaaatatayccacaatgatacacagcaagagtcccattaactttcaattatgcctctcgttcagtcacttcaagctccttgtgccaagagagcagcagcaaggagaagagctacccatcctagctaag

SEQ ID NO: 436396 - DNA, 587 bp, Homo sapiens
aaccccaaccggcctgcgccctgggagaatggggtggagccacggaagttcacgcgctttgcagaggggaggagcctggcctctcctgatcctggatagtacctgagattcaatcgctgaggcgggaaaaccsgctagcaggactgttgctttgctgagagtccctgtttccctttttttccttttggcccgataaattccatttttctcacccttcaaaatctctgtgaccctaatctctcatggccatgtgacatgggccctaaagagaaagtcctacaacaatagctttcatatgataatatcagtgataagctgtcgtttacaatggacgcctctcaggaaggtgtccctcaataacttgaacatttaaaaaattaaaagattgattgtagagagtccacctatgaaatgagcacatattagggcagagcgagaaaatcaacgtaaagaaacagagcagctggcatgtctacaaaactcaacttgaacatagtgggggatattagcataaccgaagaaaaccgctgtcagcagtttgggagggaaggactgggtctgaacacacagacaaattatagcaagag

SEQ ID NO: 436397 - DNA, 568 bp, Homo sapiens
gtagaaaacaggtgtgagccattttgtcctcaagaatctacaaactgttgtgtgtggacggggcacaggtatgaagttatagaccagtaagagatggggctagacacacaggcatggagactcctccccagccatgtgcaggagatcactctaaggtttgtgagcaaggaagtcacctacyatttacttctgcaaaggtctctatcattacagggtgactactctgcccagtactattgtaaatacttcccatacattgagctgcacactggggcttattattctcattttactgctgagaaactgagtccctacctcttgggcccttgcccagagccacacatgtggcagctgcagagctggtgccttgacttgggtcccctgagcctggagtcttgtgcacacaactgccgtcatgctacactgccagcgggcaggtagactgagaccagggcatggcccctcatctgcatgtaagcaaggctgctgcttctctgtgtgggtgatgctggtagggtttcctaacccaggccaacaatgaaaacattaagtaacactgggttcaggg

SEQ ID NO: 436398 - DNA, 599 bp, Homo sapiens
aaatggcagagacaggattcaaattcccatcttatctcactccaacagcaatgtcctttcactattccacacgcacgtagcaaggaaaacaggtaatgattattcactaggattcagttccaaacctactttctcyaagactatcacttgcagtcccactggccgggcaccattaattttgtgcttccaatcctccagatcaataggcaggcaactgaatggatggaatatatccaatctatttcctaaaatggctacagtaactggattgattctgctgtggtccagttatttcagatataaagacagtccctaggaatggattatctagcctgaaatgtctctctgataaataaattaacactgcatttgtcactaacaccatttgcatttgaatgaacttctcagacatctccgcaagaaaaaaagatcccatacataacccagcctctgggaccccttttgcaacacactgcaaagaataatttctctgaaagtgaccctgatgaaaaagcatcacttgcctaattgttgtgaaaatgaaagctttatcttgtgtttttctatgccctctttccacaaacacattaggaggcaat

SEQ ID NO: 436399 - DNA, 571 bp, Homo sapiens
actttcaggggagaataaaatagaatggaaaagagtagaataaaataacccagaccaacccactcaagtccaaggtaaccccaaagaaagacttactaattgtgatctcagcaatcactgagatactaggtgagcctcttccatcattgctagtgtctcactggagtactacatcttagcaaattctttattattattattattattattattattattattattattattattttttgagacrgacactcgcggcaacacccaggctgaagtgccgtggtaaaatctcggctcactgcaacctccacttcttgagttcaagtcattctcctgcctcagcctctcgagtagctaggactacaggtgtgcaccaccaccaagcctggctaatttttgtatttttagtagagacagggtttcaccatgttggccaggctggtctcgaactcctggcctcaagtgatccacctgcctcggcctctcaaagcactgggattacaggcatgagccaccgcacccagcccatcttagcaaattcttaagctgcgtctgcactgagaggaaaagcatt

SEQ ID NO: 436400 - DNA, 550 bp, Homo sapiens
attaattacagaacatgttagaaaatgctacgtgatacagaaaaacagaagttatatcagactaaagagagccggaagtgacagcggaaggtcatcgttttaaacagggttgcctggatatacttcagtgagaagacttggacaatgacctgaaggctgtctggggaaagagtgttctggcagaggagccaggtagtgcaaaggccctgaggccagcacattcttcatttgtttaaagaacagggaggaagcgagggtggctgaagcagagtgggtgagagagggagagtgttgccaccaacaaggtcagaccagatagggccttgtagtccttttaaaaactctggcagttattccagttgaaaaggtgagcctctgcggggttctgattaaagggttcactctagttatygtgtcaaaatagaaaagaagcaaggaagagtaaaagaaggcagaccaatgaggaggtgattggagcagtccaggcaagagtgtttgagggcttggagcagaggggccacagtggaggagtgaaaagtgtttggtttta

SEQ ID NO: 436401 - DNA, 572 bp, Homo sapiens
cctttcaacagcagaattattttcactggaaagctcaacagacaactgattcttcaaatattctccccaacaattccctcaaacaagtcaaagaacctgagacaaacgtcaatgctaaggtaggctgcgtgttcattccaccactgtgtaataccacagagacaggtacgagagtactaatcgaggcctgcgtttccacatttaaaaggtgcaaaccaaactagcaaactactgaataaaatatcacctgccttctaactggataaatatatccttataattataaaattaattgaatgtgcatagacctaaatgtctccctagtctggagaggtttagataagtaacaaaataattacatacaaaattcataagttatatytcatacaattttttcttatcattattttagaaaattcactaattagggggctataataaagattcttctgcataatttgtgttctactgacacaaagtaagcaattttgggggatcaccatagcttttaaatttttgcaggaagttttttgttattttagattggaataacatcacactgctgaagcaat

SEQ ID NO: 436402 - DNA, 640 bp, Homo sapiens
gcaatactaacaaattctcaagtaatgcttacactgctcttccaggagctacactttgaaaatcatgctaagccttcatgtaccaaaaaataagccattaaatacaaaagatcacttatactcttctgccaggtgcctatttgtcttatatttgcaaaaccaacagccttcctgggctcaggtgacccttctccatatcaaaagaaaaaatttcagcatctctaaattataatattaaaattgaacctgtaaaagaggagaaacatatttcaggtgataaacaagaaattcaaccttgtggtgacattgcaacatctaggaggaaatgttgttggatgttgatggtttaggtgagaggaaagtagttaatagttcagatttttgagtgagactttcttgggagtagtgcttcagtgaaggacaactgataacaagggtctatgcttataggaagctccaaaattaggggaggaagaaaagttaagaaggaatcaagagagtgggtaatttagaagcaaatgcagagtaggatggtgctaggaacgcaggcaaagccatgttaacaaggcagacagcagtgtaaaagrcagaagaaaagtatggtctgaaaagggagtcttggatttttaaaagacagaac

SEQ ID NO: 436403 - DNA, 538 bp, Homo sapiens
gagttcatgtcctttgcagggacatggatgcatccagaaaccatcattctgagccaactatcacaaggacagaaaaccaaacaccacatgttctcagtcataggtgggaaatgaacagtgagaacacttggacatagggcggggaacwtcacaccctgggacctgtcgtggggttggggcagagggcgggatagcattggcagaaatacctaatgtaaatgacgagttaatgggtgcagcaagccaacatggcacatgtatacctatgcacatgtaccctagaacttaaagtacaattaaaaaaattatatccatgaatgcccaatacccctaaggcaaagtgttttggtaaaagttaggttgcagaacatatctaaatctaaattctacatgggactctaccttttcatgtggacatgttggattttatcactttctggtaagccacgtgttaaagatgaccaattatgagaactaagtgaatgtgtgttaaaagcagaaaagccagctgtttgatgctcaatggatccagtctcaa

SEQ ID NO: 436404 - DNA, 538 bp, Homo sapiens
gagttcatgtcctttgcagggacatggatgcatccagaaaccatcattctgagccaactatcacaaggacagaaaaccaaacaccacatgttctcagtcataggtgggaaatgaacagtgagaacacttggacatagggcggggaacatcacaccctgggacctgtcgtggggttggggcagagggcgggatagcattggcagaaatacctaatgtaaatgacgagttaatgggtgcagcaagccaacatggcacatgtatacctatgcacatgtaccctagaacttaaagtacaattaaaaaaattatatccatgaatgcccaatacccctaaggcaaagtgttttggtaaaagttaggttgcagaacatatctaaatctaaattctacatgggactctaccttttcatgtggacatgttggattttatcactttctggtaagccacgtgttaaagatgaccaattatgagaactaagtgaatgtgtgttaaaagcagaaaagccagctgtttgaygctcaatggatccagtctcaa

SEQ ID NO: 436405 - DNA, 470 bp, Homo sapiens
tgatttcacattagaaacttaactttcctgtgraaaaaggaatttcagaaattgaaaatatgtgtgagtatgtttaccatggttcagtcaaaggaattctgggactcatatggcagaaagagacatgagggactctgaaccccaatgaatccacttatttccttttttttttttcttgagacaaggacacactctgtcatccaggtgggagtgcagtggtgcaatcatgctcactgcaatcttgaaatcctggcctcaaccaatccttctccctcagccgccccagtggctaggaatacagatgtgagccaccatgcccagatagtttttttattttttatttttcttgtaaagatgagatcttgctagcatgtccaggctggtcatgaattcctggcctcaagtgatgctcctgccttgacctcccaaagcactgggactatttactttgtcaaaaggaaaggctgagg

SEQ ID NO: 436406 - DNA, 599 bp, Homo sapiens
tgtggcccaaggcaaagctttaccaaattcttctatcagtcagaaagcaggctctcaccagactctcaatctgccggcaccttgatcttgaacttctcaggctccagaactgagcaataaatttctgtcgtttacgccacccagtctaagatcttttttattatagcagcccgaacagactaagacgcaaaaggaccaagtcttcccatagaagagagtggagaaggyaggggttttcccgatccacatgtgtctttctttctccagctggtcaagaggatcccacagaggcctcttctgccccagaagccctgtgtatgtggtggcgtgggggtgactgccccttctttgactcacagggaaacaggaatgtggcagaggagcaagtgacatctttaagaatgaaaggagagaggggcattacggttcaaaacatcactccatccttacctatgtgggaaataccctcacagtcactcacacaccaaagcgggtgtctctgtgtttatgttcatgtaggaccatgtggtctctcaatattgagatgtgggaaccacaggagaaaactaggctatgaaggccaaaaaaaaaaaaaaaaa

SEQ ID NO: 436407 - DNA, 450 bp, Homo sapiens
tttattattattcaaatcagtctccccaaaaattcagagactagggtttttcaaggacagtttggcaggtagggggccagggagtgctaattggttggatcagagatgagatcatagagagtcaaagctgtcctcttgtgctgagtcagttcctagctgggggccacagggctggttggtgggtctgggtgaagctactggtcatcagaaatgcagaaacctgactcgaaaggccaatctttkgttctacagtagtgatgttatctgtcaggagtaattggggaagttgcaagtcttgtgacttctggaaaaatagctggtaatcatttatgtttaaaccttagcagaattcaggctcctctcatcctcctaacctggtggtcttccattagctttatgaaagtggtttagttttgggggaggactattatcatttaaattacaagctaa

SEQ ID NO: 436408 - DNA, 586 bp, Homo sapiens
gaactcacttaccatagattcgtttctttgtaggcttagaattaggtcatgggaaagccacatggtaatgtatgtaaattaacatgcacaaatatgcagaaagactatatagttttccaaatttcctgaaaaataatatmttgcaagcttctcaatatggcagtttatcagtctggcagatatatttagatcatattcaactaatgtgtataaatacccaatatgggctaggtgtggttgtgttcccaatttcactaaatccctgcaaagacctgtgctgtcctcactttacagattatgtgtctgagggtcatggctactctgagctcaggtggaggcagggaatggggtctctgagcctgtattccacactctcccaccaccccatatctctgcacagaggcctccctgacctgtgaaggaacctctccccaggagtcctttgttttggcacagaatgctttctccatattgtactgctctagaagcccagtagttgaaagagataaaaatggagtcactggttaagttgggtggggcactgagcccagcctttccaatctgtcctctgcctcttcctccgttt

SEQ ID NO: 436409 - DNA, 576 bp, Homo sapiens
tctcactttggcctttcagtacttacataggcaaaacgctgggctcaatytgcgcactcgtcccagatggtaacgactcaggtggttctcagagctgcctgttcttagtgctggtggaaggggtgggtgatgttagacagacaggcctgggctctcaggttgccccatcctagtcctatatttattttacattattattactattttttgagatagcatctcactctgtcacccaggctggagtgcagtggcacaatcatggctcactgcagcctggacctcctaggctcaagcgttcctcctgcctcagcctccgagtggctgggactacaggcaagcaaaaaccaaaccaaacaaacaaacaaaaaacaagcaaacaaatgaaaacagttgatttaatttttaaaatcaaaaattttgatttttaaaaatttctgtagagatgaaggcttattatgttgcccaggctgatctcaaactcttgagctcaagtgatcctcctgcctcagcctcccaaagtgctgggattacaggtgtgaaccatcatgttcagcccctgatcctttaaatgcagca

SEQ ID NO: 436410 - DNA, 576 bp, Homo sapiens
tctcactttggcctttcagtacttacataggcaaaacgctgggctcaatctgcgcactcgtcccagatggtaacgactcaggtggttctcagagctgcctgttcttagtgctggtggaaggggtgggtgatgttagacagacaggcctgggctctcaggttgccccatcctagtcctatatttattttacattattattactattttttgagatagcatctcactctgtcacccaggctggagtgcagtggcacaatcatggctcactgcagcctggacctcctaggctcaagcgttcctcctgcctcagcctccgagtggctgggactacaggcaagcaaaaaccaaaccaaacaaacaaacaaaaaacaagcaaacaaatgaaaacagttgatttaatttttaaaatcaaaaattttgatttttaaaaatttctgtagagatgaaggcttattatgttgcccaggctgatctcaaactcttgagctcaagtgatcctcctgcctcagcctccyaaagtgctgggattacaggtgtgaaccatcatgttcagcccctgatcctttaaatgcagca

SEQ ID NO: 436411 - DNA, 576 bp, Homo sapiens
tctcactttggcctttcagtacttacataggcaaaacgctgggctcaatctgcgcactcgtcccagatggtaacgactcaggtggttctcagagctgcctgttcttagtgctggtggaaggggtgggtgatgttagacagacaggcctgggctctcaggttgccccatcctagtcctatatttattttacattattattactattttttgagatagcatctcactctgtcacccaggctggagtgcagtggcacaatcatggctcactgcagcctggacctcctaggctcaagcgttcctcctgcctcagcctccgagtggctgggactacaggcaagcaaaaaccaaaccaaacaaacaaacaaaaaacaagcaaacaaatgaaaacagttgatttaatttttaaaatcaaaaattttgatttttaaaaatttctgtagagatgaaggcttattatgttgcccaggctgatctcaaactcttgagctcaagtgatcctcctgcctcagcctcccaaagtgctgggattacaggtrtgaaccatcatgttcagcccctgatcctttaaatgcagca

SEQ ID NO: 436412 - DNA, 633 bp, Homo sapiens
gtaacatattatctcaggttttgttgtctggaaatatgtttcgttcaccttagtatttgaagaatagttttggtggctgtaaaatgttgtcagctgttttcttccagcactttgaagatatgatttcacgtcttttgtcttctattgtttctggtaaaggttagtgtcagccttattgttgtccctttgattgtaatatactctctccccaacaactggtttccttttaagatgttctattcattttcagttttcagcacccttrctacaatatgcctcaatttcattttctttatatttctcctgcttgaagttcctcttattgtcaactctatggctttgatgtctttaatctgttttaaatatctctttaaatattgtcttttctccgttaattcttccttctccttctgggattccacctacgcatattttaaaccttttttgctgcgtcctatatgtctcttacgttcttgtctgtgttttctatcttttttctctccatgcttcggtctggatattttctttgatattcttgactaattcttaaagactatgtcatctactgctaaatctagccattgaattttaatgacagttattgtagtcatcatttttaaaaatacttgccag

SEQ ID NO: 436413 - DNA, 531 bp, Homo sapiens
gttttggagctgagccagtcagcatgcacactgcaactgtgacagccgctggggctcttctccrtaagcagtggtgaatcacattgaagagcggcttgttaaaggcagacttatccctctactccgaaaatacaatctgtcactcctgtatcaaaccagctggttccctaatagctacggacaacatattttctaggaatgtgtcttgaaatttcctttggcaaatgtctctaactggcatttcctcattgaatgtgctgtattcttacacagcaaaattgaatttcccttagaagttggaatgtaagttactatcatgtggctaaaaggcacatgatgtgccatgatgcatatgtcattatcactaacgtgctcactctgttggttattgaaattgaggtggctcttattcattcctggaatttgtctattggatcacagaataggatttttcctctgagattctaagagagtgagtcatcctcctgtatccaatctccttcttttacttagtaaaataatccttgattt

SEQ ID NO: 436414 - DNA, 582 bp, Homo sapiens
caaagcacttaaagagatgcgacgatattcccatgcataccctcgggtgaggtgcatgctgggctcattgagttatcacacaaaatggaaaaaaccctctggctgagacccaaagtgctgcaggcagagtcacatgcaggggcagaatgggaggcagcctcagagaaggggcggcctttgaccttaaaagatgagagttcagtaaggagagcatgggtgcagagctttgaaagcgcaagatgtttatttagtcatccattcattcaacaagcatttactragcacttgtcatgtgccaagcactgggtttgcattcctgctctgtcaccgtatgatcctggtgtatgatcttggatgctgtaacctctctgtgccccagttccctcaagtataaaaccataacacttagctatctcacagattcgagtgctcttcggacagtgcctgctacatatgaagtgctccatgaaggcttaccgatactgttgttgttataagttgaacaaatgattgccttaaatgctgtatctgccaccgaaaagctcacaaacattgctagagcagtggatataaaaatgaata

SEQ ID NO: 436415 - DNA, 562 bp, Homo sapiens
tcttcagcatgtggcttgagtcagagcaagggggagaatactcccatggtaactataacctatttaagaattagaagagaatttccatttctatatggtgatgggataaactttgrtataaaggaagaatgggctttgaatccagaccaatttagatcaaattaccaactcctccatttatcaactacctaacctcctaaattttatttttcttacctgtagaatcagtatgaaatagactctgttggacagttgtggggattaaaggggtaacatgtaaaaagcctacaagtactgtgcctagcactctcctagatatgctgaacttcattcataggtgaggctaatacctggctcaaaatctttttttttttttttctattttatgtagagacagggtctcactacattgcccagcccgctcttaactcctgggatcaaatgatcctcccacctcacactttctatacagccccaacttctctcatcaggggacaatacagcatccaatcatgcagagcactaggctttgaaactgtaccaccccagtttgaattttgtg

SEQ ID NO: 436416 - DNA, 549 bp, Homo sapiens
tctcttgccaaattcttcgctactctacattctagataacctattaaacctagattacctagttctgataccatctttctgatctgtatgactataagaatttaattttcctagttattattatcagtactaatttccctccttactccctttcccctgcctgccatctctctgaaattttaaraacactgtgacttttaaatagacagtgttaagtataccaggaaagtgttaaagaacaaaaataattcatggatgtgaaggacatctagcaagccctacaacctgcaatgtgagaaaagcacaaatagagagagcagtaattcaatgaacaacatcatgattattcttagtatatccacctaccacaggagtgaagatttccctctcacaaatcttataaacatttaaaggctcaaaggaggtgttttaatgcaagaatgcacagccctgccactcttcatgctccatgcatgcacacaatggattatgcactctcgtggaacggctggtaaaactcagagcctagcattatcatttcctgacata

SEQ ID NO: 436417 - DNA, 370 bp, Homo sapiens
tttctgtctagtgaaagttagataacataatagtaagtgaacatatgtgctattgctttaagtacagtttttccatactacttgcrtggtaaatgtgttacgaatataatattgggggaaatgcttatccttgttttgttagaaatgaagatgaacattattccttgctcacataatgcagctgtactgaaatatctacacactgctgtctataagaggtttatattcaatgtgagaatcattttctttaagtgtctgatcatttatgtgatttgattttcaaacaggactgtaatatgggacaagaacaacatcactgcacaaggctttcaggatatagctgttgctatggaaaagtaagtttgaatta

SEQ ID NO: 436418 - DNA, 532 bp, Homo sapiens
cctgtatggtaagacacatcctctggtggtaccgttacccttttcactggactgtgccattgtttttttttttttttttaaaaatctcaccttttgaaatcagaccaaacaaaacactgtccccaccctcagacaattctttcaraaaagtcctaaagaggccgctaatgaagtgaataaagctgaagcttcagcccccttctaaggccctgtagccatagtgggaaaattcctaattaggagaaatagattaggtaactcttaaaggtttttgtgacaggaaaatatcttcaaataaaattataaataagccattaaaaatgtggagaaagactttttcaaataaaaaatatatatagggtgactctttcttggtcttacctgttttcttttgttacacaactttttgacaaacccttaaatttgggcttcctgtttagatgagattctgtttcgttaacctgatttgatgtgctttagaagatggaatgcacactataatgtttacctaactgtaggtcttaatttctta

SEQ ID NO: 436419 - DNA, 634 bp, Homo sapiens
cttaaaaaaaaaaagcagaataattttaaattttcctgaaaagaaatggggcaagccctccaggtagtgctgtcaaaataaacctgctcagctttttcacagggaatccgcataccctgaaggggatgaatctcatataaggaaaagcttgagtgccacccttcagtggcagtagagaaataaccacagggcagaaaagactgggaggagggcaaggcacagaaactgtaygcaagatctgtgacatatggaagtcacaaggacccgcatgatcctaggagccatccaagtggacaagtcaacacacaacagcatgaacaacaggcttcattccccggctggaaaccacctttccacttgcttatgtcttacctcaataggaagacaaacgcaattttctcatttcctccatcctctatgtaaaattatcatttataacagcaacttttgaggaatgctaagagtgacttgcaaatgcttaggcagatcactgattcaaaaagcgagcaatactatatgagcaatcattaaagaaggtcccaaaatgtaacttatgtataacaaaaagacttttaaaattgatgttacttttaaattttgtaacaagaaaaataagtgaaaacaaaacggtcat

SEQ ID NO: 436420 - DNA, 644 bp, Homo sapiens
cattttgtagtcattacaacagtctcagtgttgcacattttatttctctgtttcctcagtacctaactctatgtctaacacatagagggtgctcactaaaagttaatgaaggagttagtatctagcaaaatgtcactgagtgaggttctgaatcatcaagaagtgttcacttttgttctacgtgctgcatttcctaaggcaggaaagggaactgaaatgccttcaatttttttctggcattaaagttgccaaaggttacttgcatgaataaagtaaattaataattgcttacaagcagcattctcagygactccagttagaagggtttgaggttttcatccttgtgcattctgtggtttgctgaagtttttttcatactccttcgttctgtgtttccttctatctgaatatcggctgggctgacttggatgcttgcctttttctggtttggagcagatgattgacagaatatgtgtgaaagtacaagatcatctcaactccttacgaaattgtgggggagacgctatccaggaagatttaaaatcagcagagcggctcatgcgtgatgctaagaactctaaaacggtgagtttcacttcaggctgtgtgagagtctggtataataaaaacgtttcataaaattt

SEQ ID NO: 436421 - DNA, 565 bp, Homo sapiens
agttagaaaatatcattaaaaatactcaccatttaaaatagtaacagagagcctggtatggtggctcacgtttgtaatcccagcactttgggaagctgaggcaggtggatcacctgaggtcaggagttcgagaccagcctggctaacatggcaaaaccccatctctactaaaaaaaatacaaaaaaagtagccagatgtggtggcaggtgcttgtaatcccagctactcaggaggctgaggcagaagaacagcttgaacccgggagatggaagttgcagagagccgagatcacrgcaccactgcactccagcctgggtaacagagcgagactccatctcagaatattaataataataataaaatagtaaccgaaaaatctaaagtacctaggaaataaatcacacaaaaatctctaacacctcaatggagaaagtttattgagagactttaaggaaattctaaaataaaaatatgtgtcatatttgtgggtaggaaaagttattgttacagatgtcagtttttcctcaaatttatctgttatttgataattctaatagacattcc

SEQ ID NO: 436422 - DNA, 594 bp, Homo sapiens
ctttttgctctctttaatctgtggggaggcagaatccctgttcttcctaagagacaattttgaggaagtccaacgttgattttcctgaatatgaagttaatcagagtagaaaccctgtatcactgtatgtctaaatagctttcaaaattggcartcaccctttgactagatttatctgcttcacaacaattcagataagaattcgaacacctaggttagagcacatacatatatattttttaaaaagtacagctttattaaaatatagttcacgtaacatacaatgtatccttttaaagtatacaatccacagtttttcacatatttcacaaagatgaacaattttcaccatctaattccagaacatttgtattaccccaaagaggagctctgaacccattggcaatcactttccattccccaatcctctatcccctggtgaccataatctactttctatctctatggatttgcctatttttgtatatatcatgtaaatagaacaatatgtattgctatttttatctggcttccttcattgagacttaacattttccaggtttgttcatacggtaccgtgtatctacttcattc

SEQ ID NO: 436423 - DNA, 580 bp, Homo sapiens
tttaactgaacctacagttccatgtggttgggaagcctcacaatcatggtggaaggcaagaaagagcaagtcacgtcttacatggatggcagcaggcaaagagagagagcttatgcaggaaaacccccatataataaccatcagatattgtgagacttactgtcacgagaaaagccaggaaagacktgcccccatgattcagttacctcccacaacacatgggaattcaagatgagatttggctggggacacagctaaaccatatcaaaaccctaacccccaatgtgataatattttgatataggctctttgggaggtacttcagattagaagaggtcatgagagtcctcttgatgggattaatggctttatatgcaaagagagaaaaagagaacactcactctttctccaccacataaggacacagtgagaaggtggctttctgtaagctaggaagggatctcttgtcaggaatcaaatcagctagcactttgattttggacttcccagcctcctgaaataaatgttcattgcttaagcaacccagtctgtggtattttgttatagtctgagctgactg

SEQ ID NO: 436424 - DNA, 580 bp, Homo sapiens
tttaactgaacctacagttccatgtggttgggaagcctcacaatcatggtggaaggcaagaaagagcaagtcacgtcttacatggatggcagcaggcaaagagagagagcttatgcaggaaaacccccatataataaccatcagatattgtgagacttactgtcacgagaaaagccaggaaagacttgcccccatgattcagttacctcccacaacacatgggaattcaagatgagatwtggctggggacacagctaaaccatatcaaaaccctaacccccaatgtgataatattttgatataggctctttgggaggtacttcagattagaagaggtcatgagagtcctcttgatgggattaatggctttatatgcaaagagagaaaaagagaacactcactctttctccaccacataaggacacagtgagaaggtggctttctgtaagctaggaagggatctcttgtcaggaatcaaatcagctagcactttgattttggacttcccagcctcctgaaataaatgttcattgcttaagcaacccagtctgtggtattttgttatagtctgagctgactg

SEQ ID NO: 436425 - DNA, 481 bp, Homo sapiens
ctttctggaaagcatttgaccatgtatatatatgagtgtgtgtgtacatatatatgtgtgtgtgtacatatatatgtcataattattaaataagtgtattatctttgatccyacttctagaaatctttcctgaggaaataactagagagctagagtaagatttctctgtgtgatatgcgtcatggggttattttaaatacattagtaaataaattgtccaataaatcttatattcatttaatggactatcaggcaatgttgagaatcatggttttatagaatatttatcaacattacaaagttctcatgatttgatatttgatgaaaaggataggatacaaaatctgctctataaattttccagtcacagattttcatggatagaaactaagtctcacaacagagcagaaatgggtcaattcttctcaacaaaaacagatattgtgctaagtttaaagtcactatggacttttgcacaaat

SEQ ID NO: 436426 - DNA, 405 bp, Homo sapiens
ttgatcctacttctagaaatctttcctgaggaaataactagagagctagagtaagatttctctgtgtgatatgcgtcatggggttattttaaatacattagtaaataaattgtccaataaatcttatattcatttaatggactatcaggcaatgttgagaatcatggttttatagaatatttatcaacattacaaagttctcatgatttgatatttgatgaaaaggataggatacaaaatctgctctataaattttccagtcacagattttcatggatagaaactaagtctcacaacagagcagaaatgggtcaattcttctcaacaaaaacagatattgtgytaagtttaaagtcactatggacttttgcacaaatggatctacatttcagaacccagtctatt

SEQ ID NO: 436427 - DNA, 548 bp, Homo sapiens
gagtaataatgcagtacaccaagtgaaaaggtttttttttggaccaatcatacaaattccttttcttcctraggttcaagtgcgagatacatttgcaggtatgaacacactgatcctttagtcagattacttccttccattcagttgctgccttatactttaatctgtaagtcagcagcagtatcatcactgttaacagggacagtccttcatctgggttttgagtttctcatttgtcctggtagctaggctttgtgcaaaatacattatttggattatctcataatttccaaaaatgacctattgttacactaccttacagacaaggaaattaagacctagagagattaagtgactttcccaaattaggcagcaatggaatggcagattcttcaactttccaacttttggtatactagaaaatactgacaatttaggaagaaacaagttgtactgtaatatgtagaataactgaccacccaaagatgataattcagtatttatttattatttatttctgatcttcccatgagaggcagaggtaattc

SEQ ID NO: 436428 - DNA, 583 bp, Homo sapiens
tagttccaagtctgtggatcaggcatttcataagcccccagatagtgatgtgtggctgaagctttggggaggaaaggcgagtccatackcagattgtctattcctttgagactaaactattagtctttccaggatagcagaggatcaatatagtcgatttgtcatcaaatagccaattggtctttcactgttagtttctgttgctgataggttggaccttcagaagcagtagtaactagatcaggcttggcaagtggtagttcaccctgctacccaggattgtccttcctggaaggtttattcatgcccttctgaaaaaaattatgtgactaaatgacttgcattcattaaatgcagaaactttaaaggcaatggaggagaactcccttccctctttgaaaatttgaagagagggacagttcttgcccctactcctcagcaaaactcttcctctatcagaacaggaaagatgggtctgtactgtagcaacttgaatttctcattccccaaagctacatgtgaaaaagagacaactttttctgaaaaaatctaaattttattttgacactctatttcaacatga

SEQ ID NO: 436429 - DNA, 583 bp, Homo sapiens
tagttccaagtctgtggatcaggcatttcataagcccccagatagtgatgtgtggctgaagctttggggaggaaaggcgagtccatactcagattgtctattcctttgagactaaactattagtctttccaggatagcagaggatcaatatagtcgatttgtcatcaaatagccaattggtctttcactgttagtttctgttgctgatagrttggaccttcagaagcagtagtaactagatcaggcttggcaagtggtagttcaccctgctacccaggattgtccttcctggaaggtttattcatgcccttctgaaaaaaattatgtgactaaatgacttgcattcattaaatgcagaaactttaaaggcaatggaggagaactcccttccctctttgaaaatttgaagagagggacagttcttgcccctactcctcagcaaaactcttcctctatcagaacaggaaagatgggtctgtactgtagcaacttgaatttctcattccccaaagctacatgtgaaaaagagacaactttttctgaaaaaatctaaattttattttgacactctatttcaacatga

SEQ ID NO: 436430 - DNA, 583 bp, Homo sapiens
tagttccaagtctgtggatcaggcatttcataagcccccagatagtgatgtgtggctgaagctttggggaggaaaggcgagtccatactcagattgtctattcctttgagactaaactattagtctttccaggatagcagaggatcaatatagtcgatttgtcatcaaatagccaattggtctttcactgttagtttctgttgctgataggttggaccttcagaagcrgtagtaactagatcaggcttggcaagtggtagttcaccctgctacccaggattgtccttcctggaaggtttattcatgcccttctgaaaaaaattatgtgactaaatgacttgcattcattaaatgcagaaactttaaaggcaatggaggagaactcccttccctctttgaaaatttgaagagagggacagttcttgcccctactcctcagcaaaactcttcctctatcagaacaggaaagatgggtctgtactgtagcaacttgaatttctcattccccaaagctacatgtgaaaaagagacaactttttctgaaaaaatctaaattttattttgacactctatttcaacatga

SEQ ID NO: 436431 - DNA, 583 bp, Homo sapiens
tagttccaagtctgtggatcaggcatttcataagcccccagatagtgatgtgtggctgaagctttggggaggaaaggcgagtccatactcagattgtctattcctttgagactaaactattagtctttccaggatagcagaggatcaatatagtcgatttgtcatcaaatagccaattggtctttcactgttagtttctgttgctgataggttggaccttcagaagcagtagtaactagatcaggcttggcaagtggtagttcaccctgctacccaggattrtccttcctggaaggtttattcatgcccttctgaaaaaaattatgtgactaaatgacttgcattcattaaatgcagaaactttaaaggcaatggaggagaactcccttccctctttgaaaatttgaagagagggacagttcttgcccctactcctcagcaaaactcttcctctatcagaacaggaaagatgggtctgtactgtagcaacttgaatttctcattccccaaagctacatgtgaaaaagagacaactttttctgaaaaaatctaaattttattttgacactctatttcaacatga

SEQ ID NO: 436432 - DNA, 609 bp, Homo sapiens
aacgtaatctctgtgactcaaatagattgatttatttatgtttctgaaatttatctgactttgactatgagccatgtttagtatagcaaaatgattaacatcttaaggaataaagaatttttctcaaatttatttttctgtatttcttctcaaatttatttgaatttggccatgagtcatgttagtagagcaaaatgattaacatctcaagaaataatgaacattgccrcactgacttaagaatcaccaccctgatttattcctatagcttgaggcagcaccacctcttgccctgtccagaggaataacttaggttggagatggaccatattcagtccagccaagatgtttgcatgaagtccctgaaggactcagccctttccaactgggagacttccagaataaacaaagatgttcatgaattggtgggttcattgggcattactaattgcttattcaactttttttttgctttttttctctgaatgtttcagtatttgatcatctcaagatcagtaaggaattcaactggtcactgtcacagctgaggttttctggtgttcaaatatgtctatttcagacagaataatgccaccctccccccacccc

SEQ ID NO: 436433 - DNA, 609 bp, Homo sapiens
aacgtaatctctgtgactcaaatagattgatttatttatgtttctgaaatttatctgactttgactatgagccatgtttagtatagcaaaatgattaacatcttaaggaataaagaatttttctcaaatttatttttctgtatttcttctcaaatttatttgaatttggccatgagtcatgttagtagagcaaaatgattaacatctcaagaaataatgaacattgccgcactgacttaagaatcaccaccctgatttattcctatagcttgaggcagcaccacctcttgccctgtccagaggaataacttaggttggagatggaccatattcagtccagccaagatgtttgcatgaagtccctgaaggactcagccctttccaactgggagacttccagaataaacaaagatgttcatgaattggtgkgttcattgggcattactaattgcttattcaactttttttttgctttttttctctgaatgtttcagtatttgatcatctcaagatcagtaaggaattcaactggtcactgtcacagctgaggttttctggtgttcaaatatgtctatttcagacagaataatgccaccctccccccacccc

SEQ ID NO: 436434 - DNA, 527 bp, Homo sapiens
ctgccccaacttccagaggcaggagattagacagggatgacagttaaggggttactggtaataggaaaatcattaaaactggagatataactaggtaaaaaagaaaaagctagaaatgtggtttcactggataaaaagcaataataaagcattcacaaaaatgtttatcatctatatttaattgctctgtagcataacacaattatgtgtattggtaaatatgtattatattaatatattgtcactttagatttccccagttaaccctctgtgagtttactcagtctttataatttattgctcatgcagcatggtcatctgtttccaacctagaaaattagtgggcctatgcctcgggcttatgagctatcagttctaygccttgatattgcacttggtgatgcagggcagaagtagtttggtggtttctcagcccaaggttgagtaaacagatgtcccggagttgattttccccagaataattgcatacaatgagcacaaatgtttaattaatcaggaatcttgtg

SEQ ID NO: 436435 - DNA, 584 bp, Homo sapiens
cagtgacttggcatggcagggatgctaggcatgggacctctctgatggacgactttggctctgggacttcccctagtattgcactgcagtctaaggcacttccaaccaaccttctttccttccttccttttcatggagtcagacctgtactgtagtctgacagctctccagcctctgccggtgcctttttttctctaggggcttgccctggtaaaaagccttgagcatagagccccctcttggcctcttcttctgaraagacccagaataatgtatctagtgtccaaatggaagacggcaggcgctgggtcgagaaagtttaagatttttagacgtggaataggaagtagtgagggctgtaaggcaacaagtggtaaaaggagaggagagagaggtcttagaaggggcaacatcttctgatttgggcttgttttacttagtcctcgatgagtgcacaccaaaatcatgcataatacattttaaaatgcccataattcatgcccacaaaaattctggtttaggtcttaggtcttagatgattcagacatctgtgatcctgatgttccctcctggttgagtaacct

SEQ ID NO: 436436 - DNA, 584 bp, Homo sapiens
cagtgacttggcatggcagggatgctaggcatgggacctctctgatggacgactttggctctgggacttcccctagtattgcactgcagtctaaggcacttccaaccaaccttctttccttccttccttttcatggagtcagacctgtactgtagtctgacagctctccagcctctgccggtgcctttttttctctaggggcttgccctggtaaaaagccttgagcatagagccccctcttggcctcttcttctgaaaagacccagaataatgtatctagtgtccaaatggaagacggcaggcgctgggtcgagaaagtttaagatttttagacgtggaataggaastagtgagggctgtaaggcaacaagtggtaaaaggagaggagagagaggtcttagaaggggcaacatcttctgatttgggcttgttttacttagtcctcgatgagtgcacaccaaaatcatgcataatacattttaaaatgcccataattcatgcccacaaaaattctggtttaggtcttaggtcttagatgattcagacatctgtgatcctgatgttccctcctggttgagtaacct

SEQ ID NO: 436437 - DNA, 550 bp, Homo sapiens
tgttcaatttatctttactagaaaaagaatgtgttgatttaaagtgggtttagattragaatatgaacatttgatatgcaaaagtagcagtgtgtatggtatgttaaggacaaaggaacatctgtctagtactgcttctcaccaggaggtcccatgcttggtcaggcacacacccacagggaggaaagaggtgacagaggctctgggtttgtgaccacagaatgcagaggacctgactcatttcccttcccgcgctgtagggcatggtttgtggtggcggctcaccacgctggccaggagcttgcctctcctaccattcccactccatgtgatcgcttcccaaggtgccaactcctggctttccatctggggaacgcagatatttttttcaagagggtggagggaaaatcaacatgaagattaatggacttcaaagcagaaagagaatgaaaatactggaaacctttgcctgtgattcagcgttcaggggcacaagaatacactggagacaaagaagaagagccaagtcgagtctggggccagaggtttg

SEQ ID NO: 436438 - DNA, 550 bp, Homo sapiens
tgttcaatttatctttactagaaaaagaatgtgttgatttaaagtgggtttagattgagaatatgaacatttgatatgcaaaagtagcagtgtgtatggtatgttaaggacaaaggaacatctgtctrgtactgcttctcaccaggaggtcccatgcttggtcaggcacacacccacagggaggaaagaggtgacagaggctctgggtttgtgaccacagaatgcagaggacctgactcatttcccttcccgcgctgtagggcatggtttgtggtggcggctcaccacgctggccaggagcttgcctctcctaccattcccactccatgtgatcgcttcccaaggtgccaactcctggctttccatctggggaacgcagatatttttttcaagagggtggagggaaaatcaacatgaagattaatggacttcaaagcagaaagagaatgaaaatactggaaacctttgcctgtgattcagcgttcaggggcacaagaatacactggagacaaagaagaagagccaagtcgagtctggggccagaggtttg

SEQ ID NO: 436439 - DNA, 550 bp, Homo sapiens
tgttcaatttatctttactagaaaaagaatgtgttgatttaaagtgggtttagattgagaatatgaacatttgatatgcaaaagtagcagtgtgtatggtatgttaaggacaaaggaacatctgtctagtactgcttctcaccaggaggtcccatgcttggtcaggcacacacccacagggaggaaagaggtgacagaggctctgggtttgtgaccacagaatgcagaggacctgactcatttcccttcccgcgctgtagggcatggtttgtggtggcggctcaccacgctggccaggagcttgcctctcctaccattcccactccatgtgatcgcttcccaaggtgccaactcctggctttccatctggggaacgcagatatttttttcaagagggtggagggaaaatcaacatgaagattaayggacttcaaagcagaaagagaatgaaaatactggaaacctttgcctgtgattcagcgttcaggggcacaagaatacactggagacaaagaagaagagccaagtcgagtctggggccagaggtttg

SEQ ID NO: 436440 - DNA, 573 bp, Homo sapiens
gtaataactggcaaatattagtaggcatccagtaaatatttgtgttttcatttcgattcagtagtaaacaataaataataattaaacagtaacaatagctaatatttgttgagtgcacaaaaatcaatccaagatggataaaagacttaaatgtaaatccttaaactataaaaaccctggaagccaacctaggyaataccattctggacataggaaccagcaaagatttcatgatgaaggtgccaaaagcaattgcaacaaagacaacaaatgacaaatgggatcaaattaaatttaagagcttctgtacagcaaaagaaactatcaacagagtaaacagacaacctacagaatggggaaaaatattgcaaactgtgcatctgatgaaggtttaatgtccagcacctataaggaacttaaatttacgagaaaaaaccaaccccattaaaaagtgggcacaggatatgaacacatacttttcaaaagaagacatacacacaagttaacaggagtatgaaaaaaaaaactcaacaacattgctgatcattagagaaatgccaatcaaaaccacaa

SEQ ID NO: 436441 - DNA, 566 bp, Homo sapiens
tgtgtgtgtgtgtgtgataattgttaaaattgttatatgttcctggagactgcactcttatatcattatataatgttattctttgtctctcctgacagtttttggcttctaatctattttgtatgatataaatatatccactcctactcttttttggttaccaaatggtaactaatggaatatctatttccaacactttactttcagtctatgcacatccttaaatctaaaatgagtttctcatagacagcgtatagttggatcytttttttttttttaaatccgttcagccactctgtgtctctttattggaagttatatctatttatttatcagaagttaaacctatttacgtttgaagtaattactgataggaaattatttattattgccattttgttcatcattttctgtttgtcttatagttcatttgtttttggagttccagagctttttggaattccttagtgcacagttcttagttcatttttctcccttgctctcatcctttgtgtttcgttgattttttttgtattgataaacttttattaatttcttttttactt

SEQ ID NO: 436442 - DNA, 544 bp, Homo sapiens
tgtacatccaggcctgcctgattctaaagccttctgtgagaaggggaaaatggcagctggttaatagttttgagagtagccaaaataaatatgagagagatcaagaaagagcatcaaaaacaaaatggtcagaagtggmatcaaatcagattataaagtaaaaagctggaattggatggtgcaagaatggattgggaaccgatgaaggtaaggtttggaatgactattgcaagcagtcttgggctcactgggtacgggctgtttgggtgagttgggtggctttaattaagagggggaatggaactaaaataacaatacatttcctattatacaaaatgataatttcattcattaaacatatgtactatccataagacccaagtcaacataaaatatatattttgattgctcttcccactttacaatgtgtcaaattgctatacattcttcagagactcctacacatacattatcttctcagcactttcttctgacaatgttagaatgtactcttctctcatttgtgcatccacagattttttta

SEQ ID NO: 436443 - DNA, 544 bp, Homo sapiens
tgtacatccaggcctgcctgattctaaagccttctgtgagaaggggaaaatggcagctggttaatagttttgagagtagccaaaataaatatgagagagatcaagaaagagcatcaaaaacaaaatggtcagaagtggaatcaaatcagattataaagtaaaaagctggaattggatggtgcaagaatggattggraaccgatgaaggtaaggtttggaatgactattgcaagcagtcttgggctcactgggtacgggctgtttgggtgagttgggtggctttaattaagagggggaatggaactaaaataacaatacatttcctattatacaaaatgataatttcattcattaaacatatgtactatccataagacccaagtcaacataaaatatatattttgattgctcttcccactttacaatgtgtcaaattgctatacattcttcagagactcctacacatacattatcttctcagcactttcttctgacaatgttagaatgtactcttctctcatttgtgcatccacagattttttta

SEQ ID NO: 436444 - DNA, 583 bp, Homo sapiens
acaagtttattatttttaaaacagtgattctcaactaagggaaaagacaggagagcacacatcctgtcaagacatggaattgggcagcattctcctaaaaggatacatcagaatcacctgggggaatgtttcgcattctatagatgaagaatcactacagggtgaaccayctcttctaaatgaaatgatgaatgtatcctgtagatatgttcaaaggggaaaaagtgttgaaaagtagagttttggtatgattgtgaagtatattaaacacactttcattaagatatcagtagcgtaacaattggtaaaaatttttggaacccacggagaaacaatctcaccttaccaagtttggtcttcttaaaatacaagtaattgttttcatattaaataacagtaaaaagtagtaatagtatgacccaacaaagctgatacaacttaaacagtataatgtaaaattaaccaatcaaatcagagatagcaagaagaaatatgaaaaaggctagaataaattccaaatactccaaaattttaaaaagtttcctcttcattttaatttctcttggtggaggtcaaatttact

SEQ ID NO: 436445 - DNA, 460 bp, Homo sapiens
cttctatcctggttttctgtggatccttcatgcctgcttctactgttgcatattattgctttagtagaaatttattagtttacatgtttatcttctttactagactgagaagctacttaaggcaagatactctgcctatacatatttggagcttcagggatagtgagtacttgtttgaatgactgcttgaatyaatgactgctttgaagaatgaatggatgaaaaattagaaaagataaaaaccataagttgaaaccatatattgttataaaatgccttctacgaaagggtgatgatgtttgggaaagtataatcttaacacctaatctaatgaataaattattaataataccctgttcaagttgaaaaaaagcagaagcataactataggctaggcataaaagggtgaagtacacaaaagttaatttattaaccaacactacataagcattatatgact

SEQ ID NO: 436446 - DNA, 460 bp, Homo sapiens
cttctatcctggttttctgtggatccttcatgcctgcttctactgttgcatattattgctttagtagaaatttattagtttacatgtttatcttctttactagactgagaagctacttaaggcaagatactctgcctatacatatttggagcttcagggatagtgagtacttgtttgaatgactgcttgaatcaatgactgctttgaagaatgaatggatgaaaaattagaaaagataaaaaccataagttgaaaccatatattgttataaaatgccttctacgaaagggtgatgatgtttgggaaagtataatcttaacacctaatctaatgaataaattattaataatacyctgttcaagttgaaaaaaagcagaagcataactataggctaggcataaaagggtgaagtacacaaaagttaatttattaaccaacactacataagcattatatgact

SEQ ID NO: 436447 - DNA, 460 bp, Homo sapiens
cttctatcctggttttctgtggatccttcatgcctgcttctactgttgcatattattgctttagtagaaatttattagtttacatgtttatcttctttactagactgagaagctacttaaggcaagatactctgcctatacatatttggagcttcagggatagtgagtacttgtttgaatgactgcttgaatcaatgactgctttgaagaatgaatggatgaaaaattagaaaagataaaaaccataagttgaaaccatatattgttataaaatgccttctacgaaagggtgatgatgtttgggaaagtataatcttaacacctaatctaatgaataaattattaataataccctgttcaagttgaaaaaaagcagaagcataactataggctaggcataaaagggtgaagtacacaaawgttaatttattaaccaacactacataagcattatatgact

SEQ ID NO: 436448 - DNA, 558 bp, Homo sapiens
acagcttctaaaccaacagtgttgcaggaatgagacaagaacatttttaaagtatagcattgagtgaaatgctagcagtatctttactacttccatgctttgatcagtgatctgtgctttctgactgtgggagaaacatcagaaatagaaccagtatttcttactcagtggttcacaggatatgctgcatcctgcaggactcacttcaaacttgcattcttgtgtcttggaaccaaggcttcaaatgtccattcctagctactcaggaggctgaggtgggaggatcacttgagtccaggaggtcaaggctgcagtgagctatgatcacacmactgcactccaccctgagtgacagaatgagaccctgtctcgaaaaaaaaaaaaagagagaaagaaaaaaagcccattccatcattcccttaagacagctgcttctgggtgatgggatacatagtaacaccatgaataccataagcataggctgttgccttgcttcttttgctgaaaaaggagttgacaggcaaaagtgacactttgtgcaataatattttggttaac

SEQ ID NO: 436449 - DNA, 450 bp, Homo sapiens
ttttttcaacaagcggtacaagaacaactggatattcgtatggaaaaatgaacctcaacatttgcaatacactatatgcaaagtttaattagaatttaattaaattaaaatttctagaagaaagcacagcagaaaatctgtgtggcttaaaggtagtcaaaatgtgttagataggagacaaatagcaaaccattaaataaaatgtgataattgaactttatcraaatttaaaactcttgctctttggaaaattccactaagaagatgaaaaggtaagccacagatcaggagaaaatgttcacagtacgtgtatctgacaaacaacttgtttccagattatacagaaagcttttacaactccacaatttaaaaagcaattaaaatggggcaaaaatgtaattaaccagaccatgataagatgctcatcattattagacatcaggaaaggaa

SEQ ID NO: 436450 - DNA, 406 bp, Homo sapiens
ctgaagtagcctcacattccagttatcaatggactctcctaaacatccattttaacttacagactgtggtgattttcyggaaccctaatgattagcattagttttgagtcgctgtccaataatccctaaaatgtccagctagttctatttttctagtccaaaattatgtgtaaattgctgcagtttcctttgaggaactggaatgaatatttagagttttctaagtgtggtccctggaccagcagcatcattatcatctgggaaattctcaaaaatgaaaattctcaggacccaccccagcccctgttaatcttaaactctgggagtggaacctagcaatctgcattttaacaagtccatatagggattctgggacacaccagaatttgagatccactgatttaaa

SEQ ID NO: 436451 - DNA, 530 bp, Homo sapiens
gacggtgtgcagagagggtggggggaaccatactccatcttctctgttctctagtgagggcctccccagtgaggagagtggaaaacactgtcttacatcaataacacgccttctcctttgctcttttgaagagctcagagcacctagcagacaggatgttcttcaccctcagcaactccgtgaggctgaatcaggttttgatcccctctcccatttttttttaatagatgaggaaatgacagccccgagccattgatgtctgtgagtcagctggctgcagccagaagctgtgttgtgataacaggaagcagacagggaagagccgctctggtgagagtccttcatggaggcaaaacatctctgggttaaccccatgcccaatyactgcaggcacatgaaagaaatcctaaccattttagaagtcctggtatatgtaatatcttgtctcagaagatagccaactaatagggtttttgtctgtctatttttactagccaacggtttctcttctaagagtatgctaccaggtc

SEQ ID NO: 436452 - DNA, 530 bp, Homo sapiens
gacggtgtgcagagagggtggggggaaccatactccatcttctctgttctctagtgagggcctccccagtgaggagagtggaaaacactgtcttacatcaataacacgccttctcctttgctcttttgaagagctcagagcacctagcagacaggatgttcttcaccctcagcaactccgtgaggctgaatcaggttttgatcccctctcccatttttttttaatagatgaggaaatgacagccccgagccattgatgtctgtgagtcagctggctgcagccagaagctgtgttgtgataacaggaagcagacagggaagagccgctctggtgagagtccttcatggaggcaaaacatctctgggttaaccccatgcccaatcactgcaggcacatgaaagaaatcctaaccattttagaagtcctggtatatrtaatatcttgtctcagaagatagccaactaatagggtttttgtctgtctatttttactagccaacggtttctcttctaagagtatgctaccaggtc

SEQ ID NO: 436453 - DNA, 556 bp, Homo sapiens
actgttttaagactctaaagaaaagtcacactgcctggatccaaaatccagcagtacttactgctgacccgctgagtagctttaggtgagtcattgaaacaacctgggcctcagtttcttcaactgtgaaatggggatgataatagcacctgcatgacagggttcttgagagatttagatgaattaattcaggaaaaagtgcttcggtggtgatmatctcttccataataagaacacaatacatattagcacttattattattattctcgttattgtcattgttatccatgatgaggatattcagtcccaggaaaattcaagttcataattccatagagaaagtatgatgtcaggtgacgaacctgtgcatttaagtcactttctggaccatgaggtctgcttcatcctggcagactctggcatggggccacccagagtggcactgatggtgccctcagcggagaaagcatgtctgatggaaacagcagtcagctgaactcaaatgagactcagccacaatgagcccccgtgagggttgccaccctcccagccagg

SEQ ID NO: 436454 - DNA, 592 bp, Homo sapiens
ttgagcccaggagttcaagactagcctgggcaacatagcaaggctcctcctctacaaaaaataaagatagaaaaattagccaggcatagtggtacacacgtgtagtcccagctactcaggaggctgaggtgggaggatcacttaagcccaggggtttgaggctgcagtgagccrtgatcatgccactgcactccagcctgggtaacagagcaagaccctgtctctaaaaggaacaaaaacaaaaacaccttaccagataggttgtccaacacagggatgcccttgcagcttttgcaaaatacaaaagacctccaaatcctttgttttcaaagcatgaggctggaaggaaagagacaaagagagaaagggaagtcgcccacaaaaggaagtaaggtcatggggctagtggagggctctgaaaggctttcacgcttcaccaggaaaaagagggctttctcccccgcaatctgcagttgcaactggtatcacttttccaaactcagactttaggactcatcttgtctatgtgatgatttttaagaatcttaacttctctggtcttgatttcctcccttttgaaaggtaaggggat

SEQ ID NO: 436455 - DNA, 592 bp, Homo sapiens
ttgagcccaggagttcaagactagcctgggcaacatagcaaggctcctcctctacaaaaaataaagatagaaaaattagccaggcatagtggtacacacgtgtagtcccagctactcaggaggctgaggtgggaggatcacttaagcccaggggtttgaggctgcagtgagccatgatcatgccactgcactccagcctgggtaacagagcaagaccctgtctctaaaargaacaaaaacaaaaacaccttaccagataggttgtccaacacagggatgcccttgcagcttttgcaaaatacaaaagacctccaaatcctttgttttcaaagcatgaggctggaaggaaagagacaaagagagaaagggaagtcgcccacaaaaggaagtaaggtcatggggctagtggagggctctgaaaggctttcacgcttcaccaggaaaaagagggctttctcccccgcaatctgcagttgcaactggtatcacttttccaaactcagactttaggactcatcttgtctatgtgatgatttttaagaatcttaacttctctggtcttgatttcctcccttttgaaaggtaaggggat

SEQ ID NO: 436456 - DNA, 635 bp, Homo sapiens
gctctacttccctgggatatacacattctcagagcctggagagaatataagctaaaggaaaacaacatttcttgagcctattaggagggaggcaatttccttatgggctatctcattaattcctcaaatcagccctgtgacagaagtcttattaacctattttacacactggttaggtcactcccatagacacagttattgagggcaaagtccagatttgaattcagctctccttgcatctaataaagggcatggattttctgtgttcactatgggttggtgagtgtgagggcagaatgctttagaaagaggaatattttcaggaggctccaacacatggatggatgctgaagaaaccaaycgagaagtaaaatggggtccggagtgtgggaactgagggtttcagaggagcagggtgcattagagtaggcagtggctgccaggctttttgaggcccaaaccagagacttgggtctgcagagctgtggttgtgttccacccagagcacctgcagggcaatctcttttcttccatgtgccactgatagtattttggaaaagctctggcaaaagttctcaaaatagccaaattcagtggacatatttttccctcaactagaccttgacatttgacac

SEQ ID NO: 436457 - DNA, 635 bp, Homo sapiens
gctctacttccctgggatatacacattctcagagcctggagagaatataagctaaaggaaaacaacatttcttgagcctattaggagggaggcaatttccttatgggctatctcattaattcctcaaatcagccctgtgacagaagtcttattaacctattttacacactggttaggtcactcccatagacacagttattgagggcaaagtccagatttgaattcagctctccttgcatctaataaagggcatggattttctgtgttcactatgggttggtgagtgtgagggcagaatgctttagaaagaggaatattttcaggaggctccaacacatggatggatgctgaagaaaccaatcgagaagtaaaatggggtccggagtgtgggaactgagggtttcagagsagcagggtgcattagagtaggcagtggctgccaggctttttgaggcccaaaccagagacttgggtctgcagagctgtggttgtgttccacccagagcacctgcagggcaatctcttttcttccatgtgccactgatagtattttggaaaagctctggcaaaagttctcaaaatagccaaattcagtggacatatttttccctcaactagaccttgacatttgacac

SEQ ID NO: 436458 - DNA, 635 bp, Homo sapiens
gctctacttccctgggatatacacattctcagagcctggagagaatataagctaaaggaaaacaacatttcttgagcctattaggagggaggcaatttccttatgggctatctcattaattcctcaaatcagccctgtgacagaagtcttattaacctattttacacactggttaggtcactcccatagacacagttattgagggcaaagtccagatttgaattcagctctccttgcatctaataaagggcatggattttctgtgttcactatgggttggtgagtgtgagggcagaatgctttagaaagaggaatattttcaggaggctccaacacatggatggatgctgaagaaaccaatcgagaagtaaaatggggtccggagtgtgggaactgagggtttcagaggagcagggtgcattagagtaggcagtggctgccaggctttttgaggcccaaaccagagacttgggtctgcagagctgtgrttgtgttccacccagagcacctgcagggcaatctcttttcttccatgtgccactgatagtattttggaaaagctctggcaaaagttctcaaaatagccaaattcagtggacatatttttccctcaactagaccttgacatttgacac

SEQ ID NO: 436459 - DNA, 635 bp, Homo sapiens
gctctacttccctgggatatacacattctcagagcctggagagaatataagctaaaggaaaacaacatttcttgagcctattaggagggaggcaatttccttatgggctatctcattaattcctcaaatcagccctgtgacagaagtcttattaacctattttacacactggttaggtcactcccatagacacagttattgagggcaaagtccagatttgaattcagctctccttgcatctaataaagggcatggattttctgtgttcactatgggttggtgagtgtgagggcagaatgctttagaaagaggaatattttcaggaggctccaacacatggatggatgctgaagaaaccaatcgagaagtaaaatggggtccggagtgtgggaactgagggtttcagaggagcagggtgcattagagtaggcagtggctgccaggctttttgaggcccaaaccagagacttgggtctgcagagctgtggttgtgttccacccagagcacctgcagggcaatctcttttcttccaygtgccactgatagtattttggaaaagctctggcaaaagttctcaaaatagccaaattcagtggacatatttttccctcaactagaccttgacatttgacac

SEQ ID NO: 436460 - DNA, 640 bp, Homo sapiens
tgacctcttaaactgcagtatatttagttcctgaatttaagaatggcagctttcaagtctgatctccagctcagaccctttagggtggtgagtgggggtggcattttcatccaaatgtcttctgggtaccttgaactcaacatgtcccaaacagaacccagtaatctccctccaagtgcccttaaatctgtgccctccctggtctctttccagktgatggtccatctatctatgcagctgcccaagccagaaatctgggagcgatcctaaccacctgcctttcacccacccctgcctaataagcctcgttctacctccagcatctcctaggtctgtgtcctcttcactacctcctgccactactttagtacaggtgcctttgggagtcattcctcgattatcactgcagcctccaggtggtccccctgtctctaaagccctcctaattttctacctgtggccattctttcttaaagatatatgaccatcaccaaattctatttgaaggtttttaaaatctcacagttttcaggatgaaatccagtagtttagccagacacacaaagtcctttgttacctgggaagtgggtaagagtcaggagcacgtggatttgaatcctggtaccttgggtaaatgact

SEQ ID NO: 436461 - DNA, 541 bp, Homo sapiens
tctatagataagtttttcaatctctagtggcaacccattaatgggtcacacagtcaatttagtgagtcagccagcattaaagagagaatagcatagcatagcacagcacagcacagcacagcayagcatagcatagcatagcataggttgaagtagatagagggcatcccaccagtaagcacactgttttatgaaactttcatgtatatgtactgagtcatcacataaaatgtactccttattgcaagtgatagtcaaaatcaatttgaagaacagtttttgactgtgatccaccaatgcagagggtctgtggatgagtgggtgtagaggaggtagaggggtgaatgctctgggccagtcagctagtcaattgattctgcttatcagttctttacccagcagggcttgagcgttgctctgctctcccgcacctcacacctatcatctgctgatgctgctaactccttttccaacatgggacaggtaattatccctcagaggttacgtgggcaagtgcagaactaagagctttccctcaacc

SEQ ID NO: 436462 - DNA, 472 bp, Homo sapiens
aatgcaattgctcttcaagctttgacgcctgcgtctcacctcctgaggggacctgcaggcccccctcccacccttttgggtcttggcaggtccatcggccttcaattgattttgcaagatggccccttccatccaaagagctgtgcaatcctggttaggaagatggagtttcagttctgagctttaagtaacaaagataagggggatttgcatgctggcagggtgtgagaagggcactcacagtcaccagctgtttgcagctaggcctgggagtgggcaagggatgggcctgggagcagggagatctgggttccttycccacctctgctctgattttttgagtgaccttcattgaaccacttaactttctgtgctttcctctcactgccatctgtaagggggaagacaacggcacttgtctgtgaaaatgctttgagggatactggcataaaagatgcaatgtaaaagcaag

SEQ ID NO: 436463 - DNA, 535 bp, Homo sapiens
taattaagctgatttttaaccatagcgctcttttaaaaagtcatggtaaatttcttattaccagactttagccaggccaaacagccaatatttctggctcagtgaaaggaaaatacaggacagtttttggaggagaagagaataacaaatggtaatggtcatgcagatatcaaacaagaaagaactcattccctaagcagggaattgaccctgaagttgggatgccattgtaatggcagagaccaagagaaagtactgccacgtatttacaaggtcaagctcccaaggacataactgaccagtttgmtgggctgtcttgaacagcgagcttgtggagtcccagggctgtgttctatcctacggtacccttctttatgacagaacaatacagaaagacacacaaatcatgccagattcaccacagcttaagagtagcctcacaaatcttttttccattaatcaaaactttatgaaggagataaacagtgatttttaccattcattcaactggtttgcacagagagagaggccagaa

SEQ ID NO: 436464 - DNA, 446 bp, Homo sapiens
gtcaagctcccaaggacataactgaccagtttgctgggctgtcttgaacagcgrgcttgtggagtcccagggctgtgttctatcctacggtacccttctttatgacagaacaatacagaaagacacacaaatcatgccagattcaccacagcttaagagtagcctcacaaatcttttttccattaatcaaaactttatgaaggagataaacagtgatttttaccattcattcaactggtttgcacagagagagaggccagaagtctgactggtaagaaatttttacccttttgccagcatgccaggcttctgggttccctttccctagtgaacagccctagtgacctgtgggctgcaccacagccctgggggccaagccacattataaaggaaaattgtctttttctgttctggccggagaaaaatacatgtgacaaagcagacac

SEQ ID NO: 436465 - DNA, 535 bp, Homo sapiens
taattaagctgatttttaaccatagcgctcttttaaaaagtcatggtaaatttcttattaccagactttagccaggccaaacagccaatatttctggctcagtgaaaggaaaatacaggacagtttttggaggagaagagaataacaaatggtaatggtcatgcagatatcaaacaagaaagaactcattccctaagcagggaattgaccctgaagttgggatgccattgtaatggcagagaccaagagaaagtactgccacgtatttacaaggtcaagctcccaaggacataactgaccagtttgctgggctgtcttgaacagcgagcttgtggagtcccagggctgtgttctatcctacggtacccttctttatgacagaacaatacagaaagacacacaaatcatgccagattcaccacagcttaagagtagcctcacaaatcttttttccattaatcaaaactttatgaaggagataaacagtgatttttaccattcattcaamtggtttgcacagagagagaggccagaa

SEQ ID NO: 436466 - DNA, 564 bp, Homo sapiens
agaatagttattctgcaagatgtatcttgtcttgttggctgracatgtaaactgaagatcctgtaagtattcttagagccatggacctaccataatattaaggagtaaagaaaaatgaggtagaacacacgttttctattctcttacttttgattctcatataagtcagtgttggtgcactgaaatggtggcagcagaatcataagtttatttaagttgtaattatggaatctgaaagctggaagaaaacttggaggtgtccagtcaactttccttattatagatgagaaactcaggacctggaaactttaccctttcttatctccggaaactagagtctgaaatccaagccacaattcctacggcttttgtctcctttatctgccccattgactcattaaggccaaatatatgttattaagtaaaaacaaagtttatgcatgttcttgctatgtagctaatttattaaacctccaaatttaacttccatctacttccaaactccccaatgccacccaatactctctggttaccagaaattttaattattgtccatggctgaaa

SEQ ID NO: 436467 - DNA, 514 bp, Homo sapiens
gaaaatcctgttgtgcttttattttagtgttcaactattattcagaaaaactgaataataccccctttaactctagataatatgttcacacaaagaatctttttaacaattaattttttaataaactttccacaacttgttcaaacctttaatatttttctatctcactttaaaagaatccttttaccctttaaacayaggcaagaaatccacattcccaggccttcttataatcttttaccaaaagtatattctactttccttacactccttgcatattgtagaactgtttctttagtagtctcaaacacatattgcactgttaacttttagcaacttttacttttggtgaaaaacctggttcataagtgattataattatgtgccaggtgtggagcctaggacaccagacagaagtgctgtaagagctgactctttccagcatggctaaggggcatggcacttcacatgtccccaggcctcatctagaatctaatgcttcaaagtagatatt

SEQ ID NO: 436468 - DNA, 576 bp, Homo sapiens
ggggctgccatgacaaagcaccacagacatttattttgtgggctggaagtcccagatcaaggtgtcagcagggatggtctcgctccttggcttgtagatggcatcttctcttgtgtccttacatggttgcccctctgtgggtgtctgtgtcctcatctcctcttcttatgaggacatgggtcatactggatcagcacccatcttaatggcctcattttacctgaatcacctctttaaaggctctgactccaaatacagccacattctgagataatggggttgatgctggtgtggggtggggtgtgtgtatgtttgcatgttttgtgcaggtgtgtgctgcrtggtgtgtgtgtagtgtgtggtgtgtgtctgtggtatgtagggtgtgagtgtggtgtgtagagtctgtatgtgtgtagagtccctatttgtgtgtctgtatgacatggagtcatgcacatggcctgaagacatcatccctggacaaaggaggcggacatcgtcctgggccatctctatttagggaaggaagggtgcactgactgaacatggagaagttggataagagtggatgag

SEQ ID NO: 436469 - DNA, 575 bp, Homo sapiens
catggcaaattttggtgggggatgaggataattgcccctaatgaagtgtgactgtccgttagaacatgacagaccttggagagtggactctcactctcctctccccagcctggactggacttgaaccacaaacccaggtgattcctttagatcccaagttgcgattcacgtttccctctctgtttttaattgatgattgataataactccatttgctgaacaagctctgtaagagtgtgcaaaatagtactgttctacacaggtaaagaatacgcatgccactttcatgctcatcattrgtgtttttggatcttattcaggactttaaaaaatcctcagaacttttttcatttttccattttagtgtgggaatgaggcatcagaattgggtggagagactgaatgaaagtcttcaactctgattaagttagtattttaaccctaaatagattcacttttttttaagggaattgttaaatttttcttctcttatatatttatttttaaaataaaaattgtgtatatctaaggtgtcctatgtaatggcttgatatacctaaacaatgtaaaacaat

SEQ ID NO: 436470 - DNA, 577 bp, Homo sapiens
gcccttgccaccgactccagtgggcttccctcccactgtcgcaattgcatgtttgcttaggtggtggttgtctccctatctgcgctataaaatactctctgttagtgagccaagactgtgccactgcactccagcctgggcgacagagcgagactccgtctcaaaaaaaaaaaaaacaactctgtgaagctagtgtagaggccatgtctstcttgttcaccacggagtgcctagcacatagcagagttccttgcacataagcacacaataagaagtaaattttaggcacagtataataagagtaaataattaggtataattactatgatggcaaaaatgtgaataaactgttaaggaaaatggacaaggaaattactttctggcagaacctgggggaaaaaaacttcctgggagatatatttttaaataaatgtatagatgctccttaatttacaatgggattacatcctgactagtcaaaaaaattttaagttgaaccattgtaagtcaaggaccatctgcactgtgaaaagttcaaacacatggaataatagaatcaactcccatgtacaggttg

SEQ ID NO: 436471 - DNA, 486 bp, Homo sapiens
acgttacatagacgttcaagagtagagaactcagggacttctgatttatatcaagaaatgcatacacagcagacgtgtgcctgtggagtggaattctggaaaagctcacagcccagaacataatgcagactcccccagccacagcaccttccaawcctgagaagagtgctgattctccatctgagcacccattctcctgcaacatcaggggagaggatttcacctaagggtcagaccagcatctccaaacccagctccccacctttgcctgttggtggcacttgtgggagaaggggagatggtatgaaaagagccacaacaggagtcacctggacagggtggagcttgatggaaactgacatttgtgcccattggaggcaaatgtagaatttggtatcttccgtagcgtcaggcacatgaaactctccagtgcccatgacttttgacagtgacttcagagcacatctgggagacccatgtggccca

SEQ ID NO: 436472 - DNA, 486 bp, Homo sapiens
acgttacatagacgttcaagagtagagaactcagggacttctgatttatatcaagaaatgcatacacagcagacgtgtgcctgtggagtggaattctggaaaagctcacagcccagaacataatgcagactcccccagccacagcaccttccaaacctgagaagagtgctgattctccatctgagcacccattctcctgcaacatcaggggagaggatttcacctaagggtcagaccagcrtctccaaacccagctccccacctttgcctgttggtggcacttgtgggagaaggggagatggtatgaaaagagccacaacaggagtcacctggacagggtggagcttgatggaaactgacatttgtgcccattggaggcaaatgtagaatttggtatcttccgtagcgtcaggcacatgaaactctccagtgcccatgacttttgacagtgacttcagagcacatctgggagacccatgtggccca

SEQ ID NO: 436473 - DNA, 486 bp, Homo sapiens
acgttacatagacgttcaagagtagagaactcagggacttctgatttatatcaagaaatgcatacacagcagacgtgtgcctgtggagtggaattctggaaaagctcacagcccagaacataatgcagactcccccagccacagcaccttccaaacctgagaagagtgctgattctccatctgagcacccattctcctgcaacatcaggggagaggatttcacctaagggtcagaccagcatctccaaacccagctccccacctttgcctgttggtggcacttgtgggagaaggggagatgrtatgaaaagagccacaacaggagtcacctggacagggtggagcttgatggaaactgacatttgtgcccattggaggcaaatgtagaatttggtatcttccgtagcgtcaggcacatgaaactctccagtgcccatgacttttgacagtgacttcagagcacatctgggagacccatgtggccca

SEQ ID NO: 436474 - DNA, 432 bp, Homo sapiens
ggagatataaccacagatcccgtagtcatttaagagataataaaataacatactaacaactatatgcacactcatattaaaaaaaatattaaaaactaacatgggcctggcacggtggctcacgcctgtaatcccagcactttgggaggccgaggtgggtggatcacttgaggtcgggagytcgagaccagcctgaccaacatggagaaaccgtccctactaaaaatacaacattagctgggtgtggtggtgcatgcctgtaatcccagctaatcgggagactgaggcaggagaatcgcttgaacccgggaggcggaggttgcagtgagctgagaattgagccattgcactccagccagattacgactatagtcctagctacttgggaggctgaggtgggaaaatggctacagcccgggaggtaaaggctgc

SEQ ID NO: 436475 - DNA, 432 bp, Homo sapiens
ggagatataaccacagatcccgtagtcatttaagagataataaaataacatactaacaactatatgcacactcatattaaaaaaaatattaaaaactaacatgggcctggcacggtggctcacgcctgtaatcccagcactttgggaggccgaggtgggtggatcacttgaggtcgggagctcgagaccagcctgaccaacatggagaaaccgtccctactaaaaatacaayattagctgggtgtggtggtgcatgcctgtaatcccagctaatcgggagactgaggcaggagaatcgcttgaacccgggaggcggaggttgcagtgagctgagaattgagccattgcactccagccagattacgactatagtcctagctacttgggaggctgaggtgggaaaatggctacagcccgggaggtaaaggctgc

SEQ ID NO: 436476 - DNA, 432 bp, Homo sapiens
ggagatataaccacagatcccgtagtcatttaagagataataaaataacatactaacaactatatgcacactcatattaaaaaaaatattaaaaactaacatgggcctggcacggtggctcacgcctgtaatcccagcactttgggaggccgaggtgggtggatcacttgaggtcgggagctcgagaccagcctgaccaacatggagaaaccgtccctactaaaaatacaacattagctgggtgtggtggtgcawgcctgtaatcccagctaatcgggagactgaggcaggagaatcgcttgaacccgggaggcggaggttgcagtgagctgagaattgagccattgcactccagccagattacgactatagtcctagctacttgggaggctgaggtgggaaaatggctacagcccgggaggtaaaggctgc

SEQ ID NO: 436477 - DNA, 432 bp, Homo sapiens
ggagatataaccacagatcccgtagtcatttaagagataataaaataacatactaacaactatatgcacactcatattaaaaaaaatattaaaaactaacatgggcctggcacggtggctcacgcctgtaatcccagcactttgggaggccgaggtgggtggatcacttgaggtcgggagctcgagaccagcctgaccaacatggagaaaccgtccctactaaaaatacaacattagctgggtgtggtggtgcatgcctgtaatcccagctaatcgggagactgaggcaggagaatcgcttgaacccgggaggcggaggttgcagtgagctgagaattgagccattgcactccagccagaytacgactatagtcctagctacttgggaggctgaggtgggaaaatggctacagcccgggaggtaaaggctgc

SEQ ID NO: 436478 - DNA, 406 bp, Homo sapiens
ctcaaaggacaggtactgttttgaagatcatgccaaccacatgagcccaagaatggagaaatcctgaatgtgctcgagaaaggaagccaagtgaggagtgaggctccctgatggaggaaggagatggaatgccaggggtgccctgtcctggggggaggcacacagtgtggaaggcaggcagtgccatgcagcctttaccagtggcctaggaggcctgaagaagaacttcctcctagcacctcaaagatagcccctccttccttacctgctgagctcctcactgccctgcaccctygcttgcccagggcttcccactcacctggacaaaggtccagaagatgttcgttctcctctctccaaggttcgtcgccttgctccagctgttcgatgagttttggtttggaaa

SEQ ID NO: 436479 - DNA, 613 bp, Homo sapiens
acaacctctgtggaaaacagtatggagatttctctaaaaataaaattaccattcaatctggcaatccactactgggtatctactcaaaggaaaataaataattatattaaaaatagaactacactcatatgtttagcacagcagtattcacaatagcaaaaatatggaatcagcctgagtccactaacatatgactggataaagaaaacatggtgtgtatgtgtgtgtttacacatatatacaatgtaacactattaaaccataaatattcagccataaataatgaaatcatgttttgtattaatatggaggaaattkgaggctatatcttaattcaaaccactcagaaacagaaagtcaaatgccacatgttctcacttacaagtgggagctaaacaatgtatacacatggacatagagggtggaaatagtcactggagactcaggagggtaggaggggagtgagaaatgacaaatttcttaatgggtaaaatgcacaatattcagatgatggttacactaaaagtccagatttcaccactagggaaatgttttgttacatgttatccatgtaacaaaaatacacttgtaccacttaaacttatacaaaaaa

SEQ ID NO: 436480 - DNA, 613 bp, Homo sapiens
acaacctctgtggaaaacagtatggagatttctctaaaaataaaattaccattcaatctggcaatccactactgggtatctactcaaaggaaaataaataattatattaaaaatagaactacactcatatgtttagcacagcagtattcacaatagcaaaaatatggaatcagcctgagtccactaacatatgactggataaagaaaacatggtgtgtatgtgtgtgtttacacatatatacaatgtaacactattaaaccataaatattcagccataaataatgaaatcatgttttgtattaatatggaggaaatttgaggctatatcttaattcaaaccactcagaaacagaaagtcaaatgccacatgttctcacttacaagtgggagctaaacaatgtatacacatggacatagagggtggaaatagtcactggagackcaggagggtaggaggggagtgagaaatgacaaatttcttaatgggtaaaatgcacaatattcagatgatggttacactaaaagtccagatttcaccactagggaaatgttttgttacatgttatccatgtaacaaaaatacacttgtaccacttaaacttatacaaaaaa

SEQ ID NO: 436481 - DNA, 585 bp, Homo sapiens
tgtgtgaacgtaagttttcaattcatttgggtaaatactagagaatgctattgctggatcatatggtaccagtatgtttagttttataggaaactactaaattgttttccaaagtggyggtatcatttgcatttactccagcaatgaataaaagttcttgttgccccacatacttaccagcatttggtgctgtcagtgttttgaatttttgcaattctaatatgtgtgtagtggtatctcattgttgttttaatttgcaatttcctaatgacatatgatgttgaacatcttttcatatacttactctgttatatttttaagtttcacatgagacagcttctttgacccatggatatctagtagcatgttgtctaatttccaagtgcataaaaaacacacctggcattttctgtttttcatatccagtttgacttcattatggccagagaacatattttatagaatttcaattttgtaaaatttgttagcgtttgttataatgatgtcatctaccttgatgatgtcatctaccttggtgaatgtttcaagtttgcttgaaaagaaggtgcattttgttcttgtagg

SEQ ID NO: 436482 - DNA, 618 bp, Homo sapiens
ttccactgataacaggttaaaactggattttcaaaaataaaaataccatcatcatcattctgttactcataaagaaatagaaatttgtttaaaaggttcaaatcatttttatttcctaataaatacattatttgaataatatgtagctattacttgtggtacttgtgactccactcatagataggacccgtccatttccaaggggtttgctgtcctgaacggacatgaatacagatatcaaaattaatgactgacatctataactatgacagccataaatttccagataaaggctttagcaagcaagggaaaatttctgatttcttcctataaattttcctgtagcaactgtaaggcaaaatctgtccacagaaattcttagtcttaatatacttactcctcaatccattactrtattctatcagaattgaatttaaaaaatagtagtaaacattttaagtaagagtaactttacacctgaacagaattctaataagaacctatattcattctactcagagaacacttgtcatatctcttatagggatagatccagccatgaagagggattatattagtatctgtgcttcttatcagaagaaaataatatcattacca

SEQ ID NO: 436483 - DNA, 572 bp, Homo sapiens
ggtgtaatgactccctggtagtcagacatcatcagaggctgtgagacattcactaagcttatgaggtttcaatgagaagaataattagatttaagataaaaaaaatctactagccttcctttccaagttccagagatggctaagaacgttgacaaaaaaaaaaaaaaaaatgcattctaggccaatcccaggagtgtcctgatgaaggctatttttgaactagyggtgcatgaaaagaaaaatctgctttgaatgtggatgagtaaacaacacaacacacacaaatttaaatttctgaagaaacaatttccacatatttcaccttttcgctcctattctcatcccagtcacatggttaagaaaatctcaatctgaatatggataatctgaaaactctaaatatcactctctgaaaagatattaattggaaagtacttttctaaattataaaattagaaaaagttcatatgttgtattgcttttttgtgttttgtttttgtttgttttttcttacccactacaagctttctgtttggagtgactattacatagcagcaccaagtaaccactcc

SEQ ID NO: 436484 - DNA, 572 bp, Homo sapiens
ggtgtaatgactccctggtagtcagacatcatcagaggctgtgagacattcactaagcttatgaggtttcaatgagaagaataattagatttaagataaaaaaaatctactagccttcctttccaagttccagagatggctaagaacgttgacaaaaaaaaaaaaaaaaatgcattctaggccaatcccaggagtgtcctgatgaaggctatttttgaactagcggtgcatgaaaagaaaaatctgctttgaatgtggatgagtaaacaacwcaacacacacaaatttaaatttctgaagaaacaatttccacatatttcaccttttcgctcctattctcatcccagtcacatggttaagaaaatctcaatctgaatatggataatctgaaaactctaaatatcactctctgaaaagatattaattggaaagtacttttctaaattataaaattagaaaaagttcatatgttgtattgcttttttgtgttttgtttttgtttgttttttcttacccactacaagctttctgtttggagtgactattacatagcagcaccaagtaaccactcc

SEQ ID NO: 436485 - DNA, 572 bp, Homo sapiens
ggtgtaatgactccctggtagtcagacatcatcagaggctgtgagacattcactaagcttatgaggtttcaatgagaagaataattagatttaagataaaaaaaatctactagccttcctttccaagttccagagatggctaagaacgttgacaaaaaaaaaaaaaaaaatgcattctaggccaatcccaggagtgtcctgatgaaggctatttttgaactagcggtgcatgaaaagaaaaatctgctttgaatgtggatgagtaaacaacacaacacayacaaatttaaatttctgaagaaacaatttccacatatttcaccttttcgctcctattctcatcccagtcacatggttaagaaaatctcaatctgaatatggataatctgaaaactctaaatatcactctctgaaaagatattaattggaaagtacttttctaaattataaaattagaaaaagttcatatgttgtattgcttttttgtgttttgtttttgtttgttttttcttacccactacaagctttctgtttggagtgactattacatagcagcaccaagtaaccactcc

SEQ ID NO: 436486 - DNA, 605 bp, Homo sapiens
attttattgatgtcactactacctatgatccattgattcttcatgagcaaatggtatatgaaggtttcatagatttgctccttctctgtcatggagttctcacatcacataccgcttctgcatcctacattcctatcctcatccatctattgatagagattccagttctgagatcttttggggtttctgtcaagttttatattcaccgttttctagctgtgatgggagggacttgaagcattctctggaaatgtgtatgcagaagggataaaggaaagtagctcagcagaaggcacgttgctgacctttatccaccactgggagataatactataaagaaaaaataaataaataagctagagagttttagtgtgtaactttattgaggaattccatgatttactgttcaatatagcaaggcttatcatgtaacttagctgtggaactcyctgatttactgtgaagcacattggggcttatcatgtaactattacacgagagtcttggcaaagacatggttagggttttgcagagaccattaagagtgactgacatgctttcctcaaatgaaccaaagcagactctggctagcaaacacaattgtt

SEQ ID NO: 436487 - DNA, 605 bp, Homo sapiens
attttattgatgtcactactacctatgatccattgattcttcatgagcaaatggtatatgaaggtttcatagatttgctccttctctgtcatggagttctcacatcacataccgcttctgcatcctacattcctatcctcatccatctattgatagagattccagttctgagatcttttggggtttctgtcaagttttatattcaccgttttctagctgtgatgggagggacttgaagcattctctggaaatgtgtatgcagaagggataaaggaaagtagctcagcagaaggcacgttgctgacctttatccaccactgggagataatactataaagaaaaaataaataaataagctagagagttttagtgtgtaactttattgaggaattccatgatttactgttcaatatagcaaggcttatcatgtaacttagctgtggaactctctgatttactgtgaagcacaktggggcttatcatgtaactattacacgagagtcttggcaaagacatggttagggttttgcagagaccattaagagtgactgacatgctttcctcaaatgaaccaaagcagactctggctagcaaacacaattgtt

SEQ ID NO: 436488 - DNA, 595 bp, Homo sapiens
tactcttgcatttgttttagtctattttcaactctgtagctagagtgagtgygttaaaatgtaaaagcagaatatgccacttttcagatcaaaaccttaaataaatttcttactctagagtgaaatacaaagcctttatatagggtgcaagattgtgtgatcttcccttccttcattactttcatgaattcacctcctaatgctctccttatttactgtagccacaaaaatttctgctccatgtacatgccagctgaacttctacatctacttgaaatgctcctgagtggctctctccctaagcacattcaggtctatccaaatatcaccttctcaatagtcctccgtgaccatccttgaaatctcacttctcacatttcctatccctttcctcagttttattttgctttttggcactagtctctttaattatattatagaatttagtatagatttttcttagtttctgacttaccattcttaagatgtaggtttcataagggatgcaatttttgtctattttattcactactgtatctccaacaccaagaataatgtctggccacatcataagcacacaatcaataaaccattg

SEQ ID NO: 436489 - DNA, 595 bp, Homo sapiens
tactcttgcatttgttttagtctattttcaactctgtagctagagtgagtgcgttaaaatgtaaaagcagaatatgccacttttcagatcaaaaccttaaataaatttcttactctagagtgaaatacaaagcctttatatagggtgcaagattgtgtgatcttcccttccttcattactttcatgaattcacctcctaatgctctccttatttactgtagccacaaaaatttctgctccatgtacatgccagctgaacttctacatctacttgaaatgctcctgagtggctctctccctaagcacatycaggtctatccaaatatcaccttctcaatagtcctccgtgaccatccttgaaatctcacttctcacatttcctatccctttcctcagttttattttgctttttggcactagtctctttaattatattatagaatttagtatagatttttcttagtttctgacttaccattcttaagatgtaggtttcataagggatgcaatttttgtctattttattcactactgtatctccaacaccaagaataatgtctggccacatcataagcacacaatcaataaaccattg

SEQ ID NO: 436490 - DNA, 602 bp, Homo sapiens
taagcatgttggttatgaaagcaagaagagaggtagtgctgcagctagaaagaaatatttggtggaagagaggatttttaatttctatttttattttgatgttgttttaagagtggagaaacctgagaatatttatacccaaaagaaaatgatcccacagagaacaccagtttgaagattcacacaatagagaacctgcacatgtacacacctactaacagaacacagcattttcctgttacttyccttgaatgctttcagaaatccagaaatgtgttttactcctccaaatctagcatcagaaatttggctacacgggtctgtttgaggaggttcggtgcttctaagtgattcagacattccagcaacttgaattggacatcttcaagctaatctagagagcagcatatagctactgggcttgctccttcagactttttgtcttgaaacaaagttaaatctcagtattcaaaccagataaaatcagcccaagtcaaggttcacctactttccagaatagaacaagattctggttggtgaactcatcaaaaattatcctgtgaattgtccaagataaaaaatgcagtcacgaagtgtgatga

SEQ ID NO: 436491 - DNA, 603 bp, Homo sapiens
tttttgtttgtttgtttgtttgtttaaaaaatattgttcatttacacagcaatctagcaaaaatgcatgaaaatgacagacatttcttaaaacccctacatagatgagtcatcataaacgtcaataatgaagtcctcattattgacatttaaaagtcctctggaatggtttggggcttgtctgcggtccctacagttatagttagctcagttggttagcatctggtgctaaggagaccaagcttgtggctttgaactagaaagcattgtcaagagatttaaaattccattatagtgccaaaggctatgaaaggccaaattctaaacatgtggtggccaccagagtgaggggtgwgaaagctgattctcagtgcaaaccaatcactgcctcttagaaaattccatttaaaagggtttggttaaaaggtattgggggtgttaataacctcagtaagggcaataataagaatgaaatggggccacatatttactcacactacagcctagaagtgcacagaaaaaaaatgtacctttgttgcatctttaattcaaactacttcctaagccatgacacactgggtgttgaggaagaaaaacaaccttt

SEQ ID NO: 436492 - DNA, 531 bp, Homo sapiens
ctataccttgctccattcctctttttaaactttgagatttagccacattgaatgacctgtaagtttctccggagtgttctgtctcgttatgcattcttcctctgcacatgctctttatactaattataatgtccccctccctcaacttcttcttctaacttatacctgctcatcctgcaagacttataccgtcttccccaaaacccttaacctcaaccagtccccttcctgccatatgggctcagtacccttaccgtttgctctctttacatgctaacattgcacttctcacacaccctgctatgaaaatattttttgacaaacrtaagtgaatggctaattttacctgtacttaactgggttaagggatgcctggatagttggtaaaatattatttctgggtacacctgtgaaggccttttggaagagatttgcattaaaattgatagaccgtgtaaagaagatctgccctcatcaatgtgggcaagcatcatccaatctatcgaggacctgaatagaacaaaaggggag

SEQ ID NO: 436493 - DNA, 605 bp, Homo sapiens
tccttgctgctgttccaggactcttccttctattaaaagctaacatttattgtgctcttacttatgtttgagccaggcactgagctaagcctattaatcttcacaacaacctgatgtgataaagactattttattcctatgctgcagaggagaaaaaatacagcacagrgagataaagtaactttaccaggatatatttatagtaagtgctagagctgggatttcattatagaccccagattccagagcccgcacacctctcaacatgccattcctgtagccagatgatattgtggttgaaggcataagaaaatacaggcattgagaaacctggcttctggtctctgctcatttttattaagctacaaaactttgtcgtggtcactggtcactggaactcagtttcctcatctatcaagagtgtggagtttaattctgacattcactatgctttcttctgacttctattttggtgactctattctaaatgttaaactgagcttcacaagctccatgggaaagggaatcatccatgtagtcttgacagccaaaaaacccatttgcaaaagataaagaaaaaaaaaagagccattcaccagaagagt

SEQ ID NO: 436494 - DNA, 593 bp, Homo sapiens
gctgccacagatctgtattctaaagcagaggtccaaagcagagataattacttcctcttttgtggtgtccctgtagttttatattcctggattatggcattcatgcaactacttatataatggctttccccacttcttctttcttttgcccttagctgaaatttgggattatgttattcagtgatattcatctcaacattttgcctatcacacaagagacacaaagtaagtttggtttatttattgaacatgccacaattttatttttattctcagaatcaaattttgtttacttctatgtagacagatgctgtagtccaggggttagtaacctttttctgtaaaaggccaaatagtaaatgttagcaattgtcggccatatggtctctgttgcagttactcagctctgctgttgtattgcaaaagcagccataaayaatatctacatggaggaggttggttttttgacaataaaactttatttacaaaaacaggcagtgggctggttttggtccacaagctataatttttcaattcttgctttagtctactaaagagattctctctctactccttgccctcatttttctttc

SEQ ID NO: 436495 - DNA, 607 bp, Homo sapiens
aataggtattccaaacatattgtgtgaactggggttcaccataaggtacattttttaaagtctgcttttccagtattatcataccagctggagttacttatttcattccagctcagtgggaatctacaggctgcataaaaatacattaaggaatatttataagatggcaaacaggaccaaatgtatsggaaagaataatattgtgcattgctcattacaaacatgattattttgtgtatgtaacggatgtgttgttaaagcacagtgggttgtttgaagtttacaagtttgttatggattgatttattcatgaaatgctttgtttctatgacaactttattggtttgcctgtggtctaaatacatataggcatggcaggaattccacggtacaaaacaaattacacagtcacccctgaatcacttgctgcctttagggagtgtagcaaaaggatttccaaccagggcagacatcaccattcccagagccagcattagagagatcacataataaaggagaaaaaggctttttaaaaagaacaacttaaaagtctccaacagcctccaagtctgttatagaaggaaagattgaaatgagcaacgaaatg

SEQ ID NO: 436496 - DNA, 566 bp, Homo sapiens
tgctgcctttagggagtgtagcaaaaggatttccaaccagggcagacatcaccattcccagagccagcattagagagatcacataataaaggagaaaaaggctttttaaaaagaacaacttaaaagtctccaacagcctccaagtctgttatagaaggaaagattgaaatgagcaacgaaatgcccaacataagataagagaaatacaatctacccacaatgcatgagggttttatttaagaaaaacactgatcaaaggcccatatttcctgctataaataataccccttgaagaataccattaatattcacaacagttgtgtaactacaaaagaaactgagaattgttgtttagagaaaataataatggattttggaagataaaaggaaaaggtggaaaagaaaaaaagacagaaaaaaagatatttactgtggaccaaagatcatyattcagtgaaacttaagtcagggaaatcatgcctaaggggacctagaccttgtgaaagctagaaaaaagaaagtggaatccaaattatattcctcatattacccctgaaatgcatccc

SEQ ID NO: 436497 - DNA, 558 bp, Homo sapiens
ctggaagttactccagttgagtcagtaagtggggagtgaatgtaaagtcatgggacatttctacatgttactgtwgactttataaaaactgtatacttacactaccttaaatttacaaagacatttgttgtttcttcaataataaattaccttagtttactgaaactttttactttataagccctttaatgtttaacttttttactcttataacacttagcttaaaacacaaacacagtgtacagctgtacaaatgttttttctttgtattcttattccataagttatttttctatttataaaattatatatatatatatatatatatatatatatatatatataaaacaatttgaagttcttgttaaaaactaagacacacacattagcctagacctacatagggttaggatcatcaatatcactgtcttccacctccacatcttgtcccactgaaaggtcttcaaggacaatgaaatgcatagagctgccatcttctgtgataacaatgcctttttttaaatactcctaagggacctgtccaagtttgtattacaa

SEQ ID NO: 436498 - DNA, 602 bp, Homo sapiens
catcaatatcactgtcttccacctccacatcttgtcccactgaaaggtcttcaaggacaatgaaatgcatagagctgccatcttctgtgataacaatgcctttttttwaatactcctaagggacctgtccaagtttgtattacaattaacattattttaaaaagtggaaataatacacactaaaatagcaatgaaaagtataatacagtaaatacataaaacagcaagactttattattatcaggcattatgcactgtacataattgcatgtggtatacttttatatgactggaagtgcagcaggtttgtttacaccagaatgaccacaaagacatgagaaatgcattccactatgatggctgcaacatgactagaaaattttcagctgccttataatcttatgagattaccattgtgtatgtagaccttccttaactgaaatgccattatgtggcacgtgactatatatataaaatatattctcaatctttaatgaacatttttggaaatccagtgataactggtaggtttccatattccatagaaagttaataaagaaaaattaaaggtatagtgacattgtgtatggtttctcttcatt

SEQ ID NO: 436499 - DNA, 505 bp, Homo sapiens
attaactaactttaaatgatggtgtctaatatctcagttttcagaagtaatctaggtaaactgttaaaaatgaaaaaaaattgagtacatgtaagtggaataaatattttaggtaaactttttgtgtaatttaaaatcttaaaattatttttaatatgcattggatatctgggtcatttccaattaagaaaggattatgatatgttaaaatatttttctaaaaattgtggaattattcttatatataaagtgctcatatctgatagttcacgatttcttgctttttagggtttcaccaaaatttaaagttactaaggataagaatcatagttcatgtataattctgtatataaaatatgccaaagaatgttattagtgagaaaaagagtttaaaaaytaacctaaaagttagttcaaattacagatttgaaaaagatatttatgaaacaaggtagtaaagaaccagtaagtaggggagagatatgtgaagaaaattatgtatatg

SEQ ID NO: 436500 - DNA, 533 bp, Homo sapiens
gagcattttttcatgtgtctgttgcctgcataaatgtcttctttcagaagtgtctgttcatatcctttgcccactttttgatggggttgtttgattttttcttgtaaatttgtttaagttctttgaggaaaaagcaccagaaacaatttgctttcatatggcgcaacaaaagtatatttttactgtcttattatataaatattatgtgtctcacattctgagatatgctgaagaggtattgatcttcttactcttccaccagaaattacattgtcctactacatgaatgggatcattctcacagggcctacttagcagcttgtctcatgtaccacaaatgttttgttaagacttagcatactacagcataggagaaagactccatgtaaaattcaggagtgaaacctgcccctcagtgttgtcttcttggtttaagtcaggtcagactattttttctaaagtgaaataaaagtcatttcacctatgagcctgttygagtttcagaaaaaatgtttttcaaatttggtaacagt

SEQ ID NO: 436501 - DNA, 541 bp, Homo sapiens
taatttggctctatctaaggactcttccaacacttcataattcctgttccactgttatatcatatatagctatatacttttaagttaaactaaatttacaactattagataacaaaaaagaggatacatgacataatgataagaataattacaagcctaatatataaatatgtttttctgactactctaaggaagctgttgtcttctgaggtttggagttgaatgaaagttaatgtgaagatcrcatatattgttttcctttaaatctcataatgtattaattagaggaggaaatgctgtagtttgtttttgatggtgtttagttttctttttatttttgtttgttaatagttcagtctttctccaataacactgagttaattgttcgtaaaaataaggaaatctgtatttctttcatttcaaatttccttcgaattaaaagctacttgacctgttaaataaacatgcctcattcaaagtgacttttttttttttaattttgacaagctataataaaagcaaagtggaagatctaggtcga

SEQ ID NO: 436502 - DNA, 442 bp, Homo sapiens
ggtgcatatacaccatggaattctattcagccttataaaagaatgagatcatgtcctttgcaaggacctggatggagctggaaggtattattctcagcaaactaacacagaaacagaaaaccaaatactgaaagttctcacttataagtgggagctgaatgttgagaayacatggacacacaaaggggaacaacacacaccagggcctatcagagagtggagaactggaggagagagagaatcgggaaaaattactaatgagtactaggcttaacacctttgtgattaagtaacctgtacaacaacccacagtgacacaagtttacatataaaagaaacctacacttggcacttgtaaccctgaacttaaaacaaaagttaaaaaaaaagctaagttacatcaactagcaattaaagaattcatattgaaaataaactcatc

SEQ ID NO: 436503 - DNA, 599 bp, Homo sapiens
tattatttttagaaatttgcttttattatatgacaacacaaccctgataactttccatgtgggtaaacataaaactttctttctcgtttttaatgattttatagtattctacttaatatttatagtactttacaactgtattatagttgttttcttatgtattcactttttgcattaaaaatacaaaaattcagtggacatttgtaggtggtaatgatttataggtaaaaatacatttgcaagtattttattttttaagattgactactataagtagaatttgtaaaagggaataaactttgaaatgttagtatctactttaaaacagataaccacatctcccaatatgcaagaaagcctcttgtcctcaaaatcttgtaaaatagaayagtatcgaacatctagagagcaaagagtggaaaatatttttgtgtctgtttcaagtccctgaatgctagtgaaagtggtcatcattttatgattaaaacttgtctccttacattattttatttgatttgctatatttgttttgtttggattactgctatgtggagaattttcacatgatactgctgcttaaaaattatgggtatataggt

SEQ ID NO: 436504 - DNA, 635 bp, Homo sapiens
caatgtataaagaaaatagtcaggaaaagtgaaagaattgttcagaatatattgcaattttagacagtgcctgcaggggagaccacagtgaaaagcaacagagtgaactatatagaaatttgctgtttatttttcttagtggttatcctagatcaaaaataagaatccaggattaagccaacactgatgctctacagttgttttaattgaattgtactcatagaaatatcttatctcttcaacttttatttaaaataagaaattatattttgtatgtttttctcaaatttttgcatcctgttaactgtgctttgaaaagattaataacctcattgtacaaattaattagaatatatatggtaataaacacaaaatgcattattaataaattatagagaaaaggaaaaatgtgcaatagtttggcaaacgcaattagtttttaaaacagtggacacaagcaagagtaaaaatatgtcaggtaagaaactaaaatgctttgcaactaagcaaagatctattcagacactgagttttctcctcacagtttctgctggacttaccamaaattctcaagagagcacacgtattttaaataaatgttctaaaagcaaagtcctgagacattattttcaatg

SEQ ID NO: 436505 - DNA, 593 bp, Homo sapiens
agaaaaaaactattttataattgatatagaaccacaaaacagcccaaatagctaaggtaaccctaagcaaaaagaacaaagctggaggcatcacgttacctgaattcaaagtataccacagggacacagtaaccaaaacagcctggtactggtacaaaaaacagacacaaaaactaattaaatggaatagatcccagaaataaggccaaccacctacarccatctgatctttgacaaagctgacaaagaaagcaatggggaaaagactccctatccaataaatggtgctgggataactgactagccatatgcagaaggttgaaactggaccccttccacacactatatataaaaatcaactcaagatggattaaagacctaaatgtaaaaccaaaactataaaagccctggaagaaaacctaggcaatgccatcctagacatagaaacaagcaaagattttatgacaaagttgctcaatgcaattgcaagcaaaatcaaaaattgacaaatggaaagtgcttctgcacagtaaaagaaaccatcaaccgagtaaacagacaacctagagaatgggagaaaatttttgcaaagt

SEQ ID NO: 436506 - DNA, 593 bp, Homo sapiens
agaaaaaaactattttataattgatatagaaccacaaaacagcccaaatagctaaggtaaccctaagcaaaaagaacaaagctggaggcatcacgttacctgaattcaaagtataccacagggacacagtaaccaaaacagcctggtactggtacaaaaaacagacacaaaaactaattaaatggaatagatcccagaaataaggccaaccacctacaaccatctgatctttgacaaagctgacaaagaaagcaatggggaaaagactccctatccaataaatggtgctgggataactgactagccatatgcagaaggttgaaactggaccccttccacacactatatataaaaatcaaytcaagatggattaaagacctaaatgtaaaaccaaaactataaaagccctggaagaaaacctaggcaatgccatcctagacatagaaacaagcaaagattttatgacaaagttgctcaatgcaattgcaagcaaaatcaaaaattgacaaatggaaagtgcttctgcacagtaaaagaaaccatcaaccgagtaaacagacaacctagagaatgggagaaaatttttgcaaagt

SEQ ID NO: 436507 - DNA, 371 bp, Homo sapiens
atactacctcaaatcacaaaacataaatgaaatgatagtaatttccctcataaatagtcattcatagtttaataatttgaatagtttgttcactggatttcaaattaagacattaagtagatgaaacrtctatttgtgttttcttgcctttttagccactgtaaaaaatttacataaaaagttagtatttttagccagaatttatctatgtaatcgagtgtaatctgtgtaatataagtttatgataaaagtaattgcacttttatttgccttttaggattattggtttaatgattttattagtccatattttcttaatttatattactgtgatacctataagcaattaagcagaaataaacatgttattc

SEQ ID NO: 436508 - DNA, 309 bp, Homo sapiens
tcatgggttctctttaattgaggcatgtgctattttaacatgaacctttaattacctttcctgacatttaccagcataaatttttccaygcacttttggagatgaaacacattaagtgcttacacaaagttactggaaattttactgattatagtcatttcaaatacagtttgatgcactgttcaaacaaaagtgtcattgtattcagtcatctttagtatgtaaaaggacacatcctcccttcattttcctgtcctaatagacacagagagagtctacaatagggcaccaataattttgaaccaaact

SEQ ID NO: 436509 - DNA, 631 bp, Homo sapiens
gacttttgtaaaatggtatctcgttgtagttgtgatttgcttttctctgatgatttatgatgttaagcacttgttcatgttttttggccacttgtgtgtcttctttcaagacattcatgttcacctttcttgcccactgtttaatggagttatttgcttttggtttgttgaattatttaagttccttatagattctggatattagatttttgtcagatgcatagtttgcaaatattttctctcattctgtgggttattcatttactccattgatagtttcctttgctgtgcagcttttagtttaatcagatcctactgtcaatttttgttcttgttgctattgcggacttaatcattctagtgatcatctgataattatatttttcaaagaaaacatctgtacaaawtttgactatgttgaacataaatgtttctgctcccagtgtagctatctatatcttttgttgattagtaagttggtgcctgtggtatcagcctatatttggttacatgcttaatatgagcctgtgtcttttaaaatacattgtcagctgttaaaactaagcttcagagtctacaatatataggttttggtgattatgcactgagtgtaccaatccacctaaatgta

SEQ ID NO: 436510 - DNA, 606 bp, Homo sapiens
gtgatgatcatttccatgcctttttctaagctttaggcttggctgggaatccttgatctttggcttgtagatccatcacttcaatttctgcctatgttgtcaggtggcatttctgctgcgtgtgcaactgtccctttctctttgcttttctcttaaagaaagtagtcatattagatcaaggatccacttattcctgtatgaactcattataatttacatgtatatctcaattatatctgcaaagattattaccccgtaagttcctattcacagtggcagaggttaggatctccacatatcytcctagagaactcaattcaacccataacgtaagccatgatctatcattaagtacataaagcactgacaatggaaaagagaaattgagaaatccttgataagttttagtgatcaattaaatgacaaaagactgtgtgtaatatctttacactcaatgactacttgtgaaaccccctaaaaaattgacaaagattctctgtcatctattgagcttcagatttgacaaagctataccaactccaaataaaatgtcatttatttttggaaaatgttatgttttccattctttgttatgccaagtagata

SEQ ID NO: 436511 - DNA, 606 bp, Homo sapiens
gtgatgatcatttccatgcctttttctaagctttaggcttggctgggaatccttgatctttggcttgtagatccatcacttcaatttctgcctatgttgtcaggtggcatttctgctgcgtgtgcaactgtccctttctctttgcttttctcttaaagaaagtagtcatattagatcaaggatccacttattcctgtatgaactcattataatttacatgtatatctcaattatatctgcaaagattattaccccgtaagttcctattcacagtggcagaggttaggatctccacatatcctcctagagaactcaattcaacccataacgtaagccatgatctatcattaagtacataaagcactgacaatggaaaagagaaattgagaaatccttgataagttttagtgatcaattaaatgacaaaagactgtgtgtaatatctttacactcaatgactacttgtgaaaccccctaaaaaattgacaaagattctctgtcatctaytgagcttcagatttgacaaagctataccaactccaaataaaatgtcatttatttttggaaaatgttatgttttccattctttgttatgccaagtagata

SEQ ID NO: 436512 - DNA, 580 bp, Homo sapiens
aaagactaatttgaaatagaaaacagagaatcacaatccctcartcaatttccagagttgagcctgtttacagacctagagacactagaatgaagggaaggccaagtcccgttgaggaaggatctcactactctagtgacaatttatgctgttaatctttctcccatcccccctgcaaggagacttctggccttttaccagggtaactgtgcactaggggaagggaaatgatcaggcaattgggggactactggacactggccctcagctgacattgattccaggggacccaaattgcatagtggtcctccagttaaagtaggggcttatggaggtcaagtaattaatggagctttagctcaggtctgacttacagtgggtccagtgcgtcccaagtcttatcctgtggttaattcttcaatgccagaatgcataattggcatagatgtaattagcagctggcagaaccaccacactggctccctgactggtagagtgagcactattatggtgggaaaggccaaatggaagccattagagctgcctctacctagaaaaatcgtacttcaaaagcaatacc

SEQ ID NO: 436513 - DNA, 604 bp, Homo sapiens
ctgtggcaaactgagatgaaagagaattagacatactcaaactcaaaatgcaaattttataatgcatcaacttctcactggacgcaagcagtctaacttgcacctttcaaaccagtgtttcaaaaattgtggcacagtgaccacctctgtctgggtaacctaggtcacttgttataaacttgaactcctgggctccaccctgatttaccttatttattaagggtgggagctaggaataagactgtaacaagctctatggttcattctgttgcacaacttcaaagctattgctttacatcatctacttggaattgagtagagattaawcatgttgtatagtaaaagattttcttgaaatttgctaaccttcaccgtaggccagtatgaaaagtaaacatttctagttaacattcattatttgtgttaaagatattgctcagtagccagtattgaatattcagaaaatgagatataattttagagaaaagtttaaacctaaaacaaaatactggatgataggaaatcctaaaaaatctggccattaacgcccttcggcacaaagagttcagaggagataagaaaaaagtagattggaaaattagac

SEQ ID NO: 436514 - DNA, 576 bp, Homo sapiens
aactccttgcctctcatgagcggtgaaacaggagtgtcaaacacatttattttgcgtctctctaaaacagttcatgccaaggactatcagtgttctctgtactattaaaagtagggtccttagcatttatgggtctaatcatattaagcagccaacttcagaaaccccaaaagcaatgaaagaactccacccttaatattctgttcctttaaaaccactcctggtaccaaaatatgtattagtcaggtttctcctagaaggaaagtacttacaggatatatatataataaacatatatatatatgtttattaatcattaatttacacaatcacaaggtcccacaataagctgtctgcaagctgaggagcaaggagaaccagtctgaggagcaaggagaactcaggaayttggagtctgttgtttgagggcaggaagtacccggcatgggagaaagatgtacaccaagaggctagacccatgtcttcttttcacatttttctgcctcctttatattcgctggaagctgattagattgtgcccaccagattaagggtggatctgccttccccagacca

SEQ ID NO: 436515 - DNA, 639 bp, Homo sapiens
agcaacattataaatggtaactaatgagaggcatcaaatttgtttaatatattaaaattgctattttataaatattcatgtacagaccaagaactgggtaatatgactaccttaatmgaatattctgcactaaaacactgtaataactgtttaaacaacagtttagtaataatttgattcgtcatagtatttctttctctggacggaaagtagtccccaagtcttattttatttttcatagtcacagatgaaatacacagctgctgaaaagcaaatgtcagtgacattcactaactgagatatttcatgcacaaaagaggcttatgaaattccctcagtataattttaccaacagttggtgatccaatcctcaggaaaagtgaatactttagtgagcattgatggctttcaatcaccatatttcgttcctctaaaactttcactaggtcatttaccttgagaaagatatttttgtcgtattgttttattttgacagtcacctgggtttccttgaatctgataaactgtgagaaagactctctccactcttaaatcgctccgtgtgtgatgtaatatagttacttttgttcagaaattcctaaattgctaatatatatgtatgagtgtgtgtgtgtgtgt

SEQ ID NO: 436516 - DNA, 528 bp, Homo sapiens
aaatggtactgggataactagcttgccatatgcataagactgaaactagacctttatctgtgatcatacacaaaaattaactcaagatgggttaaaaacttaaatataatatttaaaactataaaaatccagaaataataaaacaagaaaaactcttcattgtgttggcctaggcaaataatttatgataaagacctcgaaagcaaatgcaacaaaaacaaaaatagacaaatgggacctaattaaactacagagtttctgtaaagcaaaagaaataatcaagagtaaacatacaacctacagaatgggaggaaatatttgcaaattatgcccacaacaaaggactaatatccagaatctacaaggaactcaactcaataagaaaaaaaaaaaatctaccaagtgaaaaactgggcaaaakacagacatttctcaaaagaagaaatagaagtaaacaacaaacacatgaaaaaatgttcaacatcactaatcatcatagaaatgcaaattaaaaccacactgagatgt

SEQ ID NO: 436517 - DNA, 562 bp, Homo sapiens
tcttacaatgtatctttggctccaactgtggatcctgggccatgtctccttgacagcaygagtgggaacttcctaccctaaggtttagccagtgacttctgtattgagggcaggggctacaagactgaggaggagggtcccatctgaaaactggggcgtgggaggatggggtctgacaggagtcagcctgtggggacagaatggtgggaggtgggaggctgagatcaggaagactgatttctggggtaggtggaggacactaaaaaaaaaaacctgaaaaattcaagaaaagaaaataacagaatgatgcagaaatcaactgaataaatttagctttatatttaatacaacattcacttcattttcttaggtttctcatcgcactgccctcaggtaagggcttggttttagtctggggactgaaaatcgctggtctggattaagattcctacagtgccatcaaattctaaaaacttgaaattctacaattctgaggcatagcaccatctcaccttctccaaagaaaagcctcaacaatgagggggaaaaaaagaaggaaggg

SEQ ID NO: 436518 - DNA, 550 bp, Homo sapiens
ttttagtcagtcagagagatggatttgagactgatctcccatctcctcacctgcagcacctgaataaagccttcttccctggcagtactgattatctcagtgattggctttctgtgtggtgaacagcagcaggatcaagaccgaaccactggtgttttggtaacattacctctcagtgtcacctaaacayatacacactcattcattcttctgtttttaagtggaaaaaaaagagtgtgtgtgtgtgtgtgcgcacacgcacaatataaactctttgagagcaaagactaacttaataaacacaaatactaggtaaatgctaaccagcttacccccaatgcagagagcttacaaagcagtctttgagcatgatgataaagtaaaacatgtttctggaactgcacacagaggtttgcagagatttcctcttgtcaaaggtaagtacaaaaaaatccacaagggtttggctggctccaatggagcaagagaggtcactctgggccctgagttatcaccttaaggggccggagcagctggcagttggaacact

SEQ ID NO: 436519 - DNA, 570 bp, Homo sapiens
accaccaaacccctcttcatgcctctaccatgcacgtaaggaaggagacattccagacacccaatccactagttccccattagtaggcagaagcagagtggtagtttttgagccattttccgcatagtcgccctgcacgcacttgtgagctaagctaatatgattcaatgcagaacacaacacaggtcgaggagtgaatcattctgccagggacgtgcaagtgacacagctggagggcgtgtgaagcatcacctacagttcaggtctcctgcaggcgttggcagatgccaggaacgcacttcggagctgggcgacagagacytttgtgtccagcatgctgatctccccataaggcccttcggtcttggagctgggcagctccagctctctcctggaagctgggtccttatacttcaaggcctggagctgaggggggcctgtgaaatctgacagagagcgggtacggaccttgcgctttttcgaggcttccctgttgtgaccagttggtttggcgtcttgggacacaggctcactttgaatgtagagaaccatctcgctcctgcctgtcct

SEQ ID NO: 436520 - DNA, 575 bp, Homo sapiens
aacatttcccaccaccatccccctgtcctgctgttatgctcttagttaaaaatgaatcccaaaagagaggccgggccctggggctcatgcctgtgatcacaaccttttgggaggcctgggcaggaggatcatttgaggccaggagtttgagaccagtttgggcaacatagtgagatcttgtctctacaaaagtaaaaaacaatatctaggtgcagtggcgtgtgcctgtagtcccagctacttaggaggctgaggcaggaggcccacttgaatccaggagtttgaggctgcagtgagctatgattgtacagctacactccagcataggcaacagagagargctctgtccctaaaaaacaaaaataaaataaaaataaagagagattgctccagttgtttctaaagttattcaaatatctgagagcaaaactgacatccttttcaaaagctacagacctttttccattactgcaaaacaaagaaaccaagagctctggctgtggggttggaagagacctctgctcagatcctggctcagtcaggttgagctgtgtagtgttgggcaactcacctgc

SEQ ID NO: 436521 - DNA, 511 bp, Homo sapiens
gcgtgcttgggggaccgtggcacttcagtgaaggaggagtctcgcccagagaaagagaaggtcgaggaactctcggctgctggggacaggtcatgggcctgccgggtggcactcagctcttgacctcgtctttggttttctatgttcagcagcacctccgggtcggaagagccgtcacccacatggagggcatagtccttggattcaccggcacaggtcctgagccccatcgtctcggtcccggggtacagagaactmgcatctctgcttgactcttcctgtttgtcactttttcctccccgcttctcgacagcatcaggctccttcctggacttggtatagcgggataaatactcggagtcggcctcgggatccagagtcagcccatacttctctgccagctgtcgccttctttctgctttgtaccttgcaattctttcggctttggactccagactgtgggtgtccatggtacccgaaccatagggtgagtcaccgtggacaccggagg

SEQ ID NO: 436522 - DNA, 314 bp, Homo sapiens
ggcttggtcaataacaacagcttccctgtcaacaaattagccctagtgggattatggtgatacaactttaatggctggtaggacatattttgaaaatattttcaaggatgacaaaaaccaaagggttttaattatttaaaccccaaagaggaaagtggagccctatttttcaaaagaccactcaagaagctatcaaaaccaaattccaagggygcctaaaaggtacgacttgaacccatgcctcaaaccctaactgagaaatagaaaatattaatagggtcctgagtagcataatcacatcccctcccctcccc

SEQ ID NO: 436523 - DNA, 541 bp, Homo sapiens
agtaactgaacacaggagaatacatagggcaaaatagaggaccccaggcattcatcgtgttatacaatccatacataagtgcatttcrtatttatcttgccttaccttgtttctcagagaatttgaaagctcccaaatagctggaaaaccctgggcttctgaacatggctgcacacagacggctcggtcacacagcctgctctacagctaattctcagccagcaaccaccttcgtctggtctaagcaaaactgggttgagatttttcacagtgcaggactagagcgaccaggcacttgtatctttgtgcctatggtacaggagaagcaagaggccactggctggaatagctcagaccccataatcagattatgaacagaaattaagcctggaggcgctgcaacagactggagcccagtgatgggacgtgggtgatgtagatgaccaaggcaaagccatggagcatcccagcatttgctctggttaaggagacagtgctgcaacctaaccatcctcggaggagtcagatacaacttcctctc

SEQ ID NO: 436524 - DNA, 591 bp, Homo sapiens
atgtggctactttgaagtgtgtaggaagcaatgactcattaattctatttctaaaaatgcacatgaaattactgtgaatgaactcaagggtgtttaccatttgtatactgataccacccaattgtctggcactgaagatgtggtgtccagtccactttcccaccagtgtttaaggaaaccatctctcttaagcatatttgatctaagtgtgcatatgcatatgagtgccatgggctaggccaatgctgaattattatcttgacgagaaatgatgacgtaaaaattaagcttagtaggattacactgaggcccagcctaggtaacaattgtgagacaagaagtttggatttcttagtttccttctgtggagaytttatttcaggattctggcaatgaaatatttctgtgaaacttgttttgcacacttctatctgtgtgcttctaagtaaactataaattctgattctttaagtgtttaagtttcctataattcctaattttcttgggtatttggcactaagacccttgctctctttctctcactggatgatttagtaagccctactggtgctattctattgagtggaagtg

SEQ ID NO: 436525 - DNA, 585 bp, Homo sapiens
tacataagcgctctgagttttatgaattttaatcaattaaagaagcttgttgttactccattcagtcattcattcaacaaatattggctgagctcctacwctgtgtgggacactgtgctaggtgtcaggatgcagcgaacaaaaggcccggcctagcgaccagaccaaggttgggtctgcagtgcattccaggggcctccccataacccccaacccctcccgctttgagacccaggctctccttgccctagaggccaggctgtccctgctgccagggggcccttcctgagaactgccctcacctgaagagacccactttgaccaagcttatgtcccctcctggcatccaatgtctggtcatttgggcccccttgcctggactggaataactccaaagactatcccagcttcagatctcccacagggccagctccagccctcatggtgacaacatcgcagttcaactcctccctctgcccaagagcactgtccgaaaacttcctgcatataacctctgtctcagagtttgtgtccgaggaacatggtcattacagagtcccaacaggaaacaaatgtcacaatcaa

SEQ ID NO: 436526 - DNA, 531 bp, Homo sapiens
ttaaaaagccagcttgactcttgctcctacctctgccacaagatcccctgcagcacctcaggactctgcagaagaaggccaccagcaagaagaccctcaccagatgcagctcctcagccttgaacttcccagytccagaactgtaagaaataaatttcatttctttacaaattacccagtctcagatattcagttatagcaacagaaaactgactaatacaagcccgaatctcttcctgaagagcaattagtcaaatccaaattgaggcacggtctgtcaaacaaatgactgaatgctttgaaatatcagggtcatgaaagacaagacaggcccaaaggtggctccaggtgagaggagcttgagcggaggcacaatggagggaggcgggtcttgactggataaaaagggacatggacatgacaaggacaacttgcaacatttggacatgggccatgtaaagagaccaggcttgtatctacattaaattcattgagggtggtcatggtttcattcttatgtgagaaaatgct

SEQ ID NO: 436527 - DNA, 531 bp, Homo sapiens
ttaaaaagccagcttgactcttgctcctacctctgccacaagatcccctgcagcacctcaggactctgcagaagaaggccaccagcaagaagaccctcaccagatgcagctcctcagccttgaacttcccagttccagaactgtaagaaataaatttcatttctttacaaattacccagtctcagatattcagttatagcaacagaaaactgactaatacaagcccgaatctcttcctgaagagcaattagtcaaatccaaattgaggcacggtctgtcaaacaaatgactgaatgctttgaaatatcagkgtcatgaaagacaagacaggcccaaaggtggctccaggtgagaggagcttgagcggaggcacaatggagggaggcgggtcttgactggataaaaagggacatggacatgacaaggacaacttgcaacatttggacatgggccatgtaaagagaccaggcttgtatctacattaaattcattgagggtggtcatggtttcattcttatgtgagaaaatgct

SEQ ID NO: 436528 - DNA, 531 bp, Homo sapiens
ttaaaaagccagcttgactcttgctcctacctctgccacaagatcccctgcagcacctcaggactctgcagaagaaggccaccagcaagaagaccctcaccagatgcagctcctcagccttgaacttcccagttccagaactgtaagaaataaatttcatttctttacaaattacccagtctcagatattcagttatagcaacagaaaactgactaatacaagcccgaatctcttcctgaagagcaattagtcaaatccaaattgaggcacggtctgtcaaacaaatgactgaatgctttgaaatatcagggtcatgaaagacaagacaggcccaaaggtggctccaggtgagaggagcttgagcggaggcacaatggagggaggcgggtcttgactggataaaaagggacatggacatgacaaggacaacttgcaacatttggacatgggccatgtaaagagaccaggcttgtatctacattaaattcattgagggtggtcatggtttcrttcttatgtgagaaaatgct

SEQ ID NO: 436529 - DNA, 575 bp, Homo sapiens
taaaacaatgtaaatgtaatatcttacaatgtcagttttttttaaaaaaaatacttataacaggttttaattatatatgctaattctgaatcctggtaagaatgagttcatgtgttagagttgctcaaaatttcatactctctgacaaagatttttaagatatrttgcaaaaatgtataaaaattgtattgctggatcttgtgaaagttggaagcttgtataatgtagagatgaaatagctcttatgctatactgagaaagtttaaatgagaaaagaaaattaacattttcttatatgacattagtttagaattaattcgtctctcctgaaaaatatattttgaactatgctataatatttatatcacaattattaagatttgttataatgttataaaacaattgttgttctgtaatttaactaggtcctaataatgtttttgtcattcttaattttaatctccaattatacctttaacttttaccaaaatatatataattaagtctctttttacatacacttttcaagcagcagtatatttcagtgacattccctgaaggaacataatttttag

SEQ ID NO: 436530 - DNA, 562 bp, Homo sapiens
agagactgataagggcctggtgcttagtattcattgttacccctggagaaatacasaatataaaggaggcaaatgagagtgatcatactgaaccttaaatgagctatatcaagctattgttttccaacagactcttcaaagcacatctttttataattttcctgatgaaatattccagcttattagacagccaactgttacagcggtaatgtgtcctcatttaacaatattaaacccaaatggctatcaatgttcagtgctcctctttgtcacagtaataacctttatttcacattttaatattttctcagtggcaatgtcctaaagaattgatttatttagactttctctggtaacatacaacattgaatacctcactttcacccattgagatacagaggagaagcaataagtattgttaggatagagaatgagtcaaagctcatattcgattcaaagctgaattataattcaatataaaattatttgtttacaattctggagtattgtaatcaaattaatgttgatattgagttttaaaaatatcatttactgcaaataa

SEQ ID NO: 436531 - DNA, 562 bp, Homo sapiens
agagactgataagggcctggtgcttagtattcattgttacccctggagaaatacacaatataraggaggcaaatgagagtgatcatactgaaccttaaatgagctatatcaagctattgttttccaacagactcttcaaagcacatctttttataattttcctgatgaaatattccagcttattagacagccaactgttacagcggtaatgtgtcctcatttaacaatattaaacccaaatggctatcaatgttcagtgctcctctttgtcacagtaataacctttatttcacattttaatattttctcagtggcaatgtcctaaagaattgatttatttagactttctctggtaacatacaacattgaatacctcactttcacccattgagatacagaggagaagcaataagtattgttaggatagagaatgagtcaaagctcatattcgattcaaagctgaattataattcaatataaaattatttgtttacaattctggagtattgtaatcaaattaatgttgatattgagttttaaaaatatcatttactgcaaataa

SEQ ID NO: 436532 - DNA, 562 bp, Homo sapiens
agagactgataagggcctggtgcttagtattcattgttacccctggagaaatacacaatataaaggaggcaaatgagagtgatcatactgaaccttaaatgagctatatcaagctattgttttccaacagactcttcaaagcacatcttkttataattttcctgatgaaatattccagcttattagacagccaactgttacagcggtaatgtgtcctcatttaacaatattaaacccaaatggctatcaatgttcagtgctcctctttgtcacagtaataacctttatttcacattttaatattttctcagtggcaatgtcctaaagaattgatttatttagactttctctggtaacatacaacattgaatacctcactttcacccattgagatacagaggagaagcaataagtattgttaggatagagaatgagtcaaagctcatattcgattcaaagctgaattataattcaatataaaattatttgtttacaattctggagtattgtaatcaaattaatgttgatattgagttttaaaaatatcatttactgcaaataa

SEQ ID NO: 436533 - DNA, 556 bp, Homo sapiens
atctcagtattaaggtaacaagatggtgacatgtctctggtgaattgagaatgcacatttcatataaagattagagtctctacccaactcaagtgatggaaagaaggtccaggttaggttgaaattatgatttttaaagaagaacttagatctaaatatttacacataatctccacatttttcaatattggcaaatagttttgcaaaaaacaaacacacarggattactatcaagactatataatactcctttccattgtcaagaactgtggagggcctaagattttaccctacttgcaatctaacaagttattcttcaacagtttcatcaattctggaaaaagatgtgagattcctgtgtcagagaaaatggacagtttattactcacataacagtggtggccaggttatcagcatttgtgttggttcttccagtctcattccccactgaccaaggcagagccagctgacacctgcatatgtgtggattgcattatagaaaaggaagaacctattattttagaataattttataattatttttatgatggcaaaa

SEQ ID NO: 436534 - DNA, 527 bp, Homo sapiens
aggtaaaattcacaacactatttggaaatacagcatgtattttttctgaatattttttgagcattgaatgaaatgaaaaattataaattaagcattttggattggaaagaagaaacataaaacgaattktaatagtattattaaaagaaaaaaggcagacaaactgaaagttccttttttttttttttttttgagacagagtctggctctgttgcccaagctggaggacagtggcgtgatctcagatcactgcaacctccgcctcccgggtttaaccgattctcctgcctcagcctcccgagtagctgggactacaggcgcaggccaccatgcccagctaatttttgtatttttagtagagacggagttttgccatgttggccagggtggtctccatctcgtgacttcgtgattagcccgcctcggccttctaaagtgctgggattacaggcgtgagccaccgcgcccagcagaaagttcctatctttctttgggtacatcagagagctgagtttacagggcaatca

SEQ ID NO: 436535 - DNA, 642 bp, Homo sapiens
tttttttaaaacactacacctgataaatgtagaacatattgctttcaaagacacaggaacaatgcatatacagaacatagaacacyttctgagctgcaaaacagaccttgaaaatgtaacagaatggaaattatataaaatatattcctagaatatgataaaattaaggtagatattgatgagagaaaaatatttagaaaattcacacaatttgaggaaataacatattttaaaataacatttcaaagaggaagtcttatacaggaaattaagcatatcttgtagaaaacaaaaacaaagaacacatcaaaatttgtggcattcaggtaaagaatcaattaaatataaatttatggcactaaattaggttattagaaatatataaagttcttaaattagataagtttccaacataaaaaactagactaggaagagcaaattgtgacaaaaacaagaagataatgagggtggagcaaaatggccaaagagtgctgcagtaattgtcccctataggaacatcagataaaagagagcaccttcataagaaccaaaatatcagggaagcaatcacagtatctttgttactggaaaaggactcttgtctcaggctccaagtgtgggttcttggatctcacgtgagaa

SEQ ID NO: 436536 - DNA, 521 bp, Homo sapiens
tacctaggtccccaaatcacagccagctgattaaagttacctaggtccccaaataaatttgagtggtggtcaggccacaaggattgcagtcactgggcaagccctggtgctgtgctggtctccgaagcaatggatttgggatgtgaatcagtgcaacaccagctgtaaaggccacgagagtgcttgtgtcacccccccccccgcccccgcaaatccatgcaatgcaacttggggagacactccttccacttggtagaaggacagggaagaatacagaggactttgtcttataatttgggtccaagttcagtcacagaaaaataaagcttcagacagattmttaaagccattgattctaggcctttgctcctgatagcatttctagatatacccttggccagaagggaatctgctgctctgatgagatggacccagtctcagcaagattcaccatctgatggtggtggttttggaccttgaataaacatcagcagcaaccaggcagtagcaaccatgagcct

SEQ ID NO: 436537 - DNA, 513 bp, Homo sapiens
tttcaacccaactaagtcagtaataaacaattagtatgcatacactaaatatttgtaaaataaatgaatgcataaaaggaagaagtatattactgcatttttagtatgacattataattttagttttgcctccaaatttttggtacctttttggtccgagaatgtttattaatttatagaccacaaacttctagtaatttcctcttctacttcttgtaagcgaagctgatctgtctttttaaaaagggaattaaagaagacatcttaagtgtaaaatacctacatttccatggtgaatatattttaaaagtcaatatatttcattaaaaaaaacaagttagcctatgtttagagatgtgatatgttagttttagcatgaggtgaaaattcataatttatattttcttgacaataatggcttacgatagaaaggtaggtctttaacatcccagtaaactaytgaaatttgatgtttgatcagaagctgttgaggtaattaattttgttttatga

SEQ ID NO: 436538 - DNA, 279 bp, Homo sapiens
attttaaatgtaaaggttgtttttttttttgttttttgttttttgttttttttgctttattttttgttaaataatgacagggtttcactctgtcactcaggctggagtgtagtggaatgatcatagctcactgcagccttgaactcctgagctcaagggatcctcccgcctcagcctcttgagtagctgagactatgggcrcatgccaccatgcctagctttttttttttttaattttttacatctatttttgcaaaggcagggtctcactatgttgcc

SEQ ID NO: 436539 - DNA, 279 bp, Homo sapiens
attttaaatgtaaaggttgtttttttttttgttttttgttttttgttttttttgctttattttttgttaaataatgacagggtttcactctgtcactcaggctggagtgtagtggaatgatcatagctcactgcagccttgaactcctgagctcaagggatcctcccgcctcagcctcttgagtagctgagactatgggcgcatgmcaccatgcctagctttttttttttttaattttttacatctatttttgcaaaggcagggtctcactatgttgcc

SEQ ID NO: 436540 - DNA, 400 bp, Homo sapiens
gacttgaagaacttttctgtctagctaaaggattgtaaatgcaccaatatgcactctgtaaaaatgcaccactcagtgctgtgtgtctagctaaaggactgtaaccgcaccaatcagcactctgtaaaaatgcaccaatcagtgctctgtgtctagctaaatgattgtaaaagcaccastcagcactctgtaaaatggaccaatcagcactctgtaaaatggaccaatcagcagaacatgggcagggccaaataaggggataaaagctggccaccccagccagcagcggcaacctgctcaggtcaccatccatgctgtggaagttttgttctttcgcttttcacaataaatcttgctgttcctcactctttgggtccgcaccacctttaagagctgtaac

SEQ ID NO: 436541 - DNA, 579 bp, Homo sapiens
tctgtaatatcaattggttcacatgatataggtaaatagggaaatcatgttagtaaaaatgtggaacttgttgatatttttttcctaggaaaggggaaacagagcagaagtagaactatartttcaaggaaaaaagcactctgctgtcttctacacaatcaagtagccctttaagctctattttaagaaaattatttttgaatatctgtatgtagatattttcttggttcctcaaatcatggcaggttgctcttcttgtatcccaaactccccttctgtcttcatgccttttgaccataagacaagtatttccaatctattgcttttgtgcatttttaaacaacccctgaggaagcctccagcctgggctctgttatttctcaagatactgattattgtttttttttagtgctcagggtagttgtatgattttgacttgccacggtcctattttttacctctcttaccttgtcatttttaaagagtgcagtttggcagaacaaaagcttatttacaagaacacagatattatgatagggcagaaagtcttacatttttagttgtgttttgcttaacttt

SEQ ID NO: 436542 - DNA, 499 bp, Homo sapiens
atttgttgttataactacatggcaagacttttttttttttttcttgagaggtgatgcaacacctctttattaacaataagamctatctaaaaagactgtttattattttcattttgactaccaaaataaccaaagcctattttaagctgcattttatagcaattgaattcaaaattgttttttctataattgtgatcaagtttatctctaagtttaaaacttattctttttttttttttaatgaaaaatgttttgttttagggacatggacttgctatgttgctcagactgatctcaaactcctggcatcaagtgatccccccacctaaacctgtggagtagctgggagtaggtgcaagccaccgtgctgggccaagaaattattctttaattcatgttattttctgatccttttcctttaaatttatattttatcattttgccatatgtctatctataatagatggacatataatatgccattccacatattttaaga

SEQ ID NO: 436543 - DNA, 499 bp, Homo sapiens
atttgttgttataactacatggcaagacttttttttttttttcttgagaggtgatgcaacacctctttattaacaataagacctatctaaaaagactgtttattattttcattttgactaccaaaataaccaaagcctattttaagctgcattttatagcaattgaattcaaaattgttttttctataattgkgatcaagtttatctctaagtttaaaacttattctttttttttttttaatgaaaaatgttttgttttagggacatggacttgctatgttgctcagactgatctcaaactcctggcatcaagtgatccccccacctaaacctgtggagtagctgggagtaggtgcaagccaccgtgctgggccaagaaattattctttaattcatgttattttctgatccttttcctttaaatttatattttatcattttgccatatgtctatctataatagatggacatataatatgccattccacatattttaaga

SEQ ID NO: 436544 - DNA, 499 bp, Homo sapiens
atttgttgttataactacatggcaagacttttttttttttttcttgagaggtgatgcaacacctctttattaacaataagacctatctaaaaagactgtttattattttcattttgactaccaaaataaccaaagcctattttaagctgcattttatagcaattgaattcaaaattgttttttctataattgtgatcaagtttatctctaagtttaaaacttattctttttttttttttaatgaaaaatgttttgttttagggacatggacttgctatgttgctcaractgatctcaaactcctggcatcaagtgatccccccacctaaacctgtggagtagctgggagtaggtgcaagccaccgtgctgggccaagaaattattctttaattcatgttattttctgatccttttcctttaaatttatattttatcattttgccatatgtctatctataatagatggacatataatatgccattccacatattttaaga

SEQ ID NO: 436545 - DNA, 541 bp, Homo sapiens
aaattactgatccacaatcacactgttgccttttttattcatatatcagcattcataagttagttgatgagttctggtctaattaaggcaagaacctgaaaaaaagcaatgaagtaaccgaagcaggaaggcaaagggctaaaaattcacaaaggtggccaggtgcagtggctcactcctgtaatcccagcactttggaaggccgaggcgggtggatcaataggtcaggagatcaagaccaccctggctaacacagtgaaaccccatctctactaaaaatacaaaaaattagccaagcatgggggcacacacctgtaatcccagcyagtcaggaggctgaggcaggagaataacttgaacccaggaggcagagattgcagtgagccaagatcatgccactgcactccagcctgggtgacagagtgatactccatccaaaaaaaaaaaatcacaaaggtgcaggtgtgatgacaactgtgcttcttcagtgcccttacaatggtgccatgaaatttactaagctcacctgagcaaagatgag

SEQ ID NO: 436546 - DNA, 601 bp, Homo sapiens
attactttatagcaacaaaaatcaatgaagacacaagattagtggcagrgacaacaaaaaagaaattgttgtcaagtcatcaagacatgatgagagatggaataggaaaggcaaaagaaattctccagaatgttttaatcattgcattcaaaaactatgtttctctattacaaatggagactttttcagagttaagaataacactcttccatgaatatttaaatactttgaattattttcaaaaagttctgaggaatgttatttagcaacaacaaaattgtgactaattttaatctttgatatacataaaatatactataaattttgacaaaatataaaaatcactgtttagaaatgtattgctttcagaaatcacagcatgctatattgaatgcacagagagacagaccaaatcaaatttagtagaattaatttgtcattttgttattttatgtagattgaagggaaagttactctcttgatatcatctgtattgaaacaggattttaaaatattgactttcaatcagataaactatctggattaatgctctgattataatatttagaatatgccagtggaatcccattaaaatatttag

SEQ ID NO: 436547 - DNA, 462 bp, Homo sapiens
gtgtatatatatatacacgtatatatatggagagagagagagagagagagagagagagacagtcttgctctgttggccaggctggagtgcagtggcacgatcttggctcactgcaacctctgcctccccggctcaagcaattctcctgcctcagcctcccgagtagctgggattacaggtgtgtgccaccatgcccagctratttttgtatttttcgtagagatggggtttcaccatgttcgccaggctggtctcaaactcctgacctcaggtgatccacctgccttggcctcccaaagtgctgggtacaaaggtttattttttattcattttacaggtgcaacccttgtcagagtgggctctgccttccatagttattcaggatcccctagtggatgaaagcctggttatcagtcacaccatctggaatatgtaattactgtggaagaggaaaagacacac

SEQ ID NO: 436548 - DNA, 574 bp, Homo sapiens
taatttacattaccaacaagtgaaaggtttccttggaagtcctggagtgtgattcctctagctttcttctttatgttcaagatagctttggttatgtgaagacttttgtgattccatatgaatcaaaaaatgatcatggataacctatgaaagtttctgtttctgtgaagaatgtcattggcattttaatagggattgcattgaatctgtagattgctttaggtagtattaatattttaacaatattaattcttctgatccataaacatggaatatctatctatttctctgagcccttttcaataactttgatcagtgttttattattttcattgkaaagattttttactttttagttacataaatcctaagtatttttttgtaattattgtaaatggaattgtttcttgaattctttttcaaattgttttctattggcaagcagaaatttgctcttcaaattagtttttgtatgttaactttgtatcatgaaagtttactgaatttgtttattgattctaacagttttttggtggaatatttaggttttttttgtaaatataagatgatgtca

SEQ ID NO: 436549 - DNA, 575 bp, Homo sapiens
aacatgtttgctcatatcgatagtgacaggagacagccaaatgcctaggcagataggggcaggtacttggtgaaaccctgcctccaagctgaagatagtttaaagcctgagagccaagctacaagtgaaatcgtcagactgaattgagaacttgtcttcccatttgacacactttcctgtgattgaccccacaggataatcacatatytcacatatttcaccgtcacctatttcacatatacctactctttcctaattggttttctacactattgttcccacatttgagtggtgtcttcactttaacctactttatctcctcacaaactaatcagcacgcacttcccatcctgtgcctgtaaagaccccagactcagttggtagaggtggagatagctggactttggggaagagatggccagaatttggggaagagaaggccaaacttcagaagatacaacctgacctgactttggggaagattacctgcccttcccatttcttctcaagatcccctcttcgctgacagctgttttcactgcttaataaaattctctcccttcaccatccttcca

SEQ ID NO: 436550 - DNA, 575 bp, Homo sapiens
aacatgtttgctcatatcgatagtgacaggagacagccaaatgcctaggcagataggggcaggtacttggtgaaaccctgcctccaagctgaagatagtttaaagcctgagagccaagctacaagtgaaatcgtcagactgaattgagaacttgtcttcccatttgacacactttcctgtgattgaccccacaggataatcacatatttcacatatttcaccgtcacctatttcacatatacctactctttcctaattggttttctacactattgttcccacatttgagtggtgtcttcactttaacctaytttatctcctcacaaactaatcagcacgcacttcccatcctgtgcctgtaaagaccccagactcagttggtagaggtggagatagctggactttggggaagagatggccagaatttggggaagagaaggccaaacttcagaagatacaacctgacctgactttggggaagattacctgcccttcccatttcttctcaagatcccctcttcgctgacagctgttttcactgcttaataaaattctctcccttcaccatccttcca

SEQ ID NO: 436551 - DNA, 584 bp, Homo sapiens
gtataaaagttgtcttgggaaaaaaaaattaaaagaactttgtagaaaagtttttataaaagtgcaaaagaaatcaatgtgaaaaatagaagtttggtgtggtaaaatgaggaataaaatcaagtcttctgttgtctctcagaaaggctactagcattgaatatgctttccacgtttaatgatccaaggaagttaaaacatcatagacagcgtggaatatatgccactgttatgaataacccagagaaaattgacctatttttctacttgacttcaggtcctaccccatgcattgtaacatttccaaaaacctagctcccaaaaaattttaaaatgtgtagatatttcgttaaaagtgtatcttgagaacactgaggagaggggcacagttcattcaatgaaagtttccawacgtgttttctcacctgacagctgcccccaaagctttactctttctgaaatttctctaaaaatttttccaaccccgattctatttatagtacctgctatctttgtctttccctttattttgcaatacaatttagtcctctcgaaggctttctctattttacattttatctgat

SEQ ID NO: 436552 - DNA, 398 bp, Homo sapiens
agtttctgtgtatttttctgtgtgtctttgttatttttcatatgtacacattttcgtgtgtgtgtgtgtgtgtgtgtgtgtgtgtaatttattttatcattgaggatgattatcacattgtggtgatccaaaagatcccatggcattgccaagaagaatattctcaggtgatttaatttctcctttttctgggaaacttagccaaaagaatgaaccccaagacttattcagatcttaaatacagaacataaatcctgcttttctgtagacattttgttagatactgacacccaaggaaaatagaatgtgtttgaaatgttggcytcacatgcgaaaataccattgatcttatgaactttgattctctaaggacaacatttgaatttctctcaaattat

SEQ ID NO: 436553 - DNA, 594 bp, Homo sapiens
atcagtggctgatcttccaatggttatataataatatgatagagcagccctatgtactacaggaggggtatttgtctgcaaaaatgagggactgaaaacaacaggcctcaaatcatacgcatattgccagctattgtactaaacagcttagagaaagctttgcttttcacgaatgtattagaaaatgtatttctaaagaaatattcatttttctgaattctagactaacargtaaataataaattactgtcaataattaagcatctatttcacaaattttagtttctagatggcagctcctccaactgatccaggtactgaatccacgggaacaacgtccagtggtgaattagtgggtctccctcctttagcaagttgatgtcaagtcaggaaacttgcaaagtctgagacattattctacttgaacagttagagggataagtcaatagatcgatcctagcagaagcaccatgcctctgaatcaaatatcagacatttatttgcttacagcaaaaacagtgaccagagtaaatgtgtagcgttgttttccaataccaagcagccccaggcaacactatgagagccagatggatt

SEQ ID NO: 436554 - DNA, 544 bp, Homo sapiens
aaacccctgataaacctatcagatcttataagatttattcactatcatgagaatagcaggggaaagaacagctcccatgattcaattacctccccctgggtccgtcccacaatacctgggaattctgagagayacaattcaagttgagatttgaatggggtctcagccaaaccatatcagcatgtacctggcttccttgcgtagggtctcctaaggctaaaaccaaagtgtctacctacagggcagcattgtcttctagagcttgggatcctcttccaagctcacacagtcgtggcagaattttattcctcgagtatgtgggactgatgtcaccttccttgccctgtgtccctccccatcttaaagacagcaatagaggttttcctttgcatgtttaaaatctctgtcctcagaatgagcccagtccctatgaagcactcacttaattaagtcaggcctatccaagatacctctttttcataaagtcagctgggacatatagcatgtcctaactacagaaatgaaacttatcacattcacagtc

SEQ ID NO: 436555 - DNA, 544 bp, Homo sapiens
aaacccctgataaacctatcagatcttataagatttattcactatcatgagaatagcaggggaaagaacagctcccatgattcaattacctccccctgggtccgtcccacaatacctgggaattctgagagatacaattcaagttgagatttgaatggggtcwcagccaaaccatatcagcatgtacctggcttccttgcgtagggtctcctaaggctaaaaccaaagtgtctacctacagggcagcattgtcttctagagcttgggatcctcttccaagctcacacagtcgtggcagaattttattcctcgagtatgtgggactgatgtcaccttccttgccctgtgtccctccccatcttaaagacagcaatagaggttttcctttgcatgtttaaaatctctgtcctcagaatgagcccagtccctatgaagcactcacttaattaagtcaggcctatccaagatacctctttttcataaagtcagctgggacatatagcatgtcctaactacagaaatgaaacttatcacattcacagtc

SEQ ID NO: 436556 - DNA, 594 bp, Homo sapiens
gctgtgctttatagctacttgagtattactagacacttaccaaatctctctcctaggaaaacattctaggtgtttctgctgaggaagttgggttgagctactcatgttctagtattaacttgaacacaaaattatgatggtaaaagttcttggagatttcagattttatgaatgaagtcatcaagtctctgcttattcttccctaagaaatgttacaaaatcattctgatggaaagttctgtatcacaattagctttgcttttgtttgtttgtttgttcattttttgatgttgtttttagaggcagtcttgctctgttgcccaggctagaatgcagtggtgtgatcacagctcactgcagccttgaactcctgggctcaaggtaccctcccgcctcaatatcctgagtagttagggctaacaggtaggagctacaatgtccagctattaatatcttttctttaaaaaawttgtggagatgagggtcatattatgaatacaaagccttaactggtgtcaaactcttggcctcaagtgatcatcttccttgaattaccaaagtgctgggattataggcatgactcattgcaccagc

SEQ ID NO: 436557 - DNA, 585 bp, Homo sapiens
tggtaatttactaacaatgtagtactcaatttttaaaatctgtaataggggaataatartttacctttaataataagattgttataaatattaaataatatgtaaaatttgtaaaccatgtaaagtagcatataatatggattatgtaaatgtgtgcccttagtccttctttaatcatccaggtattttatttattcaacaaatagttatcaagcatctgctatatgctgataggtacttaataattcctaatcatttcagatattacaagaatctcggatacattacttgaggacagtatagattccagaagtaagtactatttgctaactattttgtataaaaaaattaagtgattgtgaaaggcaaagatgttcaatatgcgttgctgccaaagagaacacagtgttatttatcataatatatatatatatatatctcataccaaatgcagaaaaagaggtttaggtggcaaaagcaacagagtgcttttattatggtaacaatgactttgacaatatattattagctgtttctgcatctcatttcattctttctcataacaatttatccattatgtctaca

SEQ ID NO: 436558 - DNA, 585 bp, Homo sapiens
tggtaatttactaacaatgtagtactcaatttttaaaatctgtaataggggaataataatttacctttaataataagattgttataaatattaaataatatgtaaaatttgtaaaccatgtaaagtagcatataatatggattatgtaaatgtgtgcccttagtccttctttaatcatccaggtattttatttattcaacaaatagttatcaagcatctgctatatgctgataggtacttaataattcctaatcatttcagatattacaagaatctcggatacattacttgaggacagtatagattccagaagtaagtactatttgctaactattttgtataaaaaaattaagtgattgtgaaaggcaaagatgttcaatatgcgttgctgccaaagagaacacagtgttatttatcataatatatatatatatatatctcataycaaatgcagaaaaagaggtttaggtggcaaaagcaacagagtgcttttattatggtaacaatgactttgacaatatattattagctgtttctgcatctcatttcattctttctcataacaatttatccattatgtctaca

SEQ ID NO: 436559 - DNA, 615 bp, Homo sapiens
aatagattcgaatgcaaactacagtgcagttttgcctcatgcaaaacagctctctcgattcacatcatgtttcttttcgctcccacttgtgattatattttcttgtgcttgacatactgaactggaataaacgggatatttttgatgctagagatgttgacaactgatataattaggatgtggagtgaaattattttgatttggggttcagttgttccaagcaggagggtcgtggatraaaacacaggagcttttcttgtccacttcatccacatcgcctggaaaaatcaattgtttgacaattgaaagtggagcccactcctgttcaacagcaggtattgacaggtagtgattagacacccaaatgcaactgtttttttccagcctgactgcaggcattgattgctgtggaattctagctctgattgcagtggaatttgatttagatatatggaatatagcaaattacaagttaggtcggaaaataaacatcaactatccttttgtatttttaaggtggtgttttaaggcctatagcctgaggtcataatagacattgtaattacctcatattcttcttatgtctcctctccaccaaggtaaagcaattggaat

SEQ ID NO: 436560 - DNA, 585 bp, Homo sapiens
tggaaaacttgattgggtgttttgttgatacaaagtgatatagaatcagtgacttcagatcagtgatgataaaatgtgatgtttcaggaaatagaataaatataatacctaaactaagtaatggatcatcttcctaaaagcagttgccagaaataattatgatatgaaacaggttaatttttatctgcagctaattrgtccaaaagtacttaggaatacatacgaagcttagccctatacggtcagcctgccctgcccttgatctaaccaaacatttacattgctacaatggatctattctgaattaacaaaaggaggctccattataacttttactaatcattaacattagtattgtattttttgttcttaaaaatcttaaattctgttcaattggaatccaactgaaatcagtctcccccttccttgtgttatattagtcacactgatcttttttcccctagaatgtatcatactcatttctggctcaaaaatcttcactcttcgctttgcacagtccaccctctaattctctgtaagacctgtctcttctcagttttcagctgctggttgaaattaagccta

SEQ ID NO: 436561 - DNA, 499 bp, Homo sapiens
taattggtccaaaagtacttaggaatacatacgaagcttagccctatacggtcagcctgccctgcccttgatctaaccaaacatttacattgctacaatggatctattcygaattaacaaaaggaggctccattataacttttactaatcattaacattagtattgtattttttgttcttaaaaatcttaaattctgttcaattggaatccaactgaaatcagtctcccccttccttgtgttatattagtcacactgatcttttttcccctagaatgtatcatactcatttctggctcaaaaatcttcactcttcgctttgcacagtccaccctctaattctctgtaagacctgtctcttctcagttttcagctgctggttgaaattaagcctagctaccagaagttaccccatcaccatatctaaataacctcatgaccctcatctacacaatcattaattttctattacatcaacttgctttcatttcataacattg

SEQ ID NO: 436562 - DNA, 585 bp, Homo sapiens
tggaaaacttgattgggtgttttgttgatacaaagtgatatagaatcagtgacttcagatcagtgatgataaaatgtgatgtttcaggaaatagaataaatataatacctaaactaagtaatggatcatcttcctaaaagcagttgccagaaataattatgatatgaaacaggttaatttttatctgcagctaattggtccaaaagtacttaggaatacatacgaagcttagccctatacggtcagcctgccctgcccttgatctaaccaaacatttacattgctacaatggatctattctgaattaacaaaaggaggctccattataacttttactaatcattaacattagtattgtattttttgttcttaaaaatcttaaattctgttcaattggaatccaactgawatcagtctcccccttccttgtgttatattagtcacactgatcttttttcccctagaatgtatcatactcatttctggctcaaaaatcttcactcttcgctttgcacagtccaccctctaattctctgtaagacctgtctcttctcagttttcagctgctggttgaaattaagccta

SEQ ID NO: 436563 - DNA, 550 bp, Homo sapiens
cttctgtgcctcggtttcttcagttctaaaatggggataataatagtgtcatcccatacgattatggtgagggttaaattagtgtattatgtagtgtgtagagcagtgctcaacatagaaatatgcataaggtgttaattatagttattaacatcattattattgttaatattgaggcaacacagttgaaaactgacaaatgtgtaaaaatgatatatggttgtcttaatactttcttgagcatatttattttgtgaatttttggctaatatttatagcactggtgccatctgttcatcttacaaggattattattttaggagtttatacatgtctatattccagagagaaagattttacattgtagaacaagttgggacacatttttatttataatcttaaaatatcttacttatagacgtattgtaaataccacagatttttgtttctawtttcttgcttttataaattttgtactaatgttaagaaatggtagcaagcttatgactaatgtcaatttaattgacagctcttaaaatgtgatcattaa

SEQ ID NO: 436564 - DNA, 601 bp, Homo sapiens
ggatttcttgtatgaggaagagatcagatcacacactcagactaaccctttcttaactgaacaatacagtcagaatgtgattgtctccaaattacatcttaaaattgcacacctgtttcgtgaatttgtaagaggatcagttagtcctgtgtttggctgaaggtgatagacacaaatactgagtcttcaggttgtcattccagggttggatggtgaggcgactgcctgagcaccacagtgtccctgaaccccatctctctcttctgctctgcccttccagtatgacgtttatcattgttatggtttggctgtgtccccacgcaaatttcatcttgaattgtagtttctataatccccaagtgtcgtgggagggaccaagtgggaggtaattgaatcacgggggtggttttctccatgttattctcatgatagtaagttctcasgagatctgaaggttttataaggggcttcccccttcactcgactctcatacttcttcttcctgccatcatgtgacgaaggacatatttgcttccccttccaccataattgtaagtttcctgaggcctccccagtcatgcagaactgtgagtcaattaaa

SEQ ID NO: 436565 - DNA, 544 bp, Homo sapiens
acaccactgcaccccagcctgggtgacgaagtaagactccataacaaaaagaaaaaaataataataatttcttaacaaaaatagttgaacagttcctgtgatttccattctataaatggagaatctgaaaatccaaaatactcataataatgatgaagaggaagatgacagttattaaacttggagaaaaaaatcagttctcggttctcatttaactgtaaactagggttaaaatgctaagtagaatacacttcctaacagaaatggaagttaaatgwcatatctttttgcctaagaacttatacggcatatcaacattgttgcaagaaaacaggaaggagtaaatatctaagtatgtacatataaacttatacaaacaaatactacagaaacattactatatgtgatatagtaatcataacaatgtctggaaatatcaaactttgggttaaaattacttttgagtttagttcaaaagaatgcagagaagacattctagaaatacttagaatagctcacgttagctacgttttttcacaaagat

SEQ ID NO: 436566 - DNA, 544 bp, Homo sapiens
acaccactgcaccccagcctgggtgacgaagtaagactccataacaaaaagaaaaaaataataataatttcttaacaaaaatagttgaacagttcctgtgatttccattctataaatggagaatctgaaaatccaaaatactcataataatgatgaagaggaagatgacagttattaaacttggagaaaaaaatcagttctcggttctcatttaactgtaaactagggttaaaatgctaagtagaatacacttcctaacagaaatggaagttaaatgacatatctttttgcctaagaacttatacggcatatcaacattgttgsaagaaaacaggaaggagtaaatatctaagtatgtacatataaacttatacaaacaaatactacagaaacattactatatgtgatatagtaatcataacaatgtctggaaatatcaaactttgggttaaaattacttttgagtttagttcaaaagaatgcagagaagacattctagaaatacttagaatagctcacgttagctacgttttttcacaaagat

SEQ ID NO: 436567 - DNA, 446 bp, Homo sapiens
tgctgatgctgtttgtctagggaccacactttgtaaatcactgcaccaagttagaatgcaaatatggcttttgctagcaaattccttcagtgtgagtatgatgagcacttgctagtagcttaatatattttactcttctgcccttgtagagcataacatggtaactatgtggacctagtaacaataaagatacagtaaccataaagacacaataactaaataattgcagggcttgcttggcacccagaaatctaaacctaataytttctcttatttcttgacctaactttctagttctctatgtggttggcaacaaatcgaaaaagtccatgaaaggatgtaacatcctacaggaacatatgtagtgactgagtatagatcagcagtcctcacaattcagtgtgcatttgtatctgggccccatgaatttcaaatcagcagttctg

SEQ ID NO: 436568 - DNA, 567 bp, Homo sapiens
aaatatccacagtttcaaagcctagcttctcccaaagattaaaaaaaaaaaaacccaaaccaaaacaaagcaaaagctattagaaaacaatattattttctatattaataaataaagaaaaacaatattaaagtagataatataaagtaaaacaatattatctaagagctgggcaacttgatgtatgtagggtttgcagctgtgtcattttaagccattcttgatattactaactgggtactacaagttaaactttaagtttaaactaaactacattatctrtctatcacctatctatctatttatctattaactattatcaatatctatctttaaagtaggataccttatatattgtaaccgtattctattatcaaagtagctggctctatagtattatatgtgttcagagggtttttttcctcctttcataaatcatttttgagtcttttctacgggatagagagaatcaagtgtaaggtgtattgaagattaagttaatttatagtgcttctctttgctatcagtgtattctcaatgttttaataacaatgcatggaccccact

SEQ ID NO: 436569 - DNA, 567 bp, Homo sapiens
aaatatccacagtttcaaagcctagcttctcccaaagattaaaaaaaaaaaaacccaaaccaaaacaaagcaaaagctattagaaaacaatattattttctatattaataaataaagaaaaacaatattaaagtagataatataaagtaaaacaatattatctaagagctgggcaacttgatgtatgtagggtttgcagctgtgtcattttaagccattcttgatattactaactgggtactacaagttaaactttaagtttaaactaaactacattatctgtctatcacctatctatctatttatctattawctattatcaatatctatctttaaagtaggataccttatatattgtaaccgtattctattatcaaagtagctggctctatagtattatatgtgttcagagggtttttttcctcctttcataaatcatttttgagtcttttctacgggatagagagaatcaagtgtaaggtgtattgaagattaagttaatttatagtgcttctctttgctatcagtgtattctcaatgttttaataacaatgcatggaccccact

SEQ ID NO: 436570 - DNA, 579 bp, Homo sapiens
tattactttcaactcctttctccaatacttccttayaagcaaggagattattattagggagagagtcaatcatggccttctgcaactgctaaggcacagcagactggcagatttctaaaaaccaagatcactcaagatgacctttgaccttcctaccccatttccacccattattgttaattttaactcttctgaccaactttgagtaaaatgtgcaaatgttcactgaaacccacagtgtaaaaatgtgtctaaaaaatttgtgagcattaaggaaatgagatgactgagtcaaacccattcatttggagaacccacttgaaaagtaatgttccctggatatcaaatgacaagctggatgtgtttatatattggcattagaccctgaaattaacacagtactaactttccctagagaatgatgcaatgaaatgtactacccaatgaacataaatagaaattattactgaagccttatttggcctttgtgacaagtgagaaaatatatgtaaatctaaatgattacaataaaaagatctataattgttaacaggaaataatatccaaacaagagactac

SEQ ID NO: 436571 - DNA, 622 bp, Homo sapiens
caccctattgtccatctcttcccagtacaacccacaccatgtgaatgttgcaacaccacttccatcatggttcatcatggttctccttgtrtaagtagctcacctattgaagcaagcctaaacctccatcgccttgcctcagtctgcagctgatggtcttccacaccattcctgcaggcagcctcttcctggcagtcaggctgggctccttgctgaatggtctgtacagtgtgctccttggtacctgttttgcttttacctatgctatggtcactggctgtaacatccttctcctgtcctgcttcccatggtcaaatgtttgtcattctcaaggtccttttaggttctgccccacctggctctttaggcccacacaacctctccccgtttctaaaaagtgtttatagattacagcatgaattttgctgtggttgtgtgtttttatgagcatgtgtgactatgtatgtatctatagatagacactgcttgtaatttcttaaagaaaacagcttctgcttgttttgttcaaaatgtctgaagccaattgtttttgtttgcttttagaaaaaaaaaaaactgacatcaaggagagagcataacacagcccccactaccaccaatt

SEQ ID NO: 436572 - DNA, 479 bp, Homo sapiens
tgtgctccttggtacctgttttgcttttacctatgctatggtcactggctgtaacatccttctcctgtcctgcttcccatggtcaaatgtttgtcattctcaaggtccttttaggttctgccccacctggctctttaggcccacacaacctctccccgtttctaaaaagtgtttatagattacagcatgaattttgctgtggttgtgtgtttttatgagcatgtgtgactatgtatgtatctatagatagacactgcttgtaatttcttaaagaaaacagcttctrcttgttttgttcaaaatgtctgaagccaattgtttttgtttgcttttagaaaaaaaaaaaactgacatcaaggagagagcataacacagcccccactaccaccaattatgcagccgagtgagtttccacattggggaaatcacggaaatcagcacatcagaatgcatgggtaagctcaccctgggaaaaacca

SEQ ID NO: 436573 - DNA, 422 bp, Homo sapiens
cacacatgtccatcttcctaatgatcctcgcgcttgctactcatggccacctcacggttcttacacttgctgtccaccccacatgctttccctccccaagcgtcttgccatagcatgctccccctgctctctctttgtctttgtctctctctctctctcactcactcatttcagttaagttgtatgtcccttgagtgctacatctgaaatagagccttcccaaactgatcttgccwttctcttattctgctctattttacttcaaagagtttatcactgcctgaatttctatgtattttcagttcactgtttcttccactaggctttgttccactagtctctggcctcaggaagactggatgttgtctttttttctaccgtattctcagcatcagagctgtgcctgatcacgatagaaactc

SEQ ID NO: 436574 - DNA, 369 bp, Homo sapiens
aattctcattccttttagctacaacttgggaaacttctgacagaataaaaatatattcctttggctraacagattagctagtattcacctaagaaggaaaaggacatagaacagttcaactttgatgtgtgtgcttcagagggactgagaggatcaatttccacatcagtccaaggcatagagtgctctctgagaggcaggctctgcagagggaggtctccatcacctagggaccgcagaggcacagaatgaaagagttcagctttactcgtgtggcaggtggtactgggatggccttgagttttctcccttggtaggattaatatctcattgaaagatgtcttgaggctgggataacctggctaaagg

SEQ ID NO: 436575 - DNA, 595 bp, Homo sapiens
ccttggaaagacaaattcagggactgagccttatctttaatcattttaaagtgatatactgcagcattttattggaacttttagaaaaaagaatagtcttctcatgaatgcttatgcttccttatcaaacrtttacatgacaatcaacagaaaaattgagtgtgaatttccaaacccaaggtagaaggctgagactgatggtacttttggggttggagtaaataaaatatctgcggtccagtatttttttcacattctcctgcacctacctcctacttaccactcttcccagaccttcctctcccctcctatttttttcttttttctctaatttaaggctatcatattagagtatcagtttggcttccataactgaaataggaatatacatatttatttttctcttgtgtaacagtgcagaggaagctaatccaggggagatgtctctgctccacgtgaacactcagggacccaggctctttccatgtcattgctccctcactccctaagtaggttgctcttgcctgcatggtcaaaagtggctcagaagaaagtatccttgtttcagccaatagaaaaatgggaaggaaaaggc

SEQ ID NO: 436576 - DNA, 573 bp, Homo sapiens
agactccaaaaggccatagccatgaagttagacactttcccatattttgttcaggaacacaaaaaccaaatgcaaagaaatgtttaagagaacatgaaattggcctcttccttcccccaaccaaaggtagtcattaacagtcaggaaggacaaactgaaacatgtaaaaagcaaatatttttgctagattttattttcaaagtttcaaacctttccaattttttttttattttttaccccaaaaaaggtatcaatacttttcattccactcttgtcaactttagccaaagccttctgagctgcagtcattttgctatttttctgttaatgaaaataagagagaaaaattgttatgaatgtaacatttattaatcatatatggaaatcaaagaagactgcawgtctcaagtttcattaaggaaggtaagcatcccccactaacatgcttcataagggagtgaaaaagttctgatttctattcagaattcagacctaagagacagaatatgttaaaagaggcagaagacaaaactgctgccttctaagaagcagaatgttccaaccaatggttta

SEQ ID NO: 436577 - DNA, 625 bp, Homo sapiens
aggccagtctcaggacatatccttaaattcttagagaatttaatgtgtgtgtagttgacaaccatttttatataattcatgtttcactcctgtattatttttattattattattattaatgtagagagaacaaagctgagaatatgcaggtggagtaattaccccaagatcatgccacttacaagtgacagagccagaattcaaaaccacttctgtctggcttcaaagcctgtggccctgaccactaagacataccacgctctgctcagaggacgctgtggaggagagggtgccttacctgcagccacctttttgccctccctcagctggttggccacgtgtttgggcagcatggcataaagtaaggtctctgttttcttcttttcaatggccaagtgcttggagaggacctgtagctcctccttcttcctttccagctggttggacagctctatctcagccagccgctgctggttcaggaggatgagatccctggtggtgtcgtkgggggcgatgtcagaaagatgcatattgagttcttccagctcttgcaggctgcggagcttcggagagcacaggtacaccatgcaccacatggactccatccagatcatctggccttgcc

SEQ ID NO: 436578 - DNA, 618 bp, Homo sapiens
agaaacctggtaattgctttaaaacactccagaaaaaataaaactagaaaaagagtggaggaatcagatagatgaaataagactggcaaaatattgttaattagtgaagctgggtggagggtatgtgggcttctgtacacaattctctctacttttgcgtatgtattaaaacattttttttaaataaataaaggagttgagttttttttggttggttgtttttttttttgtttggttgggtttttttcgtttgtttttttgtttgtttgttcggttttttgagacagggtctcactctgttgcccaggctggagtgcagtggtgctatcacggctcaygcagcttcaacctccccaggctcaggtgatcctcctgcctcagcctcctaagtagctgggactacaggtgtgtgccatcacgcctggttaatttttgtattttttgtagagatgggggttttgccatgttgtccaggctggtcttaaactcctgggctcaagtgatccacccaccttgacctcccaaagtgctgggattacaacacccacccaagactttttttccaggaggaaaatgatggtcacaaagcttctatgcttgattccccaggtgtggaga

SEQ ID NO: 436579 - DNA, 583 bp, Homo sapiens
atttctttctgtgcctctaggcattgtcatgaggccttagctcctggaactctagccatcatcttgtgtttatttggaggtgatctggtggaacaaggatctgagagccaaaagacagagagaacctggcaccctgttgatactgcaagcttacagctttctcactcctgcaagactctgcactgggacttcttgttatgtgaaataacggcttgccctgactatgtaagccagttgagtcaggaatttctgtgacctgctgccaaaagtatcttaactgacacagactacttgagttgagrgtttcaacagctcatcctctaaactcttttattggaatttctaagcagcagagtgaagtttttaattttttaaaattttcccttttaatcttgtttcttccttctctcatggccttattcaccccttcttcactcctctcatcctcctctgagaccttggcaatctcctgcctaagcctctaaaatttaagtgtctcctagctgtccttcttccctccccaggggcctttaatgatcttttctctaatccatcctgtgatactgcttgcctaatccaaaac

SEQ ID NO: 436580 - DNA, 583 bp, Homo sapiens
atttctttctgtgcctctaggcattgtcatgaggccttagctcctggaactctagccatcatcttgtgtttatttggaggtgatctggtggaacaaggatctgagagccaaaagacagagagaacctggcaccctgttgatactgcaagcttacagctttctcactcctgcaagactctgcactgggacttcttgttatgtgaaataacggcttgccctgactatgtaagccagttgagtcaggaatttctgtgacctgctgccaaaagtatcttaactgacacagactacttgagttgagagtttcaacagctcatcctctaaactcttttattggaatttctaagcagcagagtgaagtttttaattttttaaaattttcccttttaatcttgtttcttccttctctcatggccttattcaccccttcttcactcctctcatcctcctctgagaccttggyaatctcctgcctaagcctctaaaatttaagtgtctcctagctgtccttcttccctccccaggggcctttaatgatcttttctctaatccatcctgtgatactgcttgcctaatccaaaac

SEQ ID NO: 436581 - DNA, 534 bp, Homo sapiens
gtttgcagggtattctcaccacacaggaaatttgtgccccttccacactcctgcttccttactgaagggcgcccatgcttcagawcccattattctgcctctgatttgatcaaatgctcctataaaatgctttcacagtgccaggtgtccttagtgctatgcatttatctcagttggaattaattcattgtgaatggtgtccttaatttctgcttccctgctgggattcaaattccctggggttctacccccagaacctggtacaatgacttacccatagtaggtatacaataaatactcattgcatgaagaaaaaaatgcctagaagaaagagagaatgggttattaaaatacccaataacctgaataatgtgaaagtgtgaaaccaaattttgatttttttttttttggctactaactggcacattcatttaaaacatatttttcatccacggttattaaaaattcttagatattttcatccaggattattagaattttaaaatatttacccaagtctcaccactatggaac

SEQ ID NO: 436582 - DNA, 534 bp, Homo sapiens
gtttgcagggtattctcaccacacaggaaatttgtgccccttccacactcctgcttccttactgaagggcgcccatgcttcagaacccattattctgcctctgatttgatcaaatgctcctataaaatgctttcacagtgccaggtgtccttagtgctatgcatttatctcagttgsaattaattcattgtgaatggtgtccttaatttctgcttccctgctgggattcaaattccctggggttctacccccagaacctggtacaatgacttacccatagtaggtatacaataaatactcattgcatgaagaaaaaaatgcctagaagaaagagagaatgggttattaaaatacccaataacctgaataatgtgaaagtgtgaaaccaaattttgatttttttttttttggctactaactggcacattcatttaaaacatatttttcatccacggttattaaaaattcttagatattttcatccaggattattagaattttaaaatatttacccaagtctcaccactatggaac

SEQ ID NO: 436583 - DNA, 636 bp, Homo sapiens
tttaacaagtgacgcttctaatagcccaacttttagattgctttgatacctggaattaatgtgattcttttagaaatctagtgacttgtagaatcattacaaaaacaaaaattgaagttcacctcactcatttgtgacttacactgtccttccaaaaacttttaaagaaatcagctaactaaacagggggcaaagaaataagaaatctttgaaccaggcagataaacagaaattaaacaatttatctcaaactacgatatttactgtggctttaaagagtaagagttaccaaacactgttttccatttaagttaatgtgatatctccatggaaactggaaaaaaaaaaaaaagttgtgtaaattgtaaatgtattaaattagttggtttgccgggggagcagacagaaagacaggttttccagagaaaggaaacgcccactgggcaaagrtcagtgaaaaggaaacattatgtattttgaaacaagcaaataatctttttaaactgtagatttttagataaatacttgataaattaatatcaaatagatgaagactttagtgcttttttaatatccagctgtaacccaactctcaaaatacctgggacagaaaaagttgcaaaataaatactgaaa

SEQ ID NO: 436584 - DNA, 578 bp, Homo sapiens
gatcaaatatttgatgacctttgtcctgttaaggtcatgagctaccaccatgaatattagcaaatcatgctgttagtgcgtctataatgtattatttgtaagagattgttttagcataaaaaattcacaaccagaaattatacacaatttaattagaaactatcatgatacacttgtggtaggtaaaattaatctgtaatgcattaataaggctttggtgaaaaaagtaaaacataactaattactactttttcctgcttattggaaatcagacagtgtaaacaaaaacaaattagttttaatatttctgaaggtgtcttcatttttagatagagtatagactatacacacacatgtacagtggtaggctggtaacaatcagctttccaggaagtaacgccctggttttaagtatttgccaatttctgttatataaacactcttaccttggttgatttcaacctatgaatatcaggacaactccttgaaaaatgcctaaaaattgagagctgyggtggctcctgccagttgtccttgcgcataaggaggcaaggctatgcgttcgaggccaacctggg

SEQ ID NO: 436585 - DNA, 605 bp, Homo sapiens
taattttaaatacgacttttaataattttgtgcatgaaatgaaggttgtgcatactgagccatcggaaatccaatgtgccatgtgtagaattctctacttatggtgtcatgcgagtactcaaactgtttccagttttggagcattttggatctccgattttcagttgagggatgctcaacttgaatatatacaaatatgttgatatatattaaatacataaaaggaaacttaaatatagctcttaacaaacacaytgatttctttaaagtttatggcagctctttctaaaggtcagaatttcactttacagcttctatctttctaaccatatatcttactataatttcctctcaggtccttcacagagtagcatcaatggttttgaaatgcatcagcatttaagcatataatgagctatggccatatgtttggcgtctaaaataaagcaggccagatttaagaactcagagagtagacctctaagaaatttcataatctgattttcttatcatcctttatgaagttcttataaaaaaagtgttggtgaatgaagactgggcttactatatagggattcacatattctattctaaatacggtaagc

SEQ ID NO: 436586 - DNA, 548 bp, Homo sapiens
actaccaaaaaaggaagaaaatacaatcaaattctaatttttatcatgatgactactacattgctagagttattattttccaaatgctttttgatgcccctgtttgctaagcacattcctggtatgttgggtaatctgataycagtttgcataatttctcccagtagcactatgaaaaatggtactaaggactcaaaagccaaagtttggccaagtctataataaaataaattgtaaatcttgcctttgattttcccatctaggataatgcttcggcagtgtgtcctgtaatgtgatttaaatacaacaatgttctaggtactgatcaataatattataaattgaggacatgagtagttttttaatctgaacaattaaaacagacattcacctaagaggcggtgataacaagtcctaggagcgtctgttagccaaagatatttatttcaaagtttcctattcttaaattcctatggagtttgacactgagattcttttccaaattttacaaatttatatactctttatagaactcagttgaaaggcca

SEQ ID NO: 436587 - DNA, 588 bp, Homo sapiens
catgtattcccacccaccataacattttataattcagtattaaaccaatactgaactaccaaaaaaggaagaaaatacaatcaaattctaatttttatcatgatgactactacattgctagagttattattttccaaatgctttttgatgcccctgtttgctaagcacattcctggtatgttgggtaatctgataccagtttgcataatttctcccagtagcactatraaaaatggtactaaggactcaaaagccaaagtttggccaagtctataataaaataaattgtaaatcttgcctttgattttcccatctaggataatgcttcggcagtgtgtcctgtaatgtgatttaaatacaacaatgttctaggtactgatcaataatattataaattgaggacatgagtagttttttaatctgaacaattaaaacagacattcacctaagaggcggtgataacaagtcctaggagcgtctgttagccaaagatatttatttcaaagtttcctattcttaaattcctatggagtttgacactgagattcttttccaaattttacaaatttatatactctttatagaact

SEQ ID NO: 436588 - DNA, 588 bp, Homo sapiens
catgtattcccacccaccataacattttataattcagtattaaaccaatactgaactaccaaaaaaggaagaaaatacaatcaaattctaatttttatcatgatgactactacattgctagagttattattttccaaatgctttttgatgcccctgtttgctaagcacattcctggtatgttgggtaatctgataccagtttgcataatttctcccagtagcactatgaaaaatggtactaaggactcaaaagccaaagtttggccaagtctataataaaataaattgtaaatcttgcctttgattttcccatctagrataatgcttcggcagtgtgtcctgtaatgtgatttaaatacaacaatgttctaggtactgatcaataatattataaattgaggacatgagtagttttttaatctgaacaattaaaacagacattcacctaagaggcggtgataacaagtcctaggagcgtctgttagccaaagatatttatttcaaagtttcctattcttaaattcctatggagtttgacactgagattcttttccaaattttacaaatttatatactctttatagaact

SEQ ID NO: 436589 - DNA, 548 bp, Homo sapiens
actaccaaaaaaggaagaaaatacaatcaaattctaatttttatcatgatgactactacattgctagagttattattttccaaatgctttttgatgcccctgtttgctaagcacattcctggtatgttgggtaatctgataccagtttgcataatttctcccagtagcactatgaaaaatggtactaaggactcaaaagccaaagtttggccaagtctataataaaataaattgtaaatcttgcctttgattttcccatctaggataatgcttcggcagtgtgtcctgtaatgtgatttaaatacaacaatgttctaggtactgatcaataatattataaattgaggacatgagtagttttttaatctgaacaattaaracagacattcacctaagaggcggtgataacaagtcctaggagcgtctgttagccaaagatatttatttcaaagtttcctattcttaaattcctatggagtttgacactgagattcttttccaaattttacaaatttatatactctttatagaactcagttgaaaggcca

SEQ ID NO: 436590 - DNA, 548 bp, Homo sapiens
actaccaaaaaaggaagaaaatacaatcaaattctaatttttatcatgatgactactacattgctagagttattattttccaaatgctttttgatgcccctgtttgctaagcacattcctggtatgttgggtaatctgataccagtttgcataatttctcccagtagcactatgaaaaatggtactaaggactcaaaagccaaagtttggccaagtctataataaaataaattgtaaatcttgcctttgattttcccatctaggataatgcttcggcagtgtgtcctgtaatgtgatttaaatacaacaatgttctaggtactgatcaataatattataaattgaggacatgagtagttttttaatctgaacaattaaaacagacattcacctaagaggcggtgataacaagtcctaggagcgtctgttagccaaagatatttatttcaaagtttcctattcttaaattcctatggagtttgacactgagatwcttttccaaattttacaaatttatatactctttatagaactcagttgaaaggcca

SEQ ID NO: 436591 - DNA, 636 bp, Homo sapiens
aacatttgtatgcttttcttttgaagtaaggtggaaacatttttcatcagtttttcaactgttagttggaatatttgtgatcactttaaagtgtgacagtaatatgaaactcctgagatgaccagcagcatagcctttagcccatttgtgttcattttaaatatgcttttattgaataattaatatgtctagacactttattgtgaaaactagaaatttttcctatccactccggtgtaacccgtgtaaatagtttcctgtgtataccctctatacattttcyatcatatataagcaagcatgtaatagattttttttttaaagagacaagatcttgatatgttgcccaggctggagtacagtggctattcacaagtatgatcatagtgcactatagcctagaatttctgggctcaaacaatcctcctgcctcagtctctcaagtagctgggactacaggtatctaccattgtgcctggcctaaaattttatcttctaaagattataaaaatgagggaattatactatgtatacagttctccaactggctatttcataaacaatgtactgtgcaaccttttctgtatcaggcacatatgttttctaatgaatgcctaggatgacattgtaggtatg

SEQ ID NO: 436592 - DNA, 636 bp, Homo sapiens
aacatttgtatgcttttcttttgaagtaaggtggaaacatttttcatcagtttttcaactgttagttggaatatttgtgatcactttaaagtgtgacagtaatatgaaactcctgagatgaccagcagcatagcctttagcccatttgtgttcattttaaatatgcttttattgaataattaatatgtctagacactttattgtgaaaactagaaatttttcctatccactccggtgtaacccgtgtaaatagtttcctgtgtataccctctatacattttccatcatatataagcawgcatgtaatagattttttttttaaagagacaagatcttgatatgttgcccaggctggagtacagtggctattcacaagtatgatcatagtgcactatagcctagaatttctgggctcaaacaatcctcctgcctcagtctctcaagtagctgggactacaggtatctaccattgtgcctggcctaaaattttatcttctaaagattataaaaatgagggaattatactatgtatacagttctccaactggctatttcataaacaatgtactgtgcaaccttttctgtatcaggcacatatgttttctaatgaatgcctaggatgacattgtaggtatg

SEQ ID NO: 436593 - DNA, 636 bp, Homo sapiens
aacatttgtatgcttttcttttgaagtaaggtggaaacatttttcatcagtttttcaactgttagttggaatatttgtgatcactttaaagtgtgacagtaatatgaaactcctgagatgaccagcagcatagcctttagcccatttgtgttcattttaaatatgcttttattgaataattaatatgtctagacactttattgtgaaaactagaaatttttcctatccactccggtgtaacccgtgtaaatagtttcctgtgtataccctctatacattttccatcatatataagcaagcatgtaatagattttttttttaaagagacaagatcttgatatgttgcccaggctggagtacagtggctattcacaagtatgatcatagtgcactatagcctagaatttctgggctcaaacaatcctcctgcctcagtctctcaagtagctgggactacaggtatctaccattgtgcctggcctaaaattttatcttctaaarattataaaaatgagggaattatactatgtatacagttctccaactggctatttcataaacaatgtactgtgcaaccttttctgtatcaggcacatatgttttctaatgaatgcctaggatgacattgtaggtatg

SEQ ID NO: 436594 - DNA, 575 bp, Homo sapiens
gtgtggtggcatatacctgtaatctcagctactcgagaggctgaggcataagaattccttgaacctgggaagtagaggccrcagtgagccaagatcacaccactgaactccagcctggggcacagagcaagacccagtctccaaaaaattacaaaataaattcacaaaccaagtatctgctttcttcaagagactcacctgactcataaggactcacataaacttagagtaaaggggtggaaaaagatgttatgtgcaaatggacactaaaagcaagtggcaggagtagctatttttacatcagacaggacaaactttaaagcaacagcagttaagaaagacaaagagggacattatataataataaaagaactagtccaacagaaaaatatcacaatcctaaatatatatgcacctaacactggagcgcccaaatttataaaagacctaagaaatgagatagacagcaacacagtaatagtgggggacttcaatactccactgacagcactaaacaggtcatcaagacagaaagtcaacaaagaaacaatggacttaaactacatcctacaaca

SEQ ID NO: 436595 - DNA, 575 bp, Homo sapiens
gtgtggtggcatatacctgtaatctcagctactcgagaggctgaggcataagaattccttgaacctgggaagtagaggccacagtgagccaagatcacaccactgaactccagcctggggcacagagcaagacccagtctccaaaaaattacaaaataaattcacaaaccaagtatctgctytcttcaagagactcacctgactcataaggactcacataaacttagagtaaaggggtggaaaaagatgttatgtgcaaatggacactaaaagcaagtggcaggagtagctatttttacatcagacaggacaaactttaaagcaacagcagttaagaaagacaaagagggacattatataataataaaagaactagtccaacagaaaaatatcacaatcctaaatatatatgcacctaacactggagcgcccaaatttataaaagacctaagaaatgagatagacagcaacacagtaatagtgggggacttcaatactccactgacagcactaaacaggtcatcaagacagaaagtcaacaaagaaacaatggacttaaactacatcctacaaca

SEQ ID NO: 436596 - DNA, 575 bp, Homo sapiens
gtgtggtggcatatacctgtaatctcagctactcgagaggctgaggcataagaattccttgaacctgggaagtagaggccacagtgagccaagatcacaccactgaactccagcctggggcacagagcaagacccagtctccaaaaaattacaaaataaattcacaaaccaagtatctgctttcttcaagagactcacctgactcataaggactcacataaacttagagtaaaggggtggaaaaagatrttatgtgcaaatggacactaaaagcaagtggcaggagtagctatttttacatcagacaggacaaactttaaagcaacagcagttaagaaagacaaagagggacattatataataataaaagaactagtccaacagaaaaatatcacaatcctaaatatatatgcacctaacactggagcgcccaaatttataaaagacctaagaaatgagatagacagcaacacagtaatagtgggggacttcaatactccactgacagcactaaacaggtcatcaagacagaaagtcaacaaagaaacaatggacttaaactacatcctacaaca

SEQ ID NO: 436597 - DNA, 563 bp, Homo sapiens
atctgcaagaaactactagaatgaatatgtgagttcagtaacgtcacaaaatgcaaggtaagaaaacttcaaatcctaaataaatagttaaggataccctgttgaaggatcagaattgttaccaattttccccaaattgatctgtagagtaaatacaggcaattcaaaatctcaacggccttctgtcgaacttgacaaggtatctgtaaaatatatatggtaatgcaaatgacccagatgagcaatgtcagtttttgaaaataaataagttgtagaagttatgctacattccaagacttcctacacagctacattcatcaaaacagtgtggtactgacataatgagagacatgtaaatcaacgaaccaaaacagaatctagaaatagacrtatgcatatatgtgaatttaggcaaagataccaaagtgattcaatgaagaaaggataatctttttcaacaaatggtgctggaagaaatggatattcataaacaaattaacccttacctcacacaatacataaagattaatgtgaaataaacagatgcacaaataagggtgaaa

SEQ ID NO: 436598 - DNA, 622 bp, Homo sapiens
aatgaatatgtgagttcagtaacgtcacaaaatgcaaggtaagaaaacttcaaatcctaaataaatagttaaggataccctgttgaaggatcagaattgttaccaattttccccaaattgatctgtagagtaaatacaggcaattcaaaatctcaacggccttctgtcgaacttgacaaggtatctgtaaaatatatatggtaatgcaaatgacccagatgagcaatgtcagtttttgaaaataaataagttgtagaagttatgctacattccaagacttcctacacagctacattcatcaaaacagtgtggtactgacataatgagagacatgtaaatcaacgaaccaaaacagaatctagaaatagacgtatgcatatatgtgaatttaggcaaagataccaaagtgattcaatgaagaaaggataatctttttcaacaaatggtgctggaagaaatggatattcataaacaaattaacccttacctcacacaatacataaagattaatgtgaaataaacagatgcacawataagggtgaaaactgtaaaatgtgtataagaaaataggagaatatattgagttaggcaatgatttcctacagtagacataaaagacaca

SEQ ID NO: 436599 - DNA, 622 bp, Homo sapiens
aatgaatatgtgagttcagtaacgtcacaaaatgcaaggtaagaaaacttcaaatcctaaataaatagttaaggataccctgttgaaggatcagaattgttaccaattttccccaaattgatctgtagagtaaatacaggcaattcaaaatctcaacggccttctgtcgaacttgacaaggtatctgtaaaatatatatggtaatgcaaatgacccagatgagcaatgtcagtttttgaaaataaataagttgtagaagttatgctacattccaagacttcctacacagctacattcatcaaaacagtgtggtactgacataatgagagacatgtaaatcaacgaaccaaaacagaatctagaaatagacgtatgcatatatgtgaatttaggcaaagataccaaagtgattcaatgaagaaaggataatctttttcaacaaatggtgctggaagaaatggatattcataaacaaattaacccttacctcacacaatacataaagattaatgtgaaataaacagatgcacaaataagggtgaaaactgtaaaatgtgtataagaaaayaggagaatatattgagttaggcaatgatttcctacagtagacataaaagacaca

SEQ ID NO: 436600 - DNA, 576 bp, Homo sapiens
ttaacgtatattctctacctcttcagtcttactgcttctccaaagtttacaagtaaaacagtcagatactccaggaggccaaaaatcacttcccaaaagatacccacatccaatccctggaacctgtagaatgttgccttatggcaaaagatgagattacagttaaagatcttgagaggaggagtttaccctgtattatccaagtgagccctaaatgatataacttcaaggtattccacacagcattccttctaatcaaggaacttacttcacagcaaatgaggtatgacagtggacccacgatcatggaattcactgttcaaaccatgtccccatatcctgaagcagctggcttgacagaaaagaaaaggggtatttgaagtctcagcagcaggtaggtgggatatcttgcagsgctggggcaatgttctgtgggagattgtatatgtcctaaactagtgtctaatgtatgataccgtttctcccatagccaggattcatgggtccaggaatcaagggtggggaggaataggaatggcaccccttaatattactcctggtgatttactactaaaa

SEQ ID NO: 436601 - DNA, 575 bp, Homo sapiens
caaacaaggtgttgctgtgaaggtattttgtagacatgattagcagtcacagtccattgactttaaggaaattatccttgataatcttagggggacctacgtgcaatcacaygtatccttaaaagagggaggcagaggaatttttgagagagaagtgcacagaggaaaaggggatgtgaaaatagaggcagagaatagaatgatgctgccacaagccaaggaatgcctggagccaccagaagctggaataggcaggaaaggactctcccttcgagcctctggagggtgtgcagccctgccaataccctgattccagacttctcttctccagaatgatgagagaatgcacttctgttgttttaagccacaacgtttgtggcatttgttagagcagccacaggaaactaatataggtgcttaacaataaaacatagtaagaaaagaaattttatctgaggaatgcgagcctgttgtaaattatcagacccacagaggcatgagagtgaggcagcagtcgcatccaacatcccccccttgcgctaagtaatcagctcttgaagctgcttgctatgtgg

SEQ ID NO: 436602 - DNA, 584 bp, Homo sapiens
acttttcataagaatgttagttggcttcagaggttgaaataccaactcgcttccttgatttgaaatttggttggaagccaacatctagaactcggtaatgttatctacagcagtctttcttatataactcttttatatttgccttgaaaaaaaaatgctgagctaatgacaaaagacaatcttggggtactttgtcttaaaatctgagggtggagaatcagcatgcaagcaaaacttcaggtggcagcacctttggaaccagcacctagcaaactgtggggcatccattcatgctctgggggatgtcaccagccatcacagagggtgaccaactctaaaggatgagcgcaggggaagtggaaaaggagagagtagaatggcacgtggaatgtgagtttctgamgggcagagattttgtcctgtttgttctcatcgtatcacctgcatgtggaacaaagaagacagtaaatatccatggaacaggtcaatgcacagaatatgtgggtggaggaatgaaagaaagaagtaaagacgggaggaacataaactttttgaaagtatatacagggagaaagcaattagaa

SEQ ID NO: 436603 - DNA, 469 bp, Homo sapiens
ggaaagaacaaccattatttttggccttttaaaattcaagctgcaaaccacagagsttaaatgaggttaaacacctcataaaggtccctgcacacagaaacattcagaaaacactgctgacagatgactgtcattggtatggacggcttagagatctagcaaccaaagcaagattcattacgatgtttgctttaaattttgtttttgttaccactccaataaaactagatgactctattctattttaaccagtattagcctttgtattttctttatcatcaataagaaatgtatcttttgttcttaaggtaatttataatgctggtaaataccgctctaaaaaaatggtatgtataactatatgtctatacctttcaaactaagttattcttaaaattgacactaggtgaaaatactctcctttcccatcttaatattagaaaaaaattatcttgggggtggtagtaaa

SEQ ID NO: 436604 - DNA, 469 bp, Homo sapiens
ggaaagaacaaccattatttttggccttttaaaattcaagctgcaaaccacagaggttaaatgaggttaaacacctcataaaggtccctgcacacagaaacattcagaaaacactgctgacagatgactgtcattggtatggacggcttagagatctagcaaccaaagcaagattcattacgatgyttgctttaaattttgtttttgttaccactccaataaaactagatgactctattctattttaaccagtattagcctttgtattttctttatcatcaataagaaatgtatcttttgttcttaaggtaatttataatgctggtaaataccgctctaaaaaaatggtatgtataactatatgtctatacctttcaaactaagttattcttaaaattgacactaggtgaaaatactctcctttcccatcttaatattagaaaaaaattatcttgggggtggtagtaaa

SEQ ID NO: 436605 - DNA, 591 bp, Homo sapiens
ttaagtttaaatatgcatactatattatttcagtttttatcacaaattgagataaaaagtacaaaggacagcagatgcttctgaatgtcacttgaaaaatttggattttcagttgtacacatctgaggttgaggaaagttattggcaaaaacatttcaggagtgtttatgaagactagaaaagsttccgggatagaatctagagggcaggttatactgatttacaagaaagtagtcataaataagagctaatactcattgggtagtcacatgtgtttttcacaaaaattctatatggtaagaattagtattattccctccattttagaggatggaactgacgcagagggaggttaaatagctggccacacagctagtctgtggcaaagctcaattaaaacccaggcgtctgcttccagagtcatgcttgcagtcacaagagtagaaatacatactgaatcaagttgaaccataatgcaaatcacagcaaacataaagagtatgtacttttcattttgacccaacaaacaccttttgagtgcttattatgtgccatgtacaaaactgtagcctcctttgtacttcatgtaat

SEQ ID NO: 436606 - DNA, 591 bp, Homo sapiens
ttaagtttaaatatgcatactatattatttcagtttttatcacaaattgagataaaaagtacaaaggacagcagatgcttctgaatgtcacttgaaaaatttggattttcagttgtacacatctgaggttgaggaaagttattggcaaaaacatttcaggagtgtttatgaagactagaaaaggttccgggatagaatctagagggcaggttatactgatttacaagaaagtagtcataaataagagctaatactcattgggtagtcacatgtgtttttcacaaaaattctatatggtaagaattagtattattccctccattttagaggatggaactgacgcagagggaggttaaatagctggccacacagytagtctgtggcaaagctcaattaaaacccaggcgtctgcttccagagtcatgcttgcagtcacaagagtagaaatacatactgaatcaagttgaaccataatgcaaatcacagcaaacataaagagtatgtacttttcattttgacccaacaaacaccttttgagtgcttattatgtgccatgtacaaaactgtagcctcctttgtacttcatgtaat

SEQ ID NO: 436607 - DNA, 591 bp, Homo sapiens
ttaagtttaaatatgcatactatattatttcagtttttatcacaaattgagataaaaagtacaaaggacagcagatgcttctgaatgtcacttgaaaaatttggattttcagttgtacacatctgaggttgaggaaagttattggcaaaaacatttcaggagtgtttatgaagactagaaaaggttccgggatagaatctagagggcaggttatactgatttacaagaaagtagtcataaataagagctaatactcattgggtagtcacatgtgtttttcacaaaaattctatatggtaagaattagtattattccctccattttagaggatggaactgacgcagagggaggttaaatagctggccacacagctagtctgtggcaaagctcaattaaaacccaggcgtctgcttccagagtcatgcttgcagtcacaagagtagaaatacatactgaatcaagttgaaccataatgcaaatcacagcaaacataaagagtatgtrcttttcattttgacccaacaaacaccttttgagtgcttattatgtgccatgtacaaaactgtagcctcctttgtacttcatgtaat

SEQ ID NO: 436608 - DNA, 607 bp, Homo sapiens
gatcgagaccatcctggctaacacggtgaaaccccgtctctactaaaaatacaaaaaataagccgggcatggtggcgggcgcctgtagtcccagctactcaggaggctgaggcaggagaatggcatgaacccgggaggcggagcttgcagtgagccgagatcacgccactgmagtccagcctgggcgacagagcgagactctgtctcaaaaatagaaaaaaaaaattagacatttaactcaagtacaacaaccatgatgacatcatagatatgtatgtaatttcccctcagctaacaaagtatttaaatcaaaataaatgagaaaatgagacggagttgctttgcccacatactttctcattctattgtattagtcatttggatcataagaacagcaaagcaagagaagaggtatttttattgggaaaaaaaggagcataggatggcatgaaagacaggaaatcaaaagatcatgtgtaattcattgtaaatttggtaacatggaaaaaagtgaattgtgttgcagccgtatctataagtcctaatggctggcacaaagggggctttttctttcacagcaaaaaaaagtagccaagtggattttaag

SEQ ID NO: 436609 - DNA, 482 bp, Homo sapiens
aaggacatgcaacgcaatggtaatttgtgccaagccaaagaaccatatactcatgtgcatgttaaaaagtacacttaaaaggatggcaggaggttaagtctggtgtggtgaacaagatcagatcatgaattatgattatccgcaatctacaggtgaagaaactgaagttcagagaagtaactttgtcaaagtcacgtatctagtgactggcaaagctggaatttgaacaaagtgagtcaattctgaaacccatattctttggactgcaggagcctggcaatcccagccatcactgggtttaaggcccaggtccagccatgtggaaatggctcccttaagccctagccagctgcaggggccagccctgcagctcacctgccgtagcctcagtccatcctttgctagcytacttgtctctggattagtcctctcatgggagtcaaactaacctgccacctgcccaccaaagctgggcaacatca

SEQ ID NO: 436610 - DNA, 585 bp, Homo sapiens
ctttggctatattatagagttaagaaaactggctcaattatcacacagatggacatctgcaaagttaataaagacaggcctgtagaacaatcaaaattaaattattatctttcattgttctagtccattcaaatgaatgaaattgaacatgcgacatacccatgaaatgtttgcccatgttccattatcagggcctcaaatgaaaatcagtccttattttaatcaacttacacccagacttgtgtcataatatagccaaaaacctactccatatctccaactaatacgtctgtcttggtccattcaggctgtaacaaaacaccttagactggataatctaggaacaacagaagcttatttttcacakttctgaaggctggaagtccaagatcaaagcaccagtagactcaacgtctagtgaaggccccttcttcatagatgagccctcctatgtgtctgcacatggctgaaggggaaagcagcattttggggcctcttatcagagcattaattaatcccattctcaggggtacagccctcatgacctgaccacctcccaaaggccccacattctaataccatcta

SEQ ID NO: 436611 - DNA, 575 bp, Homo sapiens
tgagccctcctatgtgtctgcacatggctgaaggggaaagcagcattttggggcctcttatcagagcattaattaatcccattctcaggggtacagccctcatgacctgaccacctcccaaaggccccacattctaataccatctaccttggtgattatgttcaacatatgaattttggggctggggaggacaaatatgcagaccacagaaatggccaaaaccaaacacctaatacagtgttgagaaatattatattcacaagatctcaaagtatcattccatggattactcatcacaaaggagaaacgatacytttatggtggaaacatctggcagactccagattttcttcctaaacctgatcctccattattccatcaaggctgaaaccctgaagccatcattggcatctttctctcccaccttatagctaatccatcaggaaatactgttggctgtaccctgaaaaagtatccgcaatcctttcatctctcatccagtctactgtgtccaccacggccccagccaccaccagcccttgcctggtttggccactggcctcctcaatcgtctc

SEQ ID NO: 436612 - DNA, 519 bp, Homo sapiens
gctttctttctacccggaggcaaaggtgacacactgatggggtctcccattgcccaactctcaggcctaggattggccaactgccctcccaacagattccaactgctcaaggctgagtgcaagctgttccctccggggccactgacatcacagtccgacsggggaatcctcgccacactgcacctcacacacccctccccagccaaaggctttcatctctgtcaaatcaacacttcccaccccaaatgagaatctgacacattataatcaccttcactcctcctccgaggatcccacaaaccacagaaagacgcactcgtttttcagggctgcatgctggggacacactgccaaaacagcctgcagcccttccaagatgcttaccacccgggagagggagagtggccagccagggcagggctctgaaggacgattgtccaggaaaatggagtgaatgagatctctgtaaagtcaggtttgaagctcagagttccaactgaacccaatgagaaagtgggt

SEQ ID NO: 436613 - DNA, 519 bp, Homo sapiens
gctttctttctacccggaggcaaaggtgacacactgatggggtctcccattgcccaactctcaggcctaggattggccaactgccctcccaacagattccaactgctcaaggctgagtgcaagctgttccctccggggccactgacatcacagtccgacgggggaatcctcgccacacygcacctcacacacccctccccagccaaaggctttcatctctgtcaaatcaacacttcccaccccaaatgagaatctgacacattataatcaccttcactcctcctccgaggatcccacaaaccacagaaagacgcactcgtttttcagggctgcatgctggggacacactgccaaaacagcctgcagcccttccaagatgcttaccacccgggagagggagagtggccagccagggcagggctctgaaggacgattgtccaggaaaatggagtgaatgagatctctgtaaagtcaggtttgaagctcagagttccaactgaacccaatgagaaagtgggt

SEQ ID NO: 436614 - DNA, 569 bp, Homo sapiens
gaattatcgagttctactgatgggccctattgttttgggggctttcagggtgatacaaatattttacggttttagtctcaaaaaggctttgaaaatcctacacatattttaaagtcttatcaagaaattctgaggctacatacaaaatgtcatctaaaatgaaacaatgttttcttaagacttcaaataaaccacctcaaaaaacaaaagtacatatattaaaacaaaccacttgaatttcaacttatgtagatatatttcaaggaatatttctacccaaagcccagaagaaagagactgttctgaaactgaaaagtagtattttaaaaggccattacttgtattttcaaaaacaattttatgaatgtatacttgacaaaacgacacgtacatatttaaagttaaaaggttgcaaagttcacatacacatgtgaaaccactgacacaactgaaaaaacacacaaatcaccccaaaagtttccgcagatccattawaatccctgccaactgccatcccaagcaaccattgatctgttttctgtcactgtatattacattgcattgcctag

SEQ ID NO: 436615 - DNA, 572 bp, Homo sapiens
atgaaccattctgtggacaccactcagcctctttccccagccacccctgtcatcgccctatgggccaatgaacaaagtggccatggtggcagggatggaggttacgcatgggctcagcaacactggactgagtgtccaatttgccagcagcagacaccaacactaagccctcgatatggcaccatttctcagggtgatcagctagctacctggtggcagttgattatattgggcctcttccatcatggaaagggcagaggtttgttctcaatggaatakacacttactctggatataggtttgcctatcctgcatgcaatgcttctgccaagactactgtccgtggattcacagaatgctttatccaccatcatggtaatccacacagcagtgcctctgacccaggcactcactttatggctaaagtagtgcagcagtgggctgatgttcatggaattcactggtcttaccatgttccccatcattctgaagcagctggattgatagaacagtggaatggccttttgaagtcacaattacaacaccaactaggtgacaatattttgcagggc

SEQ ID NO: 436616 - DNA, 546 bp, Homo sapiens
aatcttacaagcttctcataaagtaacacattactatgctacccttttggtttttgctttctgcaagccacaaattcaactttctttttcagatgaagattttgcctattcacgcatatgtataaatatacatttaaaacttttatcaaatcacaccaaaaaatataatggccctakgtactcaacagccagcttcaaccatcacaattcatagccaatattttccatctctaccacctactctcctctcatataatttcaaagcaaatccaagaaattattttaatatattagtacatttcaatatgtatctccaaaagataaaactattctaaccataaatactactatcacaaataaagagaaattattatttttaattccatcaaaaatatccaggctttaaatctcttttttttttttttttttttttttttactgcttgttggtctgcactaggacacaagtaaattccacatgttgcagtagctcggaatttcattttttaaattatatttaggtctctttggtccaataatattccct

SEQ ID NO: 436617 - DNA, 593 bp, Homo sapiens
cagctcagataatctttagcattttttagcaataaagccatacataattttatttattttgttttttgagacagagtctcactctgttgcctaagctggagtgcagtggcacagtctcggctcactgcaacctctgcctcccaggttcaagcgattctcctgcctcagcctcctgagtagcagggattgcaggtgcctaccaccatgctaggctaatttttttttattttttwtttttttagtagagatggggtttcaccatgttggtcaggctggtcttgaactcctgacctcgtgatccgcccgcctcagcctccaaaagcgctgggattacaggcgtgagccactgcacctgggcattatttttaattagtgaatgcacattgcatttttagacatgatgctattacacaatttacaggctacagtatagtataaacataactttatatgcgctgagaaaccaaaaaattcttgtgactcactttatggtgatatttgctttattggaacagtctgaaactgaacccacaataccttctaggtatgattatatgtaaggtttttaacaaatatttatttagcagtgtgtc

SEQ ID NO: 436618 - DNA, 597 bp, Homo sapiens
tatttggctcacggatctgctggtgagggcttcaggctgcttccactcctggaggaagcaaaggggaaccagtgtgtgcagatatcacatgaccagagaggaagcaagggaggcagtggagtttcaacaggagacttgttagggccaaacaaaccatacacaaaccatagcgacaggtaacgagaactgactccacgtaattctaacttatgtctgatctaatccagccttctgtacggtcaactgcactttttgaacastgaaccacattataatattatgcctttgaaacttattgaaaattgctgtaaatcagatatataaacttatttgcattttcataaaatccagtattaaaaactttgtcctgaaaaagactgattggtgcctttcccttagaggataagtaagtcaactttggtttatacttcacctgattaaaaattaaaagccagattttctactcattcatagaaaagtattacctcttacaaattgttttctttctagttcttcctctgttgtatttggttacgcttgtttttctggtaatcaattagaaaacctcttttcaaatgatatagaaagaagagaaat

SEQ ID NO: 436619 - DNA, 634 bp, Homo sapiens
ataacatacaagatacaaattaataagagatctgaatagcagggagacactcctgtgtgaaatcaccaaaacattccttaaagaagtaatgttcaccttcatataaacttttttccttctgtgtaaacttagcattgctcttccagttcgaatttgtagtaaaaacattttgaaggaaaaatttgagtaactaccatcgagtattatgcttattactgggtgatgaamtaatctttacaatgacccccaccatttacatgggtacattgtgacatggaatttacccatgtaacaaacctgcacatgcaccctcggtcctaaaataaaagtcagaaacaagaaaaaaaaatccattttacgcaacttcttgttaggctaaatgaggttctaattccactcttagtatttgtaagtattcagacatacatctaacatcctaaatttttaatgacattactattacagagaagtatggcttcaaccaaataaaactagactccataaggaaaaattttaaataagtgcctgacattgagatcgagaaaaagagaaaaaagcaagagagagagaaatagagcgagtgagtttctaagtgtttttgggctactgctttttcgagcttccatcaaacaac

SEQ ID NO: 436620 - DNA, 600 bp, Homo sapiens
ccctattttaatagaatgcagactgcttagactttggctcacattctgcatgctgaggtgagctactctttcctcacttgctgcctcagtttccctttttgcagtgacacctcagataggaagctctgacatcagaagctcttcaattcagcttctacttggggcaatggaaaaggtacgatgtgttactgtgatggaaagcactgtcaaccaaccctggcagaggtgccaggggcatgagggactcaagccgtttcgaggactcatcctagaacaatgcaaacaattgtcctcaatcctgggtctatgggcctgtttactcactccgtgctgygcccggcagaaacttgcagtgatttaggaagtcagggagagacatttctggctgtgcggaacctgatgaaatactgttttgtggagacagactaaaaaataaccaaacggtctttaagtggaacagagatcagaaaatctcctgaggcacatttaagaaacccatcaattttgctggcttggccatagaagggaaaattgcactgcaaatgattatctctgatgaaatgttcccaagtcttttacagggcacttatttgtagtgac

SEQ ID NO: 436621 - DNA, 597 bp, Homo sapiens
ggatatgaaggcccaggtcccctgctgggactcactggggtgcacttcacctgccagagctcccaggaaccaggctgaggctgggactgtggtgccttgtttggctttctcctcagcctggccctcttgcccactgtcttatgggtcttcagtgacttcactgctctcaggggctgagacagagkggagcaagattagcactatgacttagaccaattatgctcaattacctggggttaacacttacaaagccggggttctgctagctggggaggagggaaaggatactcagcaggcaactcacagtgtctgcagccacagctcattaaaggaaacagcagaaaacacagcagagatattggaatcctcgccctgggctagtgagaatataaaatggttcagccactttggaaaatagcctggcagttcctcaaaaagttcaatacagagtggccagatagtccagaaattctactcctaggtatgtacctgtgagtaatgcaaacacatgtccacaaaaaaaactcatacacagaggttcatagctgctttgttcttaatagaaggaaacagggacaacccaaatgtccatcaact

SEQ ID NO: 436622 - DNA, 597 bp, Homo sapiens
ggatatgaaggcccaggtcccctgctgggactcactggggtgcacttcacctgccagagctcccaggaaccaggctgaggctgggactgtggtgccttgtttggctttctcctcagcctggccctcttgcccactgtcttatgggtcttcagtgacttcactgctctcaggggctgagacagaggggagcaagattagcactatgacttagaccaattatgctcaattacctggggttaacacttacaaagccggggttctgctagctggggaggagggaaaggatactcagcaggcaactcacagtgtctgcagccacagctcattaaaggaaacagcagaaaacacagcagagatattggaatcctcgccctgggctagtsagaatataaaatggttcagccactttggaaaatagcctggcagttcctcaaaaagttcaatacagagtggccagatagtccagaaattctactcctaggtatgtacctgtgagtaatgcaaacacatgtccacaaaaaaaactcatacacagaggttcatagctgctttgttcttaatagaaggaaacagggacaacccaaatgtccatcaact

SEQ ID NO: 436623 - DNA, 442 bp, Homo sapiens
gaccaaggttactttaaatatcttccttgggccagtgctatagtgaggtagagtcagtacctcccaatttaaagcaacttgaaaaacagaaaaaagcaactgtcctagggttcttccaaaaatcataagagaaaattaaaacaagtgacagactggaagaaaacatctgctacgtattctatagacaaaggcctaatatccagaggacacaaagagctcctacaactcagaaagagaaattcaactaaccaatgggcagagaatatgagatacatgaaaaagtattcaatttcaccagctcttagggaaatgcaaatgaaaacaataacgaaatrccatattttgctctccaaatggcaaaaactaaaatggctgatatgatcatgtacaagcaaggatgcagggaaatgagtactgtcacacactggaaggaatataaact

SEQ ID NO: 436624 - DNA, 606 bp, Homo sapiens
tatagtaatgaatggattcttacataaagattatttttatactttttgcagcaaaaggaaattgtaatatttgtacatgyccaagtgagtaaagatcatgcctatggctaaaaaacaagagagaagaaaattagataaattaatcaatccatagatactaataactccctctttaaattctacatttactttttgaacttcttttttctgtaggcaaacactgttgattgtgtttaatgttaacacaagtacactcatctacataagtctataataaataagaaactgacttacaggaaagagaatggtggtgaggtgggagtggagaagggagtcagtgagcaggagatctagcagcaggaaaatgtggaagataagccacattcaggaagggggaaatgacagtcaacagaaacaaggttttagaaaatagaagaggcctcctatcatcatgacgaaggctgaatgagctgtgaaagagaagttaaactggcttcgaagctgacaaaagagtgtagtagagagatagctacctagggaaaggactgggcaaagaggcaaatctgagactgttgagaagccaccaaagcagcccctctgaccaga

SEQ ID NO: 436625 - DNA, 555 bp, Homo sapiens
tgatttgcagtccatttgacgggcatgggtcagcattcctctgttctcctagccaggtcgtggaccttggttcactcactaaggcaagactactctgtcaggactcttggaaggtagccatccatcttttyttggtggcattccaaccaaatcattgcttccttctctatatatgataattattagtgttcaatcttgctagtgaaggtacactacagccctccaacttgcttcaaatcattttttttgtttgatctccaaactatgacagcaaaacattaaatttcatgaagatatcagtcatactggttatgggttgttactcagataacttcatgtcttggaatattctgcaatttcagtgatacctgaactgttacagagagaccttaataagtcatctttgctcttttcgtctctagatacctgagtcatctcagaaagatgcttttgtgtcttgcttttcaagagtcccgtgatctctatcatttaataaccttcttgtcaaaatgttctttcacgtgatcaaatacattttcaatacaattgcaaatt

SEQ ID NO: 436626 - DNA, 604 bp, Homo sapiens
tgcttgaacccgggaggcagaagttgcagtgacccgagattgcgctattgcactccagcctggatgacagagtgaaactctgtctcaaaacaaacaaacaaagaaacaaaacctataaaacagtgaaaataccatatttcatagaatctaagacaatgtcaactagaagaccaatcgccaatacagagatttttaaaatgtaaaaaaaaaaaaaaaaaaaaaaaaggccaaatgggacrgttaaatacatcccgacaacacagatgttaagagtgtaaaaactgtgtccttagaatctgtgacatatatggtaaaacccaccttacaggtgtgtctcctccctgtgaggattaaatgagataacataggtcaagttctcaggccagcctggagtaagtgctcaataaatgctgaaggctgctgttactgccggtgttgtccttgtaatttggagctggcaacaaatagtaacaaaaggatatacttgatccgggtcatcataatctagcaaaacagcctggatgttgtctttttccttactccaggataagttacaagaagcagacatgcaggaggtaggtccaaaagtaaacctccaatgacg

SEQ ID NO: 436627 - DNA, 569 bp, Homo sapiens
agagaaaattggtattaattataggtattgttaatttttactctatccagcacagaatttgtattctcatagtctctcatttatgacttttaatttatattatttcatgatgcaaagatatcagaataaagcctggctgtaaggtttctgtgctgtgttctattgattatgataccaagatcttataaccaaagaatatatacttacataacttttttctgattataaaataatatatcagaggttgtaaaactatggctggttatgagacaaatctggcctgctgcctgtttctgtaaataaagttgccctggaacaccgccactyctattcactgacgcattttctgtggctgctttcacgctacaagacagagtcgactagatgtgacagagactgcgtggcctacagggctgaaaatattttctacctcaccctttatagaagaagtttgctgattcctgttatataccgttattaagccagattttgaaaatacaaaaacaagaaaaaaattctcaagtactcctctacccagaaataagcacattggatacacgtatccaccc

SEQ ID NO: 436628 - DNA, 469 bp, Homo sapiens
ttttctactgtcatctatgcatcattaatgattcactcaaactactgagtttaagttgagtaacatttagatgaacttatatggactatggcatattcagtcacaattattcacttatttttcttagcttgtgttaatcttcccaaatctcacttaggtatgatcagatatgtttaatcatttatgaataaattgtgtagtttttaattttaaaatattttgtcrgttatacatgcacgtattcagtcaaacagttctacaaaatcatatatatttaatgagtcaaatcgttgtacatgacttacttagaaaaacatagcttctttccacacctcttgcctccattccatcctccaggcaactattttaactcttttagttctttatctctatataacctacttaaactgccacactctgaattttcagttttaggcataatctatggatttggcagtatggaaacaga

SEQ ID NO: 436629 - DNA, 469 bp, Homo sapiens
ttttctactgtcatctatgcatcattaatgattcactcaaactactgagtttaagttgagtaacatttagatgaacttatatggactatggcatattcagtcacaattattcacttatttttcttagcttgtgttaatcttcccaaatctcacttaggtatgatcagatatgtttaatcatttatgaataaattgtgtagtttttaattttaaaatattttgtcagttatacatgcacgtattcagtcaaacagttctacaaaatcatatatatttaatgagtcaaatcgttgtacatgacttactwagaaaaacatagcttctttccacacctcttgcctccattccatcctccaggcaactattttaactcttttagttctttatctctatataacctacttaaactgccacactctgaattttcagttttaggcataatctatggatttggcagtatggaaacaga

SEQ ID NO: 436630 - DNA, 418 bp, Homo sapiens
gtacccatggggacgtcattgaaaccagctggtggtgagttccactgggtgtcccacagcctagccttgcactrtaggaacaaaaacaacaacaaaaaaagcaggcactttacgggaagaatcttcttcctgcagcatcccttccagaccctctaacggcaaaggaagaatatttagtaactccagctccagtatcctcagcagggcaatgaacactggttttgtggctgagagacaataaactgacaactggtacaggtgtacacccataagagactcgtaatctttttatcctcttttaaattagtgtgaaagtatgaaataaaaattatttaaaaattttatggccaggcgtggtggctcacacctgtaatctcagcactttggaaggcggaggcgggaggatcacgacgtcaag

SEQ ID NO: 436631 - DNA, 418 bp, Homo sapiens
gtacccatggggacgtcattgaaaccagctggtggtgagttccactgggtgtcccacagcctagccttgcactgtaggaacaaaaacaacaacaaaaaaagcaggcactttacgggaagaatcttcttcctgcagcatcccttccagaccctctaayggcaaaggaagaatatttagtaactccagctccagtatcctcagcagggcaatgaacactggttttgtggctgagagacaataaactgacaactggtacaggtgtacacccataagagactcgtaatctttttatcctcttttaaattagtgtgaaagtatgaaataaaaattatttaaaaattttatggccaggcgtggtggctcacacctgtaatctcagcactttggaaggcggaggcgggaggatcacgacgtcaag

SEQ ID NO: 436632 - DNA, 467 bp, Homo sapiens
acagtattgaatttaggcaaatgagtacgatgccctctaagtgaaaggaagagtcacacgtctttcactttaaatcaaaggctagacatggttagtgaggaaggcatgttgaaaaccaagataggccaaaaactaaacctcttgcaaaaaaacagttggccaacttctgaatgcaaaggaaactttcttgaaggaaattcaragtacttctccagtgaacgtatgcatgataaaaaagcaaaacagccttattgctgatatggaaaaagttttagtggtctggttagaaggtcaaacccaccacaacattcccttaagctgaagcctaatccagagcaagaacttctatggaggctgagagaggtgaggaagccacagaaaaaagttgtaagccagcagaggtgggtacatgaggtttaaggaaagaagccacctccataacataattgtgcaatgtgaagcagcaa

SEQ ID NO: 436633 - DNA, 467 bp, Homo sapiens
acagtattgaatttaggcaaatgagtacgatgccctctaagtgaaaggaagagtcacacgtctttcactttaaatcaaaggctagacatggttagtgaggaaggcatgttgaaaaccaagataggccaaaaactaaacctcttgcaaaaaaacagttggccaacttctgaatgcaaaggaaactttcttgaaggaaattcagagtacttctccagtgaacgtatgcatgataaraaagcaaaacagccttattgctgatatggaaaaagttttagtggtctggttagaaggtcaaacccaccacaacattcccttaagctgaagcctaatccagagcaagaacttctatggaggctgagagaggtgaggaagccacagaaaaaagttgtaagccagcagaggtgggtacatgaggtttaaggaaagaagccacctccataacataattgtgcaatgtgaagcagcaa

SEQ ID NO: 436634 - DNA, 489 bp, Homo sapiens
cacagaaaaaagttgtaagccagcagaggtgggtacatgaggtttaaggaaagaagccacctccataacataattgtgcaatgtgaagcagcaaatactgatgaatctttctcatcccttttaatatgtacatttaaaattataaaaaatttcagcttgttaaggaataactgaaaaataaaattcacatatttaaagtatatatttagctatgttgtccaggttggtctcgaactcctgaccaggcctgggtgaaacagcaagattctgtcacagaaaataaataaataaataaataaataaataaataaataaataaataaataaagtgtatatttaaagtgtacaacatgaagattcaatayaggtatatattgtaaagtgattaccacaatgaagttaattaacatattcttccctcaactcacgtagtttccctttttaatttttgtttttttgatgagaactcaagataaactctcttagcta

SEQ ID NO: 436635 - DNA, 607 bp, Homo sapiens
cttggtttgtttatagtagtcatgaattttaattacatatatattttaaattccacaaaatattacatttttgttttgtacagtgaatgtccatttatgtttgggtttaacccaaaaaatttgagaataatgactcaaatactttagttttaaatttttgattattttatctaaattttatttatataccacttggctttccttttctcactcagaaaccaaggccacaagcaaagatcccaacatttaaaatgccagtgcaagatcccttctctgttaatgaaggccattttaaacaaaatgaaattatacaaacataaaaataaatgttttaataaaataattttaactttyaccttttagttttaagcagtgaacattaatatatgaaatttttcaccttaaaatactatccatttatttataacaagacatctaataacatgtaagcagaatatgcttcaactgaggttaagtaaatgataaacatacttataaataagcagtaaatgtttaaaaggaatctacaaaaacttttaactcaaaaccattgaaaatgcaaaatcccagttcttgaagataacaagttaatagatacattttcttt

SEQ ID NO: 436636 - DNA, 541 bp, Homo sapiens
ctcataggccacaccctaagccccatcctgagctggaacccttccttgaaaattaatgtctgagcattcagcaaggtgaatttcattgatgtttccctttgagragagaggagcatgtacttctgtcttcgttgagctcagctcctggatcatcatcatctctctctggagaggctgcagatgggaaaagaagatttttccacttccgagtcttctgaatcatttggcaggtcaaccaaactgctctctagtggtgtctgcattttcctctcatttcccttgcttctggctcctcctcctggacctccttagcaggttcattttcttctaacctgctcattccgtgatttcaacccagacctcttctctctccctcccccttgctatgctttcccagctttcttgtgtctgtctcagcttcctgaacctcttttctcctagggaacatcatgcagctacctgcttccctcatggtgcctccatgccaggctacgttcccaggcctagggactatgagaatgatgacacttaatgtcagaat

SEQ ID NO: 436637 - DNA, 596 bp, Homo sapiens
gcaggattccactcacttaattgtggaaagctagagctgaagggaygttagaaatgacacagtttgacctctgcattatattatgtgaggcaatgtgatcacatacatgcacacactagataggtagaacatgggcttcaaagtctgagcctcagcatttctaaaacttgtcttccatattaattcctttcgggtcaaaatgtttccaaactcatcatctatggaatgtatttctcatttcccacctagaagatgatatcttacattatacaatgcaaatgacttagtgaaacacaccatctcagtgaaatattgatattctgtacatttatcctgatatatccttggatagtcttaaaataactgaatacttaagtttgaagcctgaagtcttaagataactgaatgcttaagtttgaagcagaagaataactggcattctttttcaaaatgaaattactttgtttaaaagaattattagaagaatttctctctcttggttttagactgtctttccacaaatcacgtatagaggataattgtgtctttccacaaatcaagtacataggataatagaggattatattttgtcaaaa

SEQ ID NO: 436638 - DNA, 383 bp, Homo sapiens
catgcacacactagataggtagaacatgggcttcaaagtctgagcctcagcatttctaaaacttgtcttccatattaattcctttcgggtcaaaatgtttccaaactcatcatctatggaatgtatttctcatttcccacctagaagatgatatcttacattatacaatgcaaatgacttagtgaaacacaccatctyagtgaaatattgatattctgtacatttatcctgatatatccttggatagtcttaaaataactgaatacttaagtttgaagcctgaagtcttaagataactgaatgcttaagtttgaagcagaagaataactggcattctttttcaaaatgaaattactttgtttaaaagaattattagaagaatt

SEQ ID NO: 436639 - DNA, 633 bp, Homo sapiens
gtagtcatgtagctgttatgctgaattcgaatttcaagtactaggtgatggttaaacatgttttggtgggagcctagtcagagaacacagaagctataggtctgattggttggcctacctcatgctggcaaaattcagtgtaaataacaastcctatatatttttctcagaactggttcctaagagagcagaaaatcagctttatgaaaccacggctaaaagagataaatggcctcagtactcaaatttgtataccacgcttatctgcaactgcagatcacctgaacgatagtgaatcaactgattgggaagaattcatctaatgtaaactatgtggtcaacgatctaagggattatttgtgaagaagaaaatctgggttccaatttatactctgttctagctgatggtagaacctaaggaatggtccatttcccctagtaaattctcttgtatcactatagatgctttccgaaaatgctgatcacaatttaaaattttacctcttaagtgtctatttgattagtggctgaatccctccttcagactgaagtccatgagaacagaaactctgttattttttggtctgcattgtatacacggcattcaacacagtaccagccacaatgtgaatg

SEQ ID NO: 436640 - DNA, 633 bp, Homo sapiens
gtagtcatgtagctgttatgctgaattcgaatttcaagtactaggtgatggttaaacatgttttggtgggagcctagtcagagaacacagaagctataggtctgattggttggcctacctcatgctggcaaaattcagtgtaaataacaactcctatatatttttctcagaactggttcctaagagagcagaaaatcagctttatgaaaccacggctaaaagagataaatggcctcagtactcaaatttgtataccacgcttatctgcaactgcagatcacctgaacgatagtgaatcaactgattgggaagaattcatctaatgtaaactatgtggtcaacgatctaagggattatttgtgaagaagaaaatctgggttccaatttatactctgttctagctgatggtagaacctaaggaatggtccatttcccctagtaaattstcttgtatcactatagatgctttccgaaaatgctgatcacaatttaaaattttacctcttaagtgtctatttgattagtggctgaatccctccttcagactgaagtccatgagaacagaaactctgttattttttggtctgcattgtatacacggcattcaacacagtaccagccacaatgtgaatg

SEQ ID NO: 436641 - DNA, 481 bp, Homo sapiens
cttcaacaaaatcgacaaaaataagcaatagagaaaggactcgctttcaataaaaagtgctgggataactgggtagccatatgcagaaagaacctgacccctaccctcaccatatacaaatcttaaaatggattaaggatttaaatgtaagacctcaacctataaaaattctggaagacaacctaggaaatatccttcttgtcatgggctttggcaaaaaatrtatgactaagtccccaaaagcaagtgcaacaaaaacaaaaattgacaagtggcacctaattagactaaagagttctgcatagcaaaaaaaaaaaaaaaaaaattaccaacagaatgaacagacagcctacagaatgggaggaaatatttgcaaactatacatttgacaaagatctaatatccagaatctagaatctacaagaaacttaaacaaatcaacaagcaaaacaataatccaatttaaaaataggcaaaggac

SEQ ID NO: 436642 - DNA, 578 bp, Homo sapiens
tgaataaagaatgatttagatgacatggcagctttgrattttttcaatttctagtctcctatgggatttcagataaaataggcatgactttaactctgtggaggtttactagggaaaaaatatttgcatttattttgtggtggtataagaagagaatgtagaatttgcatgaaggagacctcagctcctgttccatttctgttggtaattgactctgtgaccatggactagtcactgaatttccatcaatctcatttctatacctcaacaatgagctagatgagaaaccatttccttttatttctgatattaattcatttttaaaaatccattcatttaaataaacacacctattttgttcgaaaatgtattgtaagtggtaggttatattgtgattgagaagatattgtttctactttagttagcttaaactcaagaagggctccccaaaaagacaaaaaaccaataatcttggaagtgtgaagagatacaagtgaatgaagttctagatgctgagcgaggggcaagcttgacaaagtatgagattcactgaagagtagtcaagtaggatgaagacg

SEQ ID NO: 436643 - DNA, 575 bp, Homo sapiens
ataaatgagctttctgaaacattaattttatagtttacagcacaggagcatcttagttcttgaactaggatttctggttttctctgcttgtcttttatattctttatgtttgaaaatgtatgtcagaattcacatatgagttatttcccttgaaataagtatacttatattaaaacaaatagatgttacctgtctaaaattagaaaaaatatttgctttataattgagcgattaaagtcatgtttgtgtctgccatttaaagttrtccatggtccagagctcacttgagatttaccatgcctaattcagtaatgttgactcaaatctttccagaatttctgataatcctgtcttcactcaacagttacaggccatttttgcctctgaaatataggatttgaagaacttttatctactacagtgtctcttttatagatctgttcatttttataaccaagttcttttatttcaaattattctttaatctttcttcctaatctttatgattaaactttcaacctcctgtagtagaatagattctagatgctgaggtatataactcaattgtgcaactc

SEQ ID NO: 436644 - DNA, 560 bp, Homo sapiens
gaaggaaactaaaaaatcatctttacaaaaatttaaaaaaatcttaagagtgtcctacactttcggtggaaaatacagttacattttatatagattaaaacattggcttttacttttattgtcatacttcttaggaatgtatagtggactttgttatctgtacccagctcccccttcaggcgtggaggattgtcactccagctgctggctgtgctgccgtctgatagctctcagctgtcagctctcttcaggattctctctgctcacaacagscaccttgtccaagaacccaccctattcccagagcagcccacatccaataactgatctgggcgtatcctggcccaatactctgtccatgctggaaggctcctcacttcagaatgtcccatgggataatctgaggacttcatggagactaatttccctctctgcccaatcttacttccttcccttccactgtgttgaaaccaagaacactttttaataaagtcctgcatattgatctccacctcagagttggctcccacctaccttagggcacctttagtatatagtgg

SEQ ID NO: 436645 - DNA, 560 bp, Homo sapiens
gaaggaaactaaaaaatcatctttacaaaaatttaaaaaaatcttaagagtgtcctacactttcggtggaaaatacagttacattttatatagattaaaacattggcttttacttttattgtcatacttcttaggaatgtatagtggactttgttatctgtacccagctcccccttcaggcgtggaggattgtcactccagctgctggctgtgctgccgtctgatagctctcagctgtcagctctcttcaggattctctctgctcacaacaggcaccttgtccaagaacccaccctattcccagagcagcccacatccaataactgatctgggsgtatcctggcccaatactctgtccatgctggaaggctcctcacttcagaatgtcccatgggataatctgaggacttcatggagactaatttccctctctgcccaatcttacttccttcccttccactgtgttgaaaccaagaacactttttaataaagtcctgcatattgatctccacctcagagttggctcccacctaccttagggcacctttagtatatagtgg

SEQ ID NO: 436646 - DNA, 565 bp, Homo sapiens
tcatgcattaagtcatggaagactttttacaaaatttcctgtgctgctaactccaattcaagattttcttgaaactaatwaatgtttaccatatatttaataattaaagacaaaagaaatgacaatgtggtttatattctgtcactgataccacactacatgtgaataatataaatttgaagctccaatagaaagaaaaagcatatttgtgattaggtagacatgcatgagaacttctgttgaaattaaacctttttatacttctaaacaatactaaagattttacaaatatttataaatcagtattcagaagattttaattgtaattgacagttttatataaattggctgcacaaactacatgaaaaacatgaagaatgctttgttgatattgattgattaggagttgatttttaatttacacaatagtctgaattcaatgttaataaccggttgacttaacagttagtgagtttacttaacttggggagctatagttttaaaggtatatgattttgcttcaaagtctaaacaattctttttaaaaaacaaaccagttttgtca

SEQ ID NO: 436647 - DNA, 565 bp, Homo sapiens
tcatgcattaagtcatggaagactttttacaaaatttcctgtgctgctaactccaattcaagattttcttgaaactaataaatgtttaccatatatttaataattaaagacaaaagaaatgacaatgtggtttatattctgtcactgataccacactacatgtgartaatataaatttgaagctccaatagaaagaaaaagcatatttgtgattaggtagacatgcatgagaacttctgttgaaattaaacctttttatacttctaaacaatactaaagattttacaaatatttataaatcagtattcagaagattttaattgtaattgacagttttatataaattggctgcacaaactacatgaaaaacatgaagaatgctttgttgatattgattgattaggagttgatttttaatttacacaatagtctgaattcaatgttaataaccggttgacttaacagttagtgagtttacttaacttggggagctatagttttaaaggtatatgattttgcttcaaagtctaaacaattctttttaaaaaacaaaccagttttgtca

SEQ ID NO: 436648 - DNA, 582 bp, Homo sapiens
tgttggtctatatcagagggaaaaaagatgatcaagttgataatctctggttagctcacactgttatttaaggaaagacctttcgtcttatcatattttatcctcactggagcaaatgtttgtgtcttttttatttgtacagatttatggggtacttgtgaaatgctcttgcatgtatataagacagagtgatcaagtcaaagtacagtamatttttgttaactatagtcaccctactctgcaatcaaacactgtatttaatccttctatttaactgtatgtttgcacttttaagccacttctcttcatcctcctccccatttttaccagtctctgttatctttccactctctacctccatgtaatcaaatttattagctcccacatataagtgagaacatgtgatatttgtctttttgtgcatagattatttcacttaagataatggcctccagttccatccatgttgctgcaaatagcatgatttcattcttttttatggtcatataatattctattgtgtatatataccacattttctttatccattcatccactgatggatgcttaggttgatttcat

SEQ ID NO: 436649 - DNA, 549 bp, Homo sapiens
aatgggggcaagatgaaaatgccagaatctagttatgagaagcaagaccagaagcatatctttttctggttttaattctggttctttaatattaggttggtgcaaaagtaattgtgggttttgctatagaaagtaaaggtaaaaaccgtaatgactgttgcaccaacctaaatagaatcacctaagaagctttataaaaacatgtactcctaagattcacactggacttagaaaatcagaatggttaagacagaaatgtgaatttttataagctcttctaggtaattctggaaattattcaagtttaaaaagcaataaacaaggactccttttctctgcccacaacaaccacagcccccaccaatcacaggtcacaaacagagcctgcagtaggaatcttgtggcagatactgggaagaaaagaagcctgtggatcaagcagttaacataaaaatctcacggcaagaagaaatgcyagcttgcaagttctgtgagtcttgcagcaaacaagatatttccagcacagaatgccagcaaagtttcttgttg

SEQ ID NO: 436650 - DNA, 557 bp, Homo sapiens
tattttaaagtacaatctccaaaatattatactcaagtactatggtgaaatgacaaataaacagaaatcaaagtttaaatcatagggggatgccaaaaaataccataacttcttgtattgcatgaggaagaaagtattttctgtaaaaaataattgatggattattttctcatttggtttattatttttacattaggtataattctggtcattttatgatttaatgccatgttaatcattaatcattactttataattttgctagaaatacttgaaaaataaaggagccatacttctggttcaagctcctgtacagaagtcacaatattgcaaatatgtatgtatacacacacacacacacactcacacacacgatatgatatgatataaagcaaatgcaacagacatatgttcttcactagcccgataatccaagaagtgagaggtccagtgtttgtgacttttgccttagatgacaggtttattcttcaaacagtttgacacatggctaagtctaatcacttttccctaaatgraggtaatacagtaatatcttc

SEQ ID NO: 436651 - DNA, 656 bp, Homo sapiens
attttgcatattatgtcctcccatctggaggccagtcattgaaagattgaacagtcttgaagtgggttgttcctgtttatcttacggtctaattaagctcttagaagagctacgaaaggtggcagacacattaattaaatgctttggatattaccaatatctttctatgatgtgacaagcaggattgcctcaaaatacccctgccagattataagtgactatacccaaactcagctttctatggttagtttccaaagggattgatgacttctctccccagcttcctatgagctgaaggtctccagcttcttgctttcttatacaactctatacacagctggaacctccaatctggactcctctgcttcagccctgtgctgttcaatatggtagccactagccacatatgactgtagagcacttgaactgaagctagtctaaactgagattgctgaaagtgtaaaatacacactgtatttcaaagactttgcatgaaaaatataaagtatctcaataattatttaaaattggctacatgctaaaatgattacatttgaatatattgggttaaataaactagagtatyaaaattaattttatctgcttttaaagtgtggctactagaaaatttaaagtcatgtttgtggcttgtgtta

SEQ ID NO: 436652 - DNA, 547 bp, Homo sapiens
atgtctaagaacatattaaaggtaagaaaactgtctttaaattgagcaacttattaaagtcttctgctgggcaaagcaagctcacagtgatatcttcagtaaagctttctttttctaaagaaagcctttgagcggactgcatgttttcaatgtaacataaagaaggaaatgcaaaatgtgttgtgaaataataccaaaagaagttcaaaagctagaatgtaacttcctaaaggtttttttaaaaaaagtcttctaagcatttaaaacatgaggtctagttcctgttttatagggtgaacgttccactctctacagagtctagcacagtctaaagtgaacactcaaagaataggtgattaatgatttagaagtgtgataataagacctcgggcatgtagactcctggggaaatcagtcttacatggcagttttcaagaaacctgaagatcgstatttttaagcattaaaacttgatttaaatcattttagttataaatgtttccaagcttcattattatctcactgcttttttggaaagaatattttg

SEQ ID NO: 436653 - DNA, 524 bp, Homo sapiens
gccagcagacataaaatttactaaattaagtccaagcatctccttctagattagtggcagagaatttcctttatattattttgtatcctataatctaattctaccattagattggtagactagaggtgaagccctgctcattagcaaggtgacaatatttcacactaaatagttgacttccaggcatctgtgaaagatgcaaaccaagacccaatgaataaagccatacttcaagcctattatgcttgaactcttaattcagactattcactgtgttttcattctccattcttcctaggataatgtgrgcatgaataaaaggaaaaaggcacttaaacatacttaaagacaaataacaatttactcatattcacatattatctcacgtgcatagctatctcaaacaataagtaacacaccatatcataatcaaacatgcaaagtacctgaaagagtgccacctgtcctgggataggccacttcaacatatacttcaaatgtggtctctggattctgcctacaaa

SEQ ID NO: 436654 - DNA, 572 bp, Homo sapiens
gagggtcataaagacaggattctcatgcttgtatgcctgataacaaaaagtatcataaaatactcaacagaaaccacaaccttgcacaaactccattgcaacgttatacaaaaaaatacttattcaaagatatctgcccagcaactgcctgtccaacctcagacktgcattacgcttattattgacctttgtagccaaggataattatttcaaaacaattatgtaatcctcattttttccttaaaaatctatgtcttcctttacctccctgaaaacacacttagtttactatggtgcatgtatccccactgcaatgctctattcccaaatatttttctttcagagagcctatctcatatttatgctgacatatatggtgtcagaagtgagacccaaaaaaaagatcactatcagatcagcgattatgggaaccagtgtgcagtactcatgtgagccttttgtgctctctgcttctgcagctcaccttttctgccctggtgagtcttttcccaggctgagcctcccactttttggtagaggcttttaaaatattatttgggatcttgtttaga

SEQ ID NO: 436655 - DNA, 575 bp, Homo sapiens
gtatgtatgggaggaattctgagtagtttttgtcactgtatcattatcaggatgtttggcctgtctagaataacagagtgagtttggtcatctttgctgttagggaccatatgttagaattcttaagcctgaaaagaaaaaaggccaaagattaatgggatttaaatttgtagaggatatacagaagaggtaagatagctggcttaccaacttctgagctagtaagacrccctttgagacgtaagtgaactaattttagtgaattaatccaaaatcctgtggattcatccataagaggttaagcataaatggattcgaaactagaagggcgctatcactagtaatagaagacaactcttgagggttgtgtatcccagcctccaaattacatatccagtgaagttttaaaaaaaaaaaaagaattggattcaagttttcttttcagacttttatttttaaacagtataatctttttttttttttttttttttttactgagatggagtctcactgtgtcaacccaggctgatgtgcagtggcgcaatctcggctcactgcaacctccactcacgggc

SEQ ID NO: 436656 - DNA, 305 bp, Homo sapiens
ttgaaataatgactagctttgtctaatatctcagtttttacaagcaatctaggtaaactgtcaaaaactaaacaaattaggtaaatgtaaatgggataaatgcttataaatgaacttttcatgtaatttgaaattttaaattacattaacttaaataatagatactcattaaatgtgtgggtcatttccaaattaggtaaaaatggaaacaaattactaaacataagtttgttyttggcttcttgaatgttataaatgggctaagtgtgtttggatctattaattcatttaaatattatataatc

SEQ ID NO: 436657 - DNA, 592 bp, Homo sapiens
tgccctgcttgaaaaggcttcttaactggtcttgttaaacctcccccttgatcattagacattatctcttaatctgctccacactaggaagaatccagagccaggcctgtcgctgtggggggagtggggcaccctgaaaatcagctcaggttctcaacttgccccagtcctcaatttcccttgcgaccgagggccagcagggagctctaaacttcttttcaactttgttgccccctccctgttgagtcggcgtttatgaggggggatgggtcagtggcagagcggtggaagatggcttctcagccctctcctattgtcaggcctgttggggtcccacattcattctttttttcttacacgagagctcgcccarcctcagggttgggaacagaaaccaatttagccttctaagtggatggaaggcaggagcccacctcactgcaaaggttgtgaagttattattacagatgggatgtgcaggacaatttaaaatattctaattataaacttgtagggaagccttgttcttcattaatgtaggatatgaaatcgcctctgaggtacaaggacaattacatagttgagaatgtgt

SEQ ID NO: 436658 - DNA, 533 bp, Homo sapiens
cacatgcaacactacctggctgagaccctacatatgcagaaaaccttcacccttaagcccttccacttactattttctcacatctcagagtcagcgcagaaatctagtaaataaatacacaaatgccaagactcttggagaaacatgagcacaagcccctaygtctgcctcacatccagctgttcccgccacctgtgatgttcctaatatcagtcccaggaaaggtatcgagaacatttcaagctgaacatcatggctatcattgacctctgagtttttaccataatcctaaaacctgactgaaaggatgtatatcaaagtctgcatccggaatgcagacataagttggaaaacctctgatttttggtgtctcaactcattgctcccaatggcttaacacaagaaagcaggcctttcttccctgaatcaagtcggctctagcccacagtcccaccttgcatttctgaaggatgaaggccgctaggcagacaagcctcagtttgctgggaaccacagtcacatgctgcttgaga

SEQ ID NO: 436659 - DNA, 593 bp, Homo sapiens
ttaaacaatcagatctcataagaattcactccctrtcatgagaagagcaagggggaaatctgcctccatgatccaattacctcccatccccaatattgggcattacaattcaacatgaatttgggtgggaacacagatccaaactatatcagctactctcccaaatagcctttgaaattatactctagcacagcttccattagcaatcacttacttgcctcttttctcactaaaatgcgggctccaaaaataaaggtaacatctcaatattttattatttattcactcatttcacaaataattctactaattgtcacacattattctaggtctaaggaggaagtaataaaaagtctatactcttgagtttttattttacttggagaagacaaaaataaatacttaaaaaatctcaaaaacaacagcagtgaataaaaattaaaggagaataaaaggatagtgaaagatggaagtatggagggagtatatagataaggaaggcatttttgaagaggtgactttgagcagagattgaatgaagtacgagagaaagccatggaaagatctagaaaagggcaacatttctgcaaagg

SEQ ID NO: 436660 - DNA, 593 bp, Homo sapiens
ttaaacaatcagatctcataagaattcactccctatcatgagaagagcaagggggaaatctgcctccatgatccaattacctcccatccccaatattgggcattacaattcaacatgaatttgggtgggaacacagatccaaactatatcagctactctcccaaatagcctttgaaattatactctagcacagcttccattagcaatcacttacttgcctcttttctcactaaaatgcgggctccaaaaataaaggtaacatctcaatattttattatttattcactcatttcacaaataattctactaattgtcacacattattctaggtctaaggaggaagtaataaaaagtctatactcttgagtttttattttacttggagaagacaaaaataaatacttaaaaaatctcaaaaacaacagcagtgaataaaaattaaaggagaataaaaggatagtgaaagatggaagtatggagggagtatatagataaggaaggcatttytgaagaggtgactttgagcagagattgaatgaagtacgagagaaagccatggaaagatctagaaaagggcaacatttctgcaaagg

SEQ ID NO: 436661 - DNA, 534 bp, Homo sapiens
ttttgaacctgggaggcagaggttgcagtgagccgagattgcaccactgcagtcctgtctgggtgacagggtgagactttgtcccaaaataaataaataaacagaaattatatattcatttggcaactggaactttcgaacttttggtggtatgttctacagaattaaaatagccaaattgtttaaaatgagaaaacatacygtttgtaaattggtggaaatgatgcaactcacttataaaacagagactaaaatggaagcagattgaactaacatgaagaaagacttgtctttaaattctacatcatgcacaaactataaagtttgagactctaaagacttggtggatccacattttctcatttgtctgagtgtatgcttatagtacccaaatacatcttcttatataaataaaaaatgaaaagagtttcattcattttgtcaacaagcatttattgagtccttagcagtattaagcaatgtgctacagaatggggtgaataagacatttcatcaaataactcatagtataga

SEQ ID NO: 436662 - DNA, 534 bp, Homo sapiens
ttttgaacctgggaggcagaggttgcagtgagccgagattgcaccactgcagtcctgtctgggtgacagggtgagactttgtcccaaaataaataaataaacagaaattatatattcatttggcaactggaactttcgaacttttggtggtatgttctacagaattaaaatagccaaattgtttaaaatgagaaaacataccgtttgtaaattggtggaaatgatgcaactcacttataaaacagagactaaaatggaagcagattgaactaacatgaagaaagacttgtctttaaattctacatcatgcacaaactawaaagtttgagactctaaagacttggtggatccacattttctcatttgtctgagtgtatgcttatagtacccaaatacatcttcttatataaataaaaaatgaaaagagtttcattcattttgtcaacaagcatttattgagtccttagcagtattaagcaatgtgctacagaatggggtgaataagacatttcatcaaataactcatagtataga

SEQ ID NO: 436663 - DNA, 541 bp, Homo sapiens
cacaaccatgctgaggggattctcttttaactcatgacttaaaccttaagagaatcattattgttgtccagcaatgctataaggttattttattctctttcccacattcttaaacaactatttcatagcttcytttccttccacaaaacttccatcaccatcttctccctctttaatcagctaatgtttttgcattctgtttccctgaaaaaacaaaagcagttagaatagaacttcaacatattcccaccattatatcgacaatattccagcatctgcacccagtttctctgccatctcctgttgccctcagtactatggataagctgtctcagttcttatctacagacaatcccatcctttctgcactgatgccatcccctctctcctcctcaatttcacccgtccaacaactgtctcccttctctatatcatcagtttttctttctactgactcattctcctcagcttgaaacatgctataattcctccaatatgtattttcaaaacaccttgttcccacttctcttctcccttaaac

SEQ ID NO: 436664 - DNA, 541 bp, Homo sapiens
cacaaccatgctgaggggattctcttttaactcatgacttaaaccttaagagaatcattattgttgtccagcaatgctataaggttattttattctctttcccacattcttaaacaactatttcatagcttcttttccttccacaaaacttccatcaccatcttctccctctttaatcagctaatgtttttgcattctgtttccctgaaaaaacaaaagcagttagaatagaacttcaacatattcccaccattatatcgacaatattccagcatctgcacccagtttctctgccatctcctgttgccctcagtactatggataagctgtctcagttcttatctacagacaatcccatcctttctgcactgatgccatcccctctctcctcctcaatttcacccgtccaacaactgtctcccttctctatatcatcagtttttctttctactgactcattctcmtcagcttgaaacatgctataattcctccaatatgtattttcaaaacaccttgttcccacttctcttctcccttaaac

SEQ ID NO: 436665 - DNA, 584 bp, Homo sapiens
agattatattatacagtatttatggaagtaagtgctgctttaggcggttggaaaaacacttgctgtataaccctcccctattttcacaagcacaaaagttcccagatgaattttcagggggtgatgtcagctaacaagtggcatttactgcctttgttttgtttttattttttacttcccaatagtataatttaaaattatttcaacaggttagttataaaagtgatttttatttcatttatgtttttaaaaatatgagcaaataataaatggacaaagttaagcttcaaactgcatgaagacccaattccttgcaaaactgcaattatacgtaagaaataaaaawctgcaataaattttatatagtctccttcattgtaatgcttttccattgcataatttttttgtgtgagctccaggaagtaagaaacactccctatagagcaagtatttttctatttccttgggaatttttttccttagtttaaactatctttcaatgctattcatttaatatgaacctcccttcctccccaagcttgtttaaatgctgttcatttaatatgaacctcctttcctcccca

SEQ ID NO: 436666 - DNA, 606 bp, Homo sapiens
acctctttgcttggaaaggaaagtgactcactggcaattagaaggagttccctacaggacttcattttcaaaccctgtgagcactccagtaggaagatgtgtggctcacttgaattacagggaaaagtacagacatccaggagcagccacctggtctccaggtataggatgtggtattggttagaggaggaattattaccgtcgcaaataccctctttacaatgcacaaagggcttggttcccacaaagcactttatcatagtgtttatatgcaactctgtggtgtcagttggatttgtgatttccattttagagctggaaaaggagagagagaaaggcagggagagagacagagagagagtgcacccaggaggcamcagggcaagttggtgtccagctgggactcctggccacctgccaacatggtcacttccactagctgtcatttgtctggtggtaaagtaggtggtgtctgcctgacaatccctcaaacccccagaaggggatgtttgggtcttcctactaactttgaacctttttaactttaagtgaaataaggggaattggaggaactccccactctaaggggaataaaaggaactcaca

SEQ ID NO: 436667 - DNA, 538 bp, Homo sapiens
aagtggctccactcaagaaactccaggttgaaactattagtaatggaaaatcatgtaaggtagaaggcatagatgagaattgtgccatcagaagaggaagaattacataagagtgaggccaactcataatgaaggatacaacaaaagcactgagtcctgatataaactcatgtgagccctgtattcagtcatgcctggattttcaattgcatgtgtcaatactttctcttcttagaaacaaaatttaaactagtattcagtttagattttggttgttggyatctgaatgagtcttaactaatataattttttcagcaaacttttacttggaaatttacctccaaattaaaagtggctgaagctgtttgatccattgagctggctctccccactgccttgcttccctgtgaaatcctgatcccaggaatcatccatttagggagcaagtccttactgctcctccactatgtgcaagtggctgggagagactatgtgttccccattttcaaaatgctatggtctaatttggagtttgtgg

SEQ ID NO: 436668 - DNA, 589 bp, Homo sapiens
ttacatgacttatgaaatgaaatttgaatttgaagagttactaaattttgcagtagtgatttgggggacttagtatttgtgagtctttaagtgttctttaataattttgtaggtttattatgactatatgccccactattgagactctctaagaaacaggctagtgtctgataaaaaaataagcctaaaatatctcttgttgcctttattttctcaaaaatatttcctcagcaacctatgtctgggaggtcttgctacattagcttattagctcatattctcttagtggaggggggaatggttagagtagtgtagaaactagaaggrgcagcagtgaaattgataaatctatatgggatcaatgtctgagacaggagacaagggcctatcagacatacctgatgctgctagaaatgtaggttctactaggcaagagtacagtccctctggccgattcattttttgttatttgtctcaagccctggcatctagaaagatttcccagaagtttctttttcattctttcccatttccttgtgcaccttccaatctgttctattcttttccatgccactttatttttactgga

SEQ ID NO: 436669 - DNA, 572 bp, Homo sapiens
aaaaataggttggtgcaaacataattgtggtcttcgccattaaaagtaatggcgaagactgcaattacttatccaccagctaataatttatacaaatgaaccaaatgaagactgttgatcaaaaatcgaagaatctttgccttagggaagagcatgtcattggcaacatctccagtgaaagtcttttggggcagcaatgatactctgaatgtgaccttggttgggtagcccgagagacataagcaagagaaagaccaggaagaaactagagccaattcagtgctgatgaatgaaaaccccaccactatctttcactggatccccagatttgtggtaaccccagtagtcagagtcctcatgagcaagaagcattcagctgyagcccctgttaatagggtggcctcaggaagaaagctgaaaataaactttcagtttgtctcttgtcaatgtcttcttgataacagattaaatagcttgaaaaggtaaaaattagactctcaaagtctcttgaaagcaaaaagcaattaataatttgaagggtcatttgctatctttttgtactttttgcccca

SEQ ID NO: 436670 - DNA, 612 bp, Homo sapiens
ttgctttaagtcagacacttcagccctaacattttaccctccaaatgaataactctttacacttttagattgtcattctacatttctaaatatgaggaagaaaactagaatctgtctcaaatttgaattaaaaraaacacaataggatgcttgctgctttttgtttgttcaagttttagagttcaatatttctcatctggctatttttggtctggaattagctccggttctaacctagcaggaaggtgaactgaggaagtagggtgataattaccttccgggaaacaccagagtagctgaaaggcatgggatcttcagccagactgttgaattcaaatcctaatcttgcacttccccagtgagggacagtggccaagtacttaccctctctttttctttctttatctgtaaatagggatggccgttcactgggttatcatgaggatttaacgagtcaatttgtggggagaacttagatgaaagctcagcacaaagtaagtactgaacaaatttcattaactcttgctttccaggggccccttttcccaactctacccccaactcagaggacctatgtcctgaggttcacattaaagccatgtaggagctcct

SEQ ID NO: 436671 - DNA, 546 bp, Homo sapiens
gccacatgctaagcagagtctgttgtagactctgcagaccctgcttcagtccagtaagrtgtgattccttgatgcctccctccttcctgcgtcatgtccagacattagcagatttcaactcttgtaactcaagtcacccttgtctagtgaagtgtgggatgttgtaaagcagattagattagacgtatattgtttttttcccctctaatcattagtaaagaactttttctttttctttcttccaaaaaaaaaaaatgttttgaattccagggcaaaagcttgacatagttccctagtatcattggaccaaagatggatttctctcaggggacctgaggaagccatcaatgtaatttatttctgtctcaatgctcagtaatggatgtgaccttgtgtgtctcagggctctcttaacacttgtggccctggatatgaagagttaaacattccactcctctgtagagagatgtagataccttgacattcagaggcacagttcccaacctaatcctttctaaatcagattagtccatcccatcgctgaca

SEQ ID NO: 436672 - DNA, 372 bp, Homo sapiens
gaacatccctgttcttgtcattatatttaaacaaagcatttggctgtcaggccattttctttacattttgtttagaagtgaaaaaamcccaaaatacttagcaatgcctggcatgtaatgagctctcacaaaacatcagcatcaacactcttgatggcctgagctttaattggtaaggctcaccctgagaaaagggaagatggataaatgggcaggctttattttttttaatattttataactatcattcacacaactattacaccattgccatgtttttagccttttttcttgaaataatttaaaattttcagaagagttgcaagtaagagtacaaaacatattccaatacagccttgaccaattggcaac

SEQ ID NO: 436673 - DNA, 512 bp, Homo sapiens
tgccagcaattatgttttgcaaaaaataaataatgcattctgtttccaaaaggccctgacaaactttgatagaaaaaaatcaaatcttttcccttggttttagggtggcgagtttcctgacagaagtaaagtgagtctgtgttctctaagtaatttattagtgcatcttggcacagcagcactaatgggcttgcagccaggtattctgagctgcagtttgtcatgtctgactctttarttctttcaagcaattgaagaaatggccttctgcaggctgtcagtgacagattctagctcactcacatagataaagctcaattagctcctggaaaaaaacatcttttaaaaatgcaatgagctgcaccatgaaagacaggtagacagccacacctgaaacaaaataaaatgttactgttgaggaaagaacgtgtccacaatgagcagcgtggtagttgtcttattggacagctcactccactgcagcaaagaagtgataatttctaattacctca

SEQ ID NO: 436674 - DNA, 610 bp, Homo sapiens
cccaaaagttttgaaacataatatttttattaccatttggtattaacattatttgattgaagcaataatttcttctgtgactcatgagttaataagaaatayatttgttaactttcaaaactttagatttttctagttatatatttttgctattaatttctaacttaaatggtgaccagagaaaaacggaaaagaagcagagcaagatggctgaatagaagtctccactgattgtcccctctcccacccttgcaaaggcaccaagttaataactatctacacagaaaaaaaccactttcttaagaaccaaaaatcaggtgaacactcatagtacttggttttattattattattattattattatttatttttattttttagtatttattgatcattcttgggtgtttctcagagagggggatgtggcagggtcataggataatagtggagagaaggtcagaagataaacacgtgagcaaaggtctctggttttcctagacagaggtccgtgcggccttcggcagtgtttgtgtccctgggtacttgagattagggagtggtgatgactcttaatgagcatgctgccttcaagcatctgtttaacaaagc

SEQ ID NO: 436675 - DNA, 558 bp, Homo sapiens
ttgcttttgttgcctatgcttttggggtcatatccaaataatcattgcccagatcaatgtcatgaarcatttccctatatttttagtagtttaatagtttcaggtcttatgtttcagtttttaatacattttgagttaatttttgcatgtggtgtgagataagggtctagtttcagtctcctctatgtggatatccagtttctccaacaccatttattgaagactgtccttttctcattatgtgttcttattatctttttcaaaactcagttgtctgtaaatgtatgggtttattttctggtctgtctgtactgttccattggtctaagtgtctgcttttatgccagtaccatgctgtcttgattattatagctctgcagtatattttgatttcaggtagtattataccccagctttattctttttccttaagattgcattggctatccagggtcttttgtggttctatacaaattttaggattgtttttcctatatctgtgaagaatgtcattagaattttgatagggaaggctgtgtcattttagattgaatcagt

SEQ ID NO: 436676 - DNA, 558 bp, Homo sapiens
ttgcttttgttgcctatgcttttggggtcatatccaaataatcattgcccagatcaatgtcatgaaacatttccctatatttttagtagtttaatagtttcaggtcttatgtttcagtttttaatacattttgagttaatttttgcatgtggtgtgagataagggtctagtttcagtctcctctatgtggatatccagtttctccaacaccatttattgaagactgtccttttctcattatgtgttcttattatctttttcaaaactcagttgtctgtaaatgtatgggtttattttctggtctgtctgtactgttccattggtctaagtgtctgcttttatgccagtaccatgctgtcttgattattatagctctgcagtatattttgatttcaggtagtattataccccagctttattctttttccttaagattgcattggctatccagggtcttttgtggttctatacaaattttaggattgtttttcctatatctgtgaagaatgtcattagaattttgatagggawggctgtgtcattttagattgaatcagt

SEQ ID NO: 436677 - DNA, 610 bp, Homo sapiens
cccaaaagttttgaaacataatatttttattaccatttggtattaacattatttgattgaagcaataatttcttctgtgactcatgagttaataagaaatacatttgttaactttcaaaactttagatttttctagttatatatttttgctattaatttctaacttaaatggtgaccagagaaaaacggaaaagaagcagagcaagatggctgaatagaagtctccactgattgtcccctctcccacccytgcaaaggcaccaagttaataactatctacacagaaaaaaaccactttcttaagaaccaaaaatcaggtgaacactcatagtacttggttttattattattattattattattatttatttttattttttagtatttattgatcattcttgggtgtttctcagagagggggatgtggcagggtcataggataatagtggagagaaggtcagaagataaacacgtgagcaaaggtctctggttttcctagacagaggtccgtgcggccttcggcagtgtttgtgtccctgggtacttgagattagggagtggtgatgactcttaatgagcatgctgccttcaagcatctgtttaacaaagc

SEQ ID NO: 436678 - DNA, 353 bp, Homo sapiens
tgaatgtcgccatagctaccttaatgtcaacatttattgctcccttggtaaaacttgcttcctcttctccattccttgtttgatggtggcagaaatygctacttgtttcgactgtatctttctaacgttataacagaatctttattaactgggaaaatggcgacccccaaaatatgtactttttaagcccctgttgcttattttttctagtaagaaataagtgaaagtatcatgtgccaacgtttgggagccctgtttaaatgacagccactgaaagcactcttccttcttcacctatttcttccttcctgatggctgggataaagagatggtggttggagctggaacttgtg

SEQ ID NO: 436679 - DNA, 353 bp, Homo sapiens
tgaatgtcgccatagctaccttaatgtcaacatttattgctcccttggtaaaacttgcttcctcttctccattccttgtttgatggtggcagaaatcgctacttgtttckactgtatctttctaacgttataacagaatctttattaactgggaaaatggcgacccccaaaatatgtactttttaagcccctgttgcttattttttctagtaagaaataagtgaaagtatcatgtgccaacgtttgggagccctgtttaaatgacagccactgaaagcactcttccttcttcacctatttcttccttcctgatggctgggataaagagatggtggttggagctggaacttgtg

SEQ ID NO: 436680 - DNA, 353 bp, Homo sapiens
tgaatgtcgccatagctaccttaatgtcaacatttattgctcccttggtaaaacttgcttcctcttctccattccttgtttgatggtggcagaaatcgctacttgtttcgactgtatctttctaacgttataacagaatctttattaactgggaaaatggcgacccccaaaatatgtactttttaagccccygttgcttattttttctagtaagaaataagtgaaagtatcatgtgccaacgtttgggagccctgtttaaatgacagccactgaaagcactcttccttcttcacctatttcttccttcctgatggctgggataaagagatggtggttggagctggaacttgtg

SEQ ID NO: 436681 - DNA, 353 bp, Homo sapiens
tgaatgtcgccatagctaccttaatgtcaacatttattgctcccttggtaaaacttgcttcctcttctccattccttgtttgatggtggcagaaatcgctacttgtttcgactgtatctttctaacgttataacagaatctttattaactgggaaaatggcgacccccaaaatatgtactttttaagcccctsttgcttattttttctagtaagaaataagtgaaagtatcatgtgccaacgtttgggagccctgtttaaatgacagccactgaaagcactcttccttcttcacctatttcttccttcctgatggctgggataaagagatggtggttggagctggaacttgtg

SEQ ID NO: 436682 - DNA, 550 bp, Homo sapiens
actgcttctatctgtctctcattggcatatatcatcaaaaagcacaaacgaatattgaaaggttagaaaaacacagacaaatcaaccaaagactaattttttatgctttgctgtcaaacacaaaatggctcccccatcttaccaaacacacccagtgtattctattgaaattcagacacttcttaaacacaaaaatgactttagtaagtatgttcatgtcagtccatatcatccttcttaattctttggttcctccttaatacttcgtcttccttaattcttccctttaaccayaccattttcttggcttagtgtcttactcccttccaagccatatatatccttagccatccagataaactgcaaccatcttcagttatactacccattctttctccaatttttgtttaaaccatgtgtatgttcaacataatttaatatgtacttttatgctttatcattgttctcatgttgtgttaagtgagaaaattcttgagtttatatatcacctaggagtgagcatatagtaggtgctcaaaacctacttcag

SEQ ID NO: 436683 - DNA, 550 bp, Homo sapiens
actgcttctatctgtctctcattggcatatatcatcaaaaagcacaaacgaatattgaaaggttagaaaaacacagacaaatcaaccaaagactaattttttatgctttgctgtcaaacacaaaatggctcccccatcttaccaaacacacccagtgtattctattgaaattcagacacttcttaaacacaaaaatgactttagtaagtatgttcatgtcagtccatatcatccttcttaattctttggttcctccttaatacttcgtcttccttaattcttccctttaaccataccattttcttggcttagtgtcttactcccttccaagccatatatatccttagccatccagataaactgcaaccatcttcagttatactacccattctttctccaatttttgtttaaaccatgtgtatgttcaacataatttaatatgtamttttatgctttatcattgttctcatgttgtgttaagtgagaaaattcttgagtttatatatcacctaggagtgagcatatagtaggtgctcaaaacctacttcag

SEQ ID NO: 436684 - DNA, 601 bp, Homo sapiens
tctgtaaatactgtgaattttaagtccaaatatatagttgtttatattccctctttctctagtctatctactttagttcttctttcttgattccattttagttaagtccaccataatgtcttccttccagtctcctaactagtctgccttctgccattgtcgatctcatcaattcattctcaagccagaagaaaaatgttctcwcgacatgaatcatattgtgagtccttgacctacattacaattcaaacttcttgtaaagtttttcaagttctgcctctatctcttcagcttaagttgtcagactcattgcctcactattttctctagtaaagatcttagtttaaattcttcgaaaatgccaagctacttcctgcctcaggtcttttctgtctggagacagacatactctgtcactattccaatggtgccactatttgcactatgcagaattagttcctgctgccgttactattaccacttgccttcgttattctcagtttgtttgtttccattatagaattttcacaacttgtgattatttttatttataaatccgttctctccactacagtgtaacctcatgagaacagtgacagtg

SEQ ID NO: 436685 - DNA, 537 bp, Homo sapiens
ctgcttaactgcatttagggtcacaaatattttttctactaacgctataatctagcagttcactgacatttacagcctgaacttcctaatttcctcttggttttcaggggagttaatgcttgaacatgctgcttgatttaaaattttagcaataacgtgatacgtactgatctttctccccttcttggatttttctatacttggtttacacgcagccctgtggaagctcagtgaataaatggactaaattctctcctcctcaccatccgtcttaaaaatatcctggtgctaactggggtacttaggatgkaacattaactctttcaggcctccaggggcttctctgaggactcaagaggttaaacataatgagaaaaaaaaatggttatgcaactttttgcctactttgaaaggcaaagtttgctcatatgtacctctttttaaaagaactatattttttaataccactgcaaaccataaccctatcctgtgtttctaactagtacacaattcacaattttttggattttgaactct

SEQ ID NO: 436686 - DNA, 601 bp, Homo sapiens
gttagcaaattctaagactgagtataagctaagataaactctcatttgtggcaaaatcagtatktgagttgaaatattgtatgacattagaagaaggaaggggtaattgtctgcttctaggccagcctcttgtgttaccaagattgatgtgaggggataaagtgggactggaaagcaggcagcagggaaagtggctgacagaaacagtgccttggagatgggggtctttccacatgtcatctgctatgttaaacggttcccatttattgaacacttactttgtgccacaaatgctgctaggtagtttagatacctcaacttcattattcctccatgatcctgtaaaatagatagtatggttgtcattttactggtaaaaaaaactgagctccgagaggtgaagtcatttgctgaaggttcatattactgctgaatgtcagagtcaggatttaaactcagacaaatctgatttcaaaagtattccctttctattgaatgatgttgtctagatgaaaattaatcaagattcaaaaagacttttccttttgtccttataaaatatcttgtaatcaaaaggcaaggctggattttttgccacctt

SEQ ID NO: 436687 - DNA, 553 bp, Homo sapiens
aaggaggtgacaaaaaagtcatcatttgcagatggtatgatgtatatatatatacctagaaatgccaaacaaatcaactgaaaagctatttaaactaacatgagtttaggaagatagataagtacagaaaaaagtagaaaaccaatagtttgtctacatatcaatagaaatgaatcagaatatataatcaaaaaatatcccattagtaatggaatgacaaacatcaatttctagtaatatasctaacaaattgctgtgctaagtgcaatggcacataagcaaagtgagcaaatctgatcccccaagttctcattatcccattgagagtcatgcttgggctgtgttgtgctccaagagaaggccctggccccacattactttacttacttgtataacggaggagggacacaggagaacaccaactgaatgtgcaatgatgtgagctatgtgttcttggaaagagtcttcttaaaaaagggcagcaagctaaagcattccccgcttatccaggatcttaaaaatcagcactatctgtttaaccagataaaatggc

SEQ ID NO: 436688 - DNA, 390 bp, Homo sapiens
tccctaatatcagcagtgagttgacttagatcaaggaatccattgggtgcatgagaatatagaccagtacctgggaaacaggcttattgacgtctggccttattgactgtcattctccatgcttgagtaagcattagctcatgcctttgatagtcaggctgcatcgagcactcaaagagagccggatacacattaggatataactgctttcactggcatcattttgctttcacttcacaattttttttgccctctttcttgatagcatttggaagtcatgacccagagcttgaaatttgctattcactcaataaaggcaarctttcaaaatgaaattaatgctgtcatttgatagctgatatcttgaataaagggtttcaaggaggaagc

SEQ ID NO: 436689 - DNA, 599 bp, Homo sapiens
ttcctatcaaactaccaatgacattcttcacagagctagaaaaaatatttcaaaattcatatggaaccaaaaaaagagcctgattagtgaaggcagtcctaagaaaaaataacaaagctggaggaaacacattacctgacttcacactatactatacagctacagtaaacaaacagcattctgctggtacaaaaagaaacacacagaccaatgaaacaaaatagaaagcctagaaataaggctgcacacctacaatcatcttgattttcgacaaagccaacaaaaaaaggcaataaggcaaggactccgtattcaataaatggtgctaggataactggctagccacatgtagaagattgaaattggaccctttcctttcaccaaatacaaaaatcaactcatgatggaccaaagacttaaatgtagagcctaaaactataacaatcctggaaaagaacataggaaataccattctggatataggacctttaaagatttaatgatttaatgatgaagacaccaaaagcaattgcaacaaaaacaaaagtcgacaaacggtatctaattaaacwaaagagcttctgcacggcaaaagaaac

SEQ ID NO: 436690 - DNA, 624 bp, Homo sapiens
ggaaacagttaatttaatgccattagctaaaatcctgcattgaaaaatgaatgaacaaacatagaatagttggaatctgttatcatgatttttttcctagttcaatttttttaaatttttggttctttaccagtcaaaagtaaatatggtattcaaggactcccatgtattgtggggtggaagtattaggttggtacaaaagtaattgtggtttttgctattactttcaatggcaaagcctgcaataacttttgcaccagcctaaactttcccccacacctcgcctccttgaattagtgaataaacatctggcactgtgggcaggagctaaaggaaggttgagtcatttggaggaggcaggtgttgggtggtggatggtcgaaggctgatggaatcatagaatggtttatttacagcctccatccaatkgaaagatctctaggttgctgggaaacaaaatcatggagatggccaactccctgagatcaagcagtctttgctcagaattcttttttcaaatggagcaaaggagaaaaacatctagttctttctttctgctttttcttagctgaggggtatgctagttcttaagaatttcaagagaatttgttgattcttctaaaa

SEQ ID NO: 436691 - DNA, 547 bp, Homo sapiens
  misc_feature (1)...(547): n = A,T,C or G
taagtaaaaaaaaaaaaaaagaaaagaaatcagaatagagaagagaaagacagaaatgtagaaacttgaaagaagagacactgaggataacatgagaaagttagtatatgcctatttcaagttccaaagggaaagaaaagcaaatgcactaaaaaaaaaaaaaaaaaatacaagaagaaagaaaagatgattttcaagaacagatgaaatcattaacccacagactcaggaagcccaacaaatcctaagcagaataaataaaaagaaattcatacctaaagtcatcctgatttaactaagacaccaaagacaatgaaattatcttacaatcaggcaaacaatagaggctgatcactaatcaaggagcaagagctggaacccaacatcaatagcaacaccaaccaacagtaaaattctgaaaggagtactttaggcagaagtgaartgatacgaacaaagacaataataaatacatgggagaatctaaacagacatggactacatacaannnnnnnnnnnnnnnnnnnnnnnnnnnnnnnnnnnnnnn

SEQ ID NO: 436692 - DNA, 603 bp, Homo sapiens
tatcagcttggtattttccaagttaaagtttctcattaccttgtccttctttgccccatttccacccaagtcagaaactccaattgcaagcattctttacaaattacggtttttatcttacgtgtcttttctattgaaatctattggttccgcctatgagttctgctaaagataccacacactgtaataggagaggaagcagaagctgctttattctaagaagtggttagaagtatttgtggtaaycaagttgtattagtgatctgttgttgggaaactatccccaatctaagtagtttaaaaaataatgagtatttattatctctcacggttactgtggctcaggaagtcatataggacacagtggagatatctttgttccatggtgtctggcctcagatgaaatgtttgaaagctaagggctggtgtcatctgaagacttattttctcacatgtctagcagtggatgctggctttcagcttggagtctagctgggctgaacttgtagctgtggcttcctcaaaataggttggctagatttcaaggacaagtgttctgagagatattaatttttatgacttgcagaagtcactcagggtcac

SEQ ID NO: 436693 - DNA, 547 bp, Homo sapiens
attggtatttttgataggaattrcatttaatctgtagatctctttgtgttgtatagacattttaacaatgttaattcttccaatccatgagcatgggatatatttccatttttggtgtcctctccaatttctatcatcagtgttttatagttttcattgtataggtttttcactcttttggttaaaaaagaaagtattcctaggtatttttttttgatagtgctgtaaatggaattactttattgatttatttttcagattgttcaatgttgatatatataaatgctactgatttttatatgttgattttgtatcttgcaactttactgaattcatttatcagttataacagctttttggtggagtccttagatttttctaaatgtagaataatattgtcagcaaacaagaataatttgacttctttctttctttctaatttggaagttctttatttctttctcttgcctaattgcttggctagacttccagcactacgttgaataacagtagtataagtgggcatccttgtcttgttccagatatt

SEQ ID NO: 436694 - DNA, 453 bp, Homo sapiens
ctatctgcctacctacctatctatctatctatctatctgcctacctacctatctatattagtcagcttgggctgctataacaaaatgacatagactcgtggcttcaacaaaatttaytgtctaccgttctggaggctgggaagtcaagatgaaagcagattccgtttcttgtgataacccttttcatggcctaaagacggccaccttcttgcagtgtcctcacatggcagtgagaagaagcactaatgtttcttgctcttctttttttttttaaatttttttattattattacactttaagttttagggtacatgtacacaatgtgcaggtttgttacatatgtatacatgtgccatgttggtgtgctgtacccattaactcgtcatttaacattaggtatatgtcctaatgctatccctcccccctccccccaccgcaaaacaggccccgga

SEQ ID NO: 436695 - DNA, 365 bp, Homo sapiens
gctagtgcagcagtctaagatcaaactgcaagatggcagcctggctgggggaggggtgtctaccattgctgaggcttgagtagataaacaaagaggccaggaagctcgaactgggtgtaggccaccacagctcagcacagcctactgcctctatagactccacccctgtgggcagggcatagctgaacaaaaggcagaagacagcttctgcaaacttaaacatccctgtctgacagccctgaagacagcagtkgttctcccagcacggcgattgagctctgagaacggacagactgcctcctcagtgggtccctgacccctgggtagcctaatggggagacacctcccagtagtggccaacagac

SEQ ID NO: 436696 - DNA, 481 bp, Homo sapiens
tattttgaatagtgtgtcttttggaaccaggagctgtgcagcctggggttagaggaggggtgattcctgtacttccttagccatcccagctggtgtctcagtaggtcacatgccctgcccagtgcaatggctctgggcctagttcagcactaggactcacctaaaagttgcagtcctcataackttgactgcctttcaagtttacttgcagacacaaagtgctttagccctcagtagtgaggtttgcaggcactcaagttccacccatgagatctgcttttctctctggctagggctgctttaaatgctccctctgtgggcagacgtcagcagagtttggttggggtttcctttctactctaacaaggcaacactaagttcaatgcctcacaattgctgtgttctccctcctccagcatccagagaggctcccaacaccaagccactgctggctggggttggggaggggtggcatcagcaa

SEQ ID NO: 436697 - DNA, 610 bp, Homo sapiens
ctttcatagctaaagagaggaagtcagtccctggtttcaaaactttaaaaaatacaatgattctcttgtcaggggctaatgcaactgatgactttaagctgaagccaatgtgcmtttaccattccaaaaatcctagggcccttaagaatggtgctaaatctactctgtgcccttatcaatggaacaaggccaagatgacagcacatctgtttacagtatagtctcctgaatattttaagcccactgatgacacctactcctcagaaaaaaagatttcttttaaaatgttactgctattgacagtgaacctagtccttcaggaactctaatggagataaacagggagattaatgttgtctcatgcctactaacacaatgtccattctacagtccatggaacaaggagtaatttcaactttgaagtcttattatttaagaaatacatttcgtaaagctatagctgccatagataatgatttctctgatgtatgtaggcaaaataagttgaaaacctcctagaaaagattcgcctttctagatgtcattaagaacatttgtgaattatggtaagaggtcaaaatatcaacatgaacagagtttggaagaagat

SEQ ID NO: 436698 - DNA, 610 bp, Homo sapiens
ctttcatagctaaagagaggaagtcagtccctggtttcaaaactttaaaaaatacaatgattctcttgtcaggggctaatgcaactgatgactttaagctgaagccaatgtgcatttaccattccaaaaatcctagggcccttaagaatggtgctaaatctactctgtgcccttatcaatggaacaaggccaagatgacagcacatctgtttacagtatagtctcctgaatattttaagcccactgatgacacctactcctcagaaaaaaagatttcttttaaaatgttactgctattgacagtgaacctagtccttcaggaactctaatggagatawacagggagattaatgttgtctcatgcctactaacacaatgtccattctacagtccatggaacaaggagtaatttcaactttgaagtcttattatttaagaaatacatttcgtaaagctatagctgccatagataatgatttctctgatgtatgtaggcaaaataagttgaaaacctcctagaaaagattcgcctttctagatgtcattaagaacatttgtgaattatggtaagaggtcaaaatatcaacatgaacagagtttggaagaagat

SEQ ID NO: 436699 - DNA, 567 bp, Homo sapiens
ttatttataaggagaagaggtttaattgacttacagctcctcatggctaaggaagcctcaggaaacttacaatcatgggaaaaaaggaaggggaagcaaggtacgtcttaccatggtggcatgagagagagagaggacaaagggggaagtgccacagattttcaaacaaaccgatatcttgagaactcactatcaccaaaacagcaagggggacgtctaccccatgattcaatcacctcccaccaggcccctcccccaacacatggggattacaattcaagatgagatttgagtggggacacagagcaaaatcatatgaggtatgatctatttgattttgtggcccttgaacttggtttatagcaggctctcaataaacattttgtaaatatgaaatgaaggttatcccactttggtaagagtaagatmatttgaaccatcaggaacaaagtaaatagagacaataactttatttcctttggatcatgggctacttttgtgcattctacataattcaataaccaataactttttttaaaataaagacatcaaattaagctcctcaaa

SEQ ID NO: 436700 - DNA, 560 bp, Homo sapiens
ggggacgtctaccccatgattcaatcacctcccaccaggcccctcccccaacacatggggattacaattcaagatgagatttgagtggggacacagagcaaaatcatatgaggtatgatctatttgattttgtggcccttgaacttggtttatagcaggctctcaataaacattttgtaaatatgaaatgaaggttatcccactttggtaagagtaagatcatttgaaccatcaggaacaaagtaaatagagacaataacttyatttcctttggatcatgggctacttttgtgcattctacataattcaataaccaataactttttttaaaataaagacatcaaattaagctcctcaaaaaacgtttttgactggcttctgtgcatgaaatgaataaattaactaagatactctttaaagtcccctggatattgtcatgattaaaaaggagcaagtttggctaccctaaagagatgaataaatttagataagatgtagactaaagtttcacatcttcttaacttgaaatatagataaaaatataaagagaagacagggcc

SEQ ID NO: 436701 - DNA, 633 bp, Homo sapiens
ttggaaaaaaattaaagccaacataaaattatccgaaaattccagagttctagctccatggcccctataagaaattctgaatcaataagtatgagatctgggaatgtgaattttcatacaaacctcatacaaaataattccaatgtagctagtccttctactttgggaaatacagatttggtgatttaatatgatttgctcaggtttgtgtacaagtatacacaaagagttttgtgtatcccttaacatgacaaactatcacatgattatcattgtcaagtgaatatttgctccttttttatcttaggaagtcagcaagggcayaatagatttggatcaaatgggtaatataatttgtgggcattgtaagtgatatgttgacatcactccaactatttagcacctactattttccactaaaatatactgcaccagacactttatattcatgtctaaatctcaaaataacaaagagaggtggctatcattgactcaatcttatagttgagaaaactgcaatgcaaaggggttaaattgtatttgtccatttgcattgcaataaaggaatacctgagactgggtaactaataaagaaaaaaggtttaattggctcagggtcctgcagggtgtaca

SEQ ID NO: 436702 - DNA, 540 bp, Homo sapiens
tttcagccatcttaatcttaacattttagccttttgtctttcttagattaagcaagtgactcaagaagaaaatgagttccaaatattagtcttaggtctctgtacctcaattctatcctttttttttttgagacagagtcttgctctgttacccaggctggagtgcagtggtgctatcttggcttactgcaacctctgtctcacaggttcaagcaattttcgtgcctcagcctcccatgcagctgggattataggcttgtgccaccacacctggctaatttttgtatttttagcagagacagggatttgccatgttgcccaggctgggctcaaactcctggtcttgagtgatctgcccacmtcggactaccaaagtgctgggattacaggcatgagcctccatgctcagcctctctgtcctacatttcagatccttaatatctggctgctttggcagccttgaacttcaagttttgtcttcccatgctcatgagactgcctaaagcactcccatgtcttagcaactaaattttgccttcc

SEQ ID NO: 436703 - DNA, 597 bp, Homo sapiens
aattgttagaagacgttttcagtatgaagggaatcaagttgaaaattatgtaggaataagaagggagagaccaaaaattggatgaaatgagtcacttatcaagaagagtaaaacagtgtttccaaactataatgtgatcagaaagaaccataatctttggaaactatgaaattaatattgttaaagaaatttttgatcctccaaattttaaaatgtccaggaaaacagatactgtgatgaaaaacataataaggtcattaagtttgggttaattggtgtcttagctactgacatgattaatgcaagggattctgaaagtcatacaaaattatacaatatagaagaaarcaatttattttacagagaatctttttattcaatagtttttaattctccactgaaattctctttactttgctattcttgaacatattaagcacagctattttaaagtttgtgtctgttatctctatctgattagaatccttgtaggtctgctcctctgggatctttttctctggattttcaatcacactgtcttgtcctctcatatactgagttttgattgaatgctggacattgtatataaaaaattga

SEQ ID NO: 436704 - DNA, 587 bp, Homo sapiens
agcttggaaacatatgaacagatgctgaatttcacacataatattaaatttaaaaaaattttgttacaaatagatcatgattttcataaataataggtaaggaaaccttagttcttatttttgagagtataaaattctgcgttgaaaaatttgtttctatcgatttccttctagattgaaaagtagcagttgcctcaagaatctctgaggtctggtacatggtagaggttaagtaacaaagaaggtctctcatctaagaagycctacagtttccagtttgctcagctatgggaacctagtggattcaatagggcctcgaatataccgtgtcacagggcagcctctctcatagcccattttaaggtttagctttccctctgcaacttaacaagctgtcttcctgcttcctgctcacttctgacaacttgattgaattggacgccctaggatgctcatggtgtcacctatgacagagactctgtaggcaaaaccccagcctgtgctggaatttaacatttaaaaaataacctatgtagcacacaagattgtaaaactgtaacataggaagattctaacaccaaaagtgt

SEQ ID NO: 436705 - DNA, 587 bp, Homo sapiens
agcttggaaacatatgaacagatgctgaatttcacacataatattaaatttaaaaaaattttgttacaaatagatcatgattttcataaataataggtaaggaaaccttagttcttatttttgagagtataaaattctgcgttgaaaaatttgtttctatcgatttccttctagattgaaaagtagcagttgcctcaagaatctctgaggtctggtacatggtagaggttaagtaacaaagaaggtctctcatctaagaagtcctacagtttccagtttgctcagctatgggaacctagtggattcaatagggcctcgaatataccgtgtcacagggcagcctctctcatagcccattttaaggtttagctttccctctgcaacttaacaagctgtcttccwgcttcctgctcacttctgacaacttgattgaattggacgccctaggatgctcatggtgtcacctatgacagagactctgtaggcaaaaccccagcctgtgctggaatttaacatttaaaaaataacctatgtagcacacaagattgtaaaactgtaacataggaagattctaacaccaaaagtgt

SEQ ID NO: 436706 - DNA, 596 bp, Homo sapiens
gggaaggcacaaggtttcaggaaaagtaaaggatgtagtcamataagcaatattgaatttaaaaatacaaaatacatttttatgggcaaagaatgcaaggagaaaaaagaagaagataattcaaatgctatgaaaagcagtaacatctgtatgagaaaataatagttgaagtaaaaagcaaactaaaatatagtacaattttaaataattgatagaaaagacacaagttggggccttccacctgcagagaaggcaatataatcctatcccactattttctccaggactgagcaatacttaaatagtcaatacaatttattagttttcaaccctgtattactccattttcacactgccgataaagacatacccaagattgggtcatttataaagaaaagtggtttaattgactcacaattccacatggctggggaggtctcacaatcatggtggaaggcgagcaggagcaagtcacatcttatatggtggcagggaagacagaacttgtgcaggggaactcctctttataaagccatcagactccatgagacttattcactatcatgagacaggacaggaaagacccgcccccatga

SEQ ID NO: 436707 - DNA, 564 bp, Homo sapiens
cctgtacctacccagaagcccccctcctctcttctttccagttcacctcccttcctcacttggagctgtccttgcttcagacccttaatcagaaagggccagctcattgtgtgagttatgtttggccatgggagaatggggtgaaggaatgtgaagacaaataagacatgagccttgtctttaaggaactacgaactggttgacctcccttccccaccagtgcagaccattcttgccccctgagattctgcccacctcatttggcacctcttctaagaatgcttttctgctctccccagctcgcgggagctctcctttccttaaaccctcatgacactgtggccctggccacattctgcattgcattgtgctgctttgatctactctgtacctcctaccttatctccttgactagactttaagctcttttaaggcaagatctgtgtcttgttcaatgccttacacacaggagatgctcaataaacgttacaagactgaaaccagcatggaatctgttatggctcccagcatcygtcccctttgttgccatggcgcccaggtctt

SEQ ID NO: 436708 - DNA, 628 bp, Homo sapiens
ggggtctacattcaacatttttaaagaaaagtatcttcaaccaagaatttcatatccagccaaagtaagcttcctcagcaaagaagaaataaattcctttkgagataagcaaatgctgagggagttttttaccaccatatccatcttgcaagagatcttcaaaggagcactaaatatcacagggaaagactgttaccagccactacaaaaacacacttaaatacacagaccaatgacactataaagcaaccacacaaacaagctaataacaagataacaccacaatgacatgatcaaatacacacatattaatactaaccttgaaggtaaatgggctagatgcccccatttaaaaggcacagagtggcaagctagataaaaagaaagattcaatggtttgttgtattcaagagactcatctcacacacaaaaacacccataggctcaaaataaagggatggaggaaaatctaccaagcaaatagaaatcagaaaaaaatcaagggttgtattcctaatttcagaaaaaaaaaagattttaaaccaacaaagatcaaaaatgacaaagaagggcattacataatggtaaagagttcaattcaaccagaagaactaactatcctaaatac

SEQ ID NO: 436709 - DNA, 623 bp, Homo sapiens
aaggcgagcagggcatcaataaaaaaaggcagactggcagagatgttggggccaaggaggataaggagggtgtctatgcagggtgtcccagtgtgggaagtcagagcttgagccaggtggagagggcatccatggggggattgcacgtatagcatgacatcggttactgtagcccatggaaagataaagcaggacttccacagagaggaaatgcctaacacgcagtgttggagcccaagtaagctaggaaaatatccatgcaagggaaggagtaatggttgagatgggagattaatgatattcaagaaaactgatcaaataaataagtgcacacagaaatatctgtgtaaactcataattttcattatctagatatatataaaaatgaatataaatgtgtrtatgcatgtttaaatgtgaatatgtggatataagtatgtgtgtacatcacctacctctgtccaccccaaaggactgggagcagcaataccccaatagcagtgagtactcctagtaaccagatcttggcttctggatactgtcccccactaaaagggataaaggctcaaagaagaaatggctgattataggattgggcaggaatattatatgcaaaataagca

SEQ ID NO: 436710 - DNA, 557 bp, Homo sapiens
gaaaactacatatatctactaattactaagtacaccgaatcaagagagttagaactagtcccagatctgtactagtgaactatgtaaccaactaagtcactcagccactttgtgcctcagttttacctctgttaaaaaaaaagaaatgaagaaagaaaaaggaaaaggaaaatttgatttaataatctaatattctatgcttcatttcttcctttcattccatgacaaaaataattgctgaaatctccaagctagttatctactttaacataactgaaactttctttcctgaatatgtgttaaatataatgtttttaaaccaaaaagctgcacatccttcaatatcaacgtcatagtwtctagccagacagcaaaataatgtacaaaatacaacagagccattagctactcaacacctccatcttcagggtctcaataaatcttaaaataggatgatgacccacatagtacacataataacttttaagacaacgctgtctcaaagtagactaagttaggaattatgttggcaccatgccaaatgagtcttcattttt

SEQ ID NO: 436711 - DNA, 536 bp, Homo sapiens
gttttctcccactgttctgacatagttcatgtccctccattactatctattctgaattttcatgttctaagcttactaagaaccacacagccctctgtaaatatgagttatgtacaatgaactaaatcagtgcctcaattctcttttctttggaaaaggttttttccaagaaggcatctttatccctcaggaaagtaaatccttgctgagcccactttgcagcttttccaggtaaacctctacaaatgggtagatcagagtcacctgtttccttatacagtcaggtcctagtaatgttgtcaagcaccctaacttaaagaccaaagagaaytggaggaaaaagaagagaaagataggtaggaagagagagtgggggagagagacacaggaagatgatgagagaaagattaaaagagaaaatgtcaaaaggagaatgaaaggaagagcaaggaaaaaaaggaggaagaaagcacactggaagagatagaggaaaagaaaacaagtgaaacagagagacacagaaaggtggaaaaaag

SEQ ID NO: 436712 - DNA, 536 bp, Homo sapiens
gttttctcccactgttctgacatagttcatgtccctccattactatctattctgaattttcatgttctaagcttactaagaaccacacagccctctgtaaatatgagttatgtacaatgaactaaatcagtgcctcaattctcttttctttggaaaaggttttttccaagaaggcatctttatccctcaggaaagtaaatccttgctgagcccactttgcagcttttccaggtaaacctctacaaatgggtagatcagagtcacctgtttccttatacagtcaggtcctagtaatgttgtcaagcaccctaacttaaagaccaaagagaattggaggaaaaagaagagaaagataggkaggaagagagagtgggggagagagacacaggaagatgatgagagaaagattaaaagagaaaatgtcaaaaggagaatgaaaggaagagcaaggaaaaaaaggaggaagaaagcacactggaagagatagaggaaaagaaaacaagtgaaacagagagacacagaaaggtggaaaaaag

SEQ ID NO: 436713 - DNA, 536 bp, Homo sapiens
gttttctcccactgttctgacatagttcatgtccctccattactatctattctgaattttcatgttctaagcttactaagaaccacacagccctctgtaaatatgagttatgtacaatgaactaaatcagtgcctcaattctcttttctttggaaaaggttttttccaagaaggcatctttatccctcaggaaagtaaatccttgctgagcccactttgcagcttttccaggtaaacctctacaaatgggtagatcagagtcacctgtttccttatacagtcaggtcctagtaatgttgtcaagcaccctaacttaaagaccaaagagaattggaggaaaaagaagagaaagataggtaggaagagagagtgggggagagagacacaggaagatgatgagagaaagattaaaaragaaaatgtcaaaaggagaatgaaaggaagagcaaggaaaaaaaggaggaagaaagcacactggaagagatagaggaaaagaaaacaagtgaaacagagagacacagaaaggtggaaaaaag

SEQ ID NO: 436714 - DNA, 581 bp, Homo sapiens
gtatctttttatgtgcttattagccattcacatatatcatctctaaagaaatatctattctaatcctttgtccatttttcaagttatttgtctttttgttattaaagtgtaagagttgtttttatattccgtacacaagtaccttatcagatatatgatttacaggtattttcttcaaatctgtcaggttttttttkactttctgttatttttttaccttcaagagaattgttcatttaatctaagtttctaatttattggtataaagttgttcacaatttctatgaactctgtagtgatttcatttctttcatgcctggtactgtcaatgaaaacaggcaaattctgtaaaatatttgaagagactcattctgagccaaatattgttacagtagttagctacgcaggcatgagcagggaaggagaggggtcccgccacacatacacaccaggagtgttgggtggccatcaggtgatggtcaagtggttgttaactgtctctctctaagtaataattagtcacagccccactcaggggaaagtcagtctcccaatagacaggaaaaacctgaaactggtaa

SEQ ID NO: 436715 - DNA, 437 bp, Homo sapiens
ggtgatgggaagattagcttggagattatttcagtaatctagaccaaaagagacattcttaacctggaacccacaggtaggttaggacatgctgtatttatagaatcacatgaggatgcatatgtacccataatgtaatttagtctgaaagcsccatcatatccaagaagcacagtgcaatagccaaaataaataaaaagtaattaacaaatcccatggtttactcatattactcaaaggaattccaacagaaaacgcatgaaatcacttgccaaaatcttttgttctcctgctcacttgctcttttcctaggggtatttcagcatctctctccccaaaaccttcaaagagaaatattcctccatcactcctccactgccttcttcttccatcagaagaagagccctttcttttctctctgagaactttaccaggta

SEQ ID NO: 436716 - DNA, 437 bp, Homo sapiens
ggtgatgggaagattagcttggagattatttcagtaatctagaccaaaagagacattcttaacctggaacccacaggtaggttaggacatgctgtatttatagaatcacatgaggatgcatatgtacccataatgtaatttagtctgaaagcgccatcatatccaagaagcacagtgcaatagccaaaataaataaaaastaattaacaaatcccatggtttactcatattactcaaaggaattccaacagaaaacgcatgaaatcacttgccaaaatcttttgttctcctgctcacttgctcttttcctaggggtatttcagcatctctctccccaaaaccttcaaagagaaatattcctccatcactcctccactgccttcttcttccatcagaagaagagccctttcttttctctctgagaactttaccaggta

SEQ ID NO: 436717 - DNA, 437 bp, Homo sapiens
ggtgatgggaagattagcttggagattatttcagtaatctagaccaaaagagacattcttaacctggaacccacaggtaggttaggacatgctgtatttatagaatcacatgaggatgcatatgtacccataatgtaatttagtctgaaagcgccatcatatccaagaagcacagtgcaatagccaaaataaataaaaagtaattaacaaatcccatggtttactcatattactcaaaggaattccaacagaaaacgcatgaaatcacttgccaaaatcttttgttctcctgctcacttgctcttttcctaggggtatttcagcatctctctccycaaaaccttcaaagagaaatattcctccatcactcctccactgccttcttcttccatcagaagaagagccctttcttttctctctgagaactttaccaggta

SEQ ID NO: 436718 - DNA, 600 bp, Homo sapiens
cagagtcctcgtcctcaaggagctcacrgggattggctcagacaaggagaacattaaatccagcagagagcagtcggtgtcatgacagaaacacgggctgggtgttgaggaggcacaggcaacagtgaggggagggggatatctagtgcgacacctgaaggaagaacgggtcttgaaggcagataaaatggctgtgcaaagcacattgcaaagcacactcaaaactaaagcttatgtcatacaaacacatctctctgacagttattactctgtatagcccacatgatctgtagcccaccaggctgtaagcttccagtaggggatctaccagcttggggcaagacctttggcggaagagaaagtattaaggagagtgaagagccagagaaagtgccatggggcatagggtaaagcacgggaaggctaagagaagagagcaacatctctaggatacaggagtgagacactttgggggagggagtcccatagatcaacctttatgaagaatctatccaattctaatgctatgcaagttctggagatataaggatccataaaatatgttccccagcatcaatgtataagaaacataaaatatgt

SEQ ID NO: 436719 - DNA, 531 bp, Homo sapiens
tataatgccctctttgtcttttttatctttgttggcttaaagcctcttttgtttgaaattaggattgtaacgactgcttttttctgtttttcatttgctttgtagatttttctccatcccttaattttgacctatgggtgtcattgcatgtgggatgtgtctcttagagatagcatatcattagatcttgwtttttatccagtttgccactccatgccttttaattagggcatttcgtccatttacagtcaaggttaatattgatgtttgtggatttgatactgtcatcatgatgttagctggacactatgcagacttatttgtgtggttgctttatagtgtcactgatctgtgtacttaagtgtgtttttgtagtggctggtaacaatcttccctttccatatttagtgcttccttcaggagctcttgtaaagcaggtctggtggtaacaaattccttccacatttgcttgtctgaaaaggatcttatttctccttcacttatgaagctttgtttggctggatatgaaat

SEQ ID NO: 436720 - DNA, 578 bp, Homo sapiens
gcacttccttattttctggcacaacaagaagttccaggctcatcttgtcctttccttcctcagctcgggaatcacccatttctgcaaggattcttgagtctttttattagagaatagtatttagaaaccaaaatctaggtagttattgcttttcaagtggagcacccagagtaggcactggagcagaaaagtgattctatctatgtctacaagttacctagatgctaggtaacttcattgtcactgtaatgttgctgctccaaggccctttgcgttaacagagctggagaatatatagatacatattaatatatttgtattttttctatgtctgtttatatgttgaaactatgagttcacagagatatctccaattccaatccacaggaatcattttagctctttctctttccatatttgtgatttccctktctgtatttccacgttttcattcctcaacaactgagaaattagttcccagcagcctcaatatatttacttattgctcaactccccagagtataacagatttcctgctgccaacaccctttccattgaggatggtctacgcaccttgc

SEQ ID NO: 436721 - DNA, 420 bp, Homo sapiens
tctaggggaagttcaaggtattccttctctgccttcacttcaaagccactccaacccctcaagaaggagaagctctggcctaatcaaggagaaaatgctgtcatcagggtcacaaaatggatttttaatacaaggaagtacaatacagtggagygaacattctttctttttcatgctttactctgttgcccttcttcttttctatgttcctggtgcttagggagcctacatattcctcctgcttgggatgatcagagtgaagccttaggaaaaagaatattctctctttttcattcttttgctgacatcagaatagaaagatcctgacactaaagaaccatcagtagatggctaaaggtacagggtttgtggacaaggctgctaaaggcctgtgtttagtctagaccttattatgctaaa

SEQ ID NO: 436722 - DNA, 548 bp, Homo sapiens
cacttctgttgttctcaaagaagtagagaagctgtatatattaatgtgataatataaatagacactataaacaaaaagatatttggtaatgttaaggtcctgaagagtgttagaagacatcattgtaatagttggcacacttttcaatggagtggctctttggatgttgtaggagaaattactagatgcctaccaaaagctgttccacctctagtagcaagacatagaattgcacagctaccctgtgttttccagcttcctttccagtttgtggttgggtatggtcctatgaccatgttctctccagtgggatatgagaagwggtaagatgtgatacttccagacttggcctgtaaaacctttcatgtggcaactctgtgggctttttccatgggattccatgggatggtgacatccagaatgactatggaagatttatgttgaaaatgtcagtgcatctggcagcataggtcccagattaacggggtggagaggacttatcaccctgatccctgccaacctgcccattctggatttgaatgagaaaa

SEQ ID NO: 436723 - DNA, 553 bp, Homo sapiens
gttttttctattctttttaatttattgtagctctttctgagattttatgggctatgcatggtttgaatagcacacatataatgagaaacagattacaatagtgcaactaagttttttagagaaaaattatctgtggctgttctttctaagttttaaagtctaccaccattaagataactatgaaagatttgctgagatatttactcagtggcctgaaataacagaygagcaatgtatgaatggcactttagaatcctaaaggattctattttcaagagcttaaattggcacaactaattaccagtgccagcaaatgcagagtgctgaaaacatcatttccacactacctttcagatttgtaagtgtggctctggtctgagctggcaaggcttctctgagtttcactttacatgaagttgaatgtctcagttgtgtggtttggctcctgctgaactgcatttaaagcaatggatgaaactccttaggtctgaggctatgtgaatcagatctgatgaaaaggcatattgacgggatttcacttatttcttctcaa

SEQ ID NO: 436724 - DNA, 450 bp, Homo sapiens
cccactcctcacagttcctggaaaccactaatttatctgactttatgtatttgcctcttctggatatttcatataaatgaatcacatggtatgtggccttttgtggwtgatttcacttagctttcacttagtgtaatgttttcgagggtcatccacgttgtagcatatatcagtactttattccattttataactgaataataatagtctattatatggatataccacattttgtttatccgtttatcagttagtgggcatttgggttgttttagtcttctggccactgtaaattgtggtgctatgaacattcatgtacacattttttgtttggacatgtggtttcagtttttttgagtatatacctaggattgcatttgttgactcgtatggtaattccatgtttaacttatcggggaatcacctaattgttttccatagcagctgccc

SEQ ID NO: 436725 - DNA, 559 bp, Homo sapiens
ttactgttgcaccttcccaaggacttctatgttcaagatcttctcacgaacttagaattaccttgtggagcattcagggccagcagaattatgtccagttcacagtcaaagagtctgaagcacagatgcatgaagtgcttgtttcaaaataattaaagtactgggattatgaaaattctcactgttgcctattcgtatccattctactgcttgtccacatgaaagattacatataattactttcctgtctataaaattctagycatataagaagttgaacccaagtcatggcctgtgtattagactgactatctataaactcaataaaatagaatttctttatatagtcctttctaagttagccaagaagatgggtaattgtgatgacggcttgttctgtgggccccaccatgtagtattactgagtttctttggctctagtctgttgattctgagggctcttggatatgggtggtggtttctaccattgctgctgccttacttttcttgccttgaccacagggctgctgtctgtcagtgtcttcacttctcccactgc

SEQ ID NO: 436726 - DNA, 625 bp, Homo sapiens
cttgttctgtgggccccaccatgtagtattactgagtttctttggctctagtctgttgattctgagggctcttggatatgggtggtggtttctaccattgctgctgccttacttttcttgccttgaccacagggctgytgtctgtcagtgtcttcacttctcccactgctctggtagcagggtcagtggtccagttctcaaactgacaaatattcttccccagggtataagactttgggcctataaaatgtaacctgaggacacgataggcctcacccctgtggaacccaaagttatcaccctttaacagtgatcaatttagggtgacttccttccactttagggtaagttccctatattttagtgggaacttcttatactggggccattgtttgcttttttcagtgcattaatcttgaacattatacccaaagtcctgttcattatttttccaagattctttaggagtctgatacatgtagaatttttatttgattttgtttaaaccaacacttattgaacacctattatacctcaggtgctatgctagactatatatagagtgttccatttaatagtctcaaaacacagggatattcccattggacccctgctacagatgaga

SEQ ID NO: 436727 - DNA, 625 bp, Homo sapiens
cttgttctgtgggccccaccatgtagtattactgagtttctttggctctagtctgttgattctgagggctcttggatatgggtggtggtttctaccattgctgctgccttacttttcttgccttgaccacagggctgctgtctgtcagtgtcttcacttctcccactgctctggtagcagggtcagtggtccagttctcaaactgacaaatattcttccccagggtataagactttgggcctataaaatgtaacctgaggacacgataggcctcacccctgtggaacccaaagttatcaccctttaacagtgatcaatttagggtgacttcctyccactttagggtaagttccctatattttagtgggaacttcttatactggggccattgtttgcttttttcagtgcattaatcttgaacattatacccaaagtcctgttcattatttttccaagattctttaggagtctgatacatgtagaatttttatttgattttgtttaaaccaacacttattgaacacctattatacctcaggtgctatgctagactatatatagagtgttccatttaatagtctcaaaacacagggatattcccattggacccctgctacagatgaga

SEQ ID NO: 436728 - DNA, 625 bp, Homo sapiens
cttgttctgtgggccccaccatgtagtattactgagtttctttggctctagtctgttgattctgagggctcttggatatgggtggtggtttctaccattgctgctgccttacttttcttgccttgaccacagggctgctgtctgtcagtgtcttcacttctcccactgctctggtagcagggtcagtggtccagttctcaaactgacaaatattcttccccagggtataagactttgggcctataaaatgtaacctgaggacacgataggcctcacccctgtggaacccaaagttatcaccctttaacagtgatcaatttagggtgacttccttccactttagggtaagttccctatattttagtgggaacttcttrtactggggccattgtttgcttttttcagtgcattaatcttgaacattatacccaaagtcctgttcattatttttccaagattctttaggagtctgatacatgtagaatttttatttgattttgtttaaaccaacacttattgaacacctattatacctcaggtgctatgctagactatatatagagtgttccatttaatagtctcaaaacacagggatattcccattggacccctgctacagatgaga

SEQ ID NO: 436729 - DNA, 625 bp, Homo sapiens
cttgttctgtgggccccaccatgtagtattactgagtttctttggctctagtctgttgattctgagggctcttggatatgggtggtggtttctaccattgctgctgccttacttttcttgccttgaccacagggctgctgtctgtcagtgtcttcacttctcccactgctctggtagcagggtcagtggtccagttctcaaactgacaaatattcttccccagggtataagactttgggcctataaaatgtaacctgaggacacgataggcctcacccctgtggaacccaaagttatcaccctttaacagtgatcaatttagggtgacttccttccactttagggtaagttccctatattttagtgggaacttcttatactggggccattgtttgcttttttcagtgcattaatcttgaacattatacccaaagtcctgttcattatttttccaagattctttaggagtctgatacatgtagaatttttatttgattttgtttaaaccaacacttattgaacacctattatacctcaggtgctatgctagactatatatagagtgttccatttaatagtctcamaacacagggatattcccattggacccctgctacagatgaga

SEQ ID NO: 436730 - DNA, 629 bp, Homo sapiens
ctctggggatatttcccccttcttactatgattcctgagtatcaagcagactaatgataggaccaattctgcatttaggtaagagagtgaacaaatatataccctcagtggctgtattaagtatcttaagaaattgtataactcagaaagtaaatgagaaataagattagaagaaaattcagaatatttaaatgaatagttacctataaaactaccattttgtgagttaagaaaatcaatgattcaccattaaatcatattaatttttagaattttgtcttttgctttaactaacagcagctagtgtgcactgctctcatggagagaagtagaggggggtgagtaaatacagcactttcaactgaaacatccagctacaygtattgggattcaagaaaacagcttgacccatggagaatagagaaaagcaaggcaggatgactgcccatttgggagtgactcagagcccggggagcctcctctgcctagggaagcagtgagtgagtgtgcgactctggggactcacacttctcccctgtatctttgaaaaccttaggttaggagatctcctcatgaacccaccccaccaggacctgtggtctgacacacagagctatgtggtgtcttgg

SEQ ID NO: 436731 - DNA, 563 bp, Homo sapiens
acccactggcctgggaatccagccatccacaggtagcagtgttacatctccctgacatgaagctcccagagggaggggtaggctgccatctttgctgtttcatagccttagctattattgccttcagtgcagctgccctacaaaaatgcagccagactctttttgtatgggcrttcctgggcctgcttctcctcattaggcgggacctcctgaccagggtcaccagccatccttgccagtgctttccagctggcagcggttctaagcctccttgggatggagatcccagggggagtggtgggctaccatctttgctgttttatagacttagctgttgtctttgggccctagggagtctgaggtgactagggactggagtggtaccccagcacagtgcagaagctctatagagaagtagccagactgctttttcaagcaggtcccagatcccatttctcttcactggtgcaaccttctgatcaaggtcaacagccacccctgcttgtgttttccagccagcagcagtttcaaacctctctgggatggaggttccagagggaagg

SEQ ID NO: 436732 - DNA, 563 bp, Homo sapiens
acccactggcctgggaatccagccatccacaggtagcagtgttacatctccctgacatgaagctcccagagggaggggtaggctgccatctttgctgtttcatagccttagctattattgccttcagtgcagctgccctacaaaaatgcagccagactctttttgtatgggcgttcctgggcctgcttctcctcattaggygggacctcctgaccagggtcaccagccatccttgccagtgctttccagctggcagcggttctaagcctccttgggatggagatcccagggggagtggtgggctaccatctttgctgttttatagacttagctgttgtctttgggccctagggagtctgaggtgactagggactggagtggtaccccagcacagtgcagaagctctatagagaagtagccagactgctttttcaagcaggtcccagatcccatttctcttcactggtgcaaccttctgatcaaggtcaacagccacccctgcttgtgttttccagccagcagcagtttcaaacctctctgggatggaggttccagagggaagg

SEQ ID NO: 436733 - DNA, 563 bp, Homo sapiens
acccactggcctgggaatccagccatccacaggtagcagtgttacatctccctgacatgaagctcccagagggaggggtaggctgccatctttgctgtttcatagccttagctattattgccttcagtgcagctgccctacaaaaatgcagccagactctttttgtatgggcgttcctgggcctgcttctcctcattaggcgggacctcctgaccagggtcaccagccatccttgccagtgctttccagctggcagcrgttctaagcctccttgggatggagatcccagggggagtggtgggctaccatctttgctgttttatagacttagctgttgtctttgggccctagggagtctgaggtgactagggactggagtggtaccccagcacagtgcagaagctctatagagaagtagccagactgctttttcaagcaggtcccagatcccatttctcttcactggtgcaaccttctgatcaaggtcaacagccacccctgcttgtgttttccagccagcagcagtttcaaacctctctgggatggaggttccagagggaagg

SEQ ID NO: 436734 - DNA, 563 bp, Homo sapiens
acccactggcctgggaatccagccatccacaggtagcagtgttacatctccctgacatgaagctcccagagggaggggtaggctgccatctttgctgtttcatagccttagctattattgccttcagtgcagctgccctacaaaaatgcagccagactctttttgtatgggcgttcctgggcctgcttctcctcattaggcgggacctcctgaccagggtcaccagccatccttgccagtgctttccagctggcagcggttctaagcctccttgggatggagatcycagggggagtggtgggctaccatctttgctgttttatagacttagctgttgtctttgggccctagggagtctgaggtgactagggactggagtggtaccccagcacagtgcagaagctctatagagaagtagccagactgctttttcaagcaggtcccagatcccatttctcttcactggtgcaaccttctgatcaaggtcaacagccacccctgcttgtgttttccagccagcagcagtttcaaacctctctgggatggaggttccagagggaagg

SEQ ID NO: 436735 - DNA, 597 bp, Homo sapiens
tgacacatcaacgataccattaatgtgggagctgaaactgccacctgacaactctgggttcctcatgccagtaaactaacagaatggagatagttggagtgacttatcctggttttgctactgcacaatgggagtaggaagaagaaaaatggagaaattcctttggggtacatcttagtagttccacatcctatgaytaaagtcagtagaaaactataactcaatgcaggcagggctactaatgcccagacctttccattataaacatttgagtcacttcaacaaataaagaactaagacaagctaaagtttatcaactatttttctttctacttttcccctttttcacttccctaatactgaacataagacgtgttaacagagattaattttagtatttaatacagaggatatcaaggtagaagttgactcagatataagaggagtgaacatcatccaaagatggataaagttggactttgtatatactctgctagggaaaatgttagcatgcatttagttgtatgaggaatgactgcattatgttaactggaagaatgattttgctattgaatttgtttgaatgttaaccatgat

SEQ ID NO: 436736 - DNA, 607 bp, Homo sapiens
tatatcaagtcagtaacaggttttacgacttggaataaatactcattagttgttagagtgcttatctggttttgtctcatttatttaaaaataatgtcatgaacctgaaaccataaatattaatagctgaaaccactgacacaaaatttatgtttaaaacaaatagctcttacatgagtaatagaagtttttgtgtccccacaactcaatatgctaaaagtttmtttctcttcttgagacttgtagcaaccatgtgactttaaggaagttaaggtaaggaaaaaattgacttagtttttatccttttggcattcaagaaattgagaaacaatgcagctaaaaggtatgagtggacagaaggtgccatctgctcagctacagacaatttggattgactgaagggacaatacttttccattaaaagcagaccaggcacaacctcagtgtgactagggtaaaattgtcaaatttcccctaaaaaggggaaaaaagtcagagggaaatgtggagaagagggtcatggagaagctgagttcagtgggcatcatttgaaatatgaggatgtatttccaggataccagataatttcctagatcgcattgtaaac

SEQ ID NO: 436737 - DNA, 607 bp, Homo sapiens
tatatcaagtcagtaacaggttttacgacttggaataaatactcattagttgttagagtgcttatctggttttgtctcatttatttaaaaataatgtcatgaacctgaaaccataaatattaatagctgaaaccactgacacaaaatttatgtttaaaacaaatagctcttacatgagtaatagaagtttttgtgtccccacaactcaatatgctaaaagtttctttctcttcttgagacttgtagcaaccatgtgactttaaggaagttaaggtaaggaaaaaattgacttagtttttatccttttggcattcaagaaattgagaaacaatgcagctaaaaggtatgagtggacagaaggtgccatctgctcagctacagacaakttggattgactgaagggacaatacttttccattaaaagcagaccaggcacaacctcagtgtgactagggtaaaattgtcaaatttcccctaaaaaggggaaaaaagtcagagggaaatgtggagaagagggtcatggagaagctgagttcagtgggcatcatttgaaatatgaggatgtatttccaggataccagataatttcctagatcgcattgtaaac

SEQ ID NO: 436738 - DNA, 567 bp, Homo sapiens
aggaatggattagttcccgtgagagtggtttgttataaagggagtttctttttgtgtttggtccatttttgcacatgccacttcccctttgaccttctgccatattttgacacagcaaaaagcccccaccagaagctgagcagatgtcagcaccatgtccctcgaactccccacctgcagaaccacgagataaataaacttattttcttcataaactacccaatctcaggtattctgttacagcaacaacagactaagacaatgaagtccaaaaatgtgacatcatccaactagatgataagaaaagcccattattgaccacatgaacttccaggagttaatgagtacagagctttaatattcaaattgtgacraaaacattgaatttgggggaaaatcaataagtttatgataataattattagtaatattaactcccattattttagttttaaaatggcctaatataagtcatttcacatagctcaagttaatgtttgctcagtacagaattattatttttctttaataactcctcatgacagtgtatccaaatgagttcaaaga

SEQ ID NO: 436739 - DNA, 618 bp, Homo sapiens
tattgaacatgtgcagtttactaactagaatctagtaagtacctaggtatctacagagaaaaacagtgtgtactgaatttgaatataaataatagctcaagagaggaagaatgggcatgtaagattggtcattcatctgacttctgccaattccaaacagcttcttgttcaattaccatgttgaaatgaaacaagtgtcaatgagctcttaggcctgggataacaaaagtctaagataattttagtcaaatttgttataacatataggctattaaaagttataatgacaaccagaaatgtcaagttgttaatctactctctgtttgtgagccataacaggatttttcatcagattacatgaacagtaatttctttcaaaaatacaaaacaaatcttttcagtgccatttcacaactaaagcatctaacttccagcagaccacccatagtcacccaagtcactgtgactgaactatccatgttacatgccttaaaagtatattgattccatggcatatgcyatattgaactttcaaagcaaagcaattcccaatgaatgctataaaatgagtgcacttaagtctcacattcttgcaaaatgttgccaccttaatttaaa

SEQ ID NO: 436740 - DNA, 529 bp, Homo sapiens
tatgagtaaggcagtgacataatagcaactgctaatatttatttatttattattttgagatggagtttyactcttgctacccaggctggagtgcaatggtgtgatcttggctcactacaacctctgcctcccagttcaagcgattctcctgcctcagcctcccaagtagctaggattacaggagcctgccaccacgcccagctaattttttgtatttttagtagagatggggtttcgccatgttggccaatctggccttgaactcctgacctcaggtaatccccccaccgtggcctcccaaagtgctgggattacaggtgtgagccaccgtgccctgcctgctgatatttattgaccacttattcagtgccagacttttttctaagctgctaacatgtatcatttagtatgtatttgcaacaaccctgtaattaaggttctccagaccacgagcaaattactcagccattctgtgcctcagtttcctcatatgcacaatgggagtaatcatagaacctaccacaaagag

SEQ ID NO: 436741 - DNA, 529 bp, Homo sapiens
tatgagtaaggcagtgacataatagcaactgctaatatttatttatttattattttgagatggagtttcactcttgctacccaggctggagtgcaatggtgtgatcttggctcactacaacctctgcctcccagttcaagcgattctcctgcctcagcctcccaagtagctaggattacaggagcctgccaccacgcccagctaattttttgtatttttagtagagatggggtttcgccatgttggccaatctggccttgaactcctgacctcaggtaatccccccaccgtggcctcccaaagtgctgggattacaggtgtgagccaccgtgccctgcctgctgatatttattgaccacttattcagtgccagacttttttytaagctgctaacatgtatcatttagtatgtatttgcaacaaccctgtaattaaggttctccagaccacgagcaaattactcagccattctgtgcctcagtttcctcatatgcacaatgggagtaatcatagaacctaccacaaagag

SEQ ID NO: 436742 - DNA, 582 bp, Homo sapiens
cccttctgtctataaaattgagtgattctatgaagtgtcattrcttaccttagttgagttggatgtcagcctagcctagcagtagaggtcaatgttccccaagggtagttctaccagaagcaaaaggctaagaaagggcctttgagctgtacagagctgtatggcctttgggcttctacatgacctttaggaggtcactacccttcttgagccccagtgtcctcatctgtaaaatgggatcatagcacccttagggcaggttgcagtgaggatcaaatgagatcagggatgtgatgcatctcttgtggttcctggcactaaagaggcactcaaaaaatggtagttattgttactgcttttattatggaatcaccaatacacacttacctaaagaaacaacagcaacactctctggcaagaaatgtaatctgtatcggatcagtaaatgcaccaatatgatgcagatagctgtggaaaaaaaaataatacaatgttttaaaaaaaacactcaattctgaatgataaacaccaagttcaagtcagtggttatttctgggggggtcctcacagaaatggacaatt

SEQ ID NO: 436743 - DNA, 576 bp, Homo sapiens
  misc_feature (1)...(576): n = A,T,C or G
tgggaaccagcactgtctggcaccagaatttgtggtgccttatgctgcctccttctcggcctgacacagcattggagcccaaaactgcatgttgaatggctttattcaccttcctcggggaaggaccagggattttagatnnnnnnnnnnnnnnnnnnnnnnnnnnnnnnnnnnnnnnnnnnnnnnnnnnnnnnnnnnnnnnnnnnnnnnnnnnnnnnnnnnnnnnnnnnnnnnnnnnnncagtaggcaagacaacggatagagaagagtagtgaattccagctatgtggagtttccagcttggcgaattccagccatgtggggtttattggtgctggtagaaaatggtagcctcaagccctcagttgacaagtgtggccagagagaaccccactctcaatcctttgtagaccaggtcattccygccaggctctgtgctaacggaggagagtaggttattagtcccatttaagagccagagaaattaaggcagtggagagtagcagggctactggtttaaaaacactggctctgtgcctgaatcccagccttgtcatttgctagctgtgggaccgc

SEQ ID NO: 436744 - DNA, 644 bp, Homo sapiens
tgttggatacttggccagttgtgaaaggtactgatgacacagcagtggcaaacagagaaaaatgtctgctctgaataagttaatttagggagtgaaaaacgctagcatgcaagaaagcatgatggagacrgagccacttcagatggggtggtcactggggagggagtgtttgaactgaaaatgtagagtgtgcttccatttttgtaaaaatattcttctgtgtttgtatatgactatttattataagcacagagaagaagtctggagggatactcactagactctatttgtgttcttatttttattttttttacttttagagatgaggttttgcccggtcaccccgactagagtgcagtggctcactgcaacctcaaactcctgggctcaagcgatcctcctacctcagcctccccagtagctgggactacaggtgcacaccaccattcgcagctaattttttatttttgtttttgcagagatggggtctcactgtgttgttcaggctgttgtcgttgctcttgaactcctggactcaagcgaacctcccacctaggcctcccaaagtactgggattatagggcacaaataggcccagcctatttatgcttttaactcctaatacttctggagttccattctat

SEQ ID NO: 436745 - DNA, 608 bp, Homo sapiens
tggacaaccatcaccacaatcaattttagaccattttcatcatgcwaaaaagaaaccctgtacccattagcaatctcttccatctcctatctcccccactccttgcagcctatggcaagaatgaatatattttgtcgttgatgtacaaaatattgcacctgcttaatgtatacaacttgatacaacttcacatatgtacccacccatgaaaccatcaccacaatcaagataataaacattcatcacttccaaacatttctaaatgcccttgttttttgttgtttttgtttggagggtttttgtgctaaaaataacatgagatcaaccctcttaaaaattttaagtgaacaatattgttaactataggcactgtgatatacagcacatctctagaacttattcatctggtataactaaaaatttatatctattgaacaactcccgatttcctcctttccccagccattgctaaacaccattctattctgtttctatgtgattatttagttaactccataaatgggaaaatactaatcttaccttctcatacctcaaatggggcaaagatttaggaaggttctcacaactagggctgcaaatctgagtgg

SEQ ID NO: 436746 - DNA, 494 bp, Homo sapiens
ggctggggaggcctcagtaaatttacaatcatggcagaaggggaagcaaacacacccttccttcacatggtggcagggaagaaaagcaccaagcaaaaggaagaaaaagccttataaaaccatcagatgtcatgagaactcgctatcacaagaacagcatgagggtaaccattcccccctcccatattctttcgctctgctcactaagagggcctatgaacatcatcaccaatgcccccaaatcaaggaacacagtaagtgcctagattttgacttctcagttccattycctgctaacagaaaccaggactcttccacaagcaactgatcctaaggttagaacaagtacaagatgagcctagaacatcttgtgctcacataattgagggggacatgccaaaaacgacacaaaaagccaacctcacaataaggtcagaaccagggaagagagatgctcaggatgcaaaatttaagaaaacactcattcacaggat

SEQ ID NO: 436747 - DNA, 583 bp, Homo sapiens
ccaatctgggctcactgcaacctctgtttcctgggttcaagtgattctcctgcctcagcactcaccaccaggcccagctaatttttgtatttttagtagacacagggtttcaccatgttggccaggctagtcttgaattcctgatctcaagtgatctgcccaccttggcctcccaaagtgctgggattacaggcgtgagctactgcacccagcctcaattttctaaaatcattttataaaccacaattatttcacttaagatgagtattagagaaaaataagaaatatacaaattaactgataatgacagaaagcagatcaggttgcctgggaatgggggtagaaagggggattgagaaggattatggagaagcataaggaaatgtttaagggtgatgaataggctcattttcttgtgtgtgayaatagtttcacaggtgtacctatgtcaacttttcaaattatgcatcttaaatttgtgtagtttattgtatgtcaactactgctcaataaagctttgctttgaaaaaagaaatagatttggaaatgcaccactttgtatcccctaatgaaataatatcca

SEQ ID NO: 436748 - DNA, 583 bp, Homo sapiens
ccaatctgggctcactgcaacctctgtttcctgggttcaagtgattctcctgcctcagcactcaccaccaggcccagctaatttttgtatttttagtagacacagggtttcaccatgttggccaggctagtcttgaattcctgatctcaagtgatctgcccaccttggcctcccaaagtgctgggattacaggcgtgagctactgcacccagcctcaattttctaaaatcattttataaaccacaattatttcacttaagatgagtattagagaaaaataagaaatatacaaattaactgataatgacagaaagcagatcaggttgcctgggaatgggggtagaaagggggattgagaaggattatggagaagcataaggaaatgtttaagggtgatgaataggctcattttcttgtgtgtgatartagtttcacaggtgtacctatgtcaacttttcaaattatgcatcttaaatttgtgtagtttattgtatgtcaactactgctcaataaagctttgctttgaaaaaagaaatagatttggaaatgcaccactttgtatcccctaatgaaataatatcca

SEQ ID NO: 436749 - DNA, 583 bp, Homo sapiens
ccaatctgggctcactgcaacctctgtttcctgggttcaagtgattctcctgcctcagcactcaccaccaggcccagctaatttttgtatttttagtagacacagggtttcaccatgttggccaggctagtcttgaattcctgatctcaagtgatctgcccaccttggcctcccaaagtgctgggattacaggcgtgagctactgcacccagcctcaattttctaaaatcattttataaaccacaattatttcacttaagatgagtattagagaaaaataagaaatatacaaattaactgataatgacagaaagcagatcaggttgcctgggaatgggggtagaaagggggattgagaaggattatggagaagcataaggaaatgtttaagggtgatgaataggctcattttcttgtgtgtgataatagtttcacaggtgtacctatgtcaacttttcaaattatgcatcttaaatttgtgtagtttattgtatgtcaaytactgctcaataaagctttgctttgaaaaaagaaatagatttggaaatgcaccactttgtatcccctaatgaaataatatcca

SEQ ID NO: 436750 - DNA, 580 bp, Homo sapiens
ctgttttcttggctttattaaatatttgattatagctagcttctcatctgtttacagctgctttagtttataaatacaatcaaagattttataattactgtcttcaatacaaagaaaaaatatataatgtcaggatttcatatgatgtaggagtaaattgasttaaatttagttcagatgcggataggatgtgtgtgtttatacctcagatgtaagaatattgcctatgtgtccagaccctcccttcctcctcagtctggacatgtctccaagacatgttccaaagggggtctctccttaagactttgagtggctttttcattctaagggaatagattgacatattatatgatctccagatgacaaggccctactttcaagggaaggggtgttttcaacacaagaggtatattttgaagatggtttgccagcacgcttctatagcactcatggcagtctactggagagggccttggaataaaagagtgagtaaaatctaaatggactgctttgtttgcaccttccttcatttggggaaagcattgatattggaaactagagaagttatctgtagtttttg

SEQ ID NO: 436751 - DNA, 583 bp, Homo sapiens
tgcaatggcacaatctcagcttactgaaaccttcgcctcccgggttcaagcaattctcctgcctcagcctcccaagtagctgggattacaggtgtgcaccaccacatctggctaattttttgtatctttagtagagacggggtttcaacatgttggccaggctggtctcaaactcctgacctcatgattcaccygctcgccttggcctcccagagtgctgggattacaggcatgagccaccgtgcttggcctgtttgcctattttaacactggaaaaccagaagcagtcggaacattaactttgaacactggaataaatctgtaatggcaaagtcaatagcagaacttcacaaaccagagaacttaaggggatttcagttattatcacttatagaagaaatgtgtattaatgcattatcttaaaagaggagttaagtctatgctacaaaactaatagaaaacaattaaaagacttactactttatttggcatgtcattttctttgcgtttctagaagacttaaaaatgattgtctacttgctatcataccatatacatttttgactctttggtcaaatttgtc

SEQ ID NO: 436752 - DNA, 488 bp, Homo sapiens
  misc_feature (1)...(488): n = A,T,C or G
aattctacatattagtctatttttaagtaatggcattagattttcaaagaagtgtttgagttaagaaaatcacagatttccagtacaggcaggaaaatttctggcaatagctctcaactttttcattattaagtatatttgtattaactnttatgatgcttaattttagggtcaacttgactgaattaaaatatacttacagaactggtcaaatagtaattctgggtgtgtttctgtgggtatttctaggagagatggtgtgtgattcagtggactgagtgggaaaaatctgccctcaatgtgggcaggcgccagccaattggctaaagatctggataaaacaaaaagtggaaaggcaaatttcctctcccattcctacccccttttcttcctttatttgccctgctgccatgttatcatgcagcaagaaggccctcaccagatgcctgcaccttsatattgggcttcccagaatcctgaactatgag

SEQ ID NO: 436753 - DNA, 595 bp, Homo sapiens
cactattctttcatccgcgtcacacttgctcccgtcctccccagttgttctcaggcttaacccaaaagtttgaaactctcattttatggcaagtaaggtgaactctacttttcagagtgaacctcttgctttacacattactaaagaaatagatgattcacaaatatgcatgttttagccatacagtcttgtgataaggaactgtgtttgctgtagaagcctcctggggggctgtggacagaaatcagtttagggatgtatgggtttttttggagtggggcagagagggctgccatccctctctgaagctgcctcaatttgactttttgttttctgtgcttcatagcatttaaacaatttaacagctcaattgctttacaaaaataaaatttatcttgttttcccattataaaggtaaaacatgtatgttatcatttttttaagtacaaaaaataggcagaaaagaaaaaagtcactaatagttttactcataggtgagctcctygttacatttttattaatttgtaaaggttagaatttttaaaaaagaagacacgtttttatacacagtatgcattgaatcatttaaataaaa

SEQ ID NO: 436754 - DNA, 596 bp, Homo sapiens
ccttaacacctgctgttccaggactcagcaggctgccctccaactgctcagacagtaaggctggtgccctcccccagcagcactaaactccctctggattactgcctccaaatcccaccccattcaccacagygcagggaaagccttcatttagtcatgagtggctcctggggctctgttccgaaagacacgtgtgtttacaaagacctggctgcaagggaagagcaactaatgtttgacagagatctttcgaggtgggggccttctggatgtccttaaattataggatgtaggagacaaagcaaaagatcaggtggccccaaagagcctaatattgtcacctattacgggccgaactgtttctcccccaaaatttatacattgaagctcaaaccttcaatacctcagaatgtgactgcgcagatgcccctcaacttatgatagggtcatatcccagtaaacacatcataaatggaaaatgcattaatccacccaatctatggagcatcacagcttggcctgggccaccttcaacgtgatagaacacgtacatcagctacagttgagccaggttgtctggcaacagagtccactgt

SEQ ID NO: 436755 - DNA, 596 bp, Homo sapiens
ccttaacacctgctgttccaggactcagcaggctgccctccaactgctcagacagtaaggctggtgccctcccccagcagcactaaactccctctggattactgcctccaaatcccaccccattcaccacagtgcagggaaagccttcatttagtcatgagtggctcctggggctctgttccgaaagacacgtgtgtttacaaagacctggctgcaagggaaragcaactaatgtttgacagagatctttcgaggtgggggccttctggatgtccttaaattataggatgtaggagacaaagcaaaagatcaggtggccccaaagagcctaatattgtcacctattacgggccgaactgtttctcccccaaaatttatacattgaagctcaaaccttcaatacctcagaatgtgactgcgcagatgcccctcaacttatgatagggtcatatcccagtaaacacatcataaatggaaaatgcattaatccacccaatctatggagcatcacagcttggcctgggccaccttcaacgtgatagaacacgtacatcagctacagttgagccaggttgtctggcaacagagtccactgt

SEQ ID NO: 436756 - DNA, 575 bp, Homo sapiens
caggtggcccccggcagtgctgcttctcaagggcccgctgggcatgggagggcagagacgggagaggtggtcgtggtgagaaccataggtcagcagggatgacaccccccgagccttgactccacccatgttcttgggacgttgcaagtccccaggaggagtcccagcagcacagaaggcaggctgaaggtgcagctttgggaaaagggcagggctggcaagaagaggggtcatggattggagtagtacagacagatgggggacaaaccactgaggtccctgtggagccaaacyccacttcccaggctgcagagccacatcctccctgtatgcccagtgactggtttcgttgggcacgggcttgtttttccaacccaccgtgctggcgaagctgcaggatcaaggacaactatgccgtgctttttctttcttcctgtcaagctcccatgacgacagccgcaaaataaaagagtaacaaggaaaagaaagacaacggctaaaaaaataaaataaaaagagcctacccaaggatatttagcaggtgagtatttttagctgtagctttctgaattccg

SEQ ID NO: 436757 - DNA, 627 bp, Homo sapiens
gcctcaaagccagactgaagttgaccattgtctctaaaatttgggggatctatagccccagccggatctgcaggtgcctggtataaatgtgttcacgagggactcctaggtaatgccggctaatttaattttattgtgaattgttatcayaccaaaaacattacagctggtgttttgcaaaggaaaataatattttttaaatatattggctttcctaaggtgacatgtccatcaaatcccttcaactgtttcacaacctattaattagattaaggcaatttaatgactcaggcatataaaatgccttaccttacctctccctccttcactaatgcatacatagacagagaattaggtgggagaattttaaggccagactcatataagctgggagattcaaattaaggtttaattaacctgcttagtacaagaatctctgaacagcgggagattttacacactgttacatgtgatctgtaataaccaggcacaacaggcttcttcacaaccattatgtgtaccaggatatctgcctcagcctatgtatttgatcaaatgtctggaacctgtcgattccagaagaaaaatgcttggagctatcctcaaagattatccttaggctgtgca

SEQ ID NO: 436758 - DNA, 594 bp, Homo sapiens
atctgcttccagtggattttactctaagcacaacatttgctgtaaaattttttggtagttaggttaaataaatgtatcttcatagttttttcattaaaatatatgttggactatattaatttttttcagaatgtagggagggagtttatcccagagcttttctcctctaatgtgttaatttgacaaacaaccttatagtttttttagcattaaatcatctttacacttacatgattaaagccttattaaatcataatgagctttaaagaaacatatctggaaatttcacggctaatattttatttaggatttyaaaatctgtttataaggaagcaagatctcagctttcccttcattgtgtcattcttgatctacatttggtatcagttaaatgctagcttcctaaaaggagccatgagtgctcctctcctatttgttatctgagatggtttatatgaggtacaaatgagattttacttgaaatttggggtaaaactaaaattcacttgcaaaaacacctgggccaaatcatgtgttttggggcagatttttaatgtgttatttaaataattcagtgattatagatcaattcag

SEQ ID NO: 436759 - DNA, 557 bp, Homo sapiens
ggtctcaccatgttgcccaggctggactcaaactcctgtgctctagctgtcctcccgccacagcttcccaaaatactgagattacagttgtgagccaccatgcctggccaaatgtcctttctttcatttctattacatgtaacttttttccccatcaatctagctagagagctgccaattatcactatttctaaagattcagctttcgcttaatcaattttctttattattcttctgctttctattttactgatctacacgcttgctgttatgatgtccttcctctactgcactctttgatatctagcttcttaagttgaaagttaggttatttgattttaggtctaacataatatttaaatctataaatttccctctaaaaaagactttactcrttattctgattttatttctattcaattaaaagtactttctaattttccttttgaattatttcattaacctttgaattatttagaaatatgttatttaatttccaaatatttgaggatattttcaggtaactttctgttaatggtttttacttaaattctatt

SEQ ID NO: 436760 - DNA, 557 bp, Homo sapiens
ggtctcaccatgttgcccaggctggactcaaactcctgtgctctagctgtcctcccgccacagcttcccaaaatactgagattacagttgtgagccaccatgcctggccaaatgtcctttctttcatttctattacatgtaacttttttccccatcaatctagctagagagctgccaattatcactatttctaaagattcagctttcgcttaatcaattttctttattattcttctgctttctattttactgatctacacgcttgctgttatgatgtccttcctctactgcactctttgatatctagcttcttaagttgaaagttaggttatttgattttaggtctaacataatatttaaatctataaatttccctctaaaaaagactttactcgttattctgattttatttctattcaattaaaagtactttctaattttccytttgaattatttcattaacctttgaattatttagaaatatgttatttaatttccaaatatttgaggatattttcaggtaactttctgttaatggtttttacttaaattctatt

SEQ ID NO: 436761 - DNA, 530 bp, Homo sapiens
ctctaaaaaagactttactcgttattctgattttatttctattcaattaaaagtactttctaattttccttttgaattatttcattaacctttgaattatttagaaatatgttatttaatttccaaatatttgaggatattttcaggtaactttctgttaatggtttttacttaaattctattgtgatcaatgaacatatyttgcatatgtttaaaaatacatttaattttcaacatacattatgtttaaaattttaaaactacattaaattttatttccagccccatttatcgtatctcttagtgaatgctgcatggcacttaaagaaatatatattttgctctttgagggtgaagtgttcttaaaatgtcagctactaggtcaagatactcattgtgttgtttgaatcttttaaattcttgcttgtttctttggcttgctaattctatcaattactgtgagatgactattgaaatttcccaccataattgtggctttgtccatttttcattttcttctgtcaggtttt

SEQ ID NO: 436762 - DNA, 561 bp, Homo sapiens
tatgtgtatgtaggcaggcatatacttgtattttctggctttcattttaatttcttcttagcctcatgggtctttataactattttctaaatttctggacacttggagatttctacctttttactgctactgagttttaatataattttccggtagtcacagaatattcactagaagatttcagtctttgaaatttgttgagatttgctttatagtatggtgtgttttaccaaatggacactcaaaattgtatattctgcagctgtggaatgtagtattttatatatttattgagcctaggtagtggggtttttcaaatttgctctatccttactgactttttgtctatttttctttcagtcaatttggagtgttaaaattaccaaatatcattgtggcttttcyaccctttattttaggtctgacaactttaagtttacagatctcgaagctatttcagtaggtaaatttgcatttaggattgttatatttccctattgagttgacccttttatctttattaaatattccttttctactcccataatatttcaaccctga

SEQ ID NO: 436763 - DNA, 541 bp, Homo sapiens
atggggaaaagccccttataaaaccatcagatctcatgaaaactcactcactatcacaagaacagcagccagagggtaactgcccccatgattcaattacctcccaccgggccgctcccacaacacttggggattatgggaactacaaktcaagatgagatttgggtggggacacagccaaatcatatcaaatagaaaatccaagaaataaagagttcataagttttaaattgcatgctattctgagtgacatgatgaaatcttgaaccctcccttctgggatgtgaattacacctttgtccagcatatccacactgcacacgccacccacctgttagtcacagagaagcaggcttgggaatgagatcactgttatggtatgacaatgcttatgttcaagtcacccttattttacttaataacagccccaaaagcacaaaagtaatgatgctggcaattcagatgtgccaaagaggagctgaaaagtgcttccttaatgtgaaaaggtgaaagttttagctaaaagaaagaaaaataagtg

SEQ ID NO: 436764 - DNA, 573 bp, Homo sapiens
ataattaacacatcaggtcaggctccgtcctgccaggggcgtgtttatgacattatcgcttcccagacagcttaggcccatccaggagaccggcgacagtgacttccttgccaargtagccctttgagcagcgcacttgatacctgttcgtgaatattcatgtcaatggcaaatcataacagtgtgattgtggttgaactgttcggggacaggagctgccggggagccacgattgaaagaagactcgcccgctgcccttcctccatgacaatgcgctggaaaatctccgcggatgtggaggccgtgtttggttttctctgtgtgtgtgttttctctaaagccataagtgcgcaacaatgaaatcttacttgcagagatccccattatgcatcggtcccctgaagctgctgagatgacaccacctcttacaggtggcagagagaatgcggcaaacccctgaagtctcaagtcacagcaatcatcttcaactcccaaattgtcctggaaggagagtggcatcggatttgtcttaggctgtttggccaaactggggcacagatgggataatgactt

SEQ ID NO: 436765 - DNA, 574 bp, Homo sapiens
tgcatatttcgttgtgtggaaatgctgggtcacagagtatggatatgttcagctttagcgtatactgatgaacagttttccaaagtggttttcccaatttacattcctgtgagcrgagtataagggtttcatttgtttctgtcctcaccaacacttgatattgacagcttaaaataatttttttagccattcttttggtgtacagtatactccttcatttttatttttatttgcagataaattaattacttttggtactgcttgtcattgatatttttaggaacatgaaccagtagtttttgttcttgagaactaaacatatgtatcagccttttgagtcaaaactattaggcacaaagacatttttataatagtagcactgttcattagttttcaagtatgtaacttgcagataaatatgggtagaaatctgattttctatcctctagccagcccacaaatacttggaaacttaaaacaggaagaggtgtcagaatgaatgctcttgggggcaatgggctggagggggagctctttagaaagttactgaaggctgaataaaaatatttactgt

SEQ ID NO: 436766 - DNA, 578 bp, Homo sapiens
cagactcatagaagtaccaccttgatagtctcggacaagatctggaagaattatctgggtttccaggcagagactcttgttctcttctcttattgtttcccaaacaaatgggtgctctctctctctctctctctctttgttctgagccacctggagctaggagtggagtgacacaagcacccttgtggccaccaaccctaggactgctctgggtcagacctgaagctagcacagcactgggtcttgtctgaggcctgctgtaaccactccctttctactgcctatgttagttcaaagcctgggggttttacaatcagcaggtggcaaagccagccaggcctgtgtccttcccttcagggcagcaaattcccccaggcattgrgtgggtccagaggtaccttcttggagtcagagactagaggcaaaaaccttagaagtctgcctggtgttctattttcctgtcactcagctggcgctcacaccataagacacagtccttcccactcttccctctccattccagaggtagaggagcctcactccatgaccactgtcacctcaggcccacatggagtact

SEQ ID NO: 436767 - DNA, 553 bp, Homo sapiens
gaaacatacagagagtaagaaacttgcctgacatcacaattagtaaagttcagagctaggattcaaacctgtgctgttggaatctatacccatcaacttgactatcttagagctgcttactttcagtaccttcataacacaaaaatacccttactaatgtttttactgtatattacactgyacattaacatttttgaaaaatacagttccctctcatttaaaaaaaatttaaaataggacttcattttggttttgcctgatgttttctcaagattaggttcaggttgtttgtgccctgctggaataggacttggttaggtgtgtgcttctcaggccatcacagctggaggcacacagcatccgcccatgcctcattggcgatggtaattttgatcaccttgtcaaagtgctgtttgatttctcccctgtataatcactggttcttccctctctcttccttgtaaataacatatggtctgtggggagacactttaagaccagacaaatatcctgttcctcatcaaaatttacctctaaatttagcatctactga

SEQ ID NO: 436768 - DNA, 553 bp, Homo sapiens
gaaacatacagagagtaagaaacttgcctgacatcacaattagtaaagttcagagctaggattcaaacctgtgctgttggaatctatacccatcaacttgactatcttagagctgcttactttcagtaccttcataacacaaaaatacccttactaatgtttttactgtatattacactgtacattaacatttttgaaaaatacagttccctctcatttaaaaaaaatttwaaataggacttcattttggttttgcctgatgttttctcaagattaggttcaggttgtttgtgccctgctggaataggacttggttaggtgtgtgcttctcaggccatcacagctggaggcacacagcatccgcccatgcctcattggcgatggtaattttgatcaccttgtcaaagtgctgtttgatttctcccctgtataatcactggttcttccctctctcttccttgtaaataacatatggtctgtggggagacactttaagaccagacaaatatcctgttcctcatcaaaatttacctctaaatttagcatctactga

SEQ ID NO: 436769 - DNA, 547 bp, Homo sapiens
atggggacaatatttgccacagaaattaagttattkaatataacaatgtgctctctcaagtcaataagaaaaagaaccaccatcaaagaaaaagagcaaagaacaagaaaaggaagtacgaatggttcttaaacatatgagaagatgactgacccactcataataaagtaaatgcaaatatggacaatgagatgccatttttcatctatctggtatcaaacccaaaagtttgatagcatgttgtgttggcggggatgtgcagggaagtatgtcaacatatctaagataagaatataaacagatggaacctctagcattgttatcagaattaaaaacacgtgtcagtgctctttgactatagtcacacgtctaaggatttattggacagatatgttcacatgtgtagaatgtatatgcatgcatacttcctgaaacattattttgaaaagtaaaatctcagaagcaagcttactgtctgcaatgggaggctggataaataacatggttttcatacagtggaatgtagaagaatgagacagttttatat

SEQ ID NO: 436770 - DNA, 561 bp, Homo sapiens
ttccagtaggcaagtggttatcaccaggcaggagaatatgtctgccttgggggactgacaaaatgattaaatagacccagctcaaacttaccactgctatcccctttctgaccatttttgagagtagatgggttttagtaaatcattaaattcatgtaccactgaaaattctttgaataggattgtaggcttgctgctccatcctctcccaggaggcaccccatcttggaacacaacggtggaagctcaacatcttctagaggaattcaaacagtggaaatagatgtaacactatcgtttatccacaaaagcctcagtggtaacagaggctctacttcctaccttccacactttaaccaaagcaaaagtttacaacaaatagtacaaatggtgggcgaaatgacagagggagagagcagaagggtgataataacmccactgagtgatattaattaaattaaataaataaagcctaaggaaggtctttgtggtacccaactgccataacgttgattaaccctgctgtgtttcagcacgaggtcatgtaaaccctttgacacc

SEQ ID NO: 436771 - DNA, 567 bp, Homo sapiens
gtgttaattgagatgctacaggtttatgattcatatattttacaaacctattattttctactgaaaagtgtcagcatacgtttcctgaagttttttacaattcttaacacaaagcatgtgcatatatatattacattatccatctctacactatctgaaaacaaggcaaaacctttgcactttttagtggaagacaaaggtgccttatgtggccgagaaatgtgcaaaaggcactcttgaaaatgtcagtttactttaaatttttaaaagatatatgcactattagtagtaaaaataacattataaaaaccaagtgcacaataaatccatatttgcaaaatagttggaaacatttrgtgtatctcttttttaatttgtagtaacatgcacataacataaaattcaccatcttaaccatttttagtgtacagttcagtagtcttaagtacattcatattacttcgtggtcattaccaccatccatctccagaactctttttatctcgcaaaactgaaaccctgtatccatttaacaagtcctcattctcttctcccggtcaccccggc

SEQ ID NO: 436772 - DNA, 523 bp, Homo sapiens
atgcaaaatggtgcagccactatggaaaacagtatggaaattcctttaaaaattaaaaatcaaacttccttatgatccaacaattccacttttaggtatttatccaaaagaatggaaaccaatttctttttattattttcatatataaaccaatgtattttcttgaacattaacatcccaaagaagtaatacgtctataaaagaacttttttgagccctttgatgctgaaatggtaaagttaaatagggctttgagcatttgtagagatctgcatagttttgaacttgtaacaactaccatataattatttacccaaactcagtgtaattgcttttctatcatgcattcarttgttagtcagaatatagggaaaaccataatttttcaaattaacaaagtttggcatggctttctctgctcagatcctcaacagtgtagcaatggcatctttattattttacatgtactgtcattgcaacacctcatcatactttaatgtttcactgtagaaaacagtaaaac

SEQ ID NO: 436773 - DNA, 623 bp, Homo sapiens
actctgtactccataaatatgttcatttattacatatcaattaaaaataatttttaaaagaaaaaatcaatatattaagatttttgatagtaacaaaaagtaaaattgtataaaactacatcttttartgaatggttggaactttttaaaaactatttgatagatctgctaataaatatagcttattaatagaaggagtcaagatcaggcatcaatatctttcctgttttttaagtagatgtcccaaggagcctgttcacataagtaagtaggtatgaatcaaaaagttttattttttaaaaagtcactctacgttctgaactcttccctaaatatacaccattaaaagttatttgtaatgactatcggcgacaattcattaggtctttcttcaatttttgttgaaagtaaagaattagaaactgtgtaacttgccaaatgattacctcgtaatcactgtagtcattcaatttgtcaattctgtcaccaattttttaattttcccttgcacattacccctggaagtatttctaccccagtgtaatacatcataatcgattcagaatcaatgagcatgtctttctttataaagtgggagaaggagattgttaaaaaggatctgg

SEQ ID NO: 436774 - DNA, 667 bp, Homo sapiens
tggctgtgggcagtacttagaactatgccctgttatgcatcttttaggagataggttctacagaactgtatgggtttttttcaaggttctaatgaaaggtgattcaattcaaagaaaatattagaagtcagtacagatgcatgggagaagaaatatagggcaataatattaatatcaatgtatcaaattatatctgtatttaaaagcatggattccataaattcaagtgaaatactttaatttcaaggctcatcattgtcataaatcataaagaatatcataaatacataactattaaaatgcaggcatttattgtgtaaatacaactacatatagacagtagtatctttgcatagttcattattaaaccaaaacacaagtttttatgtacaaaaacattccgtakagaagtgagaaaataaaaataaaaacccacatatgggtctctataaatgtcaacattacacctatgtgtaatgttacattatgttgtggtcaagtctaacaagaagtggattgctgaagatcgtgaatgcttcactggttaatcatgaatttatagacactgatctttctctggagagtatttggccagtatgaaagttaatttatccttgtagtattctatgaaaataaactttcaggaacttgggtgttttagaaacca

SEQ ID NO: 436775 - DNA, 667 bp, Homo sapiens
tggctgtgggcagtacttagaactatgccctgttatgcatcttttaggagataggttctacagaactgtatgggtttttttcaaggttctaatgaaaggtgattcaattcaaagaaaatattagaagtcagtacagatgcatgggagaagaaatatagggcaataatattaatatcaatgtatcaaattatatctgtatttaaaagcatggattccataaattcaagtgaaatactttaatttcaaggctcatcattgtcataaatcataaagaatatcataaatacataactattaaaatgcaggcatttattgtgtaaatacaactacatatagacagtagtatctttgcatagttcattattaaaccaaaacacaagtttttatgtacaaaaacattccgtagagaagtgagaaaataaaaataaaaacccacataygggtctctataaatgtcaacattacacctatgtgtaatgttacattatgttgtggtcaagtctaacaagaagtggattgctgaagatcgtgaatgcttcactggttaatcatgaatttatagacactgatctttctctggagagtatttggccagtatgaaagttaatttatccttgtagtattctatgaaaataaactttcaggaacttgggtgttttagaaacca

SEQ ID NO: 436776 - DNA, 667 bp, Homo sapiens
tggctgtgggcagtacttagaactatgccctgttatgcatcttttaggagataggttctacagaactgtatgggtttttttcaaggttctaatgaaaggtgattcaattcaaagaaaatattagaagtcagtacagatgcatgggagaagaaatatagggcaataatattaatatcaatgtatcaaattatatctgtatttaaaagcatggattccataaattcaagtgaaatactttaatttcaaggctcatcattgtcataaatcataaagaatatcataaatacataactattaaaatgcaggcatttattgtgtaaatacaactacatatagacagtagtatctttgcatagttcattattaaaccaaaacacaagtttttatgtacaaaaacattccgtagagaagtgagaaaataaaaataaaaacccacatatggrtctctataaatgtcaacattacacctatgtgtaatgttacattatgttgtggtcaagtctaacaagaagtggattgctgaagatcgtgaatgcttcactggttaatcatgaatttatagacactgatctttctctggagagtatttggccagtatgaaagttaatttatccttgtagtattctatgaaaataaactttcaggaacttgggtgttttagaaacca

SEQ ID NO: 436777 - DNA, 589 bp, Homo sapiens
aatactgcttccactttaatgactgcttcattttgcattttcttttcctatcttagcccatttgtgttgctataaaggaatactgaggctgggcaatttatgaagaaaagaagtttatttggttcatggttctgcaggcygtacaggaagcatggtgtcagcctctgtttctggtgaggggctcaggttgcctccactcatggtggaaggtgatggtgatctggcatgtgcagagatcacatggtaagagaggaagcaagaaagagaggggaggtgctaggctctttttaacaccagctctccagggactaatagagtgagaactcacttgctccccacgctccccgaggaagggtattaatctattcatgagggatccacccccatgacccaaacacctcccactaggcctcacctccgacattggaggtcagatttcaacgtgaggtttgggagacaaatacccaaactatagcacccacgtttatagtcaaacaagtttttagcacagggagaaacatcactgacacctgttataggcacctggtggccaacatttgttacttaaattctaaatacctttataaac

SEQ ID NO: 436778 - DNA, 539 bp, Homo sapiens
ctttagtaggtccaaaatcagtcaattgaaaaaaataaactaaaataactcagaattaatcagattaktcactgttcaaatactacatcaaaacttcaaaggcttcactataaacaaacgaatgagtataacctatagaggtatactcattttctgggctcttattattctcttcaaacttgctgcaggctagattatgggtgcaaatctctccatcatgtaacatctctctggttgtttcatgagctgtattgtattagtttggctacctacaatccatctactttgcagaaaactcccctggctgcatagtcctaattattccagtggctatgacaagatgaaggtcaagaaataaagcagcacagagatgggcagagacattggttaacagatacaatgttaggcacattcaaacaagtaaagaaatcaagcacattatcttttcaaataaagttgaaatctctgctaggataaaggttcctttttcctgctttagcataatatgtgaatttggcaaaatgctgttcagaaactga

SEQ ID NO: 436779 - DNA, 470 bp, Homo sapiens
ttcacaactccagaaaagtattttgtctattaactttgttactcctgaaactgtacctcagacccttttctttgcatgttcacactcaacgagttggtctttcttaggtcaatgtaaatgcacagtagtgatataaataacagtttctgcttctgtcaccatacctgctgtaccactactgagaaataaaagaaactctttaactgtggaatgtgagccccctttaaattatcaggcccagagaggcattggaatgagacagtagtcatgtcttgagctaagtaataattttgaagcccttgttatgtgggctctggactgacacaaccaatagctatatattaaccttacaatgccctccactagacattataactcatactctgtagttcaacaatgtataattactaaycaatgtcatttctgcaaaccaatgaaaattactgaaaagcaacttttgtacttgcccc

SEQ ID NO: 436780 - DNA, 590 bp, Homo sapiens
attaaaatagtactttagatagtttgagaagccaatccaataaagggcaaccatttttcattataactctcaaatgcccttaaaatatttacttttatatrtgtatttatatgtgaaacagcatttacaatcgtccttccacctgcttttattcacagagaggtcttacttgtcaacataaaatttccatgataaaatcaaatacaagaaaattagaactttctgacagtctggttggattaaacacaaagtcttatcctggatgtatttcttacaggtttaatgaagagctctggattcacagcacgaaataaggttgttgtgcgcacccctctgagccctgggctttgaaactctttctctttgggtggttcctttttgaatgttggaggctcaggtgctgaagacatcttgatcaatgatgatttattatctaaaaacaaaataatatattttttcccttcataattgtgcttctctgataaatttctttaaaaagtaattcttaaattccttctttgaattccaacccagatacataccaaatgtgattgtcagttatcttattactttgtataatgtactttgta

SEQ ID NO: 436781 - DNA, 626 bp, Homo sapiens
gacatggggtcgggggaggggggagggatagcattaggagatatacctaatgtaaatgacaagttaatgggtgcagcacaccaacatggcacatgtatacatatgtaacaaacctgcmtattctgcacgtgtaccctagaacttaaagtataataaaaaaatcaattacagattctaattaatatcccgtaactgaaattaagactgcaaaagatagctttaacagcagattaactgaaaaaagatttattaatctggaaaacaaatcagtagaaaatgtcacttgaagcattgagagaaaataagatgaatatgtatttaacaaaaaagaaaaagacatttggggcataatgaaaagtttaaaatataaatcatcagagtccaaaatgagagaaaagagaaaatagggagaaataattttgattattggccaagaattttctcaatcatgcaaaaattatcatgacatatattcaagaatctttatgaatcccaaggaggattaacacaaaggaaaacttactgaggcatatcgtgataagactactgaaaaccagagacagagaagaccttaaaggcaaccagataaaaaaaaatgcatgacttttaaagaaacaaaataataa

SEQ ID NO: 436782 - DNA, 626 bp, Homo sapiens
gacatggggtcgggggaggggggagggatagcattaggagatatacctaatgtaaatgacaagttaatgggtgcagcacaccaacatggcacatgtatacatatgtaacaaacctgcctattctgcacgtgtaccctagaacttaaagtataataaaaaaatcaattacagattctaattaatatcccgtaactgaaattaagactgcaaaagatagctttaacagcagattaactgaaaaaagatttattaatctggaaaacaaatcagtagaaaatgtcacttgaagcattgagagaaaataagatgaatatgtatttaacaaaaaagaaaaagacatttggggcataatgaaaagtttaaaatataaatcmtcagagtccaaaatgagagaaaagagaaaatagggagaaataattttgattattggccaagaattttctcaatcatgcaaaaattatcatgacatatattcaagaatctttatgaatcccaaggaggattaacacaaaggaaaacttactgaggcatatcgtgataagactactgaaaaccagagacagagaagaccttaaaggcaaccagataaaaaaaaatgcatgacttttaaagaaacaaaataataa

SEQ ID NO: 436783 - DNA, 610 bp, Homo sapiens
tgattaccaagccaatacacatgcctgaataatgagagatgtgttactgaatggctgataaagattgacaagggaatgcaaggagcaatacacagtatgctcttgccagtagayaattggtctgcccacaacatactcccacacttggatcatgtaggggttgagtttttcccattgaactacacagccattctgcagccattggatcagggtacagttggcacagtgacagctcacttctgaaagcagttggaacaactctttctaaatgtagagcatgaagagaaaaatggagaaaagcaacatgagtaagccattgacatgattgcagagacttggtgatctataaagttatctgtaatcatgaaatgttagcaaaacacaggcatgattcctgtggaatcccctgaggtcctcctgtaagaagactgcaactaaatgtggtatttgaaccaatctagcactcaactgctgctgtcattgatgtctcaaaccagtttaattttgaagactgtgtggctacagatagcaatttaactatttcccaagttaccaaatcctgaagttgctacaggagtgctaactgatgtaaaaattgaaccagaaagcc

SEQ ID NO: 436784 - DNA, 563 bp, Homo sapiens
ttctaaccttttgacgtattaataaagttggagaaatatagcctcaatcaaactttatgcctttaataatttctaattcatcattcagtgtttttccatcctttactgtgaggacaccctttcttccamatttatttgcatcagaaatgatgttgacaatttctttgtctccatttgcagaattcatagcaacctgagcaatttctccaggggttgtcatggttcagacagcttcttaagttcagcaattataacatcaacagctaacatcacacttctgatttccacaggattagcacttttgctaatcttttcaaagcctttcttggcaaaagagcatggcagtacaatagcactggtgatggcctccccagcttcttcatttgtgttattagcaacatcttgaacaagtttaactccaatatttttatgtttatcctttacatcaattgactttggaacagtcacaccatcttttgttactttagaacttccccagttgatcaatcattggttttggccctattgtaacagctacagcatctgctaaaaagtttacaccc

SEQ ID NO: 436785 - DNA, 563 bp, Homo sapiens
ttctaaccttttgacgtattaataaagttggagaaatatagcctcaatcaaactttatgcctttaataatttctaattcatcattcagtgtttttccatcctttactgtgaggacaccctttcttccaaatttatttgcatcagaaatgatgttgacaatttctttgtctccatttgcagaattcatagcaacctgagcaatttctccaggggttgtcatggttcagacagcttcttaagttcagcaattatarcatcaacagctaacatcacacttctgatttccacaggattagcacttttgctaatcttttcaaagcctttcttggcaaaagagcatggcagtacaatagcactggtgatggcctccccagcttcttcatttgtgttattagcaacatcttgaacaagtttaactccaatatttttatgtttatcctttacatcaattgactttggaacagtcacaccatcttttgttactttagaacttccccagttgatcaatcattggttttggccctattgtaacagctacagcatctgctaaaaagtttacaccc

SEQ ID NO: 436786 - DNA, 584 bp, Homo sapiens
aagtgacaccatagagttgctcatgaattccagggatcatcaccaacccttaaatgtttgcatcaattgtaattagcataccaaaggctcagagaatggaactaacagatagrcgcactgcacaggtcacagactgaccacaaggtggcacactcacagactagaaccgaagagtacttcaaggactttgaaaagtaaactgatactcccttgagtatccaaccccctgaagttaggttggaacttggagcctgaacctaaccagatcaattgcctgcttagagaaaaaaaaaaaaaaaaatttccatgggattaaacacaacccagagactcataacataatcatcaaaatatctaggagagactccaaaattactcaacataccaagaaccatgagaatttcaactcataccaacaaccatgaaaatttcaactcacacagaaaaagatacacatatcaatgcaacataatacagatgctgaagttatgtgaaaaagactttaaggcagctactatatgatagagcacttcttttatgtttgaatgagcaatcataaacactcttgaaacaaatgttaaaat

SEQ ID NO: 436787 - DNA, 467 bp, Homo sapiens
taatgatgattgaaaagcatattatgtcaacagatacttctttggaaggaggaaaayaggaggacaatacctcactcatcagaaagagccagacatacctatagggtatgcaaagcaagccaaaactcctttgtgtggttttggggggggcggattttttgagacagggtcttgctctgtggcccacgctggactgcagtggcataatcacggctcacagcaggctcaagagatccttccacctcagcctcctagtagctgagactataggtatgtgccaccacatctggctatttttattattttttatttttgtagaggcagggtttgaccatattgcccaggctggtctcaaactcctgggctcaagcaattttccagaggtggcctcccaaagtgctaggattacaggcatgagccactgtgcacccatcctatattatgttttgaaaaggaaaaataattaa

SEQ ID NO: 436788 - DNA, 467 bp, Homo sapiens
taatgatgattgaaaagcatattatgtcaacagatacttctttggaaggaggaaaacaggaggacaatacctcactcatcagaaagagccagacatacctatagggtatgcaaagcaagccaaaactcctttgtgtggttttgsggggggcggattttttgagacagggtcttgctctgtggcccacgctggactgcagtggcataatcacggctcacagcaggctcaagagatccttccacctcagcctcctagtagctgagactataggtatgtgccaccacatctggctatttttattattttttatttttgtagaggcagggtttgaccatattgcccaggctggtctcaaactcctgggctcaagcaattttccagaggtggcctcccaaagtgctaggattacaggcatgagccactgtgcacccatcctatattatgttttgaaaaggaaaaataattaa

SEQ ID NO: 436789 - DNA, 538 bp, Homo sapiens
tggtgctgagtataagaatgtaagacttgggactgaacgcctgctctgtcacctattagctgggtgtcctttagtcacttttagttaatttctctgtgtctcactttccttattcattacatgcggataataatgtacctcatgtggtggttaggatttaatgcattcgtggatgtaaagtacttacaatatgacctagcagagagtaagcactcggtaaaaaagaaaagctctctagttgaaaaaaccttgtttttgccttataggaatgtggtcgtccctaatgggctaccacagtaatgaggacttttgagagagagactttttggtataataaaataatttcctactgaaatggactgtgggactttgcttgtaaatgactccgccctaatgtatctgccgtatagtatttacaagtttgggatttcatgctattaatagaacaaaccataacrtttttccttatttaaaatccagtttctccattttctcgtagcatgtgagcaggataggtagaagaaaaccaccagatttc

SEQ ID NO: 436790 - DNA, 495 bp, Homo sapiens
tcagagagtagatcctaacccttgctttgaggagcttgctttgtataccacgaagtctcacagtgatggatgagtgggtgtagataatgtgcaataagccataacctctctaagcaatcaggcttacattttgcaagtcctgggaaaacctgggcagacagtattagcacactcagactgagtcctctgtgtgtagtagttgaagataaagacatcattgatgttccagacagattctcatcatgcataaataattccttaggacggaattaccrtagttgccttgagtggcacttcccctcctttaggccactcacattagttcagcagtttattgtggcgtctgaagaatcaaatgcacaattcaacctcaagaagaaaattacaaatagcatattctttttgaaccgtgaatgtattcgtccacacaatatttgatgggaaagagatctggctcatttttgcttttttcattaattctttgtttattcagtc

SEQ ID NO: 436791 - DNA, 578 bp, Homo sapiens
actccgaaatctcttaatgcccagcctttgtccacagatcagaaatgccggggatgagaagrggatgtggaggtcgagggcatgaaccaaggaggtggccaggctttgccagcacagagcaaaggaaagataccattttgggggtttgtttttaaatggattccgcaaacatttttttgagcacaacacattgtatcacattttgtgatggaagtatacaaaacaaaactcacttctgctgacaggcccacagacagatttatcttgagcagaatgacagctccacttgctcagtgtattgtggccctctgagtatcattagtagaggaacgtagaggagggaggaataacaggttcgtagaagcctttgaggtgatctttaaactggtgttctgaagggtgggtagggtttttctaggagtacgaaggccagaggggagattaggaagatagaaaaaaaaaaaaaagggcaaagacaaggaaggaagaaagaacaaggtgtgtttgcagaatggtgaagaaggcaaaggatgattggaggtgagagctgagcctgtggccagtgccttcgtttgcaa

SEQ ID NO: 436792 - DNA, 578 bp, Homo sapiens
actccgaaatctcttaatgcccagcctttgtccacagatcagaaatgccggggatgagaaggggatgtggaggtcgagggcatgaaccaaggaggtggccaggctttgccagcacagagcaaaggaaagataccattttgggggtttgtttttaaatggattccgcaaacatttttttgagcacaacacattgtatcacattttgtgatggaagtatacaaaacaaaactcacttytgctgacaggcccacagacagatttatcttgagcagaatgacagctccacttgctcagtgtattgtggccctctgagtatcattagtagaggaacgtagaggagggaggaataacaggttcgtagaagcctttgaggtgatctttaaactggtgttctgaagggtgggtagggtttttctaggagtacgaaggccagaggggagattaggaagatagaaaaaaaaaaaaaagggcaaagacaaggaaggaagaaagaacaaggtgtgtttgcagaatggtgaagaaggcaaaggatgattggaggtgagagctgagcctgtggccagtgccttcgtttgcaa

SEQ ID NO: 436793 - DNA, 578 bp, Homo sapiens
actccgaaatctcttaatgcccagcctttgtccacagatcagaaatgccggggatgagaaggggatgtggaggtcgagggcatgaaccaaggaggtggccaggctttgccagcacagagcaaaggaaagataccattttgggggtttgtttttaaatggattccgcaaacatttttttgagcacaacacattgtatcacattttgtgatggaagtatacaaaacaaaactcacttctgctgacaggcccacagacagatttatcttgagcagaatgacagctccacttgytcagtgtattgtggccctctgagtatcattagtagaggaacgtagaggagggaggaataacaggttcgtagaagcctttgaggtgatctttaaactggtgttctgaagggtgggtagggtttttctaggagtacgaaggccagaggggagattaggaagatagaaaaaaaaaaaaaagggcaaagacaaggaaggaagaaagaacaaggtgtgtttgcagaatggtgaagaaggcaaaggatgattggaggtgagagctgagcctgtggccagtgccttcgtttgcaa

SEQ ID NO: 436794 - DNA, 623 bp, Homo sapiens
tttggctttccactacatgggcaaatggacccagttcagttcggcaatactggtagatagtcacgggacaaagtaaatctgatgcatcaacaaaacaactgtaaaatcatattattcaactcttgactctaaaatctgagtcatggtttaggaaggcgggaggagaagtgcagtgctggaaaccctgcctaaccacaaagaattaaccaccctgcctcttctaagctcctgagggagaaggcacatggtggcaggtaaaattaccaatgtatttatgaaacagcaatttgtaacaccttcagattcagtgcyagttgttcagtaagttttcagttatgttttaaagctacttttaaaacatactctttttttcccctggaagaagaaaatttccttaagtaccatacttaagaaaattacaaaataatatttgtaatcctgaatgcattagcattcttctattgaagtgcccttactatgtgtaagcattaaaaaatttttccaacctagtacaatttgaaacaaattaacagaaggtatataagtttgggaatctgctttagaggcctaaagacagtaagtttttaattaaaaaaaaatcttttttttccttgttacaaaag

SEQ ID NO: 436795 - DNA, 546 bp, Homo sapiens
ttattccttaaaaaaattcaacaatctatttttggcttatggatgctaagcaaaggaagtaggaaccatgagarccaacatggattcatttgttaaatcttacagttcagaagagtaatcttgattttagcaaaccatttgtcaaaatcatgtgatactgtcaattccttgcaaatagacaaagaaatgtagggtgagttttaggacaatgaaatggattcagagctcactaaacaatagattagaagatgatttacaagtggacagaaagaatcccatggcatttggaaagacctaatccttgactcttggcttttttagtcaacatttctatcaacagctagaatgatgacatgcttatgaaatttagcatgacacaaagttatagggtcagccaacctgctcttcaagagacaacatttcaaaagacatcttcaggttggaacaagatatgaacacaaatgatttgaaattaataagaggaaacataagatcacacacttagattcaaaaaataaacacacagtccataatgagaaacacctc

SEQ ID NO: 436796 - DNA, 563 bp, Homo sapiens
cattcacctctaattgatgtgatcttattcaaaatattattttaaaaaatccatacattttttaaaataaaactttattttagattcaatgggtatatgtgtatgtttgttacatgagtatattgtagggattgggcttctagtgtactcattacccaaatagtaaacattgtacctgatggatagtttttcaactctmaccccatcttttaccctccctgcttttggactaaacagtgtcttttatttacaactttacatccatgtgtacccattgtttagctcccagttataagtaagaacatacagtatttgattttctatttctgagttagttcacttaggataatggcctctggatgcttccatgttgctgcaaaggatattatttattattttttatagttttttaaatgtggtacatacgcagcagggaatataccacagcattcaatgctataaatgtaccacattttctttatccagtcaatcactgatggacacttaagttggttccatgactttgccatatgaatattgctgtgatgaacatataagtgcag

SEQ ID NO: 436797 - DNA, 453 bp, Homo sapiens
tcaattagttcagattttctacagagatgttcatattatctgctagcaaagccttatttcttgtttctcaatcagtatacatttttatttccttttcttattgcataagctaggattttcagtaaaatgttaaaaaggagtggtgagtgggaacatttttttctcatacctgatcttagtgagaaatcttgtaggttctcaccattaagcatgatgttagctgttaggtatttttgtagatattccttattaaattgaaaaagttcccttctattcctagcttcctgacagttttaatcataaagggtattgaattttgtcaaatattttttcttcatgtgttaatatgataatgtgattyttctttagcctactgatatgatataaattaaatatattaattgatttttaaaatgttaagccaatcttgcatacctgggatagataaatcct

SEQ ID NO: 436798 - DNA, 588 bp, Homo sapiens
aaacaatggaaatcaacaacataaattgagctgaaattcaaaccaaatcatacttcctgtactcatttcccagggcttctataacaaattaccacaaactaggtgacttcacaaaacagaaatttattctcttactattctagagcctagaagtttaaaatcaagctttctgcaatgctgtgttccttctgaagatgagggaagaactttcttcttctgtttctggtagctctaggcattccatggcttgtggtaggataactccaacctccgcttctgctttcacatagccttttcctcttctcgcttcatttctcctctctgtgtctcttaaaaggaatcttgacattgtatttagggcttatccagataatacagtatgatttaccttaagatctttaattttatttgcaaagatcctttttcaaraaaatatcacattcacagtttctaagaattaggacatggacatatctttttgggtgccaccactgaaatcaccatgttctcattaccagcaccttccttttattttgtcttttaaaagccccatccacattcatttggtgaatgcaaatgagcagaata

SEQ ID NO: 436799 - DNA, 553 bp, Homo sapiens
actattaaaatgtctatactacccaaagcgatctatatcttcaatgtaatccctatcatattccaatgacattccacatagaaatagaaaaaagaaamtaagattcatatggaactataaaagatcccaaatagccaaagcaattatgagaaccaaatttaaaacttgaaagtataataccacttgacttcaatatataatgcacagctacagcaaccaaaacatatatattgaagatatatttatgtattgacataaaagacacatagactaatggaaaaaaaatagcccagaaataattctacacttctacagcaactaatttttgacaaagctgtcaaaaacacactttggagaaagcacagtctttttaataaatggttctgagaaaattcaatgtccacatgcagaagaatgacaatggacccatatcattcaccatatacaaaaatcagctcaaaatggcttcaagagttaaatataagacattaaactattaaacaaactatttatagttaatgtctatttatagttaatttatgtttaatgtctt

SEQ ID NO: 436800 - DNA, 523 bp, Homo sapiens
cagtatgaattcttcatcatatatcataaaattaaattaaataggaatttagacacaccagagtaaattattttacctgagtcacccaaaatagtacccaaatcagactgacttgactttatttgaaagaaaaagttttgagttycaaaggttatataacaaccattaattgccattaatatagaaaagaaaagataacgatagatgtaaaaaggctgaaaaagtaaaatttaactgcacagttttcttgaatcaaaggaacatttttagtcatagagaatcaaaataaggacagcagaaccagatgaataataatacgataggatcaataatgagaattgaaatcattcaatgtgaagttgagcctaatttattattataaatatgaataaaactatgccattgtcaaaaataattctatttattgcataaatatagtagcatgatgagaattagtttggagtatattcttccatatgttagttacaaatgtctggaattcagaaaatctagtaaacccaaa

SEQ ID NO: 436801 - DNA, 531 bp, Homo sapiens
aggcaacaaaagcaaaagtagacacctgggactgtatcaatctaaaaaagctactggacatcaaaagaaacaaccaacagagtaaggatacaaattatagaatgagataaaatatttgcaaactacatatctggcaaacggttaatatccagaacgtataagaaactccaacaattcaatagcaaataataataacaatccgattagaaatgggcaaaaaaataaacatttytaaaagaacacatacaaatggccaacagacacgcagaaaaaaaattcagcctagctaatcattagggaaatccaaataaaaacaataaaatatcacttcattccagttagaatggctattacaaaaaagacaaataataaataaatgttggaaaggatgtggagcaaagggttcccttgtccacaggtggtgggaatgtaaattagtacattcctcaaaaaattgaaacaagaactaccatctgatccaacaatcccactgcggagtatatatctgaagaaaatgaaatcagtatgtag

SEQ ID NO: 436802 - DNA, 634 bp, Homo sapiens
ttggggctttgggtagtaacagttaaaatggaaaaaaaaaagaattgtatagctaggtctttcaatattgytttgtgttttcacatgtgaatagttatgttgagctgtagaagcaaagaatataagaaaagaaatggagactgacatccctggcagtgaaaaatgtctgctttagaagcaggcatgtggggaacatgggattttgcttttcaccaaggccctgctcttaaagggtaaaaggcagccatgaacctgcagggaaacgagctgccccttgtatatggatatgatcataaatgtcacatttgcaaatataagattcacaccattcctcccttttcatctgtcatttcaaattacatgatttcaaatgttagcgtacaaaagtaatctcattgtaaaaagagaaactcaaagcgatagttgacaataattctcctcttactccatatttctcatcaccattaaagaaaaaaacagctaacagttttgctgaaatagaaatatactttttttaaaaaaattatacatagcattttttcagagagatatagtgtaatttatttgacactttatgttgtatccgttttattggtattgtttttgttcttgtttcttttctttttctattaag

SEQ ID NO: 436803 - DNA, 634 bp, Homo sapiens
ttggggctttgggtagtaacagttaaaatggaaaaaaaaaagaattgtatagctaggtctttcaatattgctttgtgttttcacatgtgaatagttatgttgagctgtagaagcaaagaatataagaaaagaaatggagactgacatccctggcagtgaaaaatgtctgctttagaagcaggcatgtggggaacatgggattttgcttttcaccaaggccctgctcttaaagggtaaaaggcagccatgaacctgcagggaaacgagctgccccttgtatatggatatgatcataaatgtcacatttgcaaatataagattcacaccattcytcccttttcatctgtcatttcaaattacatgatttcaaatgttagcgtacaaaagtaatctcattgtaaaaagagaaactcaaagcgatagttgacaataattctcctcttactccatatttctcatcaccattaaagaaaaaaacagctaacagttttgctgaaatagaaatatactttttttaaaaaaattatacatagcattttttcagagagatatagtgtaatttatttgacactttatgttgtatccgttttattggtattgtttttgttcttgtttcttttctttttctattaag

SEQ ID NO: 436804 - DNA, 602 bp, Homo sapiens
tgatttggttactatagctttgtagtaaattgtgaagtcaggtaatatgacgccttcagcttttttctttttgctcagtattgatttggctttttgggggtctttcattccatatatatattaagacttttcttatatttctgtgaagaatgtcattggtatattgatagaawttgcatgaaatctgtaaatagctttggaatagtattgccattttaacagtattaattcttccaatctatgagtatgaaacattttctactgttttgtgtatcctcttcaatttctttcatcagagatttatagttttccttctacacatcattcacttctttggttagattgcttcttaggtatttcatatttttgtagctattataaataaaatagtttccatgatttagattttagattatttgctgttggcatatgtaaatgctactgattttcgcatgttgattttctgtcatgcaaatttactgaattggttatttgttttaacaggtttttttgctggactttttagcggtttccaggtataaaatcatgccatatgtgaacaaggataatttgacttcctccttttaaagttagatgtcctt

SEQ ID NO: 436805 - DNA, 602 bp, Homo sapiens
tgatttggttactatagctttgtagtaaattgtgaagtcaggtaatatgacgccttcagcttttttctttttgctcagtattgatttggctttttgggggtctttcattccatatatatattaagacttttcttatatttctgtgaagaatgtcattggtatattgatagaaattgcatgaaatctgtaaatagctttggaatagtattgccattttaacagtattaattcttccaatctatgagtatgaaacattttctactgttttgtgtatcctcttcaatttctttcatcagagatttatagttttccttctayacatcattcacttctttggttagattgcttcttaggtatttcatatttttgtagctattataaataaaatagtttccatgatttagattttagattatttgctgttggcatatgtaaatgctactgattttcgcatgttgattttctgtcatgcaaatttactgaattggttatttgttttaacaggtttttttgctggactttttagcggtttccaggtataaaatcatgccatatgtgaacaaggataatttgacttcctccttttaaagttagatgtcctt

SEQ ID NO: 436806 - DNA, 602 bp, Homo sapiens
tgatttggttactatagctttgtagtaaattgtgaagtcaggtaatatgacgccttcagcttttttctttttgctcagtattgatttggctttttgggggtctttcattccatatatatattaagacttttcttatatttctgtgaagaatgtcattggtatattgatagaaattgcatgaaatctgtaaatagctttggaatagtattgccattttaacagtattaattcttccaatctatgagtatgaaacattttctactgttttgtgtatcctcttcaatttctttcatcagagatttatagttttccttctacacatcattcacttctttggttagattgcttcttaggtatttcatatttttgtagctattataaataaaatagtttccatgatttagattttagattatttgctgttggcatatgtaaatgctactgattttcgcatgttgattttctgtcatgcaaatttactgaattggttatttgttttaacaggtttttttgctggactttttagyggtttccaggtataaaatcatgccatatgtgaacaaggataatttgacttcctccttttaaagttagatgtcctt

SEQ ID NO: 436807 - DNA, 573 bp, Homo sapiens
  misc_feature (1)...(573): n = A,T,C or G
nnnnnnnnnnnnnttcgtcaaaggcattcttataatatatacttgaaatccacgggttcttggaatctttcttccatcagaaaattacatttgtgcatagttgcattccttgtgttcaagctyctcatataatgccattcacatctttctgttcttttttaccccacttcttgttaagttcttggttccctgtgcaatataatgtatggatataaagatgctagaagtatgtccagaaacaacccaacaaagtaaatgcttatgagataaagggacagaaaactccatctaatttttacccctatgcctttgattatgttctttctgcttgtatgaactggttcagccctattaatagcaagcttcatacccatggatcctgcataatgactcctccaaatgacacagtttttatatttggctctcaggacatattttcagctccacctcttgttggctttctcagctctgctttttgttttatcattgtttgtaaatccattcactattaatattttttatctcatcccagtccaacaagatttaaagtttagcttgtatttgtggctgata

SEQ ID NO: 436808 - DNA, 520 bp, Homo sapiens
cacacgggtgtgggaacaacacttactggggttagtcgaagggaggggtgaggggaggtagagcatcaggaaaaacaaccaatggatactgggcttaatactaaggtgatgggttgatctgtgtagcaagccgccatagcacacatttgcctatgtaacaaacttgcacatcctgcacatgtaccctggaacttaaaagttgaaggaaaaaaaattaaaaaaaggacttccatataatccagcaatcccacttctgtgtagatatcccataaattgaaaccaagatctcaaagagatatctgcatctccctagtcactgcagcattattcacaacaagcaagctattaaraaaacccaaatgttcattaaatgttaaatagattttttttttacaatgtgttgtatccatgcatggactatgattcagccaaaaaaaaaaaagaaatcttttcatttgtgacaacatgaatttatagcattcaatgcatatattagataaacaagaaaaatataaaatcc

SEQ ID NO: 436809 - DNA, 509 bp, Homo sapiens
tctatgaagtgttacatgatcagggacagggaagttggttaatggaagttatatagtagctagatgtatccttgtcacacttcatctaaactgatacattgcaatggtccacactgctcagacctggcaattactgtccaattccaatctattccacactgccactataatgaaaaataattaggagcctgaaaatgagttttcacatgaaatggtttcagtgcttggacacaatcgcctttggcagatggctttgggtttgctttaatataataaagacagttaatcatctctaaagagtgcactgaatgaataaacttttaacactattttctamaatggaattcttatattgatcaaatgtttaatgctcaggggtggaagttgctttggctgaattgtttggtatgagcgcataaatcactgctaaataaatgcattagaaaagaagaaaattggttcaaattgattatctattattgatggaggaaaattaaaaagcttaacac

SEQ ID NO: 436810 - DNA, 595 bp, Homo sapiens
ttacctttttggagaataatcaggatagtgttttctatacctggcaactctactcacctgttcctgcaagattgcaatttgaagtcaagatataccctcacctggaggaggagtttaaacaataaatgacaattaatatcaaagtaaattatattagaatatgacgaaaaattgctggaaactctgtttacaatttcagctatgaaagaagagaaaattttaattttcacatataatataatgacattctaattaaaatgtccatggamaaatgaacagaattaatgaatgacatgtatgaggaatggcataactttcaaattaagtaggcatgcttgaaaatctaagatgcactattcagttgctgtgtgaccatgaacaacatgtaggaaaaaattacaacattccattgagttttctggaaatgtcaaatgctataatatatgtgcatagaaaatagaagaggttctatggcatagtaaatctaagcacattctggtggttattattactaacatactaattatcctgtactttggaaacattctctctgtggctatgcacttcctggaacttgatagagaaaataaggctc

SEQ ID NO: 436811 - DNA, 607 bp, Homo sapiens
cataactttcaaattaagtaggcatgcttgaaaatctaagatgcactattcagttgctgtgtgaccatgaacaacatgtaggaaaaaattacaacattccattgagttttctggaaatgtcaaatgctataatatatgtgcatagaaaatagaagaggttctatggcatagtaaatctaagcacattctggtggttattattactaacatactaattatcctgtactttggaaacattctctctgtggctatgyacttcctggaacttgatagagaaaataaggctcatctaataatttgtgcattatgttgacaaaaaaagaaaactgctgttatttatctccgaatgtgctaatatgcaaatatcaagttagggtcaactgactgtgactgcatggggaggtagcataaggtttaaatcagaggtttgtactgataaaacaacctagatgaaaaagaagacagataccaactttatttctgtagaataaattcaactaatgaaaataatataacacattatataaattagattgttaatttcaaatttcaaatataaaattggaatatattggtggaatgataaaaaagaaataattacttaaac

SEQ ID NO: 436812 - DNA, 576 bp, Homo sapiens
cctgatctcttaaatgtaaaaagtcttatttctttgatgattaacttatcttgaatattgccctctatggaactttcarttatcaatattacttattaataactttttcatctgtaataaattatattttacttgacatagcttcgtacacactagagactgggatttttgattaatctttctttctgtaaaatatttttatggcctttctgaactaattgtttcatatgatcctagactatacgtacactagcaaaagtctgctgaagaaatgaaatgctttctttttcagacagagctgattcaaacacatttgagagagtaggcattctaatttgatgcttatttttttaatgccatgtaagtgatggggtgaaataatttgcttcaggtcatactgaatgtggtgatagaaacagtcatgtaacttaaatatttaaaatatttttagaattttccattttatatatttctgtaataattgtatagctatgatcacatgcaccattatacgtatttcttctatatgtttgatgtcttagcatatttattttttaagtgaaaaatttccaattg

SEQ ID NO: 436813 - DNA, 526 bp, Homo sapiens
agaagacttgcctgcagacaggaagtgctgaaaacttgttcaagagaaatttgaatagattgaatgaagacaaattatgcagaaccaagggaagagaagagaaagtttcagattgatgaggcagcaactgaaggcagcaaagtttgttaaagtgtataatacaccattaaggtgtgtttaggaaagattgtctttggtgcgacacaaagattcttgagaaaagaagataaattacttaatttctgtgcaccttaacgttcttatctgtaaaatatggtgagtaataatagccamcacattcataaggttttggtgagaaataagtgaattaatatatttagatcacatagtaaagtgttcaataatgttatcagtaccacccacaaccatctgcaccatcctaaccaaaaccataatttcttggctttccaaaaaagtacgtggtaaaataaaagatgcctaaaacaaagaaatagatgtttatttctaacatctatttttatgctttttaacatgtttttgctcc

SEQ ID NO: 436814 - DNA, 526 bp, Homo sapiens
agaagacttgcctgcagacaggaagtgctgaaaacttgttcaagagaaatttgaatagattgaatgaagacaaattatgcagaaccaagggaagagaagagaaagtttcagattgatgaggcagcaactgaaggcagcaaagtttgttaaagtgtataatacaccattaaggtgtgtttaggaaagattgtctttggtgcgacacaaagattcttgagaaaagaagataaattacttaatttctgtgcaccttaacgttcttatctgtaaaatatggtgagtaataatagccaacacattcataaggttttggtgagaaataagtgaattaatatatttagatcacatagtaaagtgttcaataatgttatcagtaccacccacaaccatctgcaccatcctaaccaaaaccataatttyttggctttccaaaaaagtacgtggtaaaataaaagatgcctaaaacaaagaaatagatgtttatttctaacatctatttttatgctttttaacatgtttttgctcc

SEQ ID NO: 436815 - DNA, 574 bp, Homo sapiens
taatctatagtatcttctcgtctgacaatccccgtgttttccaaaaccttgtgcagaaagctcttaatggacatcataaaatgtttggagatttgataagttttctgaggactttagtattgcattaatgaaagttaattcagttctaatctgtgattcttggtggttagaacagggatttaataccagcgttaagagtcaatattagtagtaacggtcaaataacaccatcacaggaatagttttggagactttatttttttttcaacccaaattttktattaaaatgtaactttaataaaactaacacatgctactatgtttctgggactagtaacagacacactgtagacattagggacaaagctcctcccctcatgggctgcctaatggcttggcctggtttcatgctgcttttagtaaatgtggggctctccagcctgacttgaaaagtaaagaatataaaagtttctgtttatgctgcctatatggctttattatcaggccaaaggcataaagggaagcctcatctcttctaattagagtcaagcctagattacgaaagagctgcaga

SEQ ID NO: 436816 - DNA, 585 bp, Homo sapiens
cttcgcaatgcaatcacaagtattaatagcaaaatcgaccaagtggaggacagaatctcagagcttgaagactatctttctgaaataagacaggcagacaagaaaagagaaaaaagaataaagggaatgaacgaaaactccgagaaatataggactatgtaaagagaccaaatctacaactaattagggtacctgaaaaagacagggagaatgaaaccaatttggaaaacatacttcaggatatcatctagaactttcccaacctagcaagacaggccaacatttaaattcaggaaatgcagagaaccccagtgaactccatgaaaagatcatctcccaagactggtaataatcagattctctaaggtcaaaatgaaagaaaaaaattgaagagtagtcagagagaaagtccatgtcaccttcaaaggaaagttcatcagatatagtggacctctcagcagaaacyctacaagccagaagagattcgaggtcaacattcagcattcttaaagaaaaatatttgcaactgagaatttcatatccagcaaaactaagctttgtaagcaaaagagaaataggaccctt

SEQ ID NO: 436817 - DNA, 595 bp, Homo sapiens
atatagctgagaaacacactacaaaaacttcgcaatgcaatcacaagtattaatagcaaaatcgaccaagtggaggacagaatctcagagcttgaagactatctttctgaaataagacaggcagacaagaaaagagaaaaaagaataaagggaatgaacgaaaactccgagaaatataggactatgtaaagagaccaaatctacaactaattagggtacctgaaaaagacagggagaatgaaaccaatttggaaaacatacttcaggatatcatctagaactttcccaacctagcaagacaggccaacatttaaattcaggaaatgcagagaaccccagtgaactccatgaaaagatcatctcccaagactggtaataatcagattctctaaggtcaaaatgaaagaaaaaaattgaagagtagtcagagagaaagtccatgtcaccttcaaaggaaagttcatcagatatagtggacctctcagcagaaaccctacaagccagaagagattygaggtcaacattcagcattcttaaagaaaaatatttgcaactgagaatttcatatccagcaaaactaagctttgtaagcaaa

SEQ ID NO: 436818 - DNA, 633 bp, Homo sapiens
tactagtaaaaataataaatcgggagaaaagtagagaacgggtgaragaatgaaaactaacttttggacctgacaagtttgaggtgatactgagacaaccatgtgcagttacatattcatataagatctaaagcttgggagtttttggaatatttggtggacattttggtccatttttgaaaatcccagtttttagcaattaatgaaagtcaatatgtaagttgcaaagttggatgtgatactgttataagaaacatgctttttatttcatagtatatatataaggaaatagattatagcatgagttttaggtaagaaaattgataagtaagaatgtttgcattacagttgggcaaacacactccttcgatctcggctcctaataaataatgcagagactacttggcttttctaagaacattcatcaagagttaatgccttctccattactagtttttcttacttttccagggtctctaccgagagggtagatactttctcttcacaattgagctgtgcttttttctctttaggaacctacctaccagaattagcattcaatcctgggcttttcattgttcatgaatacacctactcccaaagatgggaaagctttaagagattacaatggtt

SEQ ID NO: 436819 - DNA, 574 bp, Homo sapiens
atgtatgtatccataacttataattcatataaagttaaaacacaccttaattgtgtgcacattgctcaagattttcaagcatattaggacaaacagaaggtggataataacttttttcagtgggtacaagaatgaatattgaaaataactatttttctttcaatcagtgcattgtattttgtaggacataataataatatacagtggagtcatgtttctctgctcgtcacttcacatatagaatcccaacataacaccacccagcaagcaatgttatgtttgtttaggcagcaatawaatatgtttcttgaagtttaaaaggcaacatattttgcatttgtacattcaattttaaatcaaaaataaagtttgagtgggaaaagattgaatatcagatcttgattattttttgtcactgggccaaagcttggaaatcatctcaagtgggcctttatttctacctgcagcctccaagtataattgaattgcttgtttaggagctctcacaccattcagtaaggggacgaaggcaacaactgacattataacctaccaggtatgcacaacttctcag

SEQ ID NO: 436820 - DNA, 604 bp, Homo sapiens
gttttattctcataggatatcatcagtatctttgtatatctgtctaaccatttcatgtckatattgtgtgatgaccacactatctctttctggttcaatgctcaataaactcttcttttcatgcccagatgttccttctctggcctttatcctcaaactgagtcaagtaaattttcctatatctatttttttaaaaaaattaaacaccaactgaactcttcatctatctgtttgctttctttccactcacttgcacatgtcaattcttatataggcaatgccatttgctctttcactgccaaaacatagctcaaagctttcatcacaaatatttgatgattgacccaattatgagcaatatctgacaatctgtgggcatatgagagtatgttagggaataagaagagtgacaagaaaggagagagagaaattgggcatgttatatccgaattcattaatctttatttcaacctaagtctgtaatctttgcgatatgtaccagtgaataaatcacacagatcttaaattaaattaaggactaacaccatgaagtaaaattaaggttgagaaaaataattttaaaaacatgaaaaatcatagaaag

SEQ ID NO: 436821 - DNA, 578 bp, Homo sapiens
atttgagtttgtgttctttaaagattatttgattttaatctcatatgctcagcatgaagccatcaaaataattgttaaacaacaaaaagtgcatatttcaggtctaatgtagaggaatgcttatctagacacacattctataaagcacagtgcctagcatagagttcaataatcatttgttgaattaataaatatgccacactaaataagttgcagaagaatattacaagtataaatagtgggcttcattaatgctcaaatcccgtaactttagagtcatgttgggtccattttaaatctctaatttctacttccaggataggctatacttttaaaagtatagtagagaggagactgttttgcttccacaaacaccatctgcctccgttttccttttcctctctaaaggcatttccttctgttattgcccttggcaaactggctgttcttttcttttaaattagtcctaactttaactgctggatgtaaaggattccacatgggtgactgtgaagctgctgggctctttytgtttgtcatcactgtatatctagattggtgtacatcacacttaaaag

SEQ ID NO: 436822 - DNA, 534 bp, Homo sapiens
  misc_feature (1)...(534): n = A,T,C or G
nnnnnnnnnnnatgaaaataggtgaaagtgtaaaactcactagtagaggtaaattcataacaaaattctgaatatgacagaactataatgtaggtatgtaaatctttcaaatttgtattatgaaggctaaaagtcaaaataataaaatataactatagctacaataagttgttaagaaaaatataacatacaaagatacaaattaaggcaaaaaaaaagttgtggacaaaatagtaaaaatttacagtatttttatgtgaccaaagttaagttgttgttggcttaaaatattctattttgtaactacaagattctttaagagccctattgcaaccacaaagaaagaaattgcagcagatgcatgaataagaaagagaaaggaatcaaagtttagcacaataaaaaaatcacaatggtaaaatacaagaggraaagaaaaaaataacagatctacaaaacatccaggcaaaaattaacaaaatagagaagtgcttatgtatcaataataaccttgaatgtaaatggattaattta

SEQ ID NO: 436823 - DNA, 569 bp, Homo sapiens
aaagaatacaaaacaaccagaaaacaaataacaaaatcgcaggagtaagtccttaatatccataataacattgaatgtaaatagactaaatcctcyaatcaaaaaacatcaactggctgaatggatgaaaaaaaataagacccattgatctgttgcctacaagaaagacatttcacccataaggacacacatacacaaaataaagggacggaaaaagatattccatgccaatggaaatcaaaaaaagagcgggtgtcactatacttacatcagacaaaatgatatcaagacaaaaactctaagaagagacaaagaaggtcactatataatgccaatggggtcaattcatcaagaagttataacaattttaagtatacatacaccaaacacaggggcaaccagatatttaaaagatatattattagagataaagagagggataggccccagtgtagtaacagatgaagactttcaacagctcactttcagcaatggacagatcttccagatagaaaattaacaacaacaacaaaaaaatcaaacttaatctgaaatattgaacaaattga

SEQ ID NO: 436824 - DNA, 554 bp, Homo sapiens
gtttaaaactccccaaaagtcatattcctcatggactcatcattatttgagtttggatgctcccttaaagctccattctcagggtttgttttatttcacctaaggcagattttattctatgcaaataattctattcccagagggttagtgttagtctaaacaatcactggtaattgtttaaaattgaagctccctggaatggaaactctagtccaaattcactggagctgatgagaaaatctacaggaaaaaaaagaaaatgagcttagatgtctacaaggggtgttgaaaaagttgtaacatatttatgggcacctagaaaagcataaaacatacaaagagcgttgcacatatctaggaaaaatactagaatgtcataagsttgcacttgtggctgaccatgattctttccacaaacaataagtgtagactaagatagagatataaaatttctgtataattgtagaatgtatgccccagtacaaacaaaactggggagacttattatgtcaagatatttaagaaaatatttatcccacctatttctatttact

SEQ ID NO: 436825 - DNA, 520 bp, Homo sapiens
ggaaaaatttttgtggacaattactctaatatgttttccaaatggcttgctctctctccctctttttctggtatgccaatgtgttataggtctagtctccttatgtaatcccataattctgagaggttttgttcatttttaattttttaaaattatttttgtctggctgacttgatacacggatcagtctttgagctttaagkttcttttctcagcttgatttattctgctgttaataacttgtgcttgtattatgaaatttttgtagtaattttttttagctctagaagatcagtttggttgtttcttaaaatttttttttttattttgcaactcttgtatcactttatgacattccttatatttcttaaattaggttttaattttctcctaagtatcttgatcttcattattatccagattctgaattctatgtctgtcattccagccattttagtctagttaagaaacatttctagggagctagtccagtcatttgaaggtaaaacaccctgggttt

SEQ ID NO: 436826 - DNA, 464 bp, Homo sapiens
atttattctttatttttgtctgactgatttagtttggaggactagtctctgagctctgacattctttcttcaactcagtctgttctgctgttaatacctgtgattgtattatgaagttcttgtagtatggttttcagctctattagataagtttggtctttcttaaaatgggcattttgtctttctgctcttatattgttttattctagtccttatatttcttggattgggyttgaattttttcgtgaatctcaataatcattgttcctatccatattctgaattacatttctggcattctagtcatttcagcctagctaggaaccatagctgggcaactagtgtggtcatttggaggaagggagacactctggctatttgagttaccagcgttctttcactgattctttctcatctgtgtgggctgatgttccttaactttggtggaatttgtgtacagtcag

SEQ ID NO: 436827 - DNA, 625 bp, Homo sapiens
aagcaatgtgaagacagaaaatgaagattaaaggagaaataaatagaatagagaacagtaaaaaaatatatacaaaaatcaataaaatcaaaagttggttctgcatcaaaatggagattctttagttaaacaagaaataaaaaagtttcaaattatcaaatcacagatgaaatagcaacattactaycaactttaccaaaataaaagagattataaggttatactgtgaacaattctataccaaaaaattagatattctatagaaaatggaaacatttctagaaagacataactaataaaattaactccaaaataggaaatacaaatagagccctataggaaatgagttagtaataaaaaaattattacaaaaattataaaccaatatggctccactggcaaattccatcaaacatttgaaaaagaatcaagagaaatacttcataaagaagaggagaaataatcattttctaagtcaccacaaatggaagaatacaaaccaataacctttgtgaatatagatgtaaaacaattcaataaaatacagcaaaccaaattcaacaatgtacaaaaaatacattagtaagtgggatttattctagaaatgtaaggtttgtttaacata

SEQ ID NO: 436828 - DNA, 576 bp, Homo sapiens
tttttgttaaatagcaggtcagtgcctcaagataaccttgttgtgctttgattcycaagttcaatttacagaaaaagccaattgtactcttttgaatgtagtcaatataagtttatttaacatggttaatttttataaactttccacaatttgttcagacctttagcttttaaataatcctttaaccatctaaactgaggcagaaatttacattcccatcccttcttataatcttttaccaaaaccacattttactcttcttacacactttgtatgtaaatttattttcagtagtctcagttacatattacagtgttaactctcagcaatgtttaattttggtggaaaacccggtaagttattttaattatgtattgggtgtggataaggtctgacgctttccagcatagttaggagagtggttaactccaaatttccccaggccttaccaaactgtaaagcaggcaagttgaacagttttcaaaagccaaaaaagcagtttatgatcttaaagcatttagcaaacctaatttggaccacacatctaaattttgaagacaattttattttaccaat

SEQ ID NO: 436829 - DNA, 596 bp, Homo sapiens
tcttcgtccttttatgtacttatttttgtacaaaaagagatgattggcattttaattttaaaatagcaatagcaaataaagagatccttcatctgttaaaaacaattttttccttttctgtgttttaattctgatagtttgcatttttatggtgtgagagcaaattttgaaaaggtactctatgaagcctccatartatttttcaataattttttatttgatggttgcttttctgcattatttcaaataaaaaatgaaaaataaaaatttcaaaagtagctttggatattaacttttgatatattagtaataaaatatttttattttacataattaaatttgcctcctgtttttcaataatttgaaccagacaggttgtttatttgttatgattacaccaaacatctatcaccttatttacataaagacacctcagatgtatattgcttggctgaggatgatggtaaaatggggatgctacagagtgggggaaatttgggcccacttataattaaacaacaatgaaactacatgcatcagtcagtaaaagcaggcatctacattatggagtgaaaattaaagagtcaaacacccaa

SEQ ID NO: 436830 - DNA, 613 bp, Homo sapiens
ctgactttaaaatgtcttacaaagctatagtaacaaaaataacatggtactagcataaaaacagaaatatataccaatggaacacagtagagagatcagatataaatccacacatttgtggccaggcgaatcttgacaaaggtgtcaaaaacacacaatgggggaaaggacagtttcttcaacaaatggtgttaggaaaactgtatatccacaggcagaagaacaaaaataaacccttatctcacaccttatacaaaaactgattcaaaataaatgaaagacttcaatgtaagtccaaaagcagttaaattactagacaaaagcctagagggtacactccattacattggtcttggcaaaaattttttatatgaccctaaaagcacaataaacaaaagtaaaaatagatamatgagattatataaaactaaaaagcttctgcacagcaagggacgacatcaaagaaatgaagataaaatctagagaatgagaaaaatatttgtaaatcatacatttataagaggttagtatccaaaagatataaagaactcaaacaacccaatagcaagaaaacaaataacccgattttttaaaatggtcaaaaatcttgagg

SEQ ID NO: 436831 - DNA, 593 bp, Homo sapiens
cgaacaatgagaacacatggacacaggaagggtaacatcacacactggggcctgttgtggggtgggggaagaggggagggatagcattaggagatatacgtaacgtaaatgacgagttaatgggtgcagcacaccaacatggcacatgtatacatatgtaacaaacccgcacgttgtgcacatgtaccctagaacttaaagtataataatttaaaaaaaagattatactttcctcactgaatgaayatgatatccttatcaaaaatcatttgaccatataggtaaagctttatttctgggctctctattctattctattgttttatttatctgttttacaccaataccacactgttttgaatactgtagctttataccaggccctgaaatcaggaaatgtgagtcctgtaggtctatttttttaaagattgttttggctattcaagatcccttgattttccatatgaatttttggataggtttttctatttctgcaaaacaaaatgtacttgggattttaataagaattccactgaatctgtaaatccctttgggtagtaatgatgtcttaacaagattgagtcttccaaccc

SEQ ID NO: 436832 - DNA, 593 bp, Homo sapiens
cgaacaatgagaacacatggacacaggaagggtaacatcacacactggggcctgttgtggggtgggggaagaggggagggatagcattaggagatatacgtaacgtaaatgacgagttaatgggtgcagcacaccaacatggcacatgtatacatatgtaacaaacccgcacgttgtgcacatgtaccctagaacttaaagtataataatttaaaaaaaagattatactttcctcactgaatgaacatgatatccttatcaaaaatcatttgaccatataggtaaagctttatttctgggctctctattctattctattgttttatttatctgttttacaccaataccacactgttttgaatactgtagctttataccaggccctgaaatcaggaaatgtgagtcctgtaggtctattyttttaaagattgttttggctattcaagatcccttgattttccatatgaatttttggataggtttttctatttctgcaaaacaaaatgtacttgggattttaataagaattccactgaatctgtaaatccctttgggtagtaatgatgtcttaacaagattgagtcttccaaccc

SEQ ID NO: 436833 - DNA, 593 bp, Homo sapiens
cgaacaatgagaacacatggacacaggaagggtaacatcacacactggggcctgttgtggggtgggggaagaggggagggatagcattaggagatatacgtaacgtaaatgacgagttaatgggtgcagcacaccaacatggcacatgtatacatatgtaacaaacccgcacgttgtgcacatgtaccctagaacttaaagtataataatttaaaaaaaagattatactttcctcactgaatgaacatgatatccttatcaaaaatcatttgaccatataggtaaagctttatttctgggctctctattctattctattgttttatttatctgttttacaccaataccacactgttttgaatactgtagctttataccaggccctgaaatcaggaaatgtgagtcctgtaggtctatttttttwaagattgttttggctattcaagatcccttgattttccatatgaatttttggataggtttttctatttctgcaaaacaaaatgtacttgggattttaataagaattccactgaatctgtaaatccctttgggtagtaatgatgtcttaacaagattgagtcttccaaccc

SEQ ID NO: 436834 - DNA, 614 bp, Homo sapiens
gtgtgactatgggaaaaagacagagaaaaatgtgaggatgctatgctgctggcattaaagatggaagaagccacagtcaaggaatgaaggtgactgttcagagctgcaaaagccaaagaaacagattattctcctggagaccccagaaggaacacagcttgaccacaacttgatctcagacttttgacccccagaactgcaaaagaaaaaaaatgtgtgttattttaagccactaaaattgtggtaacttgttacagcagtaataggaaatgaacacaactgagaatccctgaactgcaattgctctgacgcagatgaatgaatatccagaagatttctgaggattcctgccttggcccttgagcaagctttactataccatcaggctttttttactgaggcctcctaaccttttgaggtggcccacttgggtaagatttaaaacaatactaaggagactctctagctttatacccacccaaaacacaggcccactgmagatggaagtgaagtgactttttacctacaattttctgctctgtttccacagcctgattcagtgaccttcttgtccttcacctttctccagtgtgggtctctcactagtccactgc

SEQ ID NO: 436835 - DNA, 604 bp, Homo sapiens
gaaataatcctatgtcagaatagacgggccactgttttagatattacattttaaggtaacgttctaggtagttgctggatctattggctattttaattcttcaaatttgaagggtttccttctcactattatttttctgatagcttgttctgggcaccagacatctttcatacgctggaaggtkcccgggagaactctggagccaattacatcatcgtgctcccaggagtgttgcaacataaacttccatttacaaatgaggccacagagtcaccaagaggtcaaatggcacgtttagtcttcatggagcatctcagccaagtttaactttacacaggcgcccacattatcacacttaaagctttactcaagcccagaactccaaaactaaacacaaattacccaaaattcacaaaagatttcatggaattcactaggattactaacagaatacttgcaaagacttcagcaatttgttctgtaagaaaatacaaatgtatatggctatgagagatttattaatatatctaattatttaatcattatcccagaataaggtgttatacaaagatgacttctaagcttcaaaattttgtttttattt

SEQ ID NO: 436836 - DNA, 604 bp, Homo sapiens
gaaataatcctatgtcagaatagacgggccactgttttagatattacattttaaggtaacgttctaggtagttgctggatctattggctattttaattcttcaaatttgaagggtttccttctcactattatttttctgatagcttgttctgggcaccagacatctttcatacgctggaaggttcccgggagaactctggagccaattacatcatcgtgctcccaggagtgttgcaacataaacttccatttacaaatgaggccacagagtcaccaagaggtcaaatggcacgtttagtcttcatggagcatctcagccaagtttaactttacacaggcgcccacattatcacacttaaagctttactcaagcccagaactccaaaactaaacacaaattacccaaaattcacaaaagatttcatggaattcactaggattactaacagaatacttgcaaagacttcagcaatttgttctgtaagaaaatacaaatgtatatggctatgagagatttattaatatatctaattatttmatcattatcccagaataaggtgttatacaaagatgacttctaagcttcaaaattttgtttttattt

SEQ ID NO: 436837 - DNA, 532 bp, Homo sapiens
aaaaacttacatagcataaaaagaaaaaaatgccatggaagcataagaactcaattaaaaacaacatttttgtattattgtttataaaataaatatatacagttaattttttctgtacatgtaattaacaaaataaatgcaaatggttaaacttctgtgttaattcaatgaccattagagtcaaaaggaaaattcaaatttttgctgtattataaaacagattaaacatttcaatttaagtgtccaggaaatattttaaaaatatgtaatttattagactgtgacaagaatttcatgttattttcattaaatataatggcttatgttgtggggtggggggaggggggagcgatagcattaggagatatacctaatgtaaatgaggagttgatgggtacagcacaccaacatggcacatgtatacatatgtaactaacctgcacgttgtgaacatgtaccctaaaacttaaaatataatacaaaaaatacrgaatacagatgtcaaactcgaaaaaataaaataaataaataa

SEQ ID NO: 436838 - DNA, 269 bp, Homo sapiens
tactcattaggaaacccattatttaagagagaaagaggataatcagcacatcaggcaaatagtaaacttaaattgagagagacgggttggatactgtagaaccatataaattggtataaggtaatgccagatgtctgygttggatcataactttacttactttcatttcaatctccaccaccccaattttagattttctcaagctaacatatggaatttaaaatatctggttggtgaatcactgtcagtgcatttggtctatcccactt

SEQ ID NO: 436839 - DNA, 562 bp, Homo sapiens
tcctaatttgaccagtaaactacagtggcttttttgggttctcagtgatcaatgttaattaagacacaagaagtcttataacccatatgttcttgttattttattttccacagtgcaaagtcactgtacagttgtaagtccttttgaaagaagtcttgatgtaagagttacaatacacagaatataggcttatagcagcatatcaactcctctcctcaagaagattgcattagtctgttctcacactactataagatactacctgagactgggtaatttataaacaaagtaagtttaattgactcagaattccacatggctgggaaggcctcaggaaatttacaatcattgcagaagaggaagcaaacaccttctacacaagkcagcggggagagaagaagagcaaaggggaaagagccccttttgaaaccatcggatctcatgggaactaactcactgtcatgagaacagcatgggggaagccgtccccatgatccaatcacccctctccgtcaaatgtgggaattacaattcaagaggagatttgagtgggcaaagagag

SEQ ID NO: 436840 - DNA, 546 bp, Homo sapiens
cacatggctgggaaggcctcaggaaatttacaatcattgcagaagaggaagcaaacaccttctacacaagtcrgcggggagagaagaagagcaaaggggaaagagccccttttgaaaccatcggatctcatgggaactaactcactgtcatgagaacagcatgggggaagccgtccccatgatccaatcacccctctccgtcaaatgtgggaattacaattcaagaggagatttgagtgggcaaagagagcctaaccatatcaaggatctagccttatcttcaaacaaggggttctagatatctggacttgcttaagtctggaaacttggagagaggctgtgattcttaattgagatgactcatattagatttctagtctctagtcctggagttttacctgttttatacatcaagtaagatttttgtacacttcctaattacttcattcctaaggtcaccatgatatttaggatacaacattttaatgaaccctttattattgcccattcttgaaatttaatgcttttagttggtctctttagtcc

SEQ ID NO: 436841 - DNA, 546 bp, Homo sapiens
cacatggctgggaaggcctcaggaaatttacaatcattgcagaagaggaagcaaacaccttctacacaagtcagcggggagagaagaagagcaaaggggaaagagccccttttgaaaccatcggatctcatgggaactaactcactgtcatgagaacagcatgggggaagccgtccccatgatccaatcacccctctccgtcaaatgtgggaattacaattcaagaggagatttgagtgggcaaagagagcctaaccatatcaaggatctagccttatcttcaaacaaggggttctagatatctggacttgcttaagtctggaaacttggagagaggctgtgattcttaattgagatgastcatattagatttctagtctctagtcctggagttttacctgttttatacatcaagtaagatttttgtacacttcctaattacttcattcctaaggtcaccatgatatttaggatacaacattttaatgaaccctttattattgcccattcttgaaatttaatgcttttagttggtctctttagtcc

SEQ ID NO: 436842 - DNA, 546 bp, Homo sapiens
cacatggctgggaaggcctcaggaaatttacaatcattgcagaagaggaagcaaacaccttctacacaagtcagcggggagagaagaagagcaaaggggaaagagccccttttgaaaccatcggatctcatgggaactaactcactgtcatgagaacagcatgggggaagccgtccccatgatccaatcacccctctccgtcaaatgtgggaattacaattcaagaggagatttgagtgggcaaagagagcctaaccatatcaaggatctagccttatcttcaaacaaggggttctagatatctggacttgcttaagtctggaaacttggagagaggctgtgattcttaattgagatgactcatattagatttctagtctctagtcctggagttttacctgttttatacatcaagtaagatttttgtacacttcctaattacttcattcctaaggtcaccatgatatttaggatacaacattttaatgaaccctttrttattgcccattcttgaaatttaatgcttttagttggtctctttagtcc

SEQ ID NO: 436843 - DNA, 633 bp, Homo sapiens
tgcttcttgaatatttgaatctcctttctcatcaccaaaactcatgaacagttttaggtcaggtaggagagtgataattaaacatttctgaagcatcattacccaagcatgtggaaatttattaggttcagtgagtggaagaatactttttattgattcaaatgcatcaagccagatgcaattatatattctgaatgtttttcaatagatattttttcttggtgctagtcagagtaattactgagcaaagtaaagagttgccctcttatttcagtagagaaagccaagaagtttctgactcaccaacaaaactttaccaaaggctttaaaaatgtttaattatcaaaaattagttccacaatttatgtttagtcataagttttaagtcacaagtttaacatatttagtcayaagtttttttcttttatctaaatattgttttctttatgctcagataatatactccttaaaatgaatcgccggaggaagaaaatacttaaaatatggccaaagctacattctctacccaaatcccaaatttctgcaaatcatctcataaaaaataattttaaaaaactagcagagtgcacaatctttataaattactagttcactccttccttttggcagggg

SEQ ID NO: 436844 - DNA, 635 bp, Homo sapiens
ttccttttttcttcaacttttaagttcagatgtacatgtgcaggatgtgtagatttgttacataggtaaacatgtgccatggtggtttgctgcacagatcatcccatcacctaggattaagcccaacatccattagatattcttcctgatgctctcccttcccacacccccaccccaacaggccacagtgtgtgttgttccctgccttatgtccatgcactctgatcactcatctcccacttataagtgagaacatgctgtgtttgctttcctgttcctgcattaattttctaaggctaatggcttccaactctatccatgttcctgcaaagaatatgatctcattcctttctatggctgcatagtattccatggtgtatatgtaccgcattttctttattcagtctatcattgatggccacttacgttgattccatgtctttgctattgtgtatagtcctgcactgaacataygcatgcatgtatctttaaataaaattattcatattcctttgggtatataacccataatgggattgctggctcaaatggtatttctgcctctaggtctttgatgaattaccacactgtcttccagaatggttggactaatttacactcccaccaacagtgta

SEQ ID NO: 436845 - DNA, 594 bp, Homo sapiens
cttctttgtacctctggtagaattcaggtgtgaatccatttggtcctggcattttttatgttggtaggctattcattactgcctctatttcagaactctttattggtctattcagggattcaattttttcctggttcactcttggaagggtgtatgcatccaggaattgatccatttcttctagattttctagtttatstgcataatggcatttatagtattctctgacgtttgcatttctgtggggtccatggtgatattcccatcatcacttctgattgtgtttttatgattcttttctctttttttaatcagtctagctagtgatttatcctattaattttttcagaaaaacagctcctgaattaattgatcttttgaaggtcttttttgtgtctctaactccttcagttcagcccagatcttgattacttcttgtcttctgctgcctttgagtttttttttttgtcttggttctctagttctttcagttgagatgttagattgttaacttgagatctttctagctttttgatgtggacatttagtgctataaatttccctcttaatactaattagctgcatcccaaagat

SEQ ID NO: 436846 - DNA, 430 bp, Homo sapiens
tatgatttttctgaggattgaaaataaattatgccaagcaaaaatatacagataccttatgcataacaattccacacattatacataggtacatccctttcaaaaaggggagcataactccccaccatttaagtgtgaggtggcatagtgtgttccttccaaagaatacagtatagaaaaggggaggcagtagtatttgtattgaaatctgacagacactgtctcatgcaggtgctcaaggttagcatcaacagtgataagtcatgctgatagcatatatccttgaaatgatgtgctgaaaatggtgcttccatgttcctccccccaaaacccataatcctaatctaatcatgagacaaacatccgaaaaatttcarctgagggccattctataaaacaccttgccagtacccctcataattgtgaaagt

SEQ ID NO: 436847 - DNA, 588 bp, Homo sapiens
aactgcttttaatgtcaataaagaaattggttaaactgtcacttactgtgttttaggactaagaccattgtataataacatgagaacttcaagaaatttgatacagaaaattggataggaagtcttctgggattacttccaagatacagaccaaagcccacttgatcgttaaaagaagattcaaccttcctaacagtgtctttctgcctgtagccaacaattcaagatggttaagagtcagaaactcatgtaatttcttggattgcaaagacctttttttttaaaaaaaaaaaaaaaaaactcaatcyaagaatataactgcataatatttctgtcattgtaatttgataacctaatgcaattttcggaattcaaatagactggcagccaacctctctttaaaatatatttaggttttgaaatattttaaaatagaaattataattttcaatttttaagccagtcaaaatttacaattgttcaatctttaagtcaatttcagaatctgtgtcctaccagactaaaataaaaactagactgcctaattaacgtagtcactttataaacccctctatgtgtatcagtaat

SEQ ID NO: 436848 - DNA, 642 bp, Homo sapiens
atgaattgctctacataacaggttgtttcttttctcgtttttttattagggaaatttttattttttttaattttcttctaatattttatattttcttttgttgttgagagttaaattacttatttggggtgatgaaatttcaacttcatttmtggccaagagaaatgtaaatcacccagggatattagatttgagactagaagcagcaactaaaagagactgtctattctggtgaagagttgtgtacattttagcttcttaagaaatagttgcactgcattatgtgataatatttttcaactgtatataagagaaggtaggtgaatgtgcattctatgcaaacaatgtgtggaaagtagtagatgcctgttgtttttatatattttgaaatcctatttgtcacttttttatgagtaattcaatgtcgaatccaatgaacaaccacttcttaggggctgctgtgtgttgtctatctccaattcaccttctgtacattacaaatgaaggtacatgattcaaactagcaaggggctgtattactcccctgaccacactgaatatataagggtgagtatatggaccttggctttggatatatgggtgctgaaagacaggttgttttctatttctggtgtaacaaat

SEQ ID NO: 436849 - DNA, 632 bp, Homo sapiens
gtgataatatttttcaactgtatataagagaaggtaggtgaatgtgcattctatgcaaacaatgtgtggaaagtagtagatgcctgttgtttttatatattttgaaatcctatttgtcacttttttatgagtaattcaatgtcgaatccaatgaacaaccacttcttaggggctgctgtgtgttgtctatctccaattcaccttctgtacattacaaatgaaggtacatgattcaaactagcaaggggctgtattactcccctgaccacactgaatatataagggtgagtatatggaccttggctttggatatatgggtgctgaaagacaggttgttttctatttctggtgtaacaaattaccacaaatgtagtgaaaaaaacaacaaaaatttattttctttcggttctagagtttataagtctaaaaggaatctcatggggttaaaaacagtgtcaataaatctggttcttttccttgcattttcagcttctcaaggcagacaacaaccttggcttttgacggcatccctccaatttctgctttcattgtcacaacacmtatgccgcctgtgatgctgctgcctccctcttataaagacccttgagattacattgagcacacacacataa

SEQ ID NO: 436850 - DNA, 585 bp, Homo sapiens
ccatctgatttgaagatgaagatacactatgtacttttcggacaaatgtgatgactttaagatttcttgtcactaaattggggatrggggcttactaactttaaattatttaagtacttcagacaaaaactaataacttcatatctctcacaaagcaaacattctgtctatacacagaatttactagaacctgtgaggaaactgtaatcattatcatttccgttttacagaataaggcaatcagaacaactgactttcctaacatcacagacctagatcagaattcagaactctgtgtccaatcttaggtcccttccaatattacaacctgcaaactaatcaaaccggcatctgtttttacatttctttaaaaaaagcaaagcaattaaaaaaaggacccaattctgctcagagacgaatatgtatttcttaatttggatctaactttataacatggtgatcaacccaagtacactgtactcgactccgaaaatcctgctcgtcactttatattttgagtcctactagagactttgatgaattgcactcaagaagacgcggcccccactacgcagtggctacggg

SEQ ID NO: 436851 - DNA, 574 bp, Homo sapiens
actatgttcagaataacattacccagaatcaatcacttcaattttaaaagatcctggagatgactaactttatagaaggatttaagtcattttttcctcaaagctttttggaagtattggcactgcaaagacagtgagacactattggaaatgaggttatttggtgtagtatcaaaaatcacagcagagggcgtcattgtaatgtgctggatttttctttcttcatgaaagaatattttctccatggctctgcayctttctgttcactcattttgaaacttgcaatatgtttatctgaaaaaaagaaaacacttaaataccaattttactatattgagaatgtagggttcaatttcagccttaaaaatcattacttattttgtttggttcccatgaagttattgcaattctggcacctttctggacttccttccagagcagtgaggagttgtgtaacctcttttactttttcttgcaggttgtcaccttattaagaccattcaaattgttggcagatcattatgtgaacacattcattaattatgttactttattcaaagatcagaaaaataca

SEQ ID NO: 436852 - DNA, 630 bp, Homo sapiens
atgtctagcatcctgtttttttaaaaacagtagtcctaatgatctgtcagaaaagacatatttttgagataaaggagtttctaaataatgaattattgtttagtaccagcttttggaatccttacattttaaggaacttgaataatttaaatattagataatgtaactcctcataaaaacagtgtctagacaagggccaatattgcattgagattggatgaacattttattttgcatataattgttgtctataaaacaaaatactaataataatggctaccagttagacaatttagaacatgtcttactatttacctttgtggtaaaacattgcatgttttaatttttttctaataaaatattatacaataacaaaactggacaatattgtgaaaaacaaccatttcagggctcttgaaattcaccaaaggcatacaacaaattgagaagcaattattcacaaaaaaatgctgaatgtaagttagtaggagcagtgggagtctatggtattcttatctggggcttctcctatccatgtcttctgtaccccattcccaagrtggatctgttgagaagtttatgagagcactgctgaatatgaaaaccagcagcttccctgccaaaggggga

SEQ ID NO: 436853 - DNA, 617 bp, Homo sapiens
cctaggaaattcattctagggtctcaggagtctggaagaagctggagttcagttactataattatgargcaaagactagtttctagagttagttaagaaaatttcagagatttagttacagtataaactgcaggcaaggccaaaacacacgggaaacaagataagaacaagtcactcagcaaaactgcctcagtgtgagcagtgagtcattgagctccttctgattcccagagtcttaggaagctttctaaatggagtggttaaccggcctagtattgtgggctacaaggatataaagccaaagagttatcacaactccaaagcaggccaagagcctctcttgcaggaaaagtcccttcaataacaaaaatatatcatgttgatcaaaatgccgttgtgaacttttccttctgtggcaaacagcttgaattctatgacaccatcacccacgtccgtatgtctcagtgtttgctctgccaagatgtctgcttgccatttgctctgtctgtacaatgccaaacacccaggtgaaaagtgaaaaatttagtcagtgtttctaaacacccagatgtttggcaccaactatgtaaaatatctggatgcctgacagcatttct

SEQ ID NO: 436854 - DNA, 617 bp, Homo sapiens
cctaggaaattcattctagggtctcaggagtctggaagaagctggagttcagttactataattatgaggcaaagactagtttctagagttagttaagaaaatttcagagatttagttacagtataaactgcaggcaaggccaaaacacacgggaaacaagataagaacaagtcactcagcaaaactgcctcagtgtgagcagtgagtcattgagctccttctgattcccagagtcttaggaagctttctaaatggagtggttaaccggcctagtattgtgggctacaaggatataaagccaaagagttatcacaactccaaagcaggccaagagcctctcttgcaggaaaagtcccttcaataacaaaaatatatcatgttgatcaaaatgccgttgtgaacttttccttctgtggcaaacagcttgaattctatgacacyatcacccacgtccgtatgtctcagtgtttgctctgccaagatgtctgcttgccatttgctctgtctgtacaatgccaaacacccaggtgaaaagtgaaaaatttagtcagtgtttctaaacacccagatgtttggcaccaactatgtaaaatatctggatgcctgacagcatttct

SEQ ID NO: 436855 - DNA, 578 bp, Homo sapiens
ctgtgttgttttgcccagagggccccattggtttttctacagtggtttgagctggacgttttgttacttgcaactgaatctcctaattgatatgacatatcagtatggggcacacataccgtgttgatcatgggcatcattttataattatcatacagtctctttcacaccttctgattcttttcagtctcaggtaccttcccagtcatttagtacccagggttatcataagccttctttctacctgccctatcaaataaaattgttcaatatcaaaaaggactggctcttccctctatcaccaaataatgctttcttcttccttattgttttcagttatctgattctaaaaattaaaattagatcaactgattgcttataccatgggratttgcatcctaatcgggacagtttcaacccaatcaattcataattggtgaaaactttcagagtgtaacaaagaaaaacaattcatcaagtacagtggagaatgtttctgggctatatccttaccaggtaagcaaacagttctgcctgtgaggctgttccataggtggtcaactgttcagaagtatttt

SEQ ID NO: 436856 - DNA, 531 bp, Homo sapiens
agaagcagacaaatgtctatcatgcaaagttgctgttcttggcaacagcaataaaggtactagcagtataatgagttaaaaaatgaaaaggaggaggttggtaaaactccacaacacacataaattccttctcttcactctttcttttgctcctgaattgtttaggagtttttgttaaaaaaattattaatatttttgtattacccataaagataactaatagttggttactgacagatctgttttggcaraggattgccatctgaaaaatttactatagaatgtaatctatagttttcatgttatatttttgaataaccaacacttttccatatgaaaataaggtatcagaggtatacctacatcaataagagcaagttggctggaaaaaactgtcttcaccttttgttcagaatgcagagttttatgcaagagacctttctcctgctaataaaacctctcctaatgtagattttctctacaggttctttgcagcaaacaacctacctgatttgtacaaaagaacactgc

SEQ ID NO: 436857 - DNA, 533 bp, Homo sapiens
ctggaaatgttgttctatggatcacttttaaacaatacttccggggatcactgtctcctttgatatctttgatcaccattttcatgcattttgagctggccagcaagaaatgggctttttggatttgccataatagttttgtagcactgggtgggtgcaaatgcaaatgggaatgtgtagtaactatgcattctgaacagacacacattttgaggattaaaactgcacccggcagccctccaaagacttatcagccttctctatttgtaaggctctgaaaagtaactttaaatttttttttcttgtagctcccaagaattgaaggtgggagaagcccctcttgtctcagaatcttcatatgcaaataaacatgcctatatggtaccaagtaaggatgcataattacctcctccaacaracattatttaaattctattttctgattagcattagaattttagtataaaactgtaagtagcaatttgaggaagcaactttttatttcagagactgttggcaacaaaggtgagcta

SEQ ID NO: 436858 - DNA, 588 bp, Homo sapiens
ttgtgttaagataatacacgaataaaaggtgccccttcattttctttttttcctaagggaaaaacaaaatacaagagatagtaaagtgaaactttgctaaaaaatatagcacgaggttttcacattgctattattgggaaaaggctcaaaatccaccatacaaacagggctctctgtgtcattcaaagatactaagatttcaggatrtataccagaaaagttcctttatcgtttctctttgtttattgttattattgttattattattgtcatcatcgcagtcatcactattatcattatttttgtgattgtcctcatcctcatgatgattcgtggccaggaagactagctcataaccaagtagatgtagcaacagatccaaaggagtaatgtgtctaggtcttggggataaaatattttgttaaaataaataggttcccaggagaagggtctattctaggagtgggagcaaataggaatcctgcaaagaaggtcagattatgacaaattcactaatttgttgccattctgtgaggaatctcaggaaacaacctgtagacattaccctgtgggcccatccccacaaac

SEQ ID NO: 436859 - DNA, 533 bp, Homo sapiens
aatcataaacactttttggagaattttgttacaaaagtgctttcytcatatataagctatgtatttcttccttttggtaattctagtcattccaccctataaataaatatatagaaatccatagtagtcacaggcattagataatgatgtattactgtataagaaaagaatatcaggccaggcgcagtggctcatgcctgtaatcccagcactttgggaggccgaagcagatggattacttgaagtcgggagttcgagaccagcctgaccaacatggagaaatcctgtctctactaaaaatacaaaatattagctaagcatggtggctaatattttataatattttgtaatcccagctactcaggaggctgaggcaggagaatctcttgaacccgggaggcagaggttgcggtgaaccgagatcacgccattgtactccagcctgggcaacaagaatgaaactctgtctccaaaaaaaaaaaaaataaataataataataataataataataataacataaaacaatacgaaa

SEQ ID NO: 436860 - DNA, 533 bp, Homo sapiens
aatcataaacactttttggagaattttgttacaaaagtgctttcttcatatataagctatgtatttcttccttttggtaattctagtcattccaccctataaataaatatatagaaatccatagtagtcacaggcattagataatgatgtattactgtataagaaaagaatatcaggccaggcgcagtggctcatgcctgtaatcccagcactttgggaggccgaagcagatggattacttgaagtcgggagttcgagaccagcctgaccaacatggagaaatcctgtctctactaaaaatacaaaatattagctaarcatggtggctaatattttataatattttgtaatcccagctactcaggaggctgaggcaggagaatctcttgaacccgggaggcagaggttgcggtgaaccgagatcacgccattgtactccagcctgggcaacaagaatgaaactctgtctccaaaaaaaaaaaaaataaataataataataataataataataataacataaaacaatacgaaa

SEQ ID NO: 436861 - DNA, 533 bp, Homo sapiens
aatcataaacactttttggagaattttgttacaaaagtgctttcttcatatataagctatgtatttcttccttttggtaattctagtcattccaccctataaataaatatatagaaatccatagtagtcacaggcattagataatgatgtattactgtataagaaaagaatatcaggccaggcgcagtggctcatgcctgtaatcccagcactttgggaggccgaagcagatggattacttgaagtcgggagttcgagaccagcctgaccaacatggagaaatcctgtctctactaaaaatacaaaatattagctaagcatggtggctaatattttataatattttgtaatcccagctactcaggaggctgaggcaggagaatctcttgaacccgggaggcagaggttgcggtgaaccgagatcacgccattgtactccagcctgggcaacaagaatgaaactctgtctccaaaaaaaaaawaaataaataataataataataataataataataacataaaacaatacgaaa

SEQ ID NO: 436862 - DNA, 611 bp, Homo sapiens
aaggggtaagaagcaattgctcaaataaatgtgtatttttttctggacctgaaattgttgtattaagatgataatttgatgcatactataatttagggtttaaaggaagtgatggttttacagatgtacatgtattctctgaatttataaacacttaaacaatataggcaccacagtgatagaaaacaggtgtgctggtacaaaaatgcagccrtcacgtggcgtattgtcaagtactgaatagtcttttggacccttgaaatttcttttagtataagcaaactaaaactaaagttacaaaataaccatcacttgtcaaaaagagaaacgtaaattattctaggtgtattttatttttaagaatccacatcactgccactatctgaaaactactctatttatgcatcaatggaatatttgtccctttcctttgagacactattggctggcagcctctgcattggagaatggataaattggttttagctccactctggtggttagatatggaacttaggccagatagttatactgatgtctttaattatgtggtttttaaaattctttttttttttttgccctctgaggaattaatgtaattatcattcaca

SEQ ID NO: 436863 - DNA, 611 bp, Homo sapiens
aaggggtaagaagcaattgctcaaataaatgtgtatttttttctggacctgaaattgttgtattaagatgataatttgatgcatactataatttagggtttaaaggaagtgatggttttacagatgtacatgtattctctgaatttataaacacttaaacaatataggcaccacagtgatagaaaacaggtgtgctggtacaaaaatgcagccatcacgtggcgtattgtcaagtactgaatagtcttttggacccttgaaatttcttttagtataagcaaactaaaactaaagttacaaaataaccatcacttgtcaaaaagagaaacgtaaattattctaggtgtattttatttttaagaatccacatcactgccactatctgaaaactactctatttatgcatcaatggaatatttgtccctttcctttgagacactattggctggcagcctctgcattggagaatggataaattggttttagctccactctggtggttagatmtggaacttaggccagatagttatactgatgtctttaattatgtggtttttaaaattctttttttttttttgccctctgaggaattaatgtaattatcattcaca

SEQ ID NO: 436864 - DNA, 591 bp, Homo sapiens
gctgagagactggggacaaaaccattgtcttattgtattcagctttctcccttgttgattagacataacaataccttcctgataggattgggatgaagtttaaattgtttgttatgtgatagttcctgttatataggaaatgctcatgaatttagtttctttttcttctgtgttgtgaggtgggccatgtggtcaggcattgttttgcatttcattttctatggtatgtctgtgaatatgtattcgtacgcccacctcataataattgttccacagtatgaaggagattagtatatcatttatttcttgaatgaacagaccacaaacaatgaacttctgttttatgaataattctttgtacctcaacatctctgggagctgtaatgtagccagttgctattgctgggcgggggagaggacttttttctcattgctgccatctaagagaagtgtttctgcttttgtaaattctgtcatggaaaagccagcctttcataaactggcctgtaaaawtaagtacgatgtataatattatttccatgaaaaactgtattttaagtatctactgacataggacaaattttatgcaga

SEQ ID NO: 436865 - DNA, 611 bp, Homo sapiens
aaggacggaactcagcaaagattctcaacaggcaagaaggcatcaaccattcttaaaacaacaaaaacaaaaccacaagatgtttaaaaatggagaaaagaatagtactaaatcctgtatctgctgaatctagtagtatccaaactatcatatatttatatcacaggtaattattactattaaactatamccatttaaattagtattaaatcctatatctatacatctaaaattgtgaaaattatgtttaaatagttgacagtgtaaaaaaatataaccatcatatactgaagaacaggtggagtagagataggacataaaagttttctatttttctttcatggcagtgagtaaagaaatgagtcttcagctgaaatgtacagtttaaagaaataacttcaaaattatgatgttctctataatcttgtaggaggaacttttaggaattaatttcctgtgagaataaatggacatatgaaattcagtggctcttcttcagggtctcctgaatttctttctactacttcttagttcaagtaaaattaagtaacatatatatatttacatggaaagacatatgttaatcagtctttctctctattcatctagaa

SEQ ID NO: 436866 - DNA, 574 bp, Homo sapiens
tcattttttaagaaaatgttatagttcttcctttgccattttggatgcatagtgtattcagtaaatggttggttgaataatggcttctctaaagatacagtctggtgacatgaaataattggtatacttctaaatagaacattacctccttcaaaaaacaatgaatgaattagcatgtagatagatgcaagtttattatctctgtcctcattctcaaatgggtatttggtgcagatgtgtgcatttgattactttttgtttttttttttttttagacggagtcggagtcggagtacagtggcatratcttggctcactgtaacctctgtctcccaggttcaagcaattctcctgcctcagcctcccaagtagctgggattacaggcatgcgccaccacacctggctaacttttgtatttttagtagagatggggtttcaccatgttggccaggctggtctggaactcctgacctcaggtgaaccgtttgcctcggcctcccaaagtgctgggattacaggagtgagccactgcacctggctgcatttgattgttttataacatatataacatgt

SEQ ID NO: 436867 - DNA, 586 bp, Homo sapiens
gaagcatttaaataaacaattatccagcatctcacactggagtcaaattttacattgacatttcctgcaagggcaaatgggaggaaaaaagcccaaagctctcagtatatatttaaaccagcacggccacagagaaatgattggcaatggaacaatcagtattcggcaattttctcacaataaattggacaaaatcactgcaatttggtataaatgttcctttcaggaattatattttattctaaggttcttcttccccctttgcctccaacttagctgcatcctagaatttgtatatcaaatgaagctacaagaatcattattattttagatttatcaagggttgtgcccaactattatatgtaaacacataaatgagtaagtgaaacaaataatatgtaaactatgcaacgcacagtttggcactggtcaaactcctctgacacaggactacgttcattatatggaagactctgactagacaccatccttaatactcaagttttattcttaaaaacaaggaraaactgagtcataagttcttagtagggaggctcagtggtttcttggtaaggtaaaacgcttc

SEQ ID NO: 436868 - DNA, 603 bp, Homo sapiens
gctgtgtgtccttgagaaaattatttaacatctctgaatctgcctttttacattttttatttattttgttatttttttttgagatggagtttcgctcttgtcactgaggctggagtgcaatggcatgatctcggcttactgcaacctctacctcccgggttcaagtgattctcccacctcagcctcccgagtagctgggattacaggtgcctgccaccatgcccagctaattttttgtatttttagtacagacagggttttcaccatgttggccaggctggtctcgaactcctgaccttgggtgatctgcctgcctcggcctcccaagtactgggaatctgcctatttttaatgtataaaacaaaattagaaatctttttaaaaactatcttacttattacaaaactatggggatgaagttaaatactatatatgaaagtttctaaactgcaaagtactactctaacatgaaattagtttttttttaaagcatttcaawactgtaactcgttggaaatataactcaaagaactggagattttaaaaacaaaccatttttgcaggggtccttggcactacttcttgtcagaaaatctaaaatgg

SEQ ID NO: 436869 - DNA, 537 bp, Homo sapiens
gtacattgcatgttgtaaggaaaagtatggtttcatgaaatgttagttttatatgtctgtgtttctgtgtgtgaatatactggattgctgtgtaaactgtatttcttactgtggattgttatcattagtttgaaaacattattttagagaaataccaatttgtgtatagtatgtggaattaacccttcacctattgtcctggaagacccatccaagtcccagtattagcaactagagaaaaattatatgcatttagtatattatttatggaaataaatgtttctgaagtcctcagttctcagcaaaaacttgttcctgtacaagacattcctgggaaacctaaacaaagagaaaaggaaggatagaaggatctgctaacatatttaaagccttctgcctgttttcctgaataacrttctaccacctggttaagggtgtttatttatagtaaggagtacacgggggtgaaatgcccaagacccctcactttataaggtcttaactggcatcagctcgttgcttctgtacagtggagcc

SEQ ID NO: 436870 - DNA, 457 bp, Homo sapiens
ttttttttttgtgtgtgtgcatgacctgctgaatcataagattttttttttgaaatcctaagagatctttttattctccaaacattttctttcttaagtcagtatcagtatcctatttttctttcagaaagatctgaggattttttttttccactttaaagtattttaagtttttgcattgatctctttacagtgatctctgtttacttcttccccttccctactcactgcggtgygtttgcttaggtctcagtattttctgctggagattttcttcaaaggtttggtattcctaggtgttttacagcactgaagcactaaacagctttcctccctgcctcctctccaggcagtttcctgggttaggagtctgggtgttggagagtgtaaagatggcagaacccagctgtttctcccatctgtcctgcctcttgttcagcccagttacagaactagg

SEQ ID NO: 436871 - DNA, 556 bp, Homo sapiens
taagagggagtaaattatccaaaaggctctgggctgccttcatcaaatgaaggcatgcagtcaaataatgtgatggagaagtcggatccattcttcccacagttagtcctggttcctggatgcctcatgtagtgtgagcacttctcagtgcaaagtgcgagcctagttcagtgacastaattcttgttcagcaaggccactaactgcaaacacaagacaaaaccaaacttcatccttcactacagtaactataactttcctaccactaagagaatggcagtctgtatccgaaatatggaatggcaagatggtctcatggtcaccatggggtgcattcaaaatgtacttttaagggtaatttagactatgtatgatttcttccttgcactctgatccgaattgctattacattcctaaagtcagaggaaatatataaatctgtgtaccttttattttatgccagctgttatgagcacatggtcactgccagaattccttctactttgagtttctgacttccagtgggaagctgagagttagaccaggagcagcagtt

SEQ ID NO: 436872 - DNA, 620 bp, Homo sapiens
tctttttttcttatcaatttcataagcagaagtggtgccaataaaaatggtacctggtatcagcgtgtttcgtcatgtacagtgtatggaatgaggccctgtgagctacttggtataaaaatttagagggtaggtgtacccagcagatgttgtyttaacctgtaactttgaagatctgtgttaaaaatatcataaagcaacataaactgtgtgttttccccttttactgagcagtcgactttatagacatgctcatgtattcattctgtgtctgtatatctggacttcactcatttaagtaaagggcatgatggctctggccttcttttttagcagaaagcttaggggacacagaatcccagaatcgtgaacacagaaattatcatcacagaatcacagtcacctgactggctcctggcatcaattagtgagtctgtagatcactcaaggtcactcaacaccttctgtgtctccctgagactcaagagcatctgcaccctggaaagttttatcacagtttctctggggtccatcctacctcaggtcagctgagaacagctcatagatgcatagatgactgtcaggccctcagtgatgattgttatgaatgccctcatgac

SEQ ID NO: 436873 - DNA, 437 bp, Homo sapiens
cagaaggcaggatcaaagacacacaggagtcctttcttttgaaatgccacgtgccattgtctttcctcccttctttgcttckttttcttaccctctctttcaattgcagatgccaaaaaagatgccaacagacactacattaccctaatggctgctacccagaacctttttataggttgttcttaatttttttgttgttgttgttcaagcttttcctttcttttttttcttggtgtttgggccacgattttaaaatgacttttattatgggtatgtgttgccaaagctggctttttgtcaaataaaatgaatacgaacttaaaaaataaaagctggtatcttaaaatgtaagagagtaagactgtgaagcctaaaatgactggctgagaatgaaccagaaatgccatttgccaaacagttgtaactagaaatttgat

SEQ ID NO: 436874 - DNA, 501 bp, Homo sapiens
atacactgctttgaaaatgtcacctctatcatgtttctagtagcgcttagtgaatatgatcaagttctcgtggagtcagacaatgaggtaagtgttctttagacaggcaatggattatcaytttattatctgatacaagtaaatgatagaaagtagggtgtggggaatggagtgaacttacttctttgctttcttgaaatttgattttaggacttttaaaataaccaaaaataatcctgtggtaagctcttctgtcagatgtgtgagcaggtctttgtgttcaaatctaattagagcctatttgatactttttaacactatgcagaggttctgaaaatgaaaataacatggaaatcctaggctaatcatcagatcattttatagtcttcctcctacaggatagaactgggagtgttggagtgagtcatcctgttttgttttgttttcattttgtttaaatcattgtttgtgtgatgggtgtgtcccaaagagtactcaaaa

SEQ ID NO: 436875 - DNA, 501 bp, Homo sapiens
atacactgctttgaaaatgtcacctctatcatgtttctagtagcgcttagtgaatatgatcaagttctcgtggagtcagacaatgaggtaagtgttctttagacaggcaatggattatcattttattatctgatacaagtaaatgatagaaagtagggtgtggggaatggagtgaacttacttctttgctttcttgaaatttgattttaggacttttaaaataaccaaaaataatcctgtggtaagctcttctgtcagatgtgtgagcaggtctttgtgttcaaatctaattagagcctatttgatactttttaacactatgcagagsttctgaaaatgaaaataacatggaaatcctaggctaatcatcagatcattttatagtcttcctcctacaggatagaactgggagtgttggagtgagtcatcctgttttgttttgttttcattttgtttaaatcattgtttgtgtgatgggtgtgtcccaaagagtactcaaaa

SEQ ID NO: 436876 - DNA, 546 bp, Homo sapiens
acattgctcaaagttgttaacaatgaaaataattaaattatccaattgtaggaaatcgattaacaaattcagagtacacctaaaaaataaaatactatgcagatgctaaaaatggtaatatagatgtataattaatattggacagaaagtcgctcatgatatattgatgtaaataatttcaaaacagcacgtacagcatgcatctgatttttaaagacatatartacagatatttattataggtgcatacatatatgcctggaagattaattcagactgttagcagggattatttctgaatagttggggtaaaggtcattttgtttttatgttttatttattttacttacctgcatttttaaatttttacatgaacaatccattttacatggattaaagaaataatgattatcttaaaagataagaaatcttaaagattaaaatctaataaaataaaagtaagctgagctgggcatggtggctcaaacctgtaatgccagcacttttggaggccaaggcagaaagatgacttcaggctaggagttg

SEQ ID NO: 436877 - DNA, 606 bp, Homo sapiens
tgaaaatacgtgaacttgtctgtcagcaattcagcttcgattttcaagtgtccttgaaaagaactgatgagtttttacctattctcgtcattacatggggtggtgaaggagctacttctgtttctgagactactatacttagtatttataatgctaaaayaaagttcatgaaaaaccaatgatacccttataatgatagtttctatgacatggaatagggattataaacaaattatatgagtacagaatatttgaatattcttcggggagagttggtttacaagacaagcattggagccattattaggtgtagaaaaatgtgacagagtaattgcagctgcccattcattcgtaggactttctaatcattcttgggaacatccctattgaaaatggctagtctcaaatgactccaaatatgagttttttggctactatgttgaaaatcaatctagttgaatggatttgttatattatatttaattgatgataataatagatatggccgtctgttttaattgatttttcctcagttactctgtgtggagaattttgaccttttaaggttctattttgtggctaagagataaagaaagtcaagttgag

SEQ ID NO: 436878 - DNA, 477 bp, Homo sapiens
ttataggctgcattttgaagtttggattttatcctagaagcatttgagactagctacgaatttttctagagaatgatgatgttattagagtagtatttaggaaggtctcattcctgtcctctttayatttatatatagcaaatatggttgtttaccaattctggtaactaaattatcccaagaaggaataattcaaaattctgcataagctgattaaatttatttaacctttttaacacaaaagattgttttcctatacacccagtaagcgtaggaaaccgtgacttattaattacatcaatattcttctgatattttctccttatgcactgaggttggggctagttttttccactgaaatgaaaatggctcaaaattgaagaagcagagaaaacataatctttttatttcatttaatcagttttgtcctactaattagacagctaaatttcccctctagaatgtcaattttttgtt

SEQ ID NO: 436879 - DNA, 477 bp, Homo sapiens
ttataggctgcattttgaagtttggattttatcctagaagcatttgagactagctacgaatttttctagagaatgatgatgttattagagtagtatttaggaaggtctcattcctgtcctctttacatttatatatagcaaatatggttgtttaccaattctggtaactaaattatcccaagaaggaataattcaaaattctgcataagctgattamatttatttaacctttttaacacaaaagattgttttcctatacacccagtaagcgtaggaaaccgtgacttattaattacatcaatattcttctgatattttctccttatgcactgaggttggggctagttttttccactgaaatgaaaatggctcaaaattgaagaagcagagaaaacataatctttttatttcatttaatcagttttgtcctactaattagacagctaaatttcccctctagaatgtcaattttttgtt

SEQ ID NO: 436880 - DNA, 535 bp, Homo sapiens
atgggacctacatctttgccagtgctgtcrtatttgccagttcctggagcatctgcagtgattacactggagaaacatgtggaacacagcagcaaatgagtgactctatgatgcccaggtcctatttctgttgagaggtttacctggctaaggaaaatgtaaagtgctcactactaagacggtgaagaataaagtaagtaacactcgggcctcctggcacagtgggattaaggcaagccaggcaggctgcttgggcactgatgtataggtggtgccaaaacatccctggaggagacctgaaatgtgggtccagttaactctggtttatacacacaaccccttacataactggcaggaataaactgattctactccctttgaagtaaagagagtattctacaaaaaatgaaggaaacaaacctccctccctcagtttcacttagctaaggtgaccaaaggtgacaggtccctgcctgtcctggagagtcgctgtttcaccataattattaatacagcctcctctttctcaatgtgt

SEQ ID NO: 436881 - DNA, 558 bp, Homo sapiens
tccaggggagcagccctttccctcccctttccaatttctacaggctgcccacattccatggcttgtggtccccttccagcaagcaatcgaatcattctgacatctgcttctatggttacatctccttccctgactctcctgcctccctctttcccttataagaacccttgtgattacattgagtctacccagataatccaggataatctcctccatctcaatgtctttcacttaatcaaatctgcagaatccctyttgccatgaaaagtgacatatttacaggctcaggggattaggatatggacatctttgcaggggggccttattctgcctaccacacaccccctccaagtgcctcttgcatgacttaataagggagtcattaaacagctgctgtcttggagccagtcctgggctagactcatttaggacagcacagtaagagaggaagcctgctgtcagtggctggcctggtatccttgtctctgtagcgtggcatctacttcctcctgtccactgacctggcctgatgcccctacatgccctctgctttagcag

SEQ ID NO: 436882 - DNA, 481 bp, Homo sapiens
gatcaatataaactcccattcttcagagagctttccctgaatattctagtgagctcttaaccaatccctaagcctctataacctctagcacataattttatacaaatgatattctggtttagggtgtccactttaatgtgctgtgagtcttgtcaccccaactcccctttgatctccttgacaagatagcttctacctctagaacttacagactggtgaagaagatacttgctcttatgaaacagaactacagaagaatacagctggctcctttaaagatgagtaagagtggaraggagaggaggttgggaggttattctaaggaggggaacagcaaagacctagagggggatgagtaggtgagaattagtagagtggaagccacatgttggggaattaagggagattcaggggaatacagggatgggacattcattcattattcaaataacatcttttgagcatctgctatatgcaagac

SEQ ID NO: 436883 - DNA, 542 bp, Homo sapiens
actactcagcaataaaaaggagctaactactgatacatgttcctcatgtatatgaggaacaaggaagttgtgctgagaaaagccaacctcagaaatatacatatatactgcatgtgtccatttatgtaatattcatgaaatgacaattatagaatgtagaacaggttagtggtttccaggggttagaaatgttggggagagggrgtgggtgtggctataaagcggaagcagaaaggaaccttgtggtgatggcacagttaagtaccgtgattgtggtggtagttacacgaagctacacatgtaataaaatttcatgcagctatacacatacacacacaaatgagtacttgaataacgactgaactttgaataagctctgtagattgggccaatgttaatttccgattttgatcttgtaatatagtaaggcaagatgttaacattggaggaggctgggggatgggttcatgggaactgtctgcagagagaaagttacaaagttacctctttgtttctctctaaagagagaaagctacaaagtt

SEQ ID NO: 436884 - DNA, 606 bp, Homo sapiens
tgagggcttagttgagggagtggcttcttcccaggaaacagtataatacctgcctcctatagtgatgctctagaatgttcccccatcctcgcagccctcagaccatacttattgctccctttatcttctttttttaagtcttttaattccccaacctctgtaaaactcaagtattcaaaggcatcttttcactcaagaaggctgagactgtgcgtatttggacaagtcataatattgaacatttaactagtttttacaataaattccccatttttagaatattgatatacaggaataccaagaggataaaatgagacagccaatgtgaaagtattccaggtaatttttattctttatcatcatcttggaaagatatgagtggtgtaagttgattattgttatgaatggttagaattatatttcttggctatattgctatgtgtatgtctgtgtatgattttatttatttatttatctattatttattttgttgagacaaggtctcacactgttgcccaggcaggagggcagtagcagatcatagctcactgtaacctcaaactcctgggcttaagcaatcctccygcctcagcctcctgagtagct

SEQ ID NO: 436885 - DNA, 429 bp, Homo sapiens
tgccaaacaatgagaaaacttaacttggctcccagcccaaccacgttctttgatgggtagcagatgccacaaagagtggctggtgcagctaacacatacctggaacgacacctcctgtcctcttgttctgttccaaggttgtcaggctgggacgaaatcccaagaaagaaatgggcatgtggtcactaycatagcagactgccagttagggacatcagaatatatttctctgtcctcaagttaggaagtgagaggacaaacctggccttctgtgttgtttcagccactaattggttttgtcaattaggcaaaacataatttctctaagcctcttttctcatccacaggcattagcctagtcagcggttctcaaagtgtggtcctgaaccaacaacgacggcagcttcaccaagagacttcttagaaatg

SEQ ID NO: 436886 - DNA, 449 bp, Homo sapiens
tctctacaaaacgaacaaaacttagccagggctgggcatggtggctagcactttgggaggccgagacaggcagatcacttgaggtcaggagtttgagaccaggttcgccgaaatggtgaaaccctgtctctactaaaaatacaaaaaaaaattagccaggcatggagaatcatgcttgtaatcccagctactcaggaggctgaggcaggagaatcacttgaaccaggaaggcagtgagccgagagcgagccactgcactccagcyttggtgacagagtgagactccatctcaaaaaaaaaaaaaacatggtacaacaaaaaattagccaggcatagtggcgcatgcctgtagtcccagctcctcaggaggatcatgtgagccccacaggtcatagctacagtgaactgggatcacaccactatactccagcctgggcaacagagcaaga

SEQ ID NO: 436887 - DNA, 622 bp, Homo sapiens
ttagtatcaagtacttcagtgcctggcaaagcagatatttataatctaagattcccacggtcagtagggtaaaaactagggaaagttttttaatkttaaaaaggaaagaagattctctgtagagcttttattcaaaatatatgatgtttaaacataagataattttatactgggaaggggcaagtacaaaatcattccagctcatctcaaacaggaatccttttattttaaaatggagctgctcgtaaaagaccagtctgatgactggagtctgtattttcaaacagacccaagaaattcatctgcccactatttctaatgaaaatgactaatgttaccttggggttcaaaacaaagggctattagcataattatgcctactggtcttgagaatatgaaagaataggaaagagaagtaactgcacagaactataccggcaaatcttctggaacgtcccaaataccaagttatcccaaaagtcagttcctgtctagatcacccatgattaggggcttgatatgacagcaatgtacttttaaaacaagacaacatacaaacaaaaaatcaaagacacaaaaccaaaacacggtaaagaaaattttcagcaatgagaataaatac

SEQ ID NO: 436888 - DNA, 622 bp, Homo sapiens
ttagtatcaagtacttcagtgcctggcaaagcagatatttataatctaagattcccacggtcagtagggtaaaaactagggaaagttttttaattttaaaaaggaaagaagattctctgtagagcttttattcaaaatatatgatgtttaaacataagataattttatactgggaaggggcaagtacaaaatcattccagctcatctcaaacaggaatccttttattttaaaatggagctgctcgtaaaagaccagtctgatgactggagtctgtattttcaaacagacccaagaaattcatctgcccactatttctaatgaaaatgactaatgttaccttggggttcaaaacaaagggctaktagcataattatgcctactggtcttgagaatatgaaagaataggaaagagaagtaactgcacagaactataccggcaaatcttctggaacgtcccaaataccaagttatcccaaaagtcagttcctgtctagatcacccatgattaggggcttgatatgacagcaatgtacttttaaaacaagacaacatacaaacaaaaaatcaaagacacaaaaccaaaacacggtaaagaaaattttcagcaatgagaataaatac

SEQ ID NO: 436889 - DNA, 575 bp, Homo sapiens
tcttttcccttttcaatatattgattatcagaattttgttcatgttataaatagaaacctccccagattgccttttacactttttagataagatgggttcttattttaaatgctgccacgaaatattttgctcagtactcatatataaaaagaaaattagttgctatatactgtcatagctttgtggcatacataaaatagaaaaaacacgttttacatgaatgctgttaggaaggatatcatcatttgatcttcaaacttgccgcttctctcaggagagttcagcaatatttctattggaattaaggaatggggtttgatttttatgaatggtttaccttcagatatttcagrgagcagaataagcatacatattgaaaagaccaaagtggcacaaggctgcaaaatattaaaggtgccaggtgcttttaattaacaaatgaggactatctcgagtaaatcagataacttggattaagttctatgatatttcaaaatgtttttcgtctttttcagttttgtgtggtttgtgcttattatattaagtattcatttttagcatttgtgatcagatt

SEQ ID NO: 436890 - DNA, 492 bp, Homo sapiens
ggatggtttttatgtcaattcaagtaaaagtggttgcccctaaaataaccacatctgtaataaagaaagcttgtctgatgatacatgcagaagatgagaaaagtaagtggaaaatgaatataaaattataatgtgtcaccttgctgacatggattacaccaacaagcatagtaattctgctaagattacataccaataattagctttccagtgtgggactgataatacatagttccattaacgttaactcaagattattttagacaaataactgtaaacgcctgctcagattcagccataaacaggatactagcaagttcttactattcatcttttaatttggtagaacttactaaaataaccttttctcttaaatggcacatccaaaaaccctcacagaaaaaaatrtttaaaagtatgtaatccccagtgagattcaaaatatttaataaccaaacagaacaaatgcaccaaccaatcacaataaacaca

SEQ ID NO: 436891 - DNA, 548 bp, Homo sapiens
ttttcattgcccagtggtgtcaccgagggtacatgatgcccacatcaccattaatcacactagccttgcctggttctccacaggtgctgggatgcagaagatgggctgggactcccaatgtgaaagctaatttagggacagtttataacatagaaagaatcagtccccccaagatgttcaggaagtgttctagtagtagccaaatgtgtacatagaattagcttccactaatctcatctatttctattcttatggtcttttatataagggggctttttgccccttcttgcacctggccttcattaggaccatccaagttcattccaatagtgctttagtaattctgagtctccaagtaaagaagcctgactcgcaacccctcttttcccagaaagctccttggttttaggaaaatctgcccatctctcaggctccttgtggtagacagcattctttgctcacagtcctttgtccctgcyttcctttgctatgtgtggaatatatctcctcatccttaaggatgctgagcttggccataacttgttttg

SEQ ID NO: 436892 - DNA, 602 bp, Homo sapiens
agaatacttattgcagtaatacctacataacattgtactggggtttctaaccattgtaataaagcaataaggcataaagagctgagaagagaagtaaaactatctttatttgtatacagtgtgattgtttacatagaaaatccaaattaatgtatgaaataattaccaagactaacaaatgaggactaataaccttagcaagcttacaggatacaaagttaatatttagtactaatatgtgaatttagcaaggttagaagatataaggttaatatgcagaaatcaatgtttttatatactagtagcaaaaaatagaaaattaaatttaaaaaattatttacaatagcrtagaaaaacacaaaatatttcatagtaaattgaacaagatgtgaaagacctctacactgaaaattagaaagcactgctgaacaaaattaaataaaccaaaataaataaaaagatatactatgttgatggattggaagacttaatattgttaaatgtcaaattaccctacttgatctataaattcaactcaatctcaattaatacttgtgatgattgattttatgtgtaagcttgacttggttaagagataccct

SEQ ID NO: 436893 - DNA, 608 bp, Homo sapiens
tactccttgttgtgtttagaagactgtagtcagtttttttcccaccctggaaggtagctgcctgacacagttggcatgctgccaagcctctttttaggttcttaataaagaaggctttctctgttctcttgcctcctggttaccccgaaatttaggcacatatttcagtgacagtttcctccaagacagatagtttttactggagacattctagatccctagcactaaaatccttaacataaattctttggtttcactccttataccaaaatgggtcatctgtagtagaaagacatttcactctccaaagttgagattctcttccttcagaatacagtaaacacacttgataaaaacaaaactgtttttaaacaagcttgtacaacttctctcaaatttagtttcccaattatgttccaaacattcgaaattcaattaaaagtttcttttcttcaaagaccatttcccaaatgattcaaagagcctttttccatatttaattctatgaatacaccaacawgcattagtattagtgttgtctgctttaattgataagctccctgaagaaagaaaaacattctgtttaatttacatattctttatttagg

SEQ ID NO: 436894 - DNA, 538 bp, Homo sapiens
ttaatttctgaaaatggagaacaatataataaaatgcctgggaaacctgaattatttayggtttaataattttgagaggtccttcaataagaagatgcatttaatctgttttattttagatatttgtccaggctctataacatacatatttattaagcataaatttattgtgaagtatcctctagagcagaatttattcaaacatgggactcaaggtattacttctttgttaccacacatttttagttttgcttgagggaagtagagttgaatacatacctaatattttgaactgatagagtgctttggagaatgcagagctttcctgattttacattctggatttaaagggttctaaatacaaaccttaataacactcctggacatcagcataagtaagataaagtgagtctttatttagtaactgaagccccatcatttgggtttgagcagcactccgccagtgaccttctgatatactatagtttatttttaaatgtacaatgtgacattagatttaaaattaaaactgtgattg

SEQ ID NO: 436895 - DNA, 448 bp, Homo sapiens
tattcaaacatgggactcaaggtattacttctttgttaccacacatttttagttttgcttgagggaagtagagttgaatacatacctaatattttgaactgatagagtgctttggagaatgcagagctttcctgattttacattctggatttaaagggttctaaatacaaaccttaataacactcctggacatcagcataagtaagataaagtgagtctttatttagtaactgaagccccatcatttgggtttgagcagcactcygccagtgaccttctgatatactatagtttatttttaaatgtacaatgtgacattagatttaaaattaaaactgtgattgcattaccctatatattttcatacagcggaaacataaagaggaacttgctcaccatgagagatatccaaaggtgaacactgttacaatgttccagctgtcagagg

SEQ ID NO: 436896 - DNA, 595 bp, Homo sapiens
agtctggggcaggagcaaggtgtaaaaaacaattggagattaatagtcaagagttgatatgtcggccaggcatggtggctcacacctgtaatcccagcactttgggaggctgaggcaggtggatcatgaggtccggagttcaagaccagcatgaccaacatggtgaaaccctgtctctactaaaaaatacaaaaattagctggacrtggtggtgcacacctgtaatcccagctactcaggaggctgaggcaggagaatcgcttgaatccaggaggtggaggttgcagtgagccgagattgcaccattgcactccagcctgggcaaaagagcaagactctgtctcaaaaaaaaaaaaaaaagagctgacatgtcagtctatgatcatcaaagaccaacgtttctttcatcctgctgcttcaccacccactgctttcttctagataaccctagatggttgctcgagttccagccattatgtcatgcatcccaactagtgggaggaagaataaggaggggaaatgtgcacccataccttcttaaggaaataatcttttgggtaataaacagtatactcaaatgaggtaagtgaacaga

SEQ ID NO: 436897 - DNA, 595 bp, Homo sapiens
agtctggggcaggagcaaggtgtaaaaaacaattggagattaatagtcaagagttgatatgtcggccaggcatggtggctcacacctgtaatcccagcactttgggaggctgaggcaggtggatcatgaggtccggagttcaagaccagcatgaccaacatggtgaaaccctgtctctactaaaaaatacaaaaattagctggacgtggtggtgcacacctgtaatcccagctactcaggaggctgaggcaggagaatcgcttgaatccaggaggtggaggttgcagtgagccgagattgcaccattgcactccagcctgggcaaaagagcaagactctgtctcaaaaaaaaaaaaaaaagagctgayatgtcagtctatgatcatcaaagaccaacgtttctttcatcctgctgcttcaccacccactgctttcttctagataaccctagatggttgctcgagttccagccattatgtcatgcatcccaactagtgggaggaagaataaggaggggaaatgtgcacccataccttcttaaggaaataatcttttgggtaataaacagtatactcaaatgaggtaagtgaacaga

SEQ ID NO: 436898 - DNA, 634 bp, Homo sapiens
ttacatgttaagtcacatggctatttggaaaatgtaatctgtctaattggctctatgactgctagacatcagagttctcattatcaagaaagaaggtcagaatggttccaaatggcagttatcaatctctgcaatgtaggccatttcctgatatggaactatcatggtacatttatctatctgttgtctttaaataaatcagcatattttaatagtgactgtttactattgtcccatagttaaaatcatgygtactattagacattggttactaaactgtcctgcccttgaatcaatcctttattgattgattcaagggaggggtgaaatgcataaaaaaccattcccaactgagtgaaggatgctctttcatgtacctaaaagagacctccctccatctgtctcctggtcagcagagctgcttttccaatgagccagtgagtttaatgttcctactgccatttatcatctttattcagtcagggtttgcatgtggttcaatggttatagaacgtagaattcctcccatacatcaccaattttctgccctccatgctgactcacaagtgttccatttagtgctccaattcttcttcttagaccatttaaagggagtctggctcacatctttttc

SEQ ID NO: 436899 - DNA, 634 bp, Homo sapiens
ttacatgttaagtcacatggctatttggaaaatgtaatctgtctaattggctctatgactgctagacatcagagttctcattatcaagaaagaaggtcagaatggttccaaatggcagttatcaatctctgcaatgtaggccatttcctgatatggaactatcatggtacatttatctatctgttgtctttaaataaatcagcatattttaatagtgactgtttactattgtcccatagttaaaatcatgcgtactattagacattggttactaaactgtcctgcccttgaatcaatcctttattgattgattcaagggaggggtgaaatgcataaaaaaccattcccaactgagtgaaggatgctctttcatgtacctaaaagagacctccctccatctgtctcctggtcagcagagctgcttttccaatgagccagtgagtttaatgttcctactgccatttatcatctttattcagtcaggktttgcatgtggttcaatggttatagaacgtagaattcctcccatacatcaccaattttctgccctccatgctgactcacaagtgttccatttagtgctccaattcttcttcttagaccatttaaagggagtctggctcacatctttttc

SEQ ID NO: 436900 - DNA, 601 bp, Homo sapiens
tttttttggacattgcttttgtggttgtggtttggtgtttcttttttggttgttgtttttttttctttttttttttttgactctcttttgtctgtacctcattgctgcccactttcttccttacctttctgatgtatgtattctttctttagatgataacagcatccatcaggtattattattgttattgctattattattattagtcttttaggccaytttcatttccttaaagtactctgaagcaccttacaactcaaagcgtggtctggggaccagcagcatgagtgtcacctagaagcttgttggaaaggcagaatgtcagccccactccaggtctactgaatcagcttgctcattttaataaggttttcagggatttgagtgcacattaaagtttagaatgtacttttctacctcatgctctccatccctacctctcattccttttctcttctacttttgcctttacaactgggttaactccaattcagtaaggagtgtaatctctagtacaatctcttctctacactggcccactatgttttatgttttaggtctcaaaggataatattcatttcaaatttttagaggcaacttc

SEQ ID NO: 436901 - DNA, 601 bp, Homo sapiens
tttttttggacattgcttttgtggttgtggtttggtgtttcttttttggttgttgtttttttttctttttttttttttgactctcttttgtctgtacctcattgctgcccactttcttccttacctttctgatgtatgtattctttctttagatgataacagcatccatcaggtattattattgttattgctattattattattagtcttttaggccattttcatttccttaaagtactctgaagcaccttacaactcaaagcgtggtctggggaccagcagcatgagtgtcacctagaagcttgttggaaaggcagaatgtcagccccactccaggtctactgaatcagcttgctcattttaataaggttttcagggatttgagtgcacattaaagtttagaatgtacttttctacctcatgctctccatccctacctctcattccttttctcttctacttttgcctttacaactgggttaactccaattcagtaaggagtgtaatctctagtacaatctcttctctacactggcccactatgttttatgttttaggtctcaaagrataatattcatttcaaatttttagaggcaacttc

SEQ ID NO: 436902 - DNA, 368 bp, Homo sapiens
actagaagatattcatggaagtagttagattttttttaaatccagcaagagccaaaatgcatttagctcatctgacccctctaaattgtttacaatatrtttaagattgaaagcaaatagttttccataactttattctaatcaccacatcatggaacttgctgtattgaggtttgcgtgtagctcccacaatataatttttacatatgtatgaaaacaagaacaaaccactttgggggaaaagctggccaagtttaatcttatttcatatttggaatgatgtctcattcagggaatataaacttacttaacaatgctgtttctccataaagatagcttcacaaggaatcacataataaaagcccaaa

SEQ ID NO: 436903 - DNA, 368 bp, Homo sapiens
actagaagatattcatggaagtagttagattttttttaaatccagcaagagccaaaatgcatttagctcatctgacccctctaaattgtttacaatatgtttaagattgaaagcaaatagttttccataactttattctaatcaccacatcatggaacttgctgtattgaggtttgcrtgtagctcccacaatataatttttacatatgtatgaaaacaagaacaaaccactttgggggaaaagctggccaagtttaatcttatttcatatttggaatgatgtctcattcagggaatataaacttacttaacaatgctgtttctccataaagatagcttcacaaggaatcacataataaaagcccaaa

SEQ ID NO: 436904 - DNA, 578 bp, Homo sapiens
cagtaaagccctgctccctctgaaggctttggagaagcatccttccttggctcttcctagcttcaggtgatggccagcaattcttggtgttccttagcttgtagctgcagcactccaatttctgcctgtgtcttgacatggcctttttttcccctctgtgtgtgtttccactatatctctgtgtctcatcttataagcacaccagtgactggatttatagtcatccagtattacctcatctgcaagttgcatctgcaagtatcctattaccaaaaaaggtcaaatatcaaggttccaggcagatataaatttgggggcacmctactcagtacccaatttaatgtcatgcaataagcacttcctttctcctttacctgtagattccacaccagccccaggctcccagctccattgaatctgtggtcaagaacagacatgggagttaggtttgcacactgcctgtctggaccctgctattaaaatccagcttcctctggtacttcagctttatctttccagagaggcattcaccctacaggctgtgggaccatgttttggcacagtgttgaaaccactta

SEQ ID NO: 436905 - DNA, 618 bp, Homo sapiens
gaccatgttttggcacagtgttgaaaccacttaccttggcagtaatgaggttaaaacctctctgagtagctagatatccagacagggcacatcaactctgaggcataatctagtttatccttttatgaagcacttcagagaatgtggccagatttgcttaacaatgctttaaatgtttctgtggtactagtaaagaaagaaccaaatttgggagagtcagtatgacttattgttatctttctgtgtttgtgctgccttgtatgcagatttatgaaactagattgaactctgaggcaaagccagaaagaaaaaaactagaaaaaaaagcaaaggaaattatatcttgctgtattggcccctgaatggaaaagtggaaataaatcaaagttttctaaattaatttacaaatcaaaaatagaagatcaatgcccttagcatttatttatatatattgatccacctcctatatatatgaatgtggctgcaaatgtctagctgctgccytgaggttcctttaccactgagtatcaacatagcatggcgtggggcctatattgttgatattttgtgttgatggctgctttggcaattcattgggaaggctgtggtgcccaaaat

SEQ ID NO: 436906 - DNA, 522 bp, Homo sapiens
ttcatcattaccaactcttaataggcagttttcatattgatgtccataagcttcttgacactttgcaacaccattttcttccttaaactctttcctcctttgattccaggattctactctctgcagaatcccaaacccaatttctgactggtctttttcaaaagattcctttgctgttatattttcctctgtccacctttaaagaagagatttttgaaagatttccatcaccctaccctcactgtccctcactctacatacttttcctatgggatcacatccactgccatgattctaactaatgccaatattttgatggttctcaaatctctctctaacctaaatgtgtatcacaatacaaggcttacatgtccatcagcataatgggtatcttcatctggcaaatcaacgaaatatggcaaaagtctcatgaawgtattatgttccttctaaccacaatgctcttctctgccattttcaccagtcaaactccttttctcccttcaaaattcactttaatgt

SEQ ID NO: 436907 - DNA, 522 bp, Homo sapiens
ttcatcattaccaactcttaataggcagttttcatattgatgtccataagcttcttgacactttgcaacaccattttcttccttaaactctttcctcctttgattccaggattctactctctgcagaatcccaaacccaatttctgactggtctttttcaaaagattcctttgctgttatattttcctctgtccacctttaaagaagagatttttgaaagatttccatcaccctaccctcactgtccctcactctacatacttttcctatgggatcacatccactgccatgattctaactaatgccaatattttgatggttctcaaatctctctctaacctaaatgtgtatcacaatacaaggcttacatgtccatcagcataatgggtatcttcatctggcaaatcaacgaaatatggcaaaagtctcatgaatgtrttatgttccttctaaccacaatgctcttctctgccattttcaccagtcaaactccttttctcccttcaaaattcactttaatgt

SEQ ID NO: 436908 - DNA, 539 bp, Homo sapiens
agccacgtgtacattaaacattaaatgaataaattactataatagagtacgagtacattgagtgaatatacattaaaaattctgctatatatggtttatactagaaatatgaaaacttaagatgattgaaagtaaaacaatagaaaaagatacatcaggcagatactgactacaagaagggaggaggaagtcaacacataaattttagacaaaatagaatttgataccaaaactagtataagagataaagatcacagcatgttaacaagtggttaatttcaccaagaagatataacatttctaactttgaataccctaatactatagcttagaaaaatataaagcaaaagttaatagaactcaaggagaaattggcaaatccactggcatagcagaagatttttaaaacrtgctcaatcatggctagataaagcaaagaaaaatcataaggattgtgacagtcacagctactttcagcctgatatgtggagctttttcctttcttgaaataagtacttggctatccagaataaagacca

SEQ ID NO: 436909 - DNA, 600 bp, Homo sapiens
acattgcaactaacctgtaaaaaaattacaacttggcaagttttgatgcagtattaaagaagaatatccacagttatctgaaaaggctattaaaattctactccyttttccaaatacatatctgtgagaggccagattttcttcatatacttcaactaaaacaacatatctacagcagattgactgtagcagcagatatgagaaaccagctgtcttcttttatgccagacattaaaaagatttgcaaaagtacaaaacaactccactcttctcattaacttttttgttttagaaaatacaatttgttagaaagtaattttcaaaagaaaagtaaaatcatgactctcatacagatgtaaaaataaacatgggctaatgactttattcaactcattaatcaatgagggaattaggcagatattacaaacagttcaaataagaagctaaactgaaatttatatggagtaaaggtagattaaaataaattgtaaataggggcaaagagggttttccaatctagtctttatcagacaaaatttgcatgtctaatagccagctacagtttacagttataaaacagctcaaagaaaagaaagacta

SEQ ID NO: 436910 - DNA, 350 bp, Homo sapiens
agcaatgtgtgctgggattgtcgctttcatgcaccccagttctcatatcaggtataagggagagaaaggaagatagaaggaagggaggggacagtgggcagaaatttctgacgtggatctgcaggtatagccttaataatttgggggtaattcctggcacacagcaagacatgtcaggatctggattgtgggctcaggaatccctataaatgaatgaaggatcacaactgagcatgtggaaagataactgactcctaagagtaaatgattatarctgtaacctctctactaaaagaccaatagcatgagtattttattttcttaattgagctttaatcccaaaatggcac

SEQ ID NO: 436911 - DNA, 636 bp, Homo sapiens
atcagtagcattgcactcttgctccttttacagttatgatgrtaaactaattctaaatgcttttgattgaaatttttaatcaagcagtggtaactcacacatagggtgtattagtctgttcccacactgctaataaagacatacctgagactgagtaatttattggtattattattattttgagatggagtcttactcttgttgcccaggctggagtataatggtgtgatctcagctcactgtaatctttgcctcacagattcaagtgattctcctccctcagccgcccgagtagctgggattacaggcacccactatcttgctagctaactttttttttgtttttgtatttttagtagagacaggatttcatcatgttggccaggctggtctcgaactcctgatctcaggtgatctgcctgcttcagcctcccaaagtgctgggattacaggcgtgagccaccatgccaggccaagactgggtaatttataaaggaaagaggtttaattgactcacagttcagcatggttggggaggcctcaggaaacttacagtcatggcagaaggggaagcaaacacatccttcttcacatggtggcaggagagagaatgagagccgagcaaaggaggaagcc

SEQ ID NO: 436912 - DNA, 636 bp, Homo sapiens
atcagtagcattgcactcttgctccttttacagttatgatggtaaactaattctaaatgcttttgattgaaatttttaatcaagcagtggtaactcacacatagggtgtattagtctgttcccacactgctaataaagacatacctgagactgagtaatttattggtattattattatttygagatggagtcttactcttgttgcccaggctggagtataatggtgtgatctcagctcactgtaatctttgcctcacagattcaagtgattctcctccctcagccgcccgagtagctgggattacaggcacccactatcttgctagctaactttttttttgtttttgtatttttagtagagacaggatttcatcatgttggccaggctggtctcgaactcctgatctcaggtgatctgcctgcttcagcctcccaaagtgctgggattacaggcgtgagccaccatgccaggccaagactgggtaatttataaaggaaagaggtttaattgactcacagttcagcatggttggggaggcctcaggaaacttacagtcatggcagaaggggaagcaaacacatccttcttcacatggtggcaggagagagaatgagagccgagcaaaggaggaagcc

SEQ ID NO: 436913 - DNA, 636 bp, Homo sapiens
atcagtagcattgcactcttgctccttttacagttatgatggtaaactaattctaaatgcttttgattgaaatttttaatcaagcagtggtaactcacacatagggtgtattagtctgttcccacactgctaataaagacatacctgagactgagtaatttattggtattattattattttgagatggagtcttactcttgttgcccaggctggagtataatggtgtgatctcagctcactgtaatctttgcctcacagattcaagtgattctcctccctcagccgcccgagtagctgggattacaggcacccactatcttgctagctaactttttttttgtttttgtatttttagtagagacaggatttcatcatgttggccaggctggtctcgaactcctgatctcaggtgatctgcctgcttcagcctcccaaagtgctgggattacaggcgtgagccaccatgccaggccragactgggtaatttataaaggaaagaggtttaattgactcacagttcagcatggttggggaggcctcaggaaacttacagtcatggcagaaggggaagcaaacacatccttcttcacatggtggcaggagagagaatgagagccgagcaaaggaggaagcc

SEQ ID NO: 436914 - DNA, 497 bp, Homo sapiens
tgtagatttagcaattggttttaacacatttagtagggagggcctgggttactctgtgctaaccagttcccacgagtttgaagactgaggaagtcagaaggatctggctctagctggaagggatattacttctgttcaggctgccagtggaagactgggtcccctggggttggctgtggcaggtggagactgatctaccgcctgcaytgaaagactcagcattcttatacttgggaatccttttttctacagaagttgctaagagcatttttgaaattgtatcctaaaactgaattggagttttgaaacattaatggaagaatcataatctcaaactttcaagtgttatgagaagttgggaactttgacttactctttggagcaaatagtccttttttataaaacccattgctatagacttttggtagtgaaaaggaaaaaaaaaaagcaaggagtctaagtaatgttattaaaatatcaaatttatattccttgtg

SEQ ID NO: 436915 - DNA, 550 bp, Homo sapiens
agcattcttatacttgggaatccttttttctacagaagttgctaagagcatttttgaaattgtatcctaaaactgaattggagttttgaaacattaatggaagaatcataatctcaaactttcaagtgttatgagaagttgggaactttgacttrctctttggagcaaatagtccttttttataaaacccattgctatagacttttggtagtgaaaaggaaaaaaaaaaagcaaggagtctaagtaatgttattaaaatatcaaatttatattccttgtggtgaagtctaatctctagatatgacttcctttagaatttttttcataaatgtggattataattacacttcatttgaaattgcttttgaaatgtgtatgtgttctcattcaagcagttacccacagacaactgggattagaatccagaagatgacagggataattcagggacatactcttatcttatgctagtagaagaagcataaagctgccagatgattttgattgctgacacccaaaaagagccatatattaaagttgtatccctcag

SEQ ID NO: 436916 - DNA, 550 bp, Homo sapiens
agcattcttatacttgggaatccttttttctacagaagttgctaagagcatttttgaaattgtatcctaaaactgaattggagttttgaaacattaatggaagaatcataatctcaaactttcaagtgttatgagaagttgggaactttgacttactctttggagcaaatagtccttttttataaaacccattgctatagacttttggtagtgaaaaggaaaaaaaaaaagcaaggagtctaagtaatgttattaaaatatcaaatttatattccttgtggtgaagtctaatctctagatatgacttcctttagaatttttttcataaatgtggattataattacacttcatttgaaattgctttygaaatgtgtatgtgttctcattcaagcagttacccacagacaactgggattagaatccagaagatgacagggataattcagggacatactcttatcttatgctagtagaagaagcataaagctgccagatgattttgattgctgacacccaaaaagagccatatattaaagttgtatccctcag

SEQ ID NO: 436917 - DNA, 577 bp, Homo sapiens
aactgggattagaatccagaagatgacagggataattcagggacatactcttatcttatgctagtagaagaagcataaagctgccrgatgattttgattgctgacacccaaaaagagccatatattaaagttgtatccctcagcaatgttattccaaaccaaattttctagatatggatgaaagtgttgatattagatatttgtgatgtgatacataatcctgaagggataatcctagggtaaggccaaggataactaccatgggtaaaaagcattagtttttgttgttgttattgttgtttttcctgacaatgaaaacagtgagtgtcccaaaagccaattatctcagaaggagcaggatctaggccacaaaatgaggactcagaaagcagctttgaagcaggtgattatggccttggacacaagaggacctagagcttgttctctctctctctcatttccagataggttggccagctttctccacatggaagtagactcagagctggactgtgaagtatccaagaagggtcccaaggaaaggggcttgacctttatggatatgagatcagtcata

SEQ ID NO: 436918 - DNA, 529 bp, Homo sapiens
cttcctagctactgagcctggtggcatatcttcctagctactgagcctggtggcatctcccagagcagtggaaagaccactggagggatgaggaatcatgatgtcaacagaagataagcaacgcaaccgctcccaaagttatgtttttgaggagtataaaagtagacgctttcctttcttcrtgcctttctgaattgggaccgcagaggaatgatgagcttggaggctgcagactgctgggaaccactacatggaaaatgggggtagagtatcagaggaccacggtgtaggtcctccagctggacatcaaagttcttacacaactatctgatcactgagaattagctcttaatgaccaggtcttattgaagaaattaccagtccttgcagaacttatagataatgagctaaatttgcagtactaattatcagaaaaagaagagcagtcttgccatggcaggcatggaaggagttcttttttacttccttactctccttactgctcaaacacctagtacagctggtaagg

SEQ ID NO: 436919 - DNA, 626 bp, Homo sapiens
gtgtagggggcaggaggagtggagaggagtggactaggcctcttcttccgtattcttctgtacatcaggtcctctagctggaaaagaactcagcactctctcaacagtgcctgtaaaaggaaaggcaacacccttacaccttctctcttgctgtctgcccaaatagcacctgttatcaggcattctctagcttggtcacatggccttttttccttaatcaattgtcagtctataaagacacttctwctcccctacatgaagcagtattctaaaggacttcacctgtgattcagaaggctcaagcagcacttaggtcaatgattagtacttacctcagagccttttgtgagaccagctgcctccagtcacctatggtggagagctggattgaaggtctgaggagctcagagaggtaagatgaagacatttgtcatttttttttctatatagccaacttaacttctcctagctcttctttgcttgagataacatctggaggccccatttattgcagcaagagattgcttttgattttaaacatgtatacttctgtcataaaaattaatttatatccaatcactgtgtgtaagaaattaaacaaaaaggttttccaagccctaagcctt

SEQ ID NO: 436920 - DNA, 563 bp, Homo sapiens
atcttatttttttctttctataacttttggggtacaaatggtttttggatacattagtgaattgtcaagtggggaagtctgagattttagtgcactcatcacccaagtagcagacattgtacccaatatatacttttttatctctcactttcatcccaccctcttcatccttctgagtctccagtgtccattataccactctatatgcttttgtgtacccatagcttagctcccacttataactgagaaagtatggtatttggctttccattttgagttacttgtgaagacattttaaagstagagaatcacagaccatcaagatgcaatctaagatgtcatcaataaacctaggtatcagttgccaagtagcagcccctactgattgaggggcaaaaattgaattattgtcacctttgtaggtggaaacaaaaagacaccatgttaaatcaggatcttggcttgtcctgatttatatattagtcttgctctacataaattgatgtgttttttaaacatgacttggcagtcatcatccaacatttaggagtgatcgaatgaac

SEQ ID NO: 436921 - DNA, 508 bp, Homo sapiens
tgatgagctgtcaccctcattattggatatatatgtatattatgtatataatatgccataaatataacacatgtatatgtacaaacataaaaatacatgtgttacatttatggcatatataatctaatattatattatagactataatgtaatatagtctagctggcatgcactagagatttcctccccttggtttgaagaagcaaacrttttaatggaagaaagctgaaacaactgcatggcttcagcatgccaaaatctgtcaatagtcctcctacaacttgtgatgtggtccttattacaagccagctcatcaggtgattcactttgaaaacctcattttagaggtgctttcctaggaccatttatggtgccaaccatcttaggttggtttccaggaaagactctacgggtaatctgtctataggagatttacttgggactcctcttagaaacaatccctgtaaacagtgagggaatcaggactgaacagaaggagaagttgaaa

SEQ ID NO: 436922 - DNA, 508 bp, Homo sapiens
tgatgagctgtcaccctcattattggatatatatgtatattatgtatataatatgccataaatataacacatgtatatgtacaaacataaaaatacatgtgttacatttatggcatatataatctaatattatattatagactataatgtaatatagtctagctggcatgcactagagatttcctccccttggtttgaagaagcaaacattttaatggaagaaagctgaaacaactgcatggcttcagcatgccaaaatctgtcaatagtcctcctacaacttgtgatgtggtccttattacaagccagctcatcaggtgattcactttgaaaacctcattttagaggtgctttcctaggaccatttatggtgccaaccatcttaggttggtttccaggaaagactctacgggtaatctgtctataggagatttacttgggamtcctcttagaaacaatccctgtaaacagtgagggaatcaggactgaacagaaggagaagttgaaa

SEQ ID NO: 436923 - DNA, 589 bp, Homo sapiens
tttacttataaattctgcacaatggacataatacatagcttcttgcttccaaatgggtaatgtctatcatttatccctatatytagacatccttgtgataaacattttgtatgacatgtatccctgcctttttgtgaggcatatgggaatggtgcttattttctacataggaagagttataatattccatactctgaattgtttcatgtagcttggatttccacaaggtcacaagttttagttgctgttggggccaaattttggccacgagtcacaacgtggagcctaactgaaatccacagatcccctaacctcagtattaatcagaagtgggagggcagaaagaggaggtcttgctgaggtgctgcttgggactaacattagcatgaaaccttggcatttgagccatatgagacaaagatggagagggaatggaatgttcctgtctttaggtgcaattgccactgagcttctgcacagtttgccctgcagcccaccatcattcactaattggcagaattttctctttgttattctgctccactgaaaacacactgcaggagcaaactggcttgtcaaagcactggtt

SEQ ID NO: 436924 - DNA, 563 bp, Homo sapiens
ttttgtaaccacggtcttctcagttgttattcttagttctatattaaggtggatccattgttcttaacaaggacttcccagtatctaaattctttacttaatctccagttgactggattttggcaacaattagtttttttttccgcaggaaaggttcatgagtgctatgtttctagacttttatatawgagaatgccttttgtgttgaaatttgaatggcagctggctgagccaaacttttctttcccagagaactgtgtgactatttctgcacagtctctgatactaaattctactgtgagaagtctaaggacaacttgatcttttttccttttgttgcttcagaaatcttcactttcccctctttcactagactttcttttttagagaagttttaggttcacagcaaaattgaacagaagtacggagttcccatgtgtgccttcttcccccatgcatagcctcccctaccatcaacagcctgtcccagagggaagcatttgttacaatcaatgaatctgcactgacacgttattattacccaaaattcacagatccattat

SEQ ID NO: 436925 - DNA, 563 bp, Homo sapiens
ttttgtaaccacggtcttctcagttgttattcttagttctatattaaggtggatccattgttcttaacaaggacttcccagtatctaaattctttacttaatctccagttgactggattttggcaacaattagtttttttttccgcaggaaaggttcatgagtgctatgtttctagacttttatatatgagaatgccttttgtgttgaaatttgaatggcagctggctgagccaaacttttctttcccagagaactgtgtgactatttctgcacagtctctgatactaaattctactgtgagaagtctaaggacaacttgatcttttttcctttygttgcttcagaaatcttcactttcccctctttcactagactttcttttttagagaagttttaggttcacagcaaaattgaacagaagtacggagttcccatgtgtgccttcttcccccatgcatagcctcccctaccatcaacagcctgtcccagagggaagcatttgttacaatcaatgaatctgcactgacacgttattattacccaaaattcacagatccattat

SEQ ID NO: 436926 - DNA, 395 bp, Homo sapiens
catgagtgctatgtttctagacttttatatatgagaatgccttttgtgttgaaatttgaatggcagctggctgagccaaacttttctttcccagagaactgtgtgactatttctgcacagtctctgatactaaattctactgtgagaagtctaaggacaacttgatcttttttccttttgttgcttcagaaatcttcactttcccctctttcactagactttcttttttagagaagttttaggttcacagcaaaattgaacagaagtacggagttcccatgtgtsccttcttcccccatgcatagcctcccctaccatcaacagcctgtcccagagggaagcatttgttacaatcaatgaatctgcactgacacgttattattacccaaaattca

SEQ ID NO: 436927 - DNA, 543 bp, Homo sapiens
ttgagaactcagattatttttacaagtaatatttacccagaaattaagaaatagcaagaaaaataaaaagaacaaatgggccatgaaattttctgtcttccaaaaggagaggatttccctcattattattctctcaatgaattattttgacccttcagcatatgtgagaattttagaagctaacaggtgaattgctttgccatgataaaaatagaaagagagctgtgcataggaatgtgtcttaggctgttactttgatgaaacggcctaamcctggagatataactgaacttggaacatgatgaaagtcatttaaactccagtactgaaacaaaggctaagaaacaaaaaggaaagccttcaaatgaggtgtaatataagggttgattttgtttatttctgaggtatatcatatgaagggatgtgtcacattgtagtgtttgtcatgatcgactgtcatagttaatgtaattttcaagagtcttgtgctatatccttctaagtatgtgattcactgtgtggcaactccaatctcgaatgtta

SEQ ID NO: 436928 - DNA, 543 bp, Homo sapiens
ttgagaactcagattatttttacaagtaatatttacccagaaattaagaaatagcaagaaaaataaaaagaacaaatgggccatgaaattttctgtcttccaaaaggagaggatttccctcattattattctctcaatgaattattttgacccttcagcatatgtgagaattttagaagctaacaggtgaattgctttgccatgataaaaatagaaagagagctgtgcataggaatgtgtcttaggctgttactttgatgaaacggcctaaccctggagatataactgaacwtggaacatgatgaaagtcatttaaactccagtactgaaacaaaggctaagaaacaaaaaggaaagccttcaaatgaggtgtaatataagggttgattttgtttatttctgaggtatatcatatgaagggatgtgtcacattgtagtgtttgtcatgatcgactgtcatagttaatgtaattttcaagagtcttgtgctatatccttctaagtatgtgattcactgtgtggcaactccaatctcgaatgtta

SEQ ID NO: 436929 - DNA, 492 bp, Homo sapiens
tctgatttcccctggtttgctgttgaagttagagcatgccacctgtttaaggctgtggttcaccaatcttgagaggtctacaaaagtgaaagacctgactgcattgtaaagagcgcaatagcaccagtcagrgatggacagtggtggttctacctaggcagtgctttctacctgagtacaatatagctcagacatatgtatggcttgcttttaaagaaggcaagctctttcctctaccaggaatctccttgccctcaacagcaggtctaggtctcctctgttcagcccacccaagcaaagatactttctttgtaataggtacttattacatgtttctttcattgatcccaccatattctaacgattgcttttcttttttttgtaataagtaccttttacatatctccattgtttcactgatgacaccataatgtattaatcactactggatttaagtctatttttcaattttgttgcaatttcacaaggcca

SEQ ID NO: 436930 - DNA, 492 bp, Homo sapiens
tctgatttcccctggtttgctgttgaagttagagcatgccacctgtttaaggctgtggttcaccaatcttgagaggtctacaaaagtgaaagacctgactgcattgtaaagagcgcaatagcaccagtcagggatggacagtggtggttctacctaggcagtgctttctacctgagtacaatatagctcagacatatgtatggcttgcttttaaagaaggcaagctctttcctctaccaggaatctccttgccctcaacagcaggtctaggtctcctctgttcagcccacccaagcaaagatactttctttgtaataggtacttattacatgtttctttcattgatcccaccatattctaacgattgcttttcttttttttgtaataagtaccttttacatatctccattgtttcactgatgacaccrtaatgtattaatcactactggatttaagtctatttttcaattttgttgcaatttcacaaggcca

SEQ ID NO: 436931 - DNA, 331 bp, Homo sapiens
gggaaaagccatgccctcttttgaaactcttttgacccctcagaagaagacattcctctttctggcattcaacctatagcccactgcccataaagctgatctttcaaactgtctgaccctcctacacagatcttacaggttgactcccctgccaaggaggggactactgaggaaaaataaaaatttcctactgaacagaggaggaagcagacacactcatcactaatatgactcatccagggargatcaaacacatgtggaaaacaaatactatgaaagaaaaggaccacagttatcagagaaaatagacataattcagaaaatagaagag

SEQ ID NO: 436932 - DNA, 579 bp, Homo sapiens
agaagacattcctctttctggcattcaacctatagcccactgcccataaagctgatctttcaaactgtctgaccctcctacacagatcttacaggttgactcccctgccaaggaggggactactgaggaaaaataaaaatttcctactgaacagaggaggaagcagacacactcatcactaatatgactcatccagggaggatcaaacacatgtggaaaacaaatactatgaaagaaaaggaccacagttatcagagaaaatagacataattcagaaaatagaagaggacttttaaagaaatcctttggtaccctcaacaagattcgagaagctattatatccataaaatagaatcaaatcgctgtgaaatagggacaaagaaccagttggcatgcctaaaaattgtatgaagtataattgctataaatgcagaggatctacaaaacatagagaaaaataggaagagaacataaaaatgaaataartatgaagcatagaggcttaattcaaaaatatttatcttctgactaggaagggtttaagaacaacaggtcttaatgaaaagaagtgtgtgctag

SEQ ID NO: 436933 - DNA, 589 bp, Homo sapiens
ctactaacaggaggggagctgagctccaytttgacctgtgcagtgatgactaggcatttaaaagggagacagagaggagctctaacagagtcaaggaagtgaaaaattacacaaagcaggaagagcatggtggtcattagtccaagtgaaaccacatggatttgctaactggaactttggaaagttaggctcctaccatcctacagagactaggagacaggtctttcttcaggtgttcgctgaaataagcagcaagtattttggcaactttgagttttctcaggcaggtgcttttaagggaggatagggtcatcctggggatgtggccttgagctgttagaaactgtgagtttttttgcttaaatcgttataggccaaggttgaggcccagctaagaaatggctcagaagagcatggctagggtttggccacagagagaatctttgtcagtgccatgatatgatttcaaacatttaattcattaggtacaagaacagagaatttattttaccctggtgcttggagtataaatattctccattaattggttcaggggtcatgccatgagacctttaaaagaaggaggtat

SEQ ID NO: 436934 - DNA, 543 bp, Homo sapiens
gttaattctgtggtttgccaaatctgtacactttcctgttactttgtagattgtaaaataatgatgcagcrttcaccataatgatcaattgttttccttactaaaatgtaagcatttaaaagatctgcctaattttttctaagtgtatgttaggcagatctatacttccaactcctaaagcattcttctaaagcagtttattagagcgcacactaatggcttatcaattaagcaaacacgatcagtattgagcacttgctctgctccagggtgccggtgctaggttcacgtgcatcagggagacagagtcattgtcctcatgaagcttacaggggggcagattgattgaaccgacacctctgattcccttttaagcctgtaagcagctgctctgtaaagcacgtgtttcaaacacaaccaccttcagagacgaggtgattctgttgagtgggtgaagcaggccaggcatgaggccgcaagcagtggtttagaccagttcattggagaatccctgccttattaaaagtatttccttccaaaaat

SEQ ID NO: 436935 - DNA, 543 bp, Homo sapiens
gttaattctgtggtttgccaaatctgtacactttcctgttactttgtagattgtaaaataatgatgcagcgttcaccataatgatcaattgttttccttactaaaatgtaagcatttaaaagatctgcctaattttttctaagtgtatgttaggcagatctatacttccaactcctaaagcattcttctaaagcagtttattagagcgcacactaatggcttatcaattaagcaaacaygatcagtattgagcacttgctctgctccagggtgccggtgctaggttcacgtgcatcagggagacagagtcattgtcctcatgaagcttacaggggggcagattgattgaaccgacacctctgattcccttttaagcctgtaagcagctgctctgtaaagcacgtgtttcaaacacaaccaccttcagagacgaggtgattctgttgagtgggtgaagcaggccaggcatgaggccgcaagcagtggtttagaccagttcattggagaatccctgccttattaaaagtatttccttccaaaaat

SEQ ID NO: 436936 - DNA, 543 bp, Homo sapiens
gttaattctgtggtttgccaaatctgtacactttcctgttactttgtagattgtaaaataatgatgcagcgttcaccataatgatcaattgttttccttactaaaatgtaagcatttaaaagatctgcctaattttttctaagtgtatgttaggcagatctatacttccaactcctaaagcattcttctaaagcagtttattagagcgcacactaatggcttatcaattaagcaaacacgatcagtattgagcacttgctctgctccagggtgccggtgctaggttcacgtgcatcagggagacagagtyattgtcctcatgaagcttacaggggggcagattgattgaaccgacacctctgattcccttttaagcctgtaagcagctgctctgtaaagcacgtgtttcaaacacaaccaccttcagagacgaggtgattctgttgagtgggtgaagcaggccaggcatgaggccgcaagcagtggtttagaccagttcattggagaatccctgccttattaaaagtatttccttccaaaaat

SEQ ID NO: 436937 - DNA, 543 bp, Homo sapiens
gttaattctgtggtttgccaaatctgtacactttcctgttactttgtagattgtaaaataatgatgcagcgttcaccataatgatcaattgttttccttactaaaatgtaagcatttaaaagatctgcctaattttttctaagtgtatgttaggcagatctatacttccaactcctaaagcattcttctaaagcagtttattagagcgcacactaatggcttatcaattaagcaaacacgatcagtattgagcacttgctctgctccagggtgccggtgctaggttcacgtgcatcagggagacagagtcatwgtcctcatgaagcttacaggggggcagattgattgaaccgacacctctgattcccttttaagcctgtaagcagctgctctgtaaagcacgtgtttcaaacacaaccaccttcagagacgaggtgattctgttgagtgggtgaagcaggccaggcatgaggccgcaagcagtggtttagaccagttcattggagaatccctgccttattaaaagtatttccttccaaaaat

SEQ ID NO: 436938 - DNA, 526 bp, Homo sapiens
  misc_feature (1)...(526): n = A,T,C or G
tgcctttggatttaatgtcatttctcaaggatatgtccatttctgagagaggatttatggaatggctggtatattaatactcatattatctcaattaattcttaacacaaccttatgagactactggaattatttacattttattgtagggtatgtcattcaccaaattttatgcttaccaaagatgaggatgaaattatctacattccaaagtcaatataagttgggtagtatattggatcaaagtatactgatgttgcttctattggtttctcatttttccactgaatcttttaatgcagacaggactgtaatgtagaaaggttttaaaatagaagctttcaaatattctgtaattttggttatcaaagcttagtatttccagtaaaatattattttccactctctcatccatctcaatcaaaataacaaattagaaacaaagcataaataattttcacttcctctacaatccaaaagaaaagccaaaraagtaaaatagaaatgaannnnnnnnnnnnnnnnn

SEQ ID NO: 436939 - DNA, 632 bp, Homo sapiens
tttcaatttctctgagttatataaatttaatagagttccagttagcatctgaatgggactaaggagattgagtttcctatcttataactttaatagaagaataaataaaacattataaaggctctataatcaatatgattaaataagttataggaacagcctagagagtatagaagtcaatcataatatctacagaaatgttatagaaagcaaaatatgttatttcaatttaatggggaaaatgtttgtttgataagcgatcttgacacagctggctatttgcctaaaggtaaacaacgttgaactcccgctcactacagagcataaagataaatggattagagcttttcaccgtgaaatgatacaacaatctcttgaatggaaatttgggaaaacttgtttttaaaatgacttggaagtttagaaaccttttaaaaccctagataygtttaaagaaaatgtacatatttgacacacttttaaaaaaagactttctggcaaatatattccacaaagttacaaagtgaaatagacctggaaaaaaatattctcaatgcatttcacagctagagggttactactacccataatattcaaaaagctctccaaaattagtaagaaaagggcagaca

SEQ ID NO: 436940 - DNA, 312 bp, Homo sapiens
gccctgagcacccccagggagagtctgtgttatgtatgttggcactaagcccagacatatcacagtacctggactatggctgatgtttagtaaatatttgagcttacggaattacctagagagcttctctatttcacttttagcatctccttctctgctttcatccawccaaaatctttattctccaagtcacttcaagtattgccttgtgtggcctcgtctgcggcataaccccttcgatggcaagatgttttataatgggggtttacggcatttcactgagggttgtatgctgtgaaatgcatggtagca

SEQ ID NO: 436941 - DNA, 562 bp, Homo sapiens
aagtatcctgttattcagttctgctgatttagccatgggcaatgcagagggctgtgggatgccctaaagcccaaggttatggaaccttaatcaatctattaaatttagatgcccataagcctgaaggacaggctttcttcttaaaaatcttctatttcccatgaggagaattctataaataggttttttctagttggaaaatatgccgaaggtagtggagagcaggttacagtgagagaccaagataggatttgtcagctgccacctttactctctgcatcagttcataaatgtgaccttcatgagccctcaacaaatgagagagccctggagagtggtaagtttcttaggggacgcctacatctctagcaatggaacaaaagcaccatcattttcttcactggagaaacaagtggattgccttaaatttttgaaagttattttacttttgtttatycaggaaaacacactacacttttgacacttacttctagagaaattctatttaaatgaacaggaggaaatcagagagtttaatagaaaaagatcagctttggtttta

SEQ ID NO: 436942 - DNA, 554 bp, Homo sapiens
ggtcccccagtattccagagcagactgggagtgactgattgcaagctgctgttaacaaggctcagtgctgttattgtcctcaagggacagaagggattctctctggacttccaactaccaggccaggagtgaccgttaaagaaagaagagatgaggccaagaggaagcattaaatsatgttgggtcacgcccctttaagagtgcaggtactgacttgagatgattaactgcactggctatcagtttaagtggattcaaccagacaggaaaagagaatttgaatgggaccacttaaatggtcaagaattcaagagctgctatatgaattttaaacagaacttgaatgcttcggatccacagagtattgctttgctttctattgatgctgcctcggtcctatggaagacaaagtggtagctttagttaaactgcacgtgttctagtccctgaaaagttgagttttatctttgtatcacaaactgctgtgaacgagagtcagaaaatccatcttgcttttgtagttacaaatcgagaaaaaggcttgattgcacacc

SEQ ID NO: 436943 - DNA, 560 bp, Homo sapiens
ttaggagaaatacctaatgtaaatgatgagttgatgggtgcagcacaccaacatggcacatgtatacctatgtaacaaacctgcacgttgtgcacatgtaccctagaacttgaagtataayaataaaaaaagatattaacattttaaaacaaaaaaaattgtcatgctcatggccttttcatcactgttgtcatatttttatgagtattctctaaaactagtcctttcattatttattctttatcaaacacaggaggaagtgaaaatattttcatcaacatccatttttttattcaaccgacttttctaggggccatttattttcttctatgcttttggttgctcttcactttaactttaaacactgctgaactgcaatgaagggttttccaggctgagaatccataactcagagccagttgtacacatttcctagtcaggagacaactctgggagagatgaattgttcggcagaaggacaattaccactgaacaaaggaaaagaggaactaaagagttgctataatggtggcattagatatttttaacaagccaagctg

SEQ ID NO: 436944 - DNA, 503 bp, Homo sapiens
tgcacatctgtaatcacagctactcaggaggctgagacgggagaagcgcttgaaccatggaggtggaggttgcagtgagctgagatggcgccactgcactccagcctgggtgacagagcgagactccgtctcaaaaaaaaaaaaagtccgcgcgtggtggtgggcgccctgtaatcccagctactacttcggaagctaaagcacgagaatcgcttcaacctgggagatggaggttgcagtgagctgggatcactccagtgcactcctgtctgggctgtagagtgagactctcaaaacaaaacatcactctgtcagcactgtagagaatgaactggtagggkcaagactatttggagacttgcaataatatttcaggcaaaatacgaggaaggcttaaactagggcaatgaatgaaggctggagagaacatgggtttgaggaagtttaaggagatagcatctgcatacttggttgccatttgagtgaagtgaaaggagaagtgg

SEQ ID NO: 436945 - DNA, 479 bp, Homo sapiens
cttgcttaaccttattaagtctgtttcctcatctgtaacaagaagatgatagttcctatcttataaagttgtgaggattgaaaatagtgtatgtaaagcacatggcacatagttgacacgtgtccaagaaataactagtaaaaatgggtagcttcctgcaaatatttctctctctctcccatccccgggaacattattttcagtatcttgcatctggggggcctccagcctctgaattagctcaggaccctgagtgaactttttaaatccttaggatttttctttttctcccacttcccttggtgccttmcagctggacacaaactcattcctaaaatatgtggatggaagctatggtaaccatggagacagggcaggtggcaaggagaggcagagacagtgtgagagaccaatagacagataggaagagagaagatataaggaatgtttcagacagagatcgtcaagcaagatggaaa

SEQ ID NO: 436946 - DNA, 553 bp, Homo sapiens
cgctgggtccctgcatctgtgcctcagttttcctgccgaatctatcaatgagatgtctctcttgcagggatcggcttcgtcactgagacctcaggcctctgccagccactccccctccccatacccctagtcatcctcggcaggtctcartcccggctccatctgtgccctcgccccagccgcagctatgttgcacaccgagggccacgctcttcttcgggcggtgggtcagggtaagctacgcttggcccgtttgcttctggagggaggcgcctacgtgaatgagggtgatgcgcagggggagactgcgctaatggcagcctgtcgggcccgctacgacgacccccagaacaaggcacgcatggtacgctacctcctggagcaaggcgcggaccccaatatcgcagaccgattagggcgcacggcgctcatgcacgcttgcgccgggggtgggggcgccgcggtggcctcgctgctccttgcccacggcgcagacccctcagtccgagatcacgcgggcgcctcggctcttgtccacgccctggaccgcggg

SEQ ID NO: 436947 - DNA, 552 bp, Homo sapiens
taagacaggaactctgctaggtgctggggatacaaatggatgaatctgaaactcatgaggaaatactatttttccaatgtaatcccaagatttaacaaggctatgtgatggaactgctattagctactatcctgctgcttcaagtctctaagtcaagatcaagggaaggtctttgcctctgggcacaggagtagcctagagtggtcacactaaatctgaagccttcctcttggcaacttacaggcatttattaaaattatagaagagtacaccctttttcttgtctgtgttacctggagagcctctgctttggctcccaaactggacatcctgtaaaaacttycatttccttagcaaggatgagggaacaaggggattgtactgacaaagggcaattaatcaggcttcacacttcgtggtgattttctttcctatctccccacctcccatcgcagtctttctcattattcttgagtttctcatttccagtctgagtgtccagccagtactttaggaaagtctggcagatagttcagcttcaggcaagcagaa

SEQ ID NO: 436948 - DNA, 312 bp, Homo sapiens
tgaagtaaaggacagagagatgctttcaaatgtcaagatccagtctgtagcttaccccagcaccttggaaaggaggcactagattaccatcacagcctcaagggagcaatcaccaaattaatcagcagactcaataagtataagctttgtatttccatagctgagattagaggacttttgtagaagtaattgtaccttctccttatatctctggctgtgtacctataagcatcctataacatggaagcacaccagcaagtagagagagaargaatgacttctgctgtaggtcaggtgagtggaaacagaaag

SEQ ID NO: 436949 - DNA, 574 bp, Homo sapiens
caacctttagccgatgagtggagaaaccaatctgagacatttccagcccaaaggagctttcgttttctgcatgggacccttggtcatgagaaaacattgagacaatatcaggggaagacagtttcccctttgacctactgaactcactccagagccccacctacactccagaacttctcccgccctgtccatttctccagagtaatcctcaccttcaaggccaaaaatccgatctcctagtgcatccacaatgtcagtcagagcagcctcatctgtgacattgaaraagaatcgctcatctggatcactggcaatagttctaatttctctcaggaaagagctgggatctcgctgccgccggaggtagtgaccaaggacctaagaggtcataagatcaaggaatgaggcattagagttggtacagaacacagccaactaacatgctgtggctgaagtctgggaagtagttaatgcccttgttttcctcaagttcccagtccttggacagttcacaagacactgcccccctgccactccccaactcttccagatccagggtgaattctcactgcaa

SEQ ID NO: 436950 - DNA, 544 bp, Homo sapiens
tcattatttaaaaagtcaaaaaacagtatatgttggctttgatgtgatgaaaaaggaacacttttacactgctggtgggaaagtaaattagtacaaccactatggaaaacagtatggagattcattaaggaactggaagtagaactaccatttgatccagtaatcccactactgagtatctgctcacaggaaaagaagtcattatgagaaaaaggcacawgtacacacatgtttatagcagcattattcacaatagcaaatatatgaaaccaacctaagtgcccatcagccaaagatatgaaaccaacctaagtgcccatcagccaatgagtggataaagaaaatgtggcatatatacaccatggaatactacttagccataaaaaggaaagaaataatgccttttgcaaaacagtggatagagctggaggccattattctaagtaaagtaactcagaaatgaaaaaccaagtaccatatattctcatggtatatatacaccatggaatactacccagtcataaaaaggaagaaaataatgcct

SEQ ID NO: 436951 - DNA, 544 bp, Homo sapiens
tcattatttaaaaagtcaaaaaacagtatatgttggctttgatgtgatgaaaaaggaacacttttacactgctggtgggaaagtaaattagtacaaccactatggaaaacagtatggagattcattaaggaactggaagtagaactaccatttgatccagtaatcccactactgagtatctgctcacaggaaaagaagtcattatgagaaaaaggcacatgtacacacatgtttatagcagcaytattcacaatagcaaatatatgaaaccaacctaagtgcccatcagccaaagatatgaaaccaacctaagtgcccatcagccaatgagtggataaagaaaatgtggcatatatacaccatggaatactacttagccataaaaaggaaagaaataatgccttttgcaaaacagtggatagagctggaggccattattctaagtaaagtaactcagaaatgaaaaaccaagtaccatatattctcatggtatatatacaccatggaatactacccagtcataaaaaggaagaaaataatgcct

SEQ ID NO: 436952 - DNA, 544 bp, Homo sapiens
tcattatttaaaaagtcaaaaaacagtatatgttggctttgatgtgatgaaaaaggaacacttttacactgctggtgggaaagtaaattagtacaaccactatggaaaacagtatggagattcattaaggaactggaagtagaactaccatttgatccagtaatcccactactgagtatctgctcacaggaaaagaagtcattatgagaaaaaggcacatgtacacacatgtttatagcagcattattcacaatagcaaakatatgaaaccaacctaagtgcccatcagccaaagatatgaaaccaacctaagtgcccatcagccaatgagtggataaagaaaatgtggcatatatacaccatggaatactacttagccataaaaaggaaagaaataatgccttttgcaaaacagtggatagagctggaggccattattctaagtaaagtaactcagaaatgaaaaaccaagtaccatatattctcatggtatatatacaccatggaatactacccagtcataaaaaggaagaaaataatgcct

SEQ ID NO: 436953 - DNA, 595 bp, Homo sapiens
ttatatccaaaccatctagtcaaaacagaaactgggctgggcgtggtgactcatacctgtgaacccagcactttgggaggccgaggtaggagaactacatgagtccagcagtttgagacccacctaggcaacacataaaaggtctcttttatagagagaccttatctctataaaaaattwaaaaaaaaaattaaccagccacggtggcaggtgcctgtagtcctagcaacacaggagactgaggcgggaggatcacttgagcccaggaggtcgaggctgcatgagccctgtattgtgccactgcatttcagtctgggcgacagagtgagaccctgtctcacaaaccaaccaaccagaaacagaatttgaaattttcagaaaattccactatttttgtttttaatccattccaatgtcaggaagctttttcttatgatcaaatctaagcctctagttttgagtctcatgaaagaaaagttgcagctggtcaccacctctttgtaagaccctatatgcacagattccatttctttctggatcatgaatacctgaactagttataatgattttatgagggcctaataagtgggaagat

SEQ ID NO: 436954 - DNA, 595 bp, Homo sapiens
ttatatccaaaccatctagtcaaaacagaaactgggctgggcgtggtgactcatacctgtgaacccagcactttgggaggccgaggtaggagaactacatgagtccagcagtttgagacccacctaggcaacacataaaaggtctcttttatagagagaccttatctctataaaaaattaaaaaaaaaaattaaccagccayggtggcaggtgcctgtagtcctagcaacacaggagactgaggcgggaggatcacttgagcccaggaggtcgaggctgcatgagccctgtattgtgccactgcatttcagtctgggcgacagagtgagaccctgtctcacaaaccaaccaaccagaaacagaatttgaaattttcagaaaattccactatttttgtttttaatccattccaatgtcaggaagctttttcttatgatcaaatctaagcctctagttttgagtctcatgaaagaaaagttgcagctggtcaccacctctttgtaagaccctatatgcacagattccatttctttctggatcatgaatacctgaactagttataatgattttatgagggcctaataagtgggaagat

SEQ ID NO: 436955 - DNA, 595 bp, Homo sapiens
ttatatccaaaccatctagtcaaaacagaaactgggctgggcgtggtgactcatacctgtgaacccagcactttgggaggccgaggtaggagaactacatgagtccagcagtttgagacccacctaggcaacacataaaaggtctcttttatagagagaccttatctctataaaaaattaaaaaaaaaaattaaccagccacggtggcaggtgcctgtagtcctagcaacacaggagactgaggcgggaggatcacttgagcccaggaggtcgaggctgcatgagccctgtattgtgccactgcatttcagtctgggcgacagagtgagaccctgtctcacaaaccaaccaaccagaaacagaatttgaaattttcagaaaattccactatttttgtttttaatccattccaatgtcaggaagctttttcttatgatcraatctaagcctctagttttgagtctcatgaaagaaaagttgcagctggtcaccacctctttgtaagaccctatatgcacagattccatttctttctggatcatgaatacctgaactagttataatgattttatgagggcctaataagtgggaagat

SEQ ID NO: 436956 - DNA, 543 bp, Homo sapiens
aatgtaaatgatgagttgatgggtgcagcaaaccaacacggcacatgtatacctatgtatcaaacctgcacgttgtacacatgtaccctagaacttaaagtataataataataaaaagaacaggtaaaaaaataataaaaaaaagatacacgaatctagatcttctgatttggtaataaycgaaggggggtggtgggtaacagattcagggaaaaagagaaacgggaaaactatgcttcgtcaacaaggcaataatggtgaaccaatgtgtgtttagaggccctatatgcttgtgttcagagtattccattgtgtctttgctaaccgaagctgctcaggggcatagtcatgaatcaagtcttccagtaaatgcctctggaacgtgaaggaatgagaacctggcaggaagacagtgcagggcattgtctggagctcgttcctcttggttgcgtgactgcccattatgactgtctgatgatggcaatgtgatcatttgtctagcaattacaaagcatcttcattttactgcctcttttaatgttc

SEQ ID NO: 436957 - DNA, 540 bp, Homo sapiens
ggcctctggcaaaccactggtgtaagtccaagaatccaaaagctgatgtttgagggcaggaagcatgcagcacaggagaaagataaaggcctgaagactcagcaagtctgctcctccattttatcctgcctgctttattctggctgcactggcagctgattagatggtgcccacccagactgasggtgggtctgcctgtcctggtccaatgacgcgattttttttttctttttttttttttttttgagacacagtcttgctctgtgcccaggctggagtgcagtggcacgatcttggctcactataaactccacctcccaggttaaagcgattctcctgccttagcctcctgagtacctgggactacaggcatgtgccaccatgcccgactaatttttgtatttttagtagagatgggttttgccatgttgtccaggctagtctggacaacaaaactttaaaaaagtataactgataaatgaattcagcaaagttgcaggatacaaaatcaacacataaaaatcagtcgcatttctatac

SEQ ID NO: 436958 - DNA, 540 bp, Homo sapiens
ggcctctggcaaaccactggtgtaagtccaagaatccaaaagctgatgtttgagggcaggaagcatgcagcacaggagaaagataaaggcctgaagactcagcaagtctgctcctccattttatcctgcctgctttattctggctgcactggcagctgattagatggtgcccacccagactgagggtgggtctgcctgtcctggtccaatgackcgattttttttttctttttttttttttttttgagacacagtcttgctctgtgcccaggctggagtgcagtggcacgatcttggctcactataaactccacctcccaggttaaagcgattctcctgccttagcctcctgagtacctgggactacaggcatgtgccaccatgcccgactaatttttgtatttttagtagagatgggttttgccatgttgtccaggctagtctggacaacaaaactttaaaaaagtataactgataaatgaattcagcaaagttgcaggatacaaaatcaacacataaaaatcagtcgcatttctatac

SEQ ID NO: 436959 - DNA, 556 bp, Homo sapiens
aatagaatattattcaaccttaaaaaggaagggaatcttgtcacatgctaacatgaataaacctagaggaaattatgttaaatgaaacaaattgtccacagacaaatactgcatgattgtatttatatgaggtatgtaacgttattaaatttatagaaacagaaagtaaaatggtgattacacacatttacctatgtaacaaacctgcacatcttgtaaatgtacccctgaacttaaaataaaagttaaaaaaagaatggtgattacaagggactagtgggagagaggaaagggcatttgtttaatgtgtatagtttcagatatgcaggataaaaaagttctggagaactgtttcacaacaacatgaatgtatttaacactrttgaactgtataattagaaatagttaaaatggtaaaagaaaaggggaagaaatatgtgaatcaattaaaaattacataaacatgcctcaatgacaatattaagtgtacatgaatgtttgttacattattctgttacttttacatacattagaaatattttataataaaagtaat

SEQ ID NO: 436960 - DNA, 657 bp, Homo sapiens
atgttgactgtaaatacaaccttttactaggtgatacaaagttgtgggtcacggcctgtccctgaaatgccacctcccttttctrtatccatgtcaatccttcccattcattaagggccagctgcttcttctccatgaaactttgcttaattccattagaccatagtgatttctgtatctctcatctctgggaacatttactgtctgcctcatcccttcggtttttctcactttggcttgtaaccagtacagtttacaaggttatttaatttttttctgtttctatgtcacatctcttcacctggattgcagactctatgagatcatggaccatgtacagcaagtcttcacatcgctttacattgcttagcatagggtgaatgcttagtaccttatttattaagtgaatgaatgaaacaagtgtcagtttcatgaaccaccacaaaaggccatttacaaatgtggtctgtgaactagaattagcataagatatatgttttcaaaggataatagagtctcgggatgagaagacactttaagggctacctagtttatccagcaccctgatgtgtacatttcctctgcagggcagagttgagcccctcagactgaacatctcccatgattcagaatgaacacctaagtaacatggaattt

SEQ ID NO: 436961 - DNA, 657 bp, Homo sapiens
atgttgactgtaaatacaaccttttactaggtgatacaaagttgtgggtcacggcctgtccctgaaatgccacctcccttttctgtatccatgtcaatccttcccattcattaagggccagctgcttcttctccatgaaacyttgcttaattccattagaccatagtgatttctgtatctctcatctctgggaacatttactgtctgcctcatcccttcggtttttctcactttggcttgtaaccagtacagtttacaaggttatttaatttttttctgtttctatgtcacatctcttcacctggattgcagactctatgagatcatggaccatgtacagcaagtcttcacatcgctttacattgcttagcatagggtgaatgcttagtaccttatttattaagtgaatgaatgaaacaagtgtcagtttcatgaaccaccacaaaaggccatttacaaatgtggtctgtgaactagaattagcataagatatatgttttcaaaggataatagagtctcgggatgagaagacactttaagggctacctagtttatccagcaccctgatgtgtacatttcctctgcagggcagagttgagcccctcagactgaacatctcccatgattcagaatgaacacctaagtaacatggaattt

SEQ ID NO: 436962 - DNA, 657 bp, Homo sapiens
atgttgactgtaaatacaaccttttactaggtgatacaaagttgtgggtcacggcctgtccctgaaatgccacctcccttttctgtatccatgtcaatccttcccattcattaagggccagctgcttcttctccatgaaactttgcttaattccattagmccatagtgatttctgtatctctcatctctgggaacatttactgtctgcctcatcccttcggtttttctcactttggcttgtaaccagtacagtttacaaggttatttaatttttttctgtttctatgtcacatctcttcacctggattgcagactctatgagatcatggaccatgtacagcaagtcttcacatcgctttacattgcttagcatagggtgaatgcttagtaccttatttattaagtgaatgaatgaaacaagtgtcagtttcatgaaccaccacaaaaggccatttacaaatgtggtctgtgaactagaattagcataagatatatgttttcaaaggataatagagtctcgggatgagaagacactttaagggctacctagtttatccagcaccctgatgtgtacatttcctctgcagggcagagttgagcccctcagactgaacatctcccatgattcagaatgaacacctaagtaacatggaattt

SEQ ID NO: 436963 - DNA, 600 bp, Homo sapiens
ggcaccatccaacaccctgcacttaattttatataattgtacctaaactgaataagcttcaagccctacaaaacctttatcagaccctggctctgaggaaggaaagtggtaggcgtgaaaggagatcactatgtatggagcagaatgagyacatgacagagcagaactaagtaaaattgggcaggtaagtagggaatggctcatatagaatgttgcatgaaaagttagattttattttaatgtaatggaaaacctctggagaactttaagaagaaaaaaatgaaatttgatttatttttactctgaaggagacatataagagagtgttcactgggaaatttaaaacaacccactgtacataaacagaatggattaataaattgataagttgtggtacattcataaggggcatattttgaagtagtgaaatgaataaattagttttatatatatcaatatagctaaatctcaaaaatacgttgatcgaaaggagaaaattttaacactaacatacagtataatttatgcatgattttacttatataaagtttaaagtcattcaaatcaatatcttacttaagggtacatactgtagaaaag

SEQ ID NO: 436964 - DNA, 558 bp, Homo sapiens
gttttttgtttttgttttttgagacagggtctaactctgtcacccaggctggagtgcagtgacatgatcttggctcattgcagcctcaacctcctgggctcaggcaatccttccacctcagcctcccaagtagctgagactacaggcacacaacaccactccyagctaattttacaaattttaaaatttttttgtagagaacaagttctcactatgttgcccaggctggtcttgaactcctgggctcaagggttcctcctgtcttggtctcccaaagtgctgggattacaggtgtaagccaccgcacctggccaatttttttttttttttaaatcaaatgcatgaaagtttaagagaagaaatctgcaatagtccatctccaattgtactgcaaaggaatatcataatgtgaacattagacagagaaaattaagccagtgggagtgttttctcattttagtgagattgcttctgaacttagcaacttagcgttaggtatacacaaatgactagacagtcaattttgatgagttgctgcaagaaaagaattagttttac

SEQ ID NO: 436965 - DNA, 600 bp, Homo sapiens
cctgtcttggtctcccaaagtgctgggattacaggtgtaagccaccgcacctggccaatttttttttttttttaaatcaaatgcatgaaagtttaagagaagaaatctgcaatagtccatctccaattgtactgcaaaggaatatcataatgtgaacattagacagagaaaattaagccagtgggagtgttttctcattttagtgagattgcttctgaacttagcaacttagcgttaggtatacacaaatgactagacagtcaattttgatgagttgctgcaagaaaagaattagttttactcatttttctgtgccatatttagcattttcttcagagtgattcagttaacatgtctcttggtaatattctctctatatttattttggaagcarcagtaaatgatacaactaatattttagaatattgtaatagcaagtaagttctaaaaacttgaagaacttggagcttatctatttgcttgctctttttaaatgattatagcatgaagctttgcttcagaagcaggggcaatatgactcttaatcaggaatgtgaaactgtttggtaacacaatctgaaaatgaaatgtttgagctgg

SEQ ID NO: 436966 - DNA, 588 bp, Homo sapiens
gatccttactgaaggtgtaggtattaaaagcctgacttttcatagatagggtgttttcttaaattaggaataagagaacaccttgactacattctcacctttgtttttcataatctattccttttcaagggcaaggctaccctagcattcttataaaacatactctagttaaaagagtaactttttcctactttagctctttataatgagccttyaaatgttcaaatccctccaattaaaaaactcaaaataatcttgcccactcctccaaaaaatctattttcctgttaaagccacaaatatctttccatcctctttaccaacaaagttcttcaaagaatgctttacattcactacactcaaattccattacttctcaatttacaacaatctggtttctgccccatcacaacaggtactaaaaaagcttccgcaaaagtaaaaattctcacattcccaatgtaatgctctctctccattcctcatcctacttaaatgctctgcagtatgtgatacttttgatttccttctaaaaaaaaaatctatcttcctgggcttttattacactattttttctttttctctacc

SEQ ID NO: 436967 - DNA, 401 bp, Homo sapiens
atgaatgaataaagtacaaaataccactttctgtcttattttctatttcatttagttcagctttttagcaatataagcataggatacttatttcattttgaaatctacacacacaggattagacaggttagaccaatttagatataataatggagacttcaacatttsttattaatggtaggtttatcagttttattcaaaaaggtgcctggcttaaaccaagactaataatcgagctgtgtggttagcttcaggtagctatgaacatgagcaaaaatttcagatactctggagaccaaccatacaatactatgtgaggtcttcagaatgctctgcataaatatccaaggacttcataattgttaacatagtccatcacagaacaaaagatgtgaatagga

SEQ ID NO: 436968 - DNA, 539 bp, Homo sapiens
gtaagaaacagacaaaaaataagtaatcaaactgagtacaagtgatgctaagtgttaggaaggaaatatacaggttactgactaaattaaggcagagaactattatggagagggtagccaaggaaggcctccctctctaaagctgacaactaagatgtcactataaaggtaagaagtagccagccaggtcaagagaactatagaatgggaagtaagtccacatgattattgtgtgcatgaagaaataaaagcattttaagaaagacacagtagtytcctaaggcaaatactgacagaagtcaaataaaatgagaatagaaaaacactacttaaattttgcagcatgaagactacaagtgaccctgactgacaaaaggtttttggtggtgaatcaaagctagaatttgtgctaaggagactacatgagtatacaggaagaaagaaagaaagaaaaaaaaaaaaggaacaatagctggaaggatatggataaaggagtattttaaagatgagatactagagcaagtttatagggtaatgag

SEQ ID NO: 436969 - DNA, 248 bp, Homo sapiens
agtggttctcccagcacagcgtttgagctctgagaatggacagactgccccctcaagtgggtccctgacccccgtgtagtgtaactgggagacacctcccagtaggggccaacagacacctcatataggcggctgcccccatgggatgaagctttcagaggaagcatcaggcagcaatatttgctgttctgcagcctccgctggtgatacccaggcaaayggggtctggagtggaactctagcaaact

SEQ ID NO: 436970 - DNA, 566 bp, Homo sapiens
cactgcagcctcgacccactaagctcaagtgatcctcccacctcagcctcccaagtagctgggaccacaggtgtgcaccaccatacctggctaatttttttactttttcttgcccaggctgggcttgtactcctggacttaagcaattcagcctcccaaaatgctgggattacaggcatgagccamtgtacctggcccagatttcttttaaattgtgtaattattatgaaacatcagagccaaaaattttagaaatcaaatctaaatccatatgttgtagataaagaaactgaagcctatagtggtaaagtaagtttactacagctttgttaatgtcactgatggttaaattctggattcagagggttagaatggtatcttattgcatatcaggaagaagagtggacaaggcagatgaaggtgttgggttttagtcctaacttcacctaattagttgagagttcttgagtaaatgcctaatagtccttatctttttttttttaatgaagctgtttgtttactctaagtgatccatatgcagtggtgacctggtaaatgtttaacaa

SEQ ID NO: 436971 - DNA, 516 bp, Homo sapiens
actacagctttgttaatgtcactgatggttaaattctggattcagagggttagaatggtatcttattgcatatcaggaagaagagtggacaaggcagatgaaggtgttgggttttagtcctaacttcacctaattagttgagagttcttgagtaaatgcctaatagtccttatctttttttttttaatgaagctgtttgtttactctaagtgatccatatgcagtggtgacctggtaaatgtttaacaaccatttctgagggagttgggggaagccctgatttgtagcaatttctgatttccatggtgaaaacactctcaccaggcaatttcagtgatattcatcaattcagyatgttatcacagaatgtggacttgagaaggcttgtatataattggttcttgtgagccagtgtgagtttctatcacaccactgcccctaagtatccttccagatataaagcttgactaatacattttttaacctttttttattgtacctagaacaaaaaaattt

SEQ ID NO: 436972 - DNA, 623 bp, Homo sapiens
ccactgcattccagtctgggtgacagagcaaggctccatcaaaaaaaaaaaaagtatcacaacatacaatatctaagaatacaatttcgagaaatgtgccraactctaataaagaaaactaaatatctgcaatgaaaggcataagattaatacttgaataaatagacaactacaacatgtcaatgaatgaatacacttaatgaaatgcatgaagtctcttcaaaaattttaaacttaattctaagaaatctcattgaaattttggaacttacaaaaacaattctaaacttcaggaaaaaaatagaaaaaaagtctgaaaggagactaaccaggggagacccgtcttaaaaaacattaaaatgaatttaaaagtaacttaaaagtaataaaaatggctgactaaaaaaaatcaactttgtcagtaaccaaaaatggatgtgaaacaatcagactctatgtttagctttttgatgagaaaaaatttttgtacttaaccatctttcaaggattgacatttgagttaataaccacacagaatcctaagagttatataattagaaagtatggaaaaaaaagacactaccacactctgagttgaaacatatattgatacttttctggag

SEQ ID NO: 436973 - DNA, 475 bp, Homo sapiens
gctacttgaagaggtatttgccacatgttagcgttggtcattattcagattattcctgtatttcagtacagaaggttcacagctttttccaatcaatgttctgaatccttgttcatttaccctaacatatgagaattttggttctgatcaagatctttcacagctcttcttccctctaaggaatagaatcatccactcagcattttgcgtcatgtttttagcaggtgattttataaaggaaagaatgggtttcaggtagaagctccctgccacttcctgaggcatatcctcaggttcatctgcttctgtgctcacccttttccctcccctccagtctcagtctttccatttaaggttatttcttccttygagcacttaatcccatgtccaatgtcttctctgttttgcctctttaatatcttctctaattgttccattttatcaatctaaaagcaatctaaaacatggtcatttc

SEQ ID NO: 436974 - DNA, 475 bp, Homo sapiens
gctacttgaagaggtatttgccacatgttagcgttggtcattattcagattattcctgtatttcagtacagaaggttcacagctttttccaatcaatgttctgaatccttgttcatttaccctaacatatgagaattttggttctgatcaagatctttcacagctcttcttccctctaaggaatagaatcatccactcagcattttgcgtcatgtttttagcaggtgattttataaaggaaagaatgggtttcaggtagaagctccctgccacttcctgaggcatatcctcaggttcatctgcttctgtgctcacccttttccctcccctccagtctcagtctttccatttaaggttatttcttccttcgagcacttaatcccatgtccaatgtcttctctgttttgcctctttaatrtcttctctaattgttccattttatcaatctaaaagcaatctaaaacatggtcatttc

SEQ ID NO: 436975 - DNA, 510 bp, Homo sapiens
aaaaaatggcttcatgggccaggcccagggtccctctgctgtgccctgcatcccagctgctccagcyatgactaaaagggtccaagatacagctggggccatggcttcagaaagtgcaagccacaagccatggcagcatccacatggtattgagcctgcagatgcacagaagccaaaaatcaaggtttgggaacctttgcctagatttcaaggatgtatggaaatgactggatgtccaggcagaagtttgctgcaggagtggggtgctaatggagaacgtctgctagggcagtgcagaagggaaatgtgaggtgggcacccccacacagagtccccactggtgtgctgcctagtggagctgtgagaaaacggccactgtcctccagaccccagaatggtagatccaccaacagcatgcaccgtgtgcctggaaaacacgtagacactcaaccccagcccatgaaagcagccaggagggagcctgtgccccacaaagccacagaggcagaa

SEQ ID NO: 436976 - DNA, 610 bp, Homo sapiens
gcccaggttaaaatcttggctccatctattactggatgttgatgcttaggcaagttacttctctgtgcctctatttgttgtgaaaacaaaatgaacatatgccaatatgaaagatgctctggatagagcctggcacacagttaacatatgtataggacttatctttttaaaaactggatatatggcattatctgaattattctgaaacttgatttttttcactcaacattatggttttaaaaatgatccaygttgcagagcagatttattttatactactacatacaattccattgtataaatgtcaatctctatccattatcctactgatgtccatttgtttctcatttgttcctgtgttgtgctgtgtacttctttacaggtcttcatgcgtacatgtgcaagagtttctctagagtgcaaatgtaaaagtggaactactggatccctgagggtgcataccttcaactttacttgataatgccaaaatgctccctaagagcattttgtcccacaagcagtgtatgaagtattctgcttctctgcattcccactgacacttggtataacactgtcaaacattaatgggataatctttattataataata

SEQ ID NO: 436977 - DNA, 622 bp, Homo sapiens
ctcaaaatcatatagctgtaagtggcagaaccratattcaaacccagttaagtctggcacaagaccccttgctaattcttagattgactactactgcctttggcttcctagaactcatgattgcctaacactctctacaatgtcttgatttacttctttgatatatttcttctctgtatatagtttaagtgttggcatgactccaggctctgaaataggtcttctactcactgcacaggcaggacaacagaacaaaaatattatataacacccaagcctatttcaatcagcattttctgttttatttctggtaaagtgcttggtatgtagaaggcacagaataaatggaaattgtcagaggtgtcttaaccagagtgactccatcttgaataaagtccagataaagcaaaacctactgggttactttcccaggaaattggacactcttagtcacaagatgtttatggttgaggaaacgagttaatggaaaaaggcattctcagtttaaaaatgggtttcactttaaagataatggtactgttacaggaaaggtgtcatgattcagagcccaggagaggattcttggatcttgcacaagaaagaattcagagcgagtttgcag

SEQ ID NO: 436978 - DNA, 558 bp, Homo sapiens
tgttagttttccttctaacaggtccttcagctgcaagtctgttggagtttgctgggggtccactccagaccctgtttgcctgggtatcatcagcggatgctgcagagcagcaaatattgctgcccaatccttcctctggaagcttcgtcccagaggggcacctgccagatgccagccagtgctctcctgtrtgaggtgtctgtcggccccaactgggaggtatctcccagtcaggctacacgggggtcagggacccacttgaggaggcagtctgtctgttatcagagctcgatcgccatgctgggagaaccactgctctcttcagagctgtcaggcatttaagtctgctgaagctgtgcccaccactgcccttccctcaggtgctctgtcccagggagatgaggcttttttctataagtccctgacttgggctgctgccttttgtttagatatgccctgcccacagaggtggaatctagagaggcagttggcctcactgctgcagtaggctccacctggtttgagcttctcaatgggtttgtttacactgtgagcata

SEQ ID NO: 436979 - DNA, 579 bp, Homo sapiens
agtttgttacagaagtaataggaactaatacagatatattttaaaaatctgttttaaaatgcactgagttgagaaccagtctctagtctctcttccagatgtctttcatttataggatgttttcacttctacarctgatgctggtggttccagtttcctcctgcttctcagtcccatccacccccttgattgaagttggaaacaggagagggaagaaaatcgactgtggattctggaaaggaggggcagggcatggagctctccatgttgacccaaactcttctttttacacttcttttctcattattttttagtggttagacaaacagtaagcatagtgcattgagaaccttgagaagactaatttgggggtgtgggtgagagtaaggaatgttgataaagacgtcgcagaataggtggcatcttaaaggacaaataaaatcttgcctgtggagaaaagggaagtattcgatgcagaagatacagcccaagaggaggcaatgggagcataaaagtgctgaatgctggacaaaagctaaagtaggttggagtattagattcagtgggagaagggtggca

SEQ ID NO: 436980 - DNA, 579 bp, Homo sapiens
agtttgttacagaagtaataggaactaatacagatatattttaaaaatctgttttaaaatgcactgagttgagaaccagtctctagtctctcttccagatgtctttcatttataggatgttttcacttctacagctgatgctggtggttccagtttcctcctgcttcycagtcccatccacccccttgattgaagttggaaacaggagagggaagaaaatcgactgtggattctggaaaggaggggcagggcatggagctctccatgttgacccaaactcttctttttacacttcttttctcattattttttagtggttagacaaacagtaagcatagtgcattgagaaccttgagaagactaatttgggggtgtgggtgagagtaaggaatgttgataaagacgtcgcagaataggtggcatcttaaaggacaaataaaatcttgcctgtggagaaaagggaagtattcgatgcagaagatacagcccaagaggaggcaatgggagcataaaagtgctgaatgctggacaaaagctaaagtaggttggagtattagattcagtgggagaagggtggca

SEQ ID NO: 436981 - DNA, 490 bp, Homo sapiens
tttttaaaactttatttcagattgtttattgcatatgtataggaacacaactgatttttaaaatattgatcttacatcccaaaaccttrctgaattcatttattagttgcaataattttttaaaggatttcttagtattttctatacaaaagatcatacctataaatacaagtagtttctttttaatctagatgcctttgatttccttctcttgcctaattgctttggctagaacctcagtacaatgttgaatggaagatgttgttcctattcttatgggaaatgcatccagtctttcactattaagtataatgttatttgtgggtgtttcctagatgccttttattggatttaggaagttttcttctattcctaatttgttgcatgcttttacataaaaaagttgttggattttgacaaatgctttttctgtatctagtgagatgatcatgtgattatttttttcatgttcatatgatgtattacattc

SEQ ID NO: 436982 - DNA, 483 bp, Homo sapiens
  misc_feature (1)...(483): n = A,T,C or G
gttgagttttataatctgcttcaggggataaatgcgggaaggagaaaggagggtgggagaaggtcacagagatcgtctggcttcttagaagggccttctatctccttcggttaagtactcagcatgccncggtgcatagtttaagggcactgtgttctgagtgctggcatccacctagggcatattgactgttgaagatgagaaatgatgacataaattattatttcataataggcacaatggcttttaaagcagaggacagttaaccatggggaagcctgagccactcatagtgagccaccattcaaggccagggtctttctttttttaagaaatttatttatattttatttttttttaaagaratgaggtctcctgtgtttccaggctggtgttgaactcctagcctcaagtgatcctcccaccttggcctcccaaaatgctgagactgcagatgtgagccactgtggctggccttggcca

SEQ ID NO: 436983 - DNA, 609 bp, Homo sapiens
agacagtttggaggttaaaggcaagatgaaattggttaggccagatctttaactgtcataattttctcactgttaaaatttttgcaatatcacagcacagaaggcagacaaaatcctgccctcatgcaccttactgctgagtaggcctttcaacattaaacaaactaacccaccaaggaggtttgcaaacataaagtgaccagtgccgtgaagaagaaccaagtgtattaaaaggatgactgagctgggcatggtggctcacgcctgtaatcccagcactttgggaggccgaggtgggtggatcacctgaggtcaggagttcragaccagcctggccaacatggtgaaaaaaccccatctcttctaaaaatacaaaaaattagctgggcatggtggtgcagcctgtaatcccagctactcaggaggctgagacaggagaatcgcttgaacccgggaggtggaggttgcagtgagccgagactgcgccactgtacaccaacctggtcaacaagagcgaaactccgtctcaaaaaaaaaaaaaaaaaggatgactgtgggggtatagcttagattggaggtgaaggaaggcctctttgagaagaagggttg

SEQ ID NO: 436984 - DNA, 456 bp, Homo sapiens
ctatcctgagaaagactagcatttagtctccatccaaggagctgggaccattttgatgtttattatgaaaattttacatcatcattagaggcaattattaaaaaaaattctcattctgtctgccactacttttcctactttctcttaatttcaataggtagataagcttttattttttaacacggtatacgaataattttgttgcactctttttacatattttgaaaacacatttccctgtctcttcacagtcttcmtggttattttcatgctgcatactcttccctcttacggccataccatatttagccacttttctgttactggttgattccagttttttgtcattataaataatgcagctataaatatctgtatacatacagcatttttctttttaaaaattatgtccttggaattgttgcccagaaagtggatgactgggtcaaagggctg

SEQ ID NO: 436985 - DNA, 497 bp, Homo sapiens
tgtgccaggcgtgtgctaggagctggagattttactctgagcaaattagacatggcccctgtgctccctgcacttccattcagggagggagagcaatgttagctcaaatcctactggaagtactcacctccaactgtaatactccatccctaaccaaggaaaaatgcagtattgckggaggaggtgggagagggccctgacggggtctgggagggtaaagcaagcttctctgacctttgagctgagagtagaaggatgcatgaagagggcaatgctactgggggtggagtcgggggcaagaaggatgttttacaggaggcagctgcatgtgccaaggtcctgaggcaggagggagcacacctatgcggggagcagactgtccaaggcctggagtggaaactgaggctggaaatggggcagcagttggtccagagcccctgcctacctcagcgactgtgcccacagtgctctctccaccctgcacacctggtgcctgc

SEQ ID NO: 436986 - DNA, 619 bp, Homo sapiens
tttctctgtctgcatagcccacacgttctggcacgggtggggagatgaactgacctctgctgcttgaactatgagcttccrcagggtgcaggttgggtggtgttctttctagaatccttagcccttggcacaggactgaaacaggccaaacaaagccatcacagaccctgagggcttgtcaggaggattacaggaagccaactttttgtaaagggttgcacggccacagtaaatgcacagtaaatgtctgctatgttcttaccaaatatttgtcaaataaacaaatacattatgtaatattttacctttcttcttattaagagatatttcagagccacactggatgagaagagggggtggaggtgggcatcattctctgctcccctcatctctaaacccatggaaaggcctggggtagtaattgcagagggggaaataatttttaaatgtctctctttttgtgcttttattgtcaaatgatagcattgttcacagtttttgaaatactgaaagcaagtctgcacaactctttctgcagaaacaatgggagcgtgtgtgtgagtgtgtataagcgtgtgtgatctctgttcctctgccataatgtgtgtgtgtgtgtatg

SEQ ID NO: 436987 - DNA, 407 bp, Homo sapiens
ttcatacagtgtgtaatgaggtgccagggtttattttaatgctaagaaccaagcataagctgaaaatagacgtagattcaagaatattttcatatggtgcttatgcagacccaggggccagataagaaggaaggggaaagggaaggaggaagtgaggaagggatggggagcagtagtgaggccccattctcttctattgtcagctcagcacataatttatatctatacctcccgtctacctacccatccatcaatatagatatgcctttaattgtttttaaatcatcttaaaattccactggtaaaataataagtttaaaattaacagttttggccaatcatttttgccagrtgggtctggaaatactggggcaatcacatgaacccacaaaaagaaagagcccccc

SEQ ID NO: 436988 - DNA, 380 bp, Homo sapiens
aagctagcagtttataagagctgtgggccgggcacagtggctcacacctgtaatcctagcactttgggaggccgaggcaggcggatcaccggaggtcaggagtttaagaccagcctggccaacatgatgaaaccccgtctctactaaaatacaaaaattagcygggcatgacggtgggtgcatgtaatcccagctactcaggaggctgagacagaattgcttgaacctggaagacggtggttgcagtgagccaagatcacaccactgcactacagcctgggcagctgagcaagacttggtctcaaaaaaaaaaaaaaaaaaaaaagctgtgctgtggaaattaccacagagataaactgagaactagtgtttcaggtttg

SEQ ID NO: 436989 - DNA, 381 bp, Homo sapiens
aactcaccgagaggaagagcatgtctagcagaagacagagggggtccgggcatcggtggccgcggagccgctctcccaccctggggaccctggcggagcagccacaccccccattccgccggagtccgtctgtcagtccgtgccctccccacagccccgccccagagtcaccggaggacccactggcgccgccgccgccgcagcagcagtgcagcaaaccccacccacccgacccgccgccgcggcaaggacgcgcgcggtccgtctgtccccagaggagggtccgggaagcggggaaagggggccacagtcccggcttgrtgcggggagcacactgtgcgcgcttttgttcagaagggggaaaccgaggccggaccgatg

SEQ ID NO: 436990 - DNA, 598 bp, Homo sapiens
cacttcaacccaggagtttgaggcagcagtgagctatgatcatactggtgcgcttcagcctaggccacaaarcgagtcctagtctcaaaaaaagaaaacaaaccagttttgtgtagagcatttctacatgtgtgctgtgcttcagtgttagtaaaatatactattttttttccaatatagttttaaacccaatgaaggagttatcataataggagccacaaacttcccagaggcattagataagtaagtattaaaagaagatttttgtgaagtactgttacatgctacaaaattgtgctaaaagaagtccgttgcaaaagatcacatcaacactgtatgattccatttatatgcaatatccagaataagcaaattcacagagacaaattgggttagcggttaccagaggttagggagaatggggaatggctgtcattggatatgggatttctttgtgggggatgggaatattctaaaattagattgtggtgatggttgtacaattctgaatgtattaaaaaccactgaagtatccactttaaattatgtgaattacatctcaataaaacttaaaatatttatttgttatatgtcacaa

SEQ ID NO: 436991 - DNA, 581 bp, Homo sapiens
gccaatatggtatctggagtcagatacaacgggttaaagtccagccttattaataacaagtctgtgattctaggaaaattaattaccctctttatatttcagtcttcttatctatgtaatcattataccagagggatacataaatgtagcaggattataagatgttattaattttaacttacgcatataaatattcaacatgctaactggcaaaaagcaagtttttaatcaatgccactaaatatgattatatcaaatatttattcatttgacagtatttattgagtaactacctgctccatggtaagggtagaatgatgagtaaaacagacatactcctctccacttggaaattcacttacagacaaacaaaatcaacacagatattcatatatggttacaagcttcaataagaatttttttaaaaagtagagaacagttattctaagaagacaaaacacaggatatgaatttgtttcggtgatgaagaactcctttcctgggaaaggtacagcacgtttatgcatgacatctctgtgatgaayagggatgaactcaggaagggagcagttaaggaaagg

SEQ ID NO: 436992 - DNA, 626 bp, Homo sapiens
tctcctgcttgcatatcacagactcttgaacttaatttttcagttgtatgtatgtattagtaatttgtatttaaattatagctctttataagtttaacaaggattctatgtgttaaatgattccaatgtgaattaaactcaaaagaaagtttaatatttcaaaaaaagacagttctatatgcatcaatattctctgctctccaatattgtatgaaacttgtagaaagtacataaattataattaaccaattgcaacaacattcataaaaatcaataatatgcttacctttaacaaggtacctttctacctttcatctttcaatgtaggtattaggttgtgaacctcatgaatactgtgtcttcaaaaagtgaaaatttttgaaagggaaactttcatgttttaactggaaaaatattattttcttttaaggatgaaatgtaaaagagaaatawgctttttttctagatttctatcttattttgataatatccagataatcgcttagtaataatatttaaaactacactatcagaatattacccacacttcacttttataatatcaaataattgttaacaaatactaatgttaagaggtgaagcttattacgtgctcccacatttat

SEQ ID NO: 436993 - DNA, 565 bp, Homo sapiens
taataatcagtaagtagatgcctaatactattagtaatattcttagtattatatcaactgagaacattgttcacaacaaaaagaacattgcgcataaatttggtactgtacttggtaaatttatagacatatacgataasaattttaaaaatacctatttacaaagatacacaggtttacagttaagaaattaatgttagataatgacaaccaggcttcttactgtcagaaaacttctaaatatctctagatactccaagctccaagagagagagcttaattttctctcctgtgaagtgtgaactggactatagttcacttccaaacaataaagtatgaaaagtgaaaattggcaactttaaaagggaagcctgaaacacataaccttaaccaagtgatcaaagttaacgtcaccaagaatgtcatgtggatatcacatacctctgacatgatgtgatgagaagggcatttgccctctgtagtgttctttccccagactaataacccatttccagtcatgaggaaaacatctaaccaaaccccaaatgggagccattttacaaaa

SEQ ID NO: 436994 - DNA, 565 bp, Homo sapiens
taataatcagtaagtagatgcctaatactattagtaatattcttagtattatatcaactgagaacattgttcacaacaaaaagaacattgcgcataaatttggtactgtacttggtaaatttatagacatatacgataacaattttaaaaatacctatttacaaagatacacaggtttacagttaagaaattaatgttagataatgacaaccaggcttcttactgtcagaaaacttctaaatatctctagatactccaagctccaagagagagagcttaattttctctcctgtgaagtgtgractggactatagttcacttccaaacaataaagtatgaaaagtgaaaattggcaactttaaaagggaagcctgaaacacataaccttaaccaagtgatcaaagttaacgtcaccaagaatgtcatgtggatatcacatacctctgacatgatgtgatgagaagggcatttgccctctgtagtgttctttccccagactaataacccatttccagtcatgaggaaaacatctaaccaaaccccaaatgggagccattttacaaaa

SEQ ID NO: 436995 - DNA, 637 bp, Homo sapiens
ttcctacataacttgttttttaaaaaatcaactactactatatattttatatcctacttttactattaaacatatacatttctcattacatattgttaactatatatttcatcaaaacttattattaagtattttcttgtcactgaacattaaccaataggatggataaaatttcaagccagctcaggcagatttatacatttatatgtttgtatatcaagaagtagtgaacattcctatctctttgcttctactttctctgagaactaagmgacaagattatgtgtatatagggagcagattgaataagcataaaaggatttttatccatgtctaggtagccctgtgtgtgtattggtgttactctaccaattacccttatgatatagggcagaatgcagctacatctacagatatgaaaagggcagatggttaggttcatctaggattccagtttaatttcagtgctgaaagaacaaaggaataggaaagttgaagcgctttgcaaggttttttgtttgtttgtttgttttttgtttttagataaaggcattggaagccaaactgtatagacaggtagattagtcaggttaagctgctggaacaaaaaaaaagtatcatagacttggtggcttac

SEQ ID NO: 436996 - DNA, 637 bp, Homo sapiens
ttcctacataacttgttttttaaaaaatcaactactactatatattttatatcctacttttactattaaacatatacatttctcattacatattgttaactatatatttcatcaaaacttattattaagtattttcttgtcactgaacattaaccaataggatggataaaatttcaagccagctcaggcagatttatacatttatatgtttgtatatcaagaagtagtgaacattcctatctctttgcttctactttctctgagaactaagagacaagattatgtgtatatagggagcagattgaataagcataaaaggatttttatccatgtctaggtagccctgtgtgtgtattggtgttactctaccaattacccttatgatatagggcagaatgcagctacatctacagatatgaaaagggcagatggttaggttcatctaggattccagtttaatttcartgctgaaagaacaaaggaataggaaagttgaagcgctttgcaaggttttttgtttgtttgtttgttttttgtttttagataaaggcattggaagccaaactgtatagacaggtagattagtcaggttaagctgctggaacaaaaaaaaagtatcatagacttggtggcttac

SEQ ID NO: 436997 - DNA, 515 bp, Homo sapiens
tctcacaatcacagctgtaggcaaaggagaagcaaaggtatgtcttacatggcagcaggtgaaaagagaatgagagccaagtgaaaggggaaaccccttataaaaccatcagctctcatgagacttattcactaccatgagaacagtgtgagggaaacagcccccatgattcaattatctcccaccgggcccctcgcaaaacatgcgggagttatgtaaacyacaattcaagatgagattcaagtgaggacacagccaaaccatatcacttacatttttgagattaaacattattttaaattttatgtatatatactgaataaagatactttcataaattgctaaatatacaatgaagaaacaacacaaatcctaccgtgtaaagatcacaatgtactgtttgatcttggtgtcatttcttctatagatatttatgtattttaatcaaaatgctatttatgtagtttgggaacctgtttttacttatattttcagtcttttagagtacacataac

SEQ ID NO: 436998 - DNA, 447 bp, Homo sapiens
agagccaagtgaaaggggaaaccccttataaaaccatcagctctcatgagacttattcactaccatgagaacagtgtgagggaaacagcccccatgattcaattatctcccaccgggcccctcgcaaaacatgcgggagttatgtaaactacaattcaagatgagattcaagtgaggacacagccaaaccatatcacttacatttttgagattaaacatyattttaaattttatgtatatatactgaataaagatactttcataaattgctaaatatacaatgaagaaacaacacaaatcctaccgtgtaaagatcacaatgtactgtttgatcttggtgtcatttcttctatagatatttatgtattttaatcaaaatgctatttatgtagtttgggaacctgtttttacttatattttcagtcttttagagtacacataacatta

SEQ ID NO: 436999 - DNA, 551 bp, Homo sapiens
taagaactggaaagactgtaagatttagcttgggcaaatgagtggcatgagtaccattaagtgaatactattaaatgaaataattatacttaatattatacaaattttattataaatattaatataaaaggcaaaaaagtaggatacaatttggatatgatgtggtgaagttatagatgtacagaattttaaaatgtgtatttggatcttggaagactgttcttgtattattaaattaaaaaataggagacctcagttaatgtctgaggctatccctgtactttgagttgctatataacgaactgcaacctaaattagtacataaaccaaaatctaacttaggagaatattatttcataacaaatagccagrtttctaccaattacatacaactgagcttcagccaatcacaggcaaacaactgatcagacttgcccccgcaaaagaaatgcctctttgcaccaacaaataagtcagacacctacctgtagccaatcagaggattttctaatttgcttctgtgtttggcctctaaaaacccactgctcaca

SEQ ID NO: 437000 - DNA, 594 bp, Homo sapiens
ccggcaactgacattctattatctgcttctgagttagactattttaggtatctaaaagaaatcatacagtatttgtctttctgtgactggcttatttcacgcaacataatatcccccaggttcatctatttttgctgtaaatggggctatatattcctttggagagaaaaatgaatgtatagagaagaaggaagtaaaggcacaagaaacagcttgaacaaaaagataggaaggttagttgcaagtcaataatctgtagaaaattacaagatattcaagataattactacataagttcgaatgtaaaacaaaaaagaaaaccagcaatagacagctttgaatgtcaagctaagaaatagggtaacatatactttagttaattggaagtcactgaataggagggagcgatgattaaagttgtatttcaacaagaatttaactttatatatgttttagaagtcatscgtaataactccagtgaagagtaataacgacctgaattagtggatttgttagaactctaggcgtggtgatcactggaatggtaaacatagaatcattttgagatatattattgaggtaaaatcagtaaat

SEQ ID NO: 437001 - DNA, 546 bp, Homo sapiens
tgcaataatacaaaaaaaatgatttttttcagcatctataactggcacttctttcttactcttttgattttctttcaagagcagacttgagtgagcacaggtgggtatgggtgggtatgagtgtgtgtgtgtgtgtgtgtgtgtgtttatattggttaaattcactttccaagtatattattctgttctgtgtttcaaattctagcagatttgagaagtgatttggaaattagatgtataacttttctggaaatctaccactaaaatgtttcatacactataatcattttacttttattccatattgtatatggttaaacatttctgaagattaaaactataagaaataatattatattttatgataatttctacatataaagaaaataagctcctaatgtatttatatattttctgagaagataaattcctaagtatataaagtaaaattraggtgtattaatcattcacaacacgttactcttttttttgaaaacttgagccagtgaaataaatattattagtattctgaagaagtgacaaatt

SEQ ID NO: 437002 - DNA, 469 bp, Homo sapiens
atataccaatcctgtttgtccttgtaattccataaagccaaatggggaaaggatgttctagataggagtagttgggaagaaataaaaaggaaagttgtcagaatgtttgatgcgagtaatgactgggaaataatttttgattgaaagagaggatcaaaagtgatataaaacttttgtcatggatacatgtctccattatgacatggagaattgtaattaacagaaatggatctgtcaagaaaagaaaaggacttacaaaccgcagacatatttttagasgtttgcatgagatctgcagatggttcctggtaagcacaattatttcctatagggcatagtagtgcactttggggatgagtccagagatggaagaaaacagttgaaaatatcctagtagaccattatgaacctaaatttagaaagttaattatagttgacaaagtagtagcagctgtaggaagagttaagg

SEQ ID NO: 437003 - DNA, 469 bp, Homo sapiens
atataccaatcctgtttgtccttgtaattccataaagccaaatggggaaaggatgttctagataggagtagttgggaagaaataaaaaggaaagttgtcagaatgtttgatgcgagtaatgactgggaaataatttttgattgaaagagaggatcaaaagtgatataaaacttttgtcatggatacatgtctccattatgacatggagaattgtaattaacagaaatggatctgtcaagaaaagaaaaggacttacaaaccgcagacatatttttagacgtttgcatgagatctgcagatggttcctggtaagcacaattatttcctatagggcatagtagtgcactttggggatgagtccagagatggaagaaaacagttgaaaatatcctagtagaccattatgaacctaaatttagaaagttaattatagttgacaaagtrgtagcagctgtaggaagagttaagg

SEQ ID NO: 437004 - DNA, 498 bp, Homo sapiens
acctttgctcttgtgcagttctaccccttgccttcccctttacttgtcccatccagcttccaaagagaatcatttacaaaataaagtgtgcctcccaaatccatacatctctyccctatgaagagagtatttaagtctcaatcatctagcccctcttcaagtctcataatttgtgtatggcccccatgtacataaacatgttaacataaattttgtatgccttttcttcctattaatctgacttttgtcagttcattttcagtgaatctttggagggtagagggtaagctttcccctggcacctccattattataaatggtattttaaattttcattttctaagtatttgtagctggagcatatattgattttttactaaaattattataggaatttgtctacagaatttaaaattttttatctacacaatcatgctgtgaatagtgataaatttgtttattttttgagttcttatgttttttattttaatttattgc

SEQ ID NO: 437005 - DNA, 498 bp, Homo sapiens
acctttgctcttgtgcagttctaccccttgccttcccctttacttgtcccatccagcttccaaagagaatcatttacaaaataaagtgtgcctcccaaatccatacatctcttccctatgaagagagtatttaagtctcaatcatctagcccctcttcaagtctcataatttgtgtatggcccccatgtacataaacatgttaacataaattttgtatgccttttcttcctattaatctgacttttgtcagttcattttcagtgaatctttggagggtagagggtaagctttcccctggcmcctccattattataaatggtattttaaattttcattttctaagtatttgtagctggagcatatattgattttttactaaaattattataggaatttgtctacagaatttaaaattttttatctacacaatcatgctgtgaatagtgataaatttgtttattttttgagttcttatgttttttattttaatttattgc

SEQ ID NO: 437006 - DNA, 487 bp, Homo sapiens
agagttagtttttcagcccttttaatccatcccttccccatctagtagtctccaatgtctattgttgccatctttatttctatgagtaatgtttagctctcccttataagcagtatttggttttctgttcctgcattatttcacttaggataatggcctccagctgcatctatgttgctgccaaaaaaaaaaaaaaaatcataattttgtttttttatggctgtgtagtattccatggtatatatatgccacattttctttatttagtccccccactgaaggacacttaggttgattccatgtctttgctattgtgaatagtccagtaagcaatatattttcaaagagtaaaataaacttctgataagtaaataatgtccctaagtattttcaatgcattataaaagtgaactaaaaattktaacatgaatgctatttaaatatctggaaagtaaaagttttaccagatttttcttctggcaatgat

SEQ ID NO: 437007 - DNA, 636 bp, Homo sapiens
tacacacattgtagaataacattaaatgaaagagaataaagaagaaattaaaaatcctttaaaggtaattaaatagaagattggctatgcaagcaattatatatctgtatttcaaagctagactattagtgtacaaaggagatgacaacgatatatcttcagtaattagtggttgaaaaaaatagtgaattgattggcgaggcttggggaaaaccagatttccggggaaaaaaaacaataacaacaaccaaacaaacaaaaaacaaggggattgagtgctactgagatcttctatcactagagttcacagttaactgagtcattcatttaattactttccctcccttttattgtttttctaaggtaccaaacacatggctaaagtcttttcaattgcttccctcatgcctgttggtaactgctaaactcccgtccaccctcctacctatttattcaggctttttcttgattgtcatcttatcagagaggctttctctaaccataktatctaatgtagctgttgcagctccactcagcattctctatttatttggttgcttcatttttctgcacacaacctcgtgacattatttacttatatatttgcttgtgtatcttttcccacaaggatgtaag

SEQ ID NO: 437008 - DNA, 540 bp, Homo sapiens
aacattcttaaaattcctttttattttcttttgggatatcctattgaaaggggacatattaaaggtaatgtgggtcactgacaccttaaaactcccataayctccatggtaatgataaaataacaagaaaaaattgcaaatatgtggagttcaatgtctgctataagttgattccacttaaattatttacctttttaatgcctatcaattcttacgtgtcacatgagttgaactactactgtctgtcaaaaataagtaaatgtaaactgcaggttaaatatacatattccaaaatgcttgggaccataaatgttttcagattttgcatttttttttgtgaaatatttgcatatatatcatgaaatatcttgtggatggaacccaagtttcaacatgaaattcattcatgtttcataatcactgactttatacacatagtctgaagataattttacataatattcaagtttttttgagcatgacaaaaaggtttgactgagttttgacttctgcctgtcacatgaagtcaggtgctaaatt

SEQ ID NO: 437009 - DNA, 543 bp, Homo sapiens
gactttatacacatagtctgaagataattttacataatattcaagtttttttgagcatgacaaaaaggtttgactgagttttgacttctgcctgtcacatgaagtcaggtgctaaatttttcacttatgtcatcaggtcatcattcaaaaagttccagatgttagaactgtttgggtttggaattttcatattacagatgttcaacctgtatttttttcactttaaagttattgatttttattattcactgtaatttgaatcccttcaaactccatgtgcatgtatacacacsatatcatttgaatagagaacaatcagttcacactgtaataacagctttactctaaagatttattagagatcacaacccagagcagaggaaaatggggctcagaactgggtcagagaaagacaatcttataagagaaagtaagcaactttaagagttattatgttgcatatgaaaattaaaattttataactctctatagcctgtaaaattctctcttgttaaaaaaatggactcctgtagggctgactgt

SEQ ID NO: 437010 - DNA, 603 bp, Homo sapiens
gaaacttaatccctaatgccacagtgttgggaagtgagccttttgggaggtgtttctgtcatgaggactccctccctgtgaatggattaatgacattataaaatggacttacaggagtaggttctgtctcctctgctcttctgccatgtggagacacagactttgttctctctcttgcccttctgccttctactatgtgtgttcagagcaagaagattctctttagaccaaattckcgtgcattggtcttgaacttcccagcctccagaactatgagagaataaatttatgttatttataaattacccagtatgtagtgttctgttatagcagcacaaaagggactaacacacccacacatgcacacacacacacacacacacgttagaaagagagctcaattttgagaataccaggagtctctcttctattcaagcagagctcacacagctgaggaaatgatattgagaatctctgcctttaatgagtttgtcattttttttagttctcatacgttaattttaaaataggagaaaaagtacggcttatggaggagtatctaaaacaattaatataagaaaatattagtggccagttgattct

SEQ ID NO: 437011 - DNA, 488 bp, Homo sapiens
attttgttaattatacactttttaaccattgcttctcaaaccttagtatccataactacatgttatatgacctgactctaaggcaggtgtttttcagtgacctattttaacatttctccctcattggagagacaatgatactccaccaacacagaaatatatcatatttctgggtaagaagtcttttctggagtcaacagagtgtcacacaaacacaatcaactccacaaatacatgaaataagccttaatcagtaaaattcagatactaaataaaacccattccgaaaatatatatctgtcatatattgtatggaaaaaatcagaattggcttaaataatgcaaaaatttagaatctccctttcaagttgtatatgcctatttctcagtraaattatgttgaaatatttcagttatagttcagggttaaagcataaaaagctaatcagtattaatgtatgcatagagcatatttatattattacttt

SEQ ID NO: 437012 - DNA, 564 bp, Homo sapiens
gagggttgatctatctctctgctaggcagagattgtaatggctgctcaccttgatcaggactgagctgactcaagagtgaggtgtagctctggtgaatttcagcatacctctggtgactgcatgaccgtctatggctttcaaatgagaatctgttgtataccccacagcctatcctgctaatatttgtcttaagaggtaactctgattttcagataatttccatctttgaaaaaaaaaaaactagaatacagaggaactacgtgttctatgacagaattgaagtaaatatataacaagagtaaactatttttgataaagaagaaataaagggcygtgcaggcaagcatagataatttattttctgaaaacctgaactaaaaaatagttattattattattattattatactgtaagttctgggatacatgtgcagaatgtgcaggtttgttacatagataggcatttgccatggtggtttgctgcacccatcaacctgtcatctccattaggtacatctcctaatgctatccctccttttgccccccatacccccaacaggccc

SEQ ID NO: 437013 - DNA, 645 bp, Homo sapiens
agagaccttctccatgtactgtcataaagaactgaaaaacttcctgctgcaatactttacaaatacatcttagactgtgtctggacttttttccgaggacacctagcaggcaatcctgaactcttgtgagtttacattcacaagaatagactcctgatcttcagagttcggagaatttaaacatttaaaaaattcttattaaaaatagatacaataaaagataaaatatgataaatattttaaataaataatataatttggttttaaaaaattgtaattatcaagagctggaaggtctgrtagcaaaaatggaaataaaagccactgttgtaaaataagcaggattggccatgatttaatctagggggtctgaagttgtaaatatgaataataaaggagtaatataacattactcacaagcaatatgttaaaatatcaattgtcatactgtatacacatcgtttataaggggaagattcaaaatataaagccatagaattttaaaagcattgaaaaaactgaggcaaacactaataaaaagctaatgatataataacagatatatattcacacacacaagacatatgtgtgtatgtgtatatatacatatatattcattaggcatatatgtatcaatgtatgtgt

SEQ ID NO: 437014 - DNA, 645 bp, Homo sapiens
agagaccttctccatgtactgtcataaagaactgaaaaacttcctgctgcaatactttacaaatacatcttagactgtgtctggacttttttccgaggacacctagcaggcaatcctgaactcttgtgagtttacattcacaagaatagactcctgatcttcagagttcggagaatttaaacatttaaaaaattcttattaaaaatagatacaataaaagataaaatatgataaatattttaaataaataatataatttggttttaaaaaattgtaattatcaagagctggaaggtctgatagcaaaaatggaaataaaagccactgttgtaaaataagcaggattggccatgatttaatctagggggtctgaagttgtaaatatgaataataaaggagtaatataacattactcacaagcaatatgttaaaatatcaatygtcatactgtatacacatcgtttataaggggaagattcaaaatataaagccatagaattttaaaagcattgaaaaaactgaggcaaacactaataaaaagctaatgatataataacagatatatattcacacacacaagacatatgtgtgtatgtgtatatatacatatatattcattaggcatatatgtatcaatgtatgtgt

SEQ ID NO: 437015 - DNA, 353 bp, Homo sapiens
actcctctaaaactgtttaattccaagtcactaatgactttctagtcaaatccaaaagacacactcgtttccttattttacttgatctcttgrcatcatttggaactgtcagcaccagtgttcctcttataaagcacgtttttggcttctgatataaaaccccatcagaatttccaccaaaaagctttgactgctcactcgctgtctctaatgtggaatactcctcccctgctcatgtcttcaaaactaaaattctgtggggtcttgcattgcatttctcattctcctcagtctacacaatttccctgtaatactgcattccatagcatcagctgatacttctgtgccaaaca

SEQ ID NO: 437016 - DNA, 597 bp, Homo sapiens
gcataataatgatgtaggagtaaaataatcaacagtaatatcatgtaagatgggaaaggccaccagagtcaaatgcatgttcttatttctttccttcttttttagagacagagtcttgctatgttgcccaagatgaactaactcctggtctcaagcaatcctcccaccttagctgaatagccaggactgcaaacatagctcaatgcacctggccttgtttatttctgaaggagaatgagatacttattaattttagactagtgatatacttattaattttagactttgtagattaactctgtgcaaatcgtaatattgtgaagataactacaaaaagatatcaaacagggtatatgctgtctaaattatatgagaaaaaagtaaaaactttaatcaaagaaaataattgcctaaattaagcatagaaaatttgataattatgtttttaaaagatgatgtaattatatacgamttaatatttacaataaatatgtttattgcactaactactccacttacaaaatttgtaagtctgaattacaaagaaatcattttattctacattgtatacatatatttaaacaccacattataccc

SEQ ID NO: 437017 - DNA, 627 bp, Homo sapiens
aaattttatagtaactgggtatgtagcaataaaaaatgaatacaactttctaaactattgtaccacccaaaactactatttttattgtcagctatcactcatctcttctacgctgaattctacctatatgactttgttcatgttgcttactccatttagaacgtttgattcactactctatgtgtttccaaagccttactctctctttaaaataatatattaaactctgtcgtctttgcttaggtatagcaataaagttaaaagcatgtatttcacaacaaaagtaatatttttgcttatactttatagcacacagcttttatattattagayacaaagtttaattaatgaaaaatagcacttgatattataatgattcgtagaatgtaaagcattcaatggattatatatacatataaaactttacattcatacctgtaattagttttatgagctaagttattactttcttaatttgatcatgatgttatactaaaaacaaagagaaattgctcatgttttacagtataggagtgtgattgtgaaacatggttgcaactgtctacatgtggttgttttcatttatatttagaatatttaaaattaaacaaatagaggagtagccac

SEQ ID NO: 437018 - DNA, 565 bp, Homo sapiens
  misc_feature (1)...(565): n = A,T,C or G
tccaataagtctttcattgaatcaaccactataactacttggtataaattatttaaattattaatgagaattatcrtgtactagacttcattatgaatttttacattattttaaattaaaggttaaaatgttacctctggttactaataattgtttagtgtataaaatttgtataaatatagaagaggnnnnnnnnnnnnnnnnnnnnnnnnnnnnnnnnnnnnnnnnnnnnnnnnnnnnnnnnnnnnnnnnnnnnnnnnnnnnnnnnnnnnnnnnnnnnnnnnnnnnctgtgaacaaaactgccaaatatttgtgtctgctcagtttattaataaatctatagcacctagaactgagacactcaataaatattttctgaatgaataaatataatgagataggtttataaaacccagatcaaaacacaatgacaatagaacctattttttgcattttaaaattttcagctttaaatgaaataaaattaacaaatttgataaaaaattaacatttaaaatttagattttcgcagcttggtaatgaaagttaacttttttttttttt

SEQ ID NO: 437019 - DNA, 602 bp, Homo sapiens
agcagtattcatacttcccattgttcatctagtattggcaataaagataaaaaaaaaagtttcctatggttacacagtaaagccttctgtgcagagatgcttactagaaaagtattttgacttccctttttctcatctcctatcaagaagaaggcaacaagactcaatgtacatatttcagcatcaaattctgtaaagtaagtataatggatgactccttgggccatataacaaactcaagaagtatttggccccaacatatgattcaaggcaagtgagatttacatttttatgcaaagtaaggataataaatacaatagataagtttatgtgatttataataaacattaaaaagaaatacaccatacartaagctttttgtcccataataacattttttcatttaatcgtagtttaatgaaagttgttaattaaactaagattaaacattagtttaaacattaaactaatgaacagctttcgttaaactaaggtttaattaaaaagttgttaaattttttatatggcagaatagtatttcattatatgactattaacaaatttatttattcattcttaatctatttatgtattcttatact

SEQ ID NO: 437020 - DNA, 561 bp, Homo sapiens
atggtgatttctttccaaaccactaagaaatttaaaatgttaggccgggcgcggtggctcacgcctgttaatcctagcactttgggaggccaaggcgggtggatcacttgagctcaggagttcgagaccagccaagccaacatggtgaaaacccgtctctactaaaaatacaaaaattagccaggcatggtgatgggagcctgtaatcccagctatctgggaggctgaggcacaagaatcgcttgaacccggaaggcggaggttgcagtgagccaagatcgcccactgcactccagcctgggcgacggggcgtgatttcgtctcaaaaaaaaaaattaaaaatattagaaacacttcatttttgtgccgtgatttaacaaatactgtccctattttctcaacggaaacaatgaggcgataaaattttctcgtgactgctgctatgtaaacycctctactcaaccttcactgaacattttactgagacctattgggcgtcagacccgcggaggatccttcctcggatgtgtcttgactactgtgccatgatttttcactgct

SEQ ID NO: 437021 - DNA, 554 bp, Homo sapiens
aatattttctaattaactgttaaaatagaggccaccataattaaaactttaacaaggttccttgacaaactgatgccgatttctgttggaagagaaattgttggaaaatatataataactgaattgaaaaataacagggaaacatgctctgtcaaatatcaaaacacactataaagagctagtaattaagcagtgtggtattaaccaggaataggcaaatagatcagtgkatcagaatgaagtccagaaacacacacacacccccacacacccctacctggcattgtgaaaacttcgctcttgaaaacactgagagaaggttagtctgttcagtaatcctgttgggtcaattagttctgcatttaaaaaagaaactgaaagcagatacctacctcatattcatcaccaaataaactccagctgggataaaaagctaaatgcaaaaataaacccttaaaagtatagaatactctaccaaagcatattttaacataaatggagatggctttgaaagcaagataaaattcaccaaagccataaaggaaacagtagat

SEQ ID NO: 437022 - DNA, 537 bp, Homo sapiens
tgctaaaactaattcagatgaagaaaaggtaggaataatttatttgaaatcaatactatatagctctttataaattttttaaaaatccagccccagtcaaaaatcaaaaggtgttttataaatatctccacaaggtcattaagtaaaaaaattggattatttaaatttaaataagtcaaaggaaaatattgggaattagcatgtaatgctctcatcattattgttttgacatcttggttggaaaattctccccaaaatagctatttkctattcaacatagtactggaagtgctagccagagcaatcagacaagagaaagaaaaaaaaaaggcatctacatatgaaaagaattcaaactatctctcttcaaggataatatgaccctatacatagaaaaccctacagactctgccaaaagggtcctggaattgataaacaacttcggtaaagtttcaggatacaaaatcaatgtacaaaaaatcaataacatttctatacaccaacaacattcaagctaagagccaaatcgagaatgca

SEQ ID NO: 437023 - DNA, 537 bp, Homo sapiens
tgctaaaactaattcagatgaagaaaaggtaggaataatttatttgaaatcaatactatatagctctttataaattttttaaaaatccagccccagtcaaaaatcaaaaggtgttttataaatatctccacaaggtcattaagtaaaaaaattggattatttaaatttaaataagtcaaaggaaaatattgggaattagcatgtaatgctctcatcattattgttttgacatcttggttggaaaattctccccaaaatagctattttctattcaacatagtactggaagtgctagccagagcaatcagacaagagaaagaaaraaaaaaggcatctacatatgaaaagaattcaaactatctctcttcaaggataatatgaccctatacatagaaaaccctacagactctgccaaaagggtcctggaattgataaacaacttcggtaaagtttcaggatacaaaatcaatgtacaaaaaatcaataacatttctatacaccaacaacattcaagctaagagccaaatcgagaatgca

SEQ ID NO: 437024 - DNA, 537 bp, Homo sapiens
tgctaaaactaattcagatgaagaaaaggtaggaataatttatttgaaatcaatactatatagctctttataaattttttaaaaatccagccccagtcaaaaatcaaaaggtgttttataaatatctccacaaggtcattaagtaaaaaaattggattatttaaatttaaataagtcaaaggaaaatattgggaattagcatgtaatgctctcatcattattgttttgacatcttggttggaaaattctccccaaaatagctattttctattcaacatagtactggaagtgctagccagagcaatcagacaagagaaagaaaaaaaaaaggcatctacatatgaaaagaattcaaactatctctcttcaaggataatatgaccctatacatagaaaaccctacagactctgccaaaagggtcctggaattgataaacaacttyggtaaagtttcaggatacaaaatcaatgtacaaaaaatcaataacatttctatacaccaacaacattcaagctaagagccaaatcgagaatgca

SEQ ID NO: 437025 - DNA, 582 bp, Homo sapiens
tgtttatttttcattgataattataattattataataatgtttttttttttttttttgagacagagtcttgctctgtctcccaagctggagtgcagtggcatgatctcagttcactgcaacctctgcctcccgggttcaagtgattctcatgccycagcctcctgagtagctgggactataggcatgcacaaccactccaggctaactgtattttttgtatttttagtagagacaagttttgccatgttggccaggctggtctcaaactcctggactcaagtgatctgcctgccttggcctcccaaagtactaggattacaggtgtgagccaccacacctggcctataattattatttaaattattaattttctactaatgctgagaaagatggtataagacataaaaatctaatgtttgtctaatgatatgggtcaaggcacctaatattaatagttagctaaagaataggggaaaatatttacaaataattccaatgtagaatgatttatagaaagttactttatatttttccacattacattttaaagttacttaaaatatttttggctacatgaaatt

SEQ ID NO: 437026 - DNA, 582 bp, Homo sapiens
tgtttatttttcattgataattataattattataataatgtttttttttttttttttgagacagagtcttgctctgtctcccaagctggagtgcagtggcatgatctcagttcactgcaacctctgcctcccgggttcaagtgattctcatgccccagcctcctgagtagctgggactataggcatgcacaaccactccaggctaactgtattttttgtatttttagtagagacaagttttgccatgttggccaggctggtctcaaactcctggactcaagtgatctgcctgccttggcctcccaaagtactaggattacaggtgtgagccaccacacctggcctataattattatttaaattattaattttctactaatgctgagaaagatggtataagacataaaaatctaatgtttgtctaatgatatgggtcaaggcacctaatattaatagttagctaaagaataggggaaaatatttacaaataattccaatgtagaatgatttatagaaagttactttatatttttccacattacattttaaagtwacttaaaatatttttggctacatgaaatt

SEQ ID NO: 437027 - DNA, 596 bp, Homo sapiens
atttctttgacatattttaaaatgtcagtctcttggccagcaggcagaaatggccttacaaagctgtcttaagtgggaaagtttgcattaatgtggagaatctccactaatgcarctgtgccacctctcctttctatgcttttccccagatctaggagagactgaaagtctgacacatttaaaagtctgagaagaaacatttaccatctattctctctgagggtggcttcatctacataaaaagtccacctttgttcgccaaaccttttctccctgctcccaaaaccttttttaaaatcagaatctaagcccccactctttctgtaacctcaaaatggtatataagtttctataactcattgggaagttgggtcttcattctgaagactcccatgtatacatattaaataaatctgtgtgccttttctcctattaataaatatgattcatgtctgtgatttttagcaaacttcaggggcgaagagcctatggcggcccccactaaagaaaactgaacagtctcagagacctgtaaaacactatcaactataccaacatatgtataatgagtgtcccagaaggagaggggaaagaaa

SEQ ID NO: 437028 - DNA, 596 bp, Homo sapiens
atttctttgacatattttaaaatgtcagtctcttggccagcaggcagaaatggccttacaaagctgtcttaagtgggaaagtttgcattaatgtggagaatctccactaatgcaactgtgccacctctcctttctatgcttttccccagatctaggagagactgaaagtctgacacatttaaaagtctgagaagaaacatttaccatctattctctctgagggtggcttcatctacataaaaagtccacctttgttcgccaaaccttttctccctgctcccaaaaccttttttaaaatcagartctaagcccccactctttctgtaacctcaaaatggtatataagtttctataactcattgggaagttgggtcttcattctgaagactcccatgtatacatattaaataaatctgtgtgccttttctcctattaataaatatgattcatgtctgtgatttttagcaaacttcaggggcgaagagcctatggcggcccccactaaagaaaactgaacagtctcagagacctgtaaaacactatcaactataccaacatatgtataatgagtgtcccagaaggagaggggaaagaaa

SEQ ID NO: 437029 - DNA, 596 bp, Homo sapiens
atttctttgacatattttaaaatgtcagtctcttggccagcaggcagaaatggccttacaaagctgtcttaagtgggaaagtttgcattaatgtggagaatctccactaatgcaactgtgccacctctcctttctatgcttttccccagatctaggagagactgaaagtctgacacatttaaaagtctgagaagaaacatttaccatctattctctctgagggtggcttcatctacataaaaagtccacctttgttcgccaaaccttttctccctgctcccaaaaccttttttaaaatcagaatctaagcccccactctttctgtaacctcaaaatggtatataagtttctataactcattgggaagttgggtcttcattctgaagactcccatgtatacatattaaataaatctgtgtgccttttctcctattaataaatatgattcatgtctgtgatttttagcaaacttcaggggygaagagcctatggcggcccccactaaagaaaactgaacagtctcagagacctgtaaaacactatcaactataccaacatatgtataatgagtgtcccagaaggagaggggaaagaaa

SEQ ID NO: 437030 - DNA, 596 bp, Homo sapiens
atttctttgacatattttaaaatgtcagtctcttggccagcaggcagaaatggccttacaaagctgtcttaagtgggaaagtttgcattaatgtggagaatctccactaatgcaactgtgccacctctcctttctatgcttttccccagatctaggagagactgaaagtctgacacatttaaaagtctgagaagaaacatttaccatctattctctctgagggtggcttcatctacataaaaagtccacctttgttcgccaaaccttttctccctgctcccaaaaccttttttaaaatcagaatctaagcccccactctttctgtaacctcaaaatggtatataagtttctataactcattgggaagttgggtcttcattctgaagactcccatgtatacatattaaataaatctgtgtgccttttctcctattaataaatatgattcatgtctgtgatttttagcaaacttcaggggcgaagagcctatggyggcccccactaaagaaaactgaacagtctcagagacctgtaaaacactatcaactataccaacatatgtataatgagtgtcccagaaggagaggggaaagaaa

SEQ ID NO: 437031 - DNA, 561 bp, Homo sapiens
cttaatattgttaagatggcaacactacccaaagtgatctacagattcaacatactctctccatcaaaacaccagctatattttgtgaagaaattgacaagtggatcctaaatccacatggaaataaaagggactctgaataaccaaaacaatcttgaaaaagaacaataaaattggagtactcgcacttcttgattttaaactcactaaaaagttagtcatccagacagtatggtattggcataaggatagagttatagatcaatgaaacacaactgggagtctaagagtaaacccatatgttacggtcaattgtttttttacaagagtgccaagagcatttaattggcaaaggatagtgtcttcaacctatggtgttaggacaactgaataaatacaggcaaaagagtgaaaytggacgcctacctcacatcatatacaaaaatgaactcaaaatgggtgaaaagggagctaaaactataaaactcttagaagaaaacataggttaggcaatgacttcttatgtatgacacctaacacacaagcaagcaagaaaaagta

SEQ ID NO: 437032 - DNA, 561 bp, Homo sapiens
cttaatattgttaagatggcaacactacccaaagtgatctacagattcaacatactctctccatcaaaacaccagctatattttgtgaagaaattgacaagtggatcctaaatccacatggaaataaaagggactctgaataaccaaaacaatcttgaaaaagaacaataaaattggagtactcgcacttcttgattttaaactcactaaaaagttagtcatccagacagtatggtattggcataaggatagagttatagatcaatgaaacacaactgggagtctaagagtaaacccatatgttacggtcaattgtttttttacaagagtgccaagagcatttaattggcaaaggatagtgtcttcaacctatggtgttaggacaactgaataaatacaggcaaaagagtgaaactggacgcctacctcacatcatatacaaaaatgaactcaaaatgggtgaaaagggagctaaaactataaaactcttwgaagaaaacataggttaggcaatgacttcttatgtatgacacctaacacacaagcaagcaagaaaaagta

SEQ ID NO: 437033 - DNA, 640 bp, Homo sapiens
ataatccagtatactttaaatcatctctagattacttaacattagattacattaacacraaagtaaatgctatataaatagatgttatactttgttgggtttttaaaaattatttattattattgtattattattattattattttccccaattttttttgatccacagttggttgaattcatggatgcagaatttgtggatatggaaggctatctgtatagaaatggccaacaagtacaagaaaagatttcaacatcattagtcattaggaaagtgcaaatcaaaaccacagtaagatatcacttcacatccactaggatggttaaatttttttaaataaaggacaacatgtgttgataaggatgtggagaaattggaaccctgatacacagctaatgggaatataaaatggtacagccactatagaaaatagcttggcagttcctcaaaaagataaacaaaatggaattaacccagcaattccacttctaggcatgcaccaaagagaattaaaaatatttgcacacaaaacttgtacagggatgttcatagtagcattattcataatagtgaagaggtgtaaacatgtaaatgttcatcagctgatgattcggtaaataaaatgtggcatatccaaaa

SEQ ID NO: 437034 - DNA, 640 bp, Homo sapiens
ataatccagtatactttaaatcatctctagattacttaacattagattacattaacacaaaagtaaatgctayataaatagatgttatactttgttgggtttttaaaaattatttattattattgtattattattattattattttccccaattttttttgatccacagttggttgaattcatggatgcagaatttgtggatatggaaggctatctgtatagaaatggccaacaagtacaagaaaagatttcaacatcattagtcattaggaaagtgcaaatcaaaaccacagtaagatatcacttcacatccactaggatggttaaatttttttaaataaaggacaacatgtgttgataaggatgtggagaaattggaaccctgatacacagctaatgggaatataaaatggtacagccactatagaaaatagcttggcagttcctcaaaaagataaacaaaatggaattaacccagcaattccacttctaggcatgcaccaaagagaattaaaaatatttgcacacaaaacttgtacagggatgttcatagtagcattattcataatagtgaagaggtgtaaacatgtaaatgttcatcagctgatgattcggtaaataaaatgtggcatatccaaaa

SEQ ID NO: 437035 - DNA, 640 bp, Homo sapiens
ataatccagtatactttaaatcatctctagattacttaacattagattacattaacacaaaagtaaatgctatataaatagatgttatactttgttgggtttttaaaaattatttattattattgtattattattattattattttccccaattttttttgatccacagttggttgaattcatggatgcagaatttgtggatatggaaggctatctgtatagaaatggccaacaagtacaagaaaagatttcaacatcattagtcattaggaaagtgcaaatcaaaaccacagtaagatatcacttcacatccactaggatrgttaaatttttttaaataaaggacaacatgtgttgataaggatgtggagaaattggaaccctgatacacagctaatgggaatataaaatggtacagccactatagaaaatagcttggcagttcctcaaaaagataaacaaaatggaattaacccagcaattccacttctaggcatgcaccaaagagaattaaaaatatttgcacacaaaacttgtacagggatgttcatagtagcattattcataatagtgaagaggtgtaaacatgtaaatgttcatcagctgatgattcggtaaataaaatgtggcatatccaaaa

SEQ ID NO: 437036 - DNA, 640 bp, Homo sapiens
ataatccagtatactttaaatcatctctagattacttaacattagattacattaacacaaaagtaaatgctatataaatagatgttatactttgttgggtttttaaaaattatttattattattgtattattattattattattttccccaattttttttgatccacagttggttgaattcatggatgcagaatttgtggatatggaaggctatctgtatagaaatggccaacaagtacaagaaaagatttcaacatcattagtcattaggaaagtgcaaatcaaaaccacagtaagatatcacttcacatccactaggatggttaaatttttttaaataaaggacaacatgtgttgataaggatgtggagaaattggaaccctgatacacagctaatgggaatataaaatggtacagccactatagaaaatagcttggcagttcctcaaaaagataaacaaaatggaattaacccagcaattccacttctaggcaygcaccaaagagaattaaaaatatttgcacacaaaacttgtacagggatgttcatagtagcattattcataatagtgaagaggtgtaaacatgtaaatgttcatcagctgatgattcggtaaataaaatgtggcatatccaaaa

SEQ ID NO: 437037 - DNA, 579 bp, Homo sapiens
aatcctttcaattctatgaaggctgagagaagtgagaaagctgcagaagaaaagctggaagccagcagaggatggttcatgaggtttaaggaaagaagcccccttcataacataaaaatgccaagtgaagcagtaagtgctgatgtcacacctgttgctgcaattttttgctggaggaattaaatatgtcttatgtgttgcagcaagttacccagaactagctaagatcaytgatgaaggtgattacactaaccaacagattttcaatgtacacaaaacagccttctgttggaaaaagatgcaagctgagaaaagtgggaaattctggccttctccattattatcaagcctctaaagattctggagatacccctatctcagccccacagtccatgtgacttttaaaaaaatatatatggaggaaactgtgaaagccatatcacccagacattcctagctagagaggagaagacaatgcctcgcttcaaagcatcaaaaaacaggttgacttgtctaatgcagccagtgagtttatgttgaagctaatgctcaattaccattctgaaaatcctaggaatt

SEQ ID NO: 437038 - DNA, 579 bp, Homo sapiens
aatcctttcaattctatgaaggctgagagaagtgagaaagctgcagaagaaaagctggaagccagcagaggatggttcatgaggtttaaggaaagaagcccccttcataacataaaaatgccaagtgaagcagtaagtgctgatgtcacacctgttgctgcaattttttgctggaggaattaaatatgtcttatgtgttgcagcaagttacccagaactagctaagatcactgatgaaggygattacactaaccaacagattttcaatgtacacaaaacagccttctgttggaaaaagatgcaagctgagaaaagtgggaaattctggccttctccattattatcaagcctctaaagattctggagatacccctatctcagccccacagtccatgtgacttttaaaaaaatatatatggaggaaactgtgaaagccatatcacccagacattcctagctagagaggagaagacaatgcctcgcttcaaagcatcaaaaaacaggttgacttgtctaatgcagccagtgagtttatgttgaagctaatgctcaattaccattctgaaaatcctaggaatt

SEQ ID NO: 437039 - DNA, 579 bp, Homo sapiens
aatcctttcaattctatgaaggctgagagaagtgagaaagctgcagaagaaaagctggaagccagcagaggatggttcatgaggtttaaggaaagaagcccccttcataacataaaaatgccaagtgaagcagtaagtgctgatgtcacacctgttgctgcaattttttgctggaggaattaaatatgtcttatgtgttgcagcaagttacccagaactagctaagatcactgatgaaggtgattacactaaccaacagattttcaatgtacacaaaacagccttctgttggaaaaagatgcaagctgagaaaagtgggaaattctggccttctccattattatcaagcctctaaagattctggagatacccctatctcagccccacagtccatgtgacttttaaaaaaatatatatggaggaaactgtgaaagccatatcacccagacattcctagctagagaggagaagacaatgcctcgcttcaaagcatcaaaaaacaggttgacttgtctaatgcagccagtgastttatgttgaagctaatgctcaattaccattctgaaaatcctaggaatt

SEQ ID NO: 437040 - DNA, 641 bp, Homo sapiens
atgggaagaactgcaaatcatccattaacctttccaatcaccgtagtatccacatggttagaactgtccttcactataaagattaacaattcactctagagtgaaaatctttaacatttatactggggacagkattaacatcttcctgggaagctgttaaaataggcttttatcatatgttcagtgatcctgcggagtcagagtaggattatttcacataagtgaatttttcatataaactaaggtaaatgaatgctttggggacaaaagactttacttttaaccttaaaaaaaatcctccaacaatgttttatatatcacctttttcttaataacttgggcttatgattatgagcatacatttctattttatgttcagttcagtaaataattttgcatatttgctttttgccactctttgtgaaagggaatagaaagcatgagtcaccctgactgacctcagggaggaacctacagctgagtgaagcaaacagatatatcagcaataagggaccaagaggaaggctaaggcaagtagaaattctggtgcccctgtcacagagaggggctaggaaaatcagaaaagaaacacaggaaagtgatattcaccatttactggaatttaaaacctattatgtgtc

SEQ ID NO: 437041 - DNA, 641 bp, Homo sapiens
atgggaagaactgcaaatcatccattaacctttccaatcaccgtagtatccacatggttagaactgtccttcactataaagattaacaattcactctagagtgaaaatctttaacatttatactggggacagtattaacatcttcctgggaagctgttaaaataggcttttatcatatgttcagtgatcctgcggagtcagagtaggattatttcacataagtgaatttttcatataaacwaaggtaaatgaatgctttggggacaaaagactttacttttaaccttaaaaaaaatcctccaacaatgttttatatatcacctttttcttaataacttgggcttatgattatgagcatacatttctattttatgttcagttcagtaaataattttgcatatttgctttttgccactctttgtgaaagggaatagaaagcatgagtcaccctgactgacctcagggaggaacctacagctgagtgaagcaaacagatatatcagcaataagggaccaagaggaaggctaaggcaagtagaaattctggtgcccctgtcacagagaggggctaggaaaatcagaaaagaaacacaggaaagtgatattcaccatttactggaatttaaaacctattatgtgtc

SEQ ID NO: 437042 - DNA, 641 bp, Homo sapiens
atgggaagaactgcaaatcatccattaacctttccaatcaccgtagtatccacatggttagaactgtccttcactataaagattaacaattcactctagagtgaaaatctttaacatttatactggggacagtattaacatcttcctgggaagctgttaaaataggcttttatcatatgttcagtgatcctgcggagtcagagtaggattatttcacataagtgaatttttcatataaactaaggtaaatgaatgctttggggacaaaagactttacttttaaccttaaaaaaaatcctccaacaatgttttatatatcacctttttcttaataacttgggcttatgattatgagcatacatttctattttatgttcagttcagtaaataattttgcatatttgctttttgccactctttgtgaaagggaatagaaagcatgagtcaccctgactgacctcagggaggaacctacagctgagtgaagcaaacagatatatcagcaataagggaccaagaggaaggctaaggcaagtagaaattctggtgcccctgtcacagagaggggctaggaaaatcagaaaagraacacaggaaagtgatattcaccatttactggaatttaaaacctattatgtgtc

SEQ ID NO: 437043 - DNA, 560 bp, Homo sapiens
ttagctctaatccccaaacctaatgcccttcctctcaatcctttcattatccctctagatattctggatcagtgactagcagattattctgcatgccactcccatcctcaaaatcctctacctccttgtctgacctagctatgtcttcaggactccaaccctcttttcggctcttcctcccttgactgtcactgttgaacttcttcagagcaatatcccagactatttyttcttttcccactgtatattctccccaaagcatttcattcattcaatgacttcactttttatataataattttgaaattttatataataatttgaaattaataattttcaaatctttatttgtttcctgagagtcatatatccaactgctctttggacacttccatttggataacacacattgaaaactgagtttacatcctaatcttaaaacatatgccaaaataagattaatattgattaaatatttaaacgtcagatattatgctatacaaatactaaaatatgtggtgaatgctatgaaacattgagatggtctttttaactgtaac

SEQ ID NO: 437044 - DNA, 560 bp, Homo sapiens
ttagctctaatccccaaacctaatgcccttcctctcaatcctttcattatccctctagatattctggatcagtgactagcagattattctgcatgccactcccatcctcaaaatcctctacctccttgtctgacctagctatgtcttcaggactccaaccctcttttcggctcttcctcccttgactgtcactgttgaacttcttcagagcaatatcccagactatttcttcttttcccactgtatattctccccaaagcatttcattcattcaatgacttcactttttatataataattttgaaattttatataataatttgaaattaataattttcaaatctttatttgtttcctgagagtcatatatccaactgctctttggacacttccatttggataacacacattgaaaactgagtttacatcctaatctkaaaacatatgccaaaataagattaatattgattaaatatttaaacgtcagatattatgctatacaaatactaaaatatgtggtgaatgctatgaaacattgagatggtctttttaactgtaac

SEQ ID NO: 437045 - DNA, 579 bp, Homo sapiens
tctcagcctctcattatccttatgtagggtgtcaatacaacttagcagcaaatgcttgcatcatggcttcttccacagtattctactccaacaggacattttccaagatcatcatcagtgcaatctttatgaagtgaactgccacattgggccaggatctattgctgtcacacctaccaatcagaacagatcctgctacatggtgagtgagccagttacaaattacctcctattttctcgtatcactatccatactcctagttttagaactggtcttctgagaagcagacactaagatgggattacatgtacaaggatcatgttatcagatatgcccatgtaaaaggaaatagagagggrgcaggaggaggccaggagagcagtctgacagtaatgcaagtcttagccctagtaaaggacagtgagagaaggttggctgaaagcaaaagcatcctaggctgtaatgtagtctaggaaaagtttggcaaagccaaccaagagtactcacttctgcagcacatatactaaaattagaatgatacagagaagattagcatagtccctgtgcaagaatgacac

SEQ ID NO: 437046 - DNA, 553 bp, Homo sapiens
ttcataaatgaaggagaaataaagtcattttcagacaaacaaatgctgagggaatttgtcactaccaaaccagcactataagaaatgctaaaaggagttctagaccttgaaacaaaagcccaatatgtaccaaaacagaacctcttgaaaccttaaaactcacagggactayaaaacaataacacaatgaaaaaaaactatctaggtaacaattaatatgatgaagagaacagtgcctcgtatctcaatattaacactgaatgtaaatggtctaaatgctctgcttaaaaaatacagaatgaatttaaaaaatcacaaaccaaatatctgctgtcttcaagagactcacctaacatggaaggattcatataaactcaaggtaaaagggtgcaaaaagatattccacgcaaatagaaaccaaaagtgagaagtagtagctattcttatatcagacaaaacagacttcaaagcaataacacattaaaaaaaagcaaagatggtcactatataatgacaaaaggatcaattcaacaagaagatatttcaattctaa

SEQ ID NO: 437047 - DNA, 586 bp, Homo sapiens
taactgtactggatgtttttgccttcagtcttttttcctaggcttcacttctactttgtttagtggcttggattatattttatatgctgttttgtggcctacttttccccaataagctttataacatctcacttccactgccaggtgacattctactgaactaataatgtacagcagcttacttaaggcatcctcctatgttatgtgttgttttctatattttactaatatattgctctaatgggtttctgtgtatacatactgtgctctgtgttttagattcactcctcaggacggatccttgtaagtggaagaaccatgtcaaaggctgtgaaaagtttcaaagcccttcacacacgttgtcaaattgttgactcttctatccttcccttcccagaatagttcccgagacacccccgcagagcccccagagttcctcagagctcagtgagaacaccactgatgtagaatatttgagttattcattggccgtatgtcaarctaggtttttaaatataatttctctgccattctggtgtttacagaggtttagtaacttgcctaaggttccagttagtaatagcag

SEQ ID NO: 437048 - DNA, 516 bp, Homo sapiens
tctgacttcctccaacaggctctgctctcaccaagcacctcccttgtaccaggaatgtccttcctccctcacctgcgctagttagtaccaagtccatccctagttctcagcttaaatgtccctgcctcaaagatggggacacaaagatgaataaaaggcagttcttgttcttatggagctcacaacttagtggtagaaagggtcacaaaagaaattatggcccagacagtcttgtaagtgctgtagtagaggaaccatgcacagatggggatgtggcggaagccatgggaacaaatgaaggttatgcagsatagtgtctaaagtcaaaagagcagggacccccagatagaacccagccctgattcttcatatcaccaaagaagcctcagggtgttattttagtcagtttagacttttctcccaacttagaggagagaagagaggagaagaaaaaaaaattgccataagtagcagtggctgaatgtgacatggaatgattaaatcagcttagattaa

SEQ ID NO: 437049 - DNA, 649 bp, Homo sapiens
attatatattcaattttttttcttctagttaccatgtagaatatagctatatgatgatataaaccattctgctgaatggagttgttctttccaaccttcttccttgcttcagagagagtcaattttgattgacgtgcacattcacatacatcagaaggcacagggatcttctgcttctataaaacctgtcttttaatgtacatgaacactaatttatagtgtgtgtattgcactaaatgtcacaattagaaagttcactttgtttttccatcagcattcgggtgtagcaggtagtacagatttrtaatgtgaggaaatgaaatagcgggcagtttatgtcgaataacagtcgttctgaattacagaattgtggatactgacccatatttgttttctttctcattaaagttccatcaagctccgcctcagagaatgctattggtgatccatataaaactcacatttccagtgcagcgctgtctctgaattccttgcatactgtcagatattattctaaagtcaccccttcctacgatgcaactgctgtaacaaatcagaacatttcaattcatttaccttcagccatgcccccggtctcaaagcttctccctcggcactgcacttctgggttgggccagacgtgcactac

SEQ ID NO: 437050 - DNA, 632 bp, Homo sapiens
ccagccagcagaaacccctgacctgcatttgttgttgctactctggttggaaggctgggacctaagagcttgattctgagtctctctaccctgatgagtgaaaaggaggtgcagtcaacccatgctctcgctcctcatgctgcagggctggtgtctcgatayccagaaccagtgaagctgaatgggactgtgctagtttgacggtgaccaggtggaatctgatctcccctagcactgattgcccacccctctgcttctactcagagcttccacagtggcacatcccattttagcaccctcatcctcaactggccccgtaactaactgctacttatctcttaggtgggcagcatcacttacactaatcaaaaagctttctttcagtcaccagccaggctgatttcagataccaggtgtcttcatacagcagatatttactgagcacccattatgttctgacattgagtttgtcattgtactaagaatgtggtatacaaaggtagacacgatccctgccctcatgcagatttagtgttaaggggatgcagacaaagaagcagaaattacaatatggttgaagcgggtaggaggagtgccccactatatatatcagctagatgtgggcaaggtta

SEQ ID NO: 437051 - DNA, 595 bp, Homo sapiens
ggccccgtaactaactgctacttatctcttaggtgggcagcatcacttacactaatcaaaaagctttctttcagtcaccagccaggctgatttcagataccaggtgtcttcatacagcagatatttactgagcacccattatgttctgacattgagtttgtcattgtactaagaatgtggtatacaaaggtagacacgatccctgccctcatgcagatttagtgttaaggggatgcagacaaagaagcagaaattacaatatggttgaagcgggtaggaggagtgccccactatatatatcagctagatgtgggcaaggttagtgactgctcacccctggagaaataccatctatgtcaatctctagccactaaggaatagctaggtagargggtgaggaatcgggagtgagtaggcaagagcagtcctggcagatgggtcagcatatgaaacagtcatacctgcattgtttggaagaactgtctagtgctagaggaagactcaaactaaattggcctacttaaaatggacttctgttaactttaatatagttgctaatacttttgcatattaacaatagctaacatgttttgag

SEQ ID NO: 437052 - DNA, 558 bp, Homo sapiens
ttacagactagcaggttttttgtttttcatctcttcctccctatgggtattagaaaggacagttgaaaataagggggaaaaaggtttgttttatatttcactgaattgttcttatatgtaagttttattattaaataaaatactcagttttcaccctgagcattgtaatccrtttttgttttgtttaataaatatatgttttctcttttagtagtactatgtagggaatttaatttcctagagttttgagaagcttaaaaattactgtaggcatagcctaattctcacatcaaattgtacaacttttctttgaggataccaaaatgatggaatctgcagatgtttgacatactttataaaggaacagaagtttccaactaaggctttattcttattattaaaaacaggtgcatgattcttcattctctttcctttaggaataattgctttgacattagaaaagaacctgttgaggtattttggacactgggactactgcctatgttcccagctggtcttaattgttgctggggcttttgctttgtaccagggtttctt

SEQ ID NO: 437053 - DNA, 558 bp, Homo sapiens
ttacagactagcaggttttttgtttttcatctcttcctccctatgggtattagaaaggacagttgaaaataagggggaaaaaggtttgttttatatttcactgaattgttcttatatgtaagttttattattaaataaaatactcagttttcaccctgagcattgtaatccatttttgttttgtttaataaatatatgttttctcttttagtagtactatgtagggaatttaatttcctagagttttgagaagcttaaaaattactgtaggcatagcctaattctcacatcaaattgtacaacttttctttgaggataccaaaatgatggaatctgcagatgtttgacatactttataaaggaacagaagtttccaactaaggctttattcttattattaaaaacaggtgcatgattcttcattctctttcctttaggaataattgctttgacattagaaaagaacctgttgaggtattttggacactgggactactgcctatgttcscagctggtcttaattgttgctggggcttttgctttgtaccagggtttctt

SEQ ID NO: 437054 - DNA, 597 bp, Homo sapiens
accctgctgcaagattttcctttactatttacattctttcttgttattcttaacacttgcatcatcacaaaggtgtgttttcttcgtgacaagtrtttttacatgactcagttgaaagctgagattatgtgtggttgatttttcatccatgactgcacatttgtcttgatcttaagaattcccagctttttgaaacgaaagttttaacatttttgctcagatccacatatttgattccttgttggttttcacagcactctgggcaaaaaatgggactgaaagttggtgtatgttaaatctaagagcatggcaaataatgctggaccacggctctattcaattctataatttatctaggggagtggccccatcccacgtgcccttaccccagtggaaaagtctggctgcctcatacgatatcaacatcaaaagattagcgttgtattgaatatagtctcatttatttaccagttaagatctattgccaatgcatttatctgggaatcttgttttagcttactttatttttcgcttctatcacctttgaaagaatgttcccctttggagcaaaagttttcaaaatagttcatactggtc

SEQ ID NO: 437055 - DNA, 601 bp, Homo sapiens
ctaccctgctgcaagattttcctttactatttacattctttcttgttattcttaacacttgcatcatcacaaaggtgtgttttcttcgtgacaagtatttttacatgactcagttgaaagctgagattatgtgtggttgatttttcatccatgactgcacatttgtcttgatcttaagaattcccagctttttgaaacgaaagttttaacatttttgctcagatccacatatttgattccttgttggttttcacagcactctgggcaaaaaatgggactgaaagttggtgtatgttaaatctaagagcatggcaaataatgctggaccacggctctattcaattctataatttatctaggggagtggccccatcccaygtgcccttaccccagtggaaaagtctggctgcctcatacgatatcaacatcaaaagattagcgttgtattgaatatagtctcatttatttaccagttaagatctattgccaatgcatttatctgggaatcttgttttagcttactttatttttcgcttctatcacctttgaaagaatgttcccctttggagcaaaagttttcaaaatagttcatactggtctc

SEQ ID NO: 437056 - DNA, 584 bp, Homo sapiens
tgtgtattctgccaaaacagttgagtaaatgaaacaaacttaacagctttttgcctaatttgctaatataccaacaggcctcacaattaggtatgcatgtcaggtgtattagtccattttcacactgccgataaagacatatccaagactgggtaaattataaagaaaaagaagtttaatggactcatagttccaagtgacyggggaggcctcataatcatggcagaaggtgaaaagcaaatcttacatggcagcaggcaagagagagaacttgtgcagggaaactcccctttataaaaccatcagatctcatgaggcttattcactgtcatgagaatagcacgggaaagaccgcctccatgattcgattatctcccactggatacctctcacaacacatgggaattatgggagctacaattcaagatgagatttgggtggggacacagccagaccatatcatcagggttgttcaggagactccttggggagttgtaagttgtagccctgtattaggatggggttccaggagatgctgccatggagcatcccttttacgtccacatatggtccttctgaggaac

SEQ ID NO: 437057 - DNA, 584 bp, Homo sapiens
tgtgtattctgccaaaacagttgagtaaatgaaacaaacttaacagctttttgcctaatttgctaatataccaacaggcctcacaattaggtatgcatgtcaggtgtattagtccattttcacactgccgataaagacatatccaagactgggtaaattataaagaaaaagaagtttaatggactcatagttccaagtgactggggaggcctcataatcatggcagaaggtgaaaagcaaatcttacatggcagcaggcaagagagagaacttgtgcagggaaactcccctttataaaaccatcagatctcatgaggcttattcactgtcatgagaatagcacgggaaagaccgcctccatgattcrattatctcccactggatacctctcacaacacatgggaattatgggagctacaattcaagatgagatttgggtggggacacagccagaccatatcatcagggttgttcaggagactccttggggagttgtaagttgtagccctgtattaggatggggttccaggagatgctgccatggagcatcccttttacgtccacatatggtccttctgaggaac

SEQ ID NO: 437058 - DNA, 536 bp, Homo sapiens
ttctgtatgaattctatatggaccaaaattttaaaaaaatacactgtacctttaacttttctyctctaatatgcagaatagcatacatctagcaaacagctatttttactgggcacataaatcttactcctccaaaattcctggtctttcttaggcaagggaacatgttcccagtggaaaaggcctgagattatattctgttttaatgcttctcatcctggtagaatcatttctctgtttctcaatgtttttacttgctgagtaatactgttaatgtagaatcttaaaaactgtaggaaggttttattaaaagataagaaggtaccatgaggcctatttttagttagaactctggtactttttgagttctaaaagcctcaaatacaatgcctcatctcagatgtcttagaatgtagcctcttcacttattcattcagcaaatatttactaaggtcctattacatggctgttactatcttaggtgccagggatagagtggcttactcaccagttctttggaagagaagagacaatta

SEQ ID NO: 437059 - DNA, 536 bp, Homo sapiens
ttctgtatgaattctatatggaccaaaattttaaaaaaatacactgtacctttaacttttctcctctaatatgcagaatagcatacatctagcaaacagctatttttactgggcacataaatcttactcctccaaaattcctggtctttcttaggcaagggaacatgttcccagtggaaaaggcctgagattatrttctgttttaatgcttctcatcctggtagaatcatttctctgtttctcaatgtttttacttgctgagtaatactgttaatgtagaatcttaaaaactgtaggaaggttttattaaaagataagaaggtaccatgaggcctatttttagttagaactctggtactttttgagttctaaaagcctcaaatacaatgcctcatctcagatgtcttagaatgtagcctcttcacttattcattcagcaaatatttactaaggtcctattacatggctgttactatcttaggtgccagggatagagtggcttactcaccagttctttggaagagaagagacaatta

SEQ ID NO: 437060 - DNA, 521 bp, Homo sapiens
ttggcctcacattttattagaactaagaagggtaggagagtttttcagagtttggtgtcacatccatgcgtactaggttagtgttgtgaaagttctgagcactgggtggggggcagtgggaggggaatatgcttcattctttgtgcagtttttcaaactattttcttttcaaactacaaaaccagaaagtgttcatgtgatagggcattaacatagagatacacaaagaaaacggcaacaatctgtctcccccactattggctccttagcagccaatatttacacttttggatgcatgtttatccttagctctgtaagctcatacaattatatgccaacagatacacaatacagattctctttctttctcttcattaccaaataatgagatgatactataaatatttctgccacttgccttttcatataacagcatatcatattcctccacgtcaatatatgtagcctaastcgtatgttattaatagaagcatgttattctgtagtatgtatatatgtgc

SEQ ID NO: 437061 - DNA, 604 bp, Homo sapiens
ttgactttgcatttggtgtatggacatttttatcagtttcattgagctgtaatttacatacaataaaattgacctgttttaagtgtacaatgtggtagattttgacaaataggtacctgtatgtaaccatcaccacaatgatgatatagaagtttcattatcccacatattttacctatgcttctttgtaaccaatcttttcccacctctagccctgtgaccactgatctggttttcttgccttttctggaatttcatataaatgaaattatgcagcatgtagtcatttgtgcctgtcttttttcactgaacataataccttgagatcccatgttgtgtgtatcagcmgttccactttttaaatagctgtatgcatattccacagtttgtttatccattcaccagtaaatatttatttcagttgttgttttacctaatatgaataaaactggtaaaaaagtttaaatacaagtctccgtaaacatatttttctttttcttgggtatatatctcggtatgggattgatgggtcatagagtaggtacaaaaaaaactggcaaattatttttcaaaataatcatatcattttatattccaaataggg

SEQ ID NO: 437062 - DNA, 512 bp, Homo sapiens
aaaaaacaaaaaacaagatgtattttagcaaaggtgactatttttgagattaattttaggatccttaagtaaaattttcataattttggggtaattactccattccttggggcagtgatagaatgtataagtaagtatacattcttatttttctgaaatccttgtatcaagaataacctgtaattttacataattttatttttcacttggagatgccatatttaatctatggacttaaagaactctgcagatttgaatactttactaagttcagattcacttctctgcttaaaatccttcagtgattttccttttctttaggacaagtccacattccttaataaggccctcargatgtggggtgctgtcccctgcccactcttgcagctgcctctctccactctgtctgcctgtgccccagccactctgcccacctcttcttccttgaacaagctgcttcccactcaaagtcttcactcagctatttcttctccttggaataatgcccttcc

SEQ ID NO: 437063 - DNA, 552 bp, Homo sapiens
aggatatttgtaactctatctcatgattgtattacttctacctagcatggtgcctggcacattggagacactcaaaaattacttattagatgaatggatgaatgaatgaaaaattatgtggtctgtaaaactcatgacctcaaaatggcattgaagtcaaggatataatccttcatataaaaatgtgaattttcctatcactggatctctagataattattttctggagagaacatgttaacctctaattacttgagtacgttgagagagtcattggccatcagccatcaacctggagagagaccgtgggcagtaaggtgatggagcctgctgtgaccatgttctgttgaaagcttttatcaacaactgagatgatgatgttggtgcagtgttaatcagactgataggatgctggagggatcattcaagtataatgcrccctcattaggatccaaaaggatctcactcaacaggtttcaatgggggagcaaataacaatacgcaaggttaataaaggaaaattccaagtgggcactggacttaggtccccca

SEQ ID NO: 437064 - DNA, 586 bp, Homo sapiens
ttgcatggttcttatgagaatgaagtaagaaaatgtatgaaagcccccagcatggcaaaaagcaagcactaaattaatgggagccactgagagagttgrggcctagtcattttcaacctgtaggatatagagctgtgtctgcttggggcggtagttggggtacagcttaaatagcatttgcttttgggagctagaatgagatctccaatactttcagatgatcctgggggaaaggatgtattagttccattcacttctttgatcaatatcttagtaatataaaggaagtagcattcgtttttgaaaattacttgaattaggagttttctagttagatttcatttcaataaggaattattgttgaatataaattagatttgccaaatgcttaagctgccctggaatgaactttagtaccagcctgctgtcctggactaaatgatatgaccatactgtagggccaatgtatactatttaatgtcttcatctacttaattatcagttgccccctggtttccttaaagagctaatgatgcccaactatttctagtgagagcactttgctactgagagagtcaaacaccaa

SEQ ID NO: 437065 - DNA, 527 bp, Homo sapiens
cacaattttccctggtcctgtactaaatacagaagaattactcaggtaatccttgtctgagtaactttatcccatgtagggaaaaacattaatatataacttaaccctataaaaaattaagccaacatgtgaatcagctataagtcagcatcctttttatatataggtcaaggtaagagccactcaagtatagcaaatttccttggtggagattaatgaggtagcaacattttgtccaatatttggctagataaagtatattctttcttgaatagtcaaattctttaaattattatttattatctttatacattttyattattggaaatataatgtagtttaagtattaaaataaattctgacaaaggacttccctggaaaaactattacgccactgtgtcagagtccccaagaccactcccatccatattcagtggttcactagaagaattctatactgtcagagtccccaagaccactgccatattcaatgatgcactagaagaattcataaggattggcatata

SEQ ID NO: 437066 - DNA, 587 bp, Homo sapiens
cactccttctaagtatttttttatataatttcaatccatttaatgtgaattactaatttctaagattttttgggtaatttttcataacctgctatttttaggatgtgatattctctctacagatacaaattcaaattttagaagttttttttttttctattcccttatgtcctagtttattcaagctgctataacaaaagactataaactgagtggcttataaacaacagaaatttatttctcagctcrgaggttgggaagtccaagatcacagcactggcagattaaatgtctggtgatggcacaatttctagttcatagatggcaatttatttgtgttctcacatggtggagaagcaagggatctttcttgggcctcttttataaggcactaatcccattcacaagggctcctcccttatgacctaatcacctcccaaagaccccacctgctaacgccatcaccttagcagttaagatttcaacatatgaattcggtagagggcacaaacattcagactacagcaccttaaaaatctgtctcttcaatcgttcagtgtgtgcattcgtctagttctgttaatgtc

SEQ ID NO: 437067 - DNA, 587 bp, Homo sapiens
cactccttctaagtatttttttatataatttcaatccatttaatgtgaattactaatttctaagattttttgggtaatttttcataacctgctatttttaggatgtgatattctctctacagatacaaattcaaattttagaagttttttttttttctattcccttatgtcctagtttattcaagctgctataacaaaagactataaactgagtggcttataaacaacagaaatttatttctcagctcagaggttgggaagtccaagatcacagcactggcagattaaatgtctggtgatggcacaatttctagttcatagatggcaatttatttgtgttctcacatggtggagaagcaagggatctttcttgggcctcttttataaggcactaatcccattcacaagggctcctcccttatgacctaatcacctcccaaagaccccacctgctaacgccatcaccttagcagttaagatttcaacatatgaattcrgtagagggcacaaacattcagactacagcaccttaaaaatctgtctcttcaatcgttcagtgtgtgcattcgtctagttctgttaatgtc

SEQ ID NO: 437068 - DNA, 583 bp, Homo sapiens
cacaggcttgtgtttataaaccttttgaactcttctggggaaatgcttggttttcatagaaaggagtcagcaacactgcgtctgatctcctttcatgcatttctacttttttctttcgtgctacctcagttttaatttcctttgctgtacccatgcagcccttgtccccagtgtaaacaagttgggaggaactgatgagtgggccaggttgacaaggggagcacggtaagcacaggaggaacccatccaacaggacgcagcctggatctatttcagcggtctccgtgggaacagggaccaggcagctcagccgaccttctccacttgactcttctcttcttttattcctttctgctctagctgtctttctctctctgaaaataatagttccaaataaycaagctttaggtggtgtcagtagccagaaacatccaaggctgactagacaggaagcaaagtgttcattttgaatttaaaatgagaaatctaggcctatttcaggagttggtagttgtggggtggtgaccaagtgtacaagtttaagctgatttcttacccaataatgaacatcaaataggtgagc

SEQ ID NO: 437069 - DNA, 509 bp, Homo sapiens
ccctgccacgtgtcttctccctccaggcctccacttgggcagggtgaatgggctctcctctcaccagtatctgctctcaacagcagcagcctcttctccttcgctaaatcaatccctaaatcaatccccatctactttgcatttgaaaaacatgaaaaaaacgtggcccttgatatcacctgttttattttttgtttttgttgtttacgcctttgcaattttttccctctataattgtagtagggccttgggagtgaaagataataaacagcttctatttgtcatctttttttcttccacattccttatgaacaaaatttgtttccaggctttggggggtcatgacaaggttataagttatgagtctacagagtctttgggtatgcactgccatctggatctactrtaccaggggctggccagagtgtatctttccaaaggagtcctgcatctgcctgcttaggggatgatctagcatttccagcagacctggagaggacagaaggggt

SEQ ID NO: 437070 - DNA, 544 bp, Homo sapiens
tggtgtctggaaccaagctgtgggacaaaataaaagcctgcggagccacccttggtagcagcattctttcccagaccttgacayttagctacattgcaagagtgaaattcctattcttaagcagtctcaaccttccttagacacgaagcaatgcaaaagacacggtcctagatccccactgtccttggttgaggaggtttgtgggtagcaacaggtggctcaggctgcagctgaatggacagctggagtgagaaccctggaaatacctaggcttgacttcccataatgcagcatttttgggcaaaatgaggaagttagagcttcctctgtttagaaatggtttactgaggtcagtgcctggctgggctgatcatctttcctttaagcaaaactaaattcatctatttctggttgaaatgggctcagcattatcaccagttcatgcctaacattgttgcaacctttgctaatttcatctaattcataactgcttagtgtatcttcaaagtaattgatagaacaaaataatttctggtaaaaaatg

SEQ ID NO: 437071 - DNA, 643 bp, Homo sapiens
agcattctgctgggccaggaaggttgacatgggattgctgctcacatcccagacagggtgctccatgctccctggcttgcgggtgcttttgctgaaactctgagcaggcccagcacaacatgtgctcatattttccttctttctgtgacagaagatcgcattacttcggggtttccagatgtctaaaattgaagtgtgtaaaattgagtatggctagcagcccaataagatgtgaaattctatcagggatttccctgcctgatagagatggaccaactccactcaagtgtcgggatgacccatgttatagctgaatccaggagagtgcaggaggggaggtctcctgggctgctctgtgatggaatgtgatgtctgcattctggatggcttcccaatctggggargagcggagctggataactggaatgtgcagtgaggtgaagatgagatttctcaccttgatctgtcctcagagaacaagcgtttatcagttgagatgatgaggacatacatacagatacatgggctcacaaagtgaaagctatccaggagaccagcacctcggggagagggataactgcttgggagacaaggtctttaaattggaatttagattagaaatatttcctctatatgctgaagt

SEQ ID NO: 437072 - DNA, 599 bp, Homo sapiens
cttggtctcatgaagaaattttaaataaaactggaagaaaaatttaactagaaatgtaaaaatgctcactactagggttagttattgtaaaagataattatttgggtgatagcttatacagcaatttgaaagttatgttttatttctgttcaatgaatacatgtacatgattttaaagacaaatgcactatagaatgtaatataaagaaataccagtaccccagtcttgtatmtggttagaaaggatttagcttttaaaaatatactctcttcccctcccccaggtaattgcattctcttatctccccgatacagctatgtcaaaaattctacaaaattattattcactcctcaaccacatgacgtccatgattatatttccttttttaggtaaagcttcttgaattgtcttcagttgataattgcctccgtttaatttttgctttggttcttaatgccctaggggtagtttgtcattgccagaaatgtaactctcccctcagtagattcaatgttacaggtaatacagccttcacttgtggtgtgtgtgtgtgtgtgtgtgtgtgtgtgtgtgtgttattattttttcttagagatat

SEQ ID NO: 437073 - DNA, 598 bp, Homo sapiens
gcttttattatttaatagaagaaagagtatcaatttatcaggaaagatcacctgtttcttgtgacataattttaagttcacaatttcttgttacaattattttactttattcctttttattcccagttgctttattaaatcatggagatcaaggattatgtgyactttctttttgtcttcatatctttagtaataaacatagtgtccagaagagatattgattaataagtgaatgaataaataatataataatgatcaggcataaataacatattttctaacatatttaaagacttaatagtcaattgtacatctgggaaagtatttctgtgaggcacaaaataatataatccaggctaaagtttttagatgctctgactaattataattttggacagagcttagaaataggggaaatcattattagtaaagtcatcagaaatcttgattttcttcaggaggtttttgtcaagatttggatggtcagtaattgaagatggaaattataagtgagtacttaaagtagagacagcttttctctgtttttgaccggaaaaacgatccataataacttagattctaagcacatagaaaacaa

SEQ ID NO: 437074 - DNA, 574 bp, Homo sapiens
tcctcccagggctggggggtgtgaactgtggccactcctgctgcctccactggccagcttgttctaggttcctggttgggctctggtctgaccctttggctgtgggggcttcaaaaatgccaactctgtagtcatgatcacctacctatttaatgtacacacacacacacacacacacacacacacacacacacacgcccttcagaatatggggttagaaggacctcaagcagttatctgagtcatctcccagcctttgtttatgcgttcattcattcagtaattaaacaaacagtrtttattctacatgataccaagccctgagggttcaagaaacaatgaaactaagccccttaatgtgtttgacacttgttgtttgattttttggtttctttgtctttttgttgtagtatgcatccctgctttgctgacagaagctcctggggtttcttttgtgagccacttgtcccccattcataggctacagagtttcaaagaagcctgccctttccctatccccagcccacagggagggatggacacaacacccagtagttctgaccaatcagaagca

SEQ ID NO: 437075 - DNA, 572 bp, Homo sapiens
ctaactgcagcctcaactcttcccagatttaatagatccttccatctcagcctcctgaatagctggtactacaggcacatgccaccacacttggctaatttttattttttgtagtgatggggttttactatgttgccctgactggtctctaactcctgaactcaagtgatttacctgccttggcctcccaaagtgctgggattacaggcacgagccaccacacctggtcattacacaaaattatttaaaatattgtataaaattatctttaggttatgtggataaagtgtacgtgaaacataaataaattccatattaagatttgtgtcccatccccaacatatctcattaggtatatgcaaatattccaaaataaaaacagattacaaaatgtgaaacccttcttgtcataagcatttcagggatacttaacatgtattgcatatatacatatataatgaaatgaaggctcagagaggtgaattaatctgttcaagatcacacaagagyggcagagttaggtaatgagacaaaggacattcatcccagacctgaccttataaatgtccaca

SEQ ID NO: 437076 - DNA, 592 bp, Homo sapiens
agcacacatttttctttatcctttataaattctgattctgcctgtgccatgataaatgatgccactgatatcctcatggactccaatggactcacttagcccacagacagacatcgtctttcttcctatggtagactgtggaggctgtgctacaataaggaaatggcccattgctttttctgtaagtagagtgcaagtgcctttcctgaaccactgttgaatgaacataatgttcctcttaccaccctagycattccttttcagtctcctttgctggttcagccccatctctctgacctctaaatacaggagtgctcccaggctcggtctttggccttgttttcttttctatccacactcattgcattgttgacctgatccatcctcagggctctgaagaccacttaaatagtgatgcttcacagattagtatctttaggaggaagcttcttcatgaatatcagactgatatgttcaattacttactcacatctccacttggacatctaattaacacccaaaccctaacatttacaaagctaagttcctgatattttccccaacctttgctcctgtaatcctctgcatctca

SEQ ID NO: 437077 - DNA, 583 bp, Homo sapiens
ctctgatcattgggccagcagttaaaagactcatgttttagtattgaatattcctttgtttatgagttgagtcaccttggaaaatccttttggtctctgaacgtcagctcttgcacctgagacagtagtgtaggctgtttccctagatttttaacttgccttgaagcactaaatacctaaatgacctcagacatgtttcttagcttctctgagcctcagtttccctgtctctaaagggaaaatgataccagtggctacctctctgtgtccctgtaagaatgccatgcccctcacgacacatacaggcgtgtgcagcagggcatggcacaataaatgtgttctatggacacaactgcggggcatggtggggggattgttctrttccacagttgttgccactatctgtttaaaggatgccctttgaaaacttcacatgcatatacaagtgtgcatctgtgcctaggtaaatgagcaccactcctgtcattatcctgtgatttcacatttctaatctacttgctcatttttctcaaattgcttgatgatgctatttctccctaaagaaataagaccccaatgttag

SEQ ID NO: 437078 - DNA, 597 bp, Homo sapiens
tacagtttggtatggccacgtgactgaattatagctaatggaatgtgcgcagaagtcacgtttgtcgtatctaggcctggcataaacatcttccacccatgttcttccatactgttttcccgttttggctggctgtggaagacaggcagcagagaaggcagggtcatgaccagcttgatgccgygaagggagcagacagccctcgctgagctgagccgcccaggagtattctgactcatcacataaatgagaagtttcagccggtcgctgtggctcacgcctgtaatcccagcactttgggaggccgaggctggtggatcacctgaggtcaggagtttgagaccagcctggccaacatgataaaaccccgtctgtactaaaaatacagaaaaattagccgggtgtggtggcgggcacctgtaatcccagctactcggaaggctgaggcaggagtatcgcttgaacccaggaggcgggaggttgcagtgagccgagatcaccccacggcactccagcctgggcgaaagagcaaaactcagtttcaaaaaaaaaagagcaagagagaagtttctattatgttgcatcattacatgtgtg

SEQ ID NO: 437079 - DNA, 597 bp, Homo sapiens
tacagtttggtatggccacgtgactgaattatagctaatggaatgtgcgcagaagtcacgtttgtcgtatctaggcctggcataaacatcttccacccatgttcttccatactgttttcccgttttggctggctgtggaagacaggcagcagagaaggcagggtcatgaccagcttgatgccgcgaagggagcagacagccctcgctgagctgagccgcccaggagtattctgactcatcacataaatgagaagtttcagccggtcgctgtggctcacgcctgtaatcccagcactttgggaggccgaggctggtggatcacctgaggtcaggagtttgagaccagcctggccaacatgataaaaccccrtctgtactaaaaatacagaaaaattagccgggtgtggtggcgggcacctgtaatcccagctactcggaaggctgaggcaggagtatcgcttgaacccaggaggcgggaggttgcagtgagccgagatcaccccacggcactccagcctgggcgaaagagcaaaactcagtttcaaaaaaaaaagagcaagagagaagtttctattatgttgcatcattacatgtgtg

SEQ ID NO: 437080 - DNA, 612 bp, Homo sapiens
aatgatatccctgtgtgtatatgtgtcggtktgacagtgtatgtaggtgggcactcaaaaccgtagacctttttccttaccttttcttaccactacctttgttactagccctgtttcgtggctgtccccaagtagatatgcctgagggatgcaagggttgcatattaattacatcctgtaaaagcagaagatagatctcaagagagtatgtataatttttttttttttggttttggaagatgtgaacttcatatcaaccaagagttatgtagctgatatgcttccgttttacaaaaatgtctgaagttttctgctttctaactttgtgcttttaacctagagaaaattatagtttccatctaaggcaaaaaacaatgattcattgtcctgcttaggtttatttggctagttacgagatctggaagcaatttgagatgttcatttttatcactgtacataaaaatctgattaacaagtactcttcagtgatcttattgtctttcagaagcatctctgctttcttacattttaaattgcactttaatttttaaaggaatctgcctttcttggggactctttaaagagtttgctggtctatttattgatggaaag

SEQ ID NO: 437081 - DNA, 604 bp, Homo sapiens
tagcactcataaggacattctcatattcataggtacagggggcagagaaattctagggagaaaagggcgggtctctgacaaaactcagctctcaatctgaaaagcctgaaacccatggcccaaagtgacaacttctctccccgttttcccactcgaatgttgycttttcctaaactacccatggcccaccccaccccccatcctgtgcccataaagaccccagaaccagctggcagaggggagaagcagctgtacatcagggactatggttggacattggagagaagcgggcttgacttcagagggacagcttgatggcataacttcggagaagaatcagccgaatatggccggacttcagaggaagattacctacacacctcatcctcttttcagcttccctccccgttaagggccactttcactggcaataaaatcccctgcattcaccagcttcaatttgatcatgtgacctcgtttttccctgatgctggacaaaagcttgggagccacgagtgcagagggctgtcacactggccctttgccttcactggcagaggtcagccgcctcatgtgaaaaggcaaagagcccaatgagctgtta

SEQ ID NO: 437082 - DNA, 588 bp, Homo sapiens
gggaagttaaagatttttgagaagtcttaaaaattgttaagtatgcttaacctatcatttccaaagtttatttgaccagaaataattttaagtcatgacttttaatatacaaagttccctagaaattttctttgcaaaacattgctatatgtttatgttaaagtgatcattctaagatgcaaattgaatatgtcccagttgtgcttaaatattgcattgaccatcgattccccataagatcaagttcaaaactacccagcagggatacaaggcccttcatgcttttgtccccagttacaygttaagtaacttccaaacttttcctgacacatacttcacctgttttcaaagcatactctgctctccaagacctcctatgtgatactctttgtctgtattccccttcctaccttatccagacagaaaatccctactcagcctttagatacagctcaagcattagctcctcttggaagatttccctggcaagcataactagccaacccacaatctgcaagatttctgtgctttcctccaggtttgtggaacaccctgtgtctaagtgtctacttgtacaggctgtttgta

SEQ ID NO: 437083 - DNA, 588 bp, Homo sapiens
gggaagttaaagatttttgagaagtcttaaaaattgttaagtatgcttaacctatcatttccaaagtttatttgaccagaaataattttaagtcatgacttttaatatacaaagttccctagaaattttctttgcaaaacattgctatatgtttatgttaaagtgatcattctaagatgcaaattgaatatgtcccagttgtgcttaaatattgcattgaccatcgattccccataagatcaagttcaaaactacccagcagggatacaaggcccttcatgcttttgtccccagttacacgtyaagtaacttccaaacttttcctgacacatacttcacctgttttcaaagcatactctgctctccaagacctcctatgtgatactctttgtctgtattccccttcctaccttatccagacagaaaatccctactcagcctttagatacagctcaagcattagctcctcttggaagatttccctggcaagcataactagccaacccacaatctgcaagatttctgtgctttcctccaggtttgtggaacaccctgtgtctaagtgtctacttgtacaggctgtttgta

SEQ ID NO: 437084 - DNA, 573 bp, Homo sapiens
aaaacaactcaacaaacttattggcttcatacaacaagaactagctcacagcaacatcttccacaagtagctgggaggttctgctttttgtcttcctgactgaggaatccaggctgatgaaatagatttgatctgaaacattgcctgttgccaaaccagacagaaggggatggaagacagaattgcatattggctcttaaaacttctgcctagaaatcactggtactacttctgaaaatgtgtcattggctaaatcaggtcatacggccacatccaatttcaagagggcagagcatttttctccttccatgtacctagaggagtgttggaaatattcggtgaatagccctgatgactacccagtcctatcacacaacaagtagttaatttagtttccttttgacatgcaaaaaatacttacctctttcctaagggattataacccaaaattttaaccaaaccaactggattctatttyaagtccaggatctctgagtgatgcctttggtcaccttggtcctgacatgtaccctgttattacagagacctatacattcataaggtaagttgttt

SEQ ID NO: 437085 - DNA, 582 bp, Homo sapiens
gcattgtatcttggaagtaactaacttgcttttggttttacaggcttataaacagaagggacttgacttgtctcagatgagactttggacttttacttttaagttaatgctggaatgagttaagactttggggattgttgggaaagcatgattggttttgaaatgtataaaggacatgagatttgagaggggctagggcaaaatgatatggtttggctctgtgtccccactaaaatctcatctcaaattgtaatccccatgtgccagagaaggaagctgttctcatgayagtgagtggattatcaccagatctaatggttttttaaacggtagtttttcctgcactctcacaagctctctcactgccatgtaagatatgcctgttttcccttccaccatgattgtaagtttcctgaagcctcccaagccatgaggaactgagttaattaaacctctttcctttataaatcacctggtcttaggaagttatttatagccgtgtgaaaatggactaatacaattacctttttagttttaactcctttacctttccttagactctccaaactccccactagcatt

SEQ ID NO: 437086 - DNA, 528 bp, Homo sapiens
tttttaaaagcatgtatttattatctcctggtttctgtggcccagaagtcaagcacagtttaactgagttctctgttcagagtgtcacaaaattgctttcaaggtgtcatactagctgtgtttctctattgaattcgaggtcttcttctaagcttaagtagttggaagaattcagttcctggccgggcacggkggctcacacctgtaatcccagcactttgggaggctgaggtgggcagatcaggaggtcaggagatggagaccatcctggctaacgcggtgaaaccccgtctctactaaaaatacaaaaaatcagctgagcgcagtggcgtgagcctgtagtcccccctactcgggaggctgaggcgggagaatggcgtgaacacgggagacagagcttgcagtgagccgagatagcgccactgcagtccggtgcctgggagaaagagggagactctgtctcaaaaaaaaaaaaaaaaaaaaaaattcaaagaattcagttccttgtggatgtaggactcaagaccc

SEQ ID NO: 437087 - DNA, 528 bp, Homo sapiens
tttttaaaagcatgtatttattatctcctggtttctgtggcccagaagtcaagcacagtttaactgagttctctgttcagagtgtcacaaaattgctttcaaggtgtcatactagctgtgtttctctattgaattcgaggtcttcttctaagcttaagtagttggaagaattcagttcctggccgggcacggtggctcacacctgtaatcccagcactttgggaggctgaggtgggcagatcaggaggtcaggagatggagaccatcctggctaacgcggtgaaaccccgtctctactaaaaatacaaaaaatcagctgagcgcagtggcgtgagcctgtagtcccmcctactcgggaggctgaggcgggagaatggcgtgaacacgggagacagagcttgcagtgagccgagatagcgccactgcagtccggtgcctgggagaaagagggagactctgtctcaaaaaaaaaaaaaaaaaaaaaaattcaaagaattcagttccttgtggatgtaggactcaagaccc

SEQ ID NO: 437088 - DNA, 529 bp, Homo sapiens
cttggttctacatggctggggagacctcacaatcatggcagaaggttgaaggcacgttttacatagcggcagacaagagagaataagaaccaagcaaaaaggaaaaccctgtataaaaccatcagatctcctgagatttactactatgagatcagtatgggggaactgccccatgattcaattatctccctctgagtccctcccacaacacatgggaattatggaagctgaaattcaagatgagatttgggtggggacacagccaaaccatatcactgagtttcatttsataaatctgatctttctgaaatagatgattctgatgattcagatgattctgatgttccatttagaaataactctaaggacagtttttatgttttatttttacattgaaaatcagtcagatttgcttcagagtgtgttcatataaaattaaatgagcgctggcagtgagctgtacttttgtttttctaaacaagaaaaggcttaaaaaagaggtttattctgaaccaatatgaattaccat

SEQ ID NO: 437089 - DNA, 617 bp, Homo sapiens
cttcttacaaccactcagtagaacatggaaggtttaatttgcatgcaagtgccatgatccccatggtagaacctggtctaatatcttagtggtttaggagcttggattctgctgccagattgccaggatttgaatcttgcctcccctactcactacctgtattactttggacgagttacttaactaatttgtgcctcattttacttatctggaaaataaagaaaataatggtgcctacctcaaaggactgttttaagggttgatttggtatcagtaaaacattgggtacagtgcctggcatgtagtaggcactatttaagttttagctacactraaaaaaaaagagaaatgcccgaggatactcatgggcagcattcagggctgtttcaaccaagaagaataggcctagataggccaagagcttgttgtaaggcagatagagtcaggatgtataaatctggtttatagtcatttggtgggaatttgaaggggaaaatgtggaacacatgatatatgatctcttaataaattatcttccagaaaaattcctgctagggaaatcataccaggtttctggggtggggctatattgggtacctagtgagtcatgttaatga

SEQ ID NO: 437090 - DNA, 620 bp, Homo sapiens
gattctttaacccaaatatgcctgtcatcgaagttcagcttttttccatttagctgtactgtttctatgggcaataaaagctyactgggaagatttttatttgtatatattgtatacaaatatattgtattacttgtaaatattgtccattgcacctcaaatcagtggtgtgctagagctggcttgtgtaaattcataggagacaattttccataacttttcccaattttgatcagtgatgtattgttggtagcttgaaattaactggagcaggagtatttatactgtgaaaatgggcaaacactataaatcagttttcttctctgtaaaactggctgttaagatataccaacacaccactgctccaaactcttggattttttaatgtacttaaatatatagaccaattattttttccccactcattttgctttcttgcaaattgaattgtttatcatttttgattcaatacttgaaaactcttccagaatagttaaattgcatgaatccacatggtattcttatagatgagccaattttttaaggaaaataaagttaaaatattaatcaagagccatattttctcttcaagtacagtttcattgctattatttgttttg

SEQ ID NO: 437091 - DNA, 594 bp, Homo sapiens
aaggcacaggtcactccaattcaggatttgttctttaacttgactgggatcactgttacatgggtttggttaagtttcatgggcackgtcaccatgtagttacagactggattgccatatgtggcataacccaaagttgcttgggccttaggagacacacatgagttcttaccagtcatattgaaataaggtgtgacagtccatgtgtttgtcatttgggagagaagaggtccacatttggagctgttcacaaaagtgtgaaacacagcaaaaaaattattggatagtcatgcccacatgaatttttctgttctcatagcatgtggaagatgacaacaaacccagtagtgagtcatattgctggcacagctgctgcttgactcaagaagaccatatgattgttgccaggtggggctagatctaggggacaagtgagggacattaaatgttctttcctctcaacatttctcagggtctaagatcttccctccttagatgccagagttgttttttttcctccctcacagtcacaaagtttgtcctacggaaatagctgcaacttcttcctttgctcagtccagtgggttgggtgtc

SEQ ID NO: 437092 - DNA, 567 bp, Homo sapiens
atcggtgtaaatggcagtagttgctgttttctattttaaattctcaagagaaaaacctcaacaaggtccagttcatctattcaaaccaagtcacataaataataagtaactgtccagccaacagtatagctttttggggtcagggaccttccctgtcatctgtggctggggaaggacagggtgaagaggtgtgggggcaggcaccagggagcaggagttcagagattggtctccggaccagactccagggttcagtccttggatctttcatttataaactctgtgtccttgggaaaaaatatttaaatctctctatgcctcagctttctcatctgtaaggggaataacattaatatctactttatagaattgtggggartagtgaaataatggatgaaatgtgtttagaatagcagttggtacacagtaaactaatcaactaaccaaagctattattgtaggtatgagaggaaaattaatctggttgctctgagaatagtttgggtccaaatcttatttcagttgctagattgcaaggtccctgagcacaggatttatgtcttgttt

SEQ ID NO: 437093 - DNA, 577 bp, Homo sapiens
cgccactttcttgcagtagttgcacaagtcccagttttcacagggtgatgtaaagagggccatatggcaactacagacacagtggattgtatacaggaaagaaaaccgagcttaacaaacccaaatcttcataatgagcaggaaacaaacctgacctttgctccagatggagacactatctccatcttgaaagattattcactattcraaaatccttcaagagatgttctggagaaattagcaactcagattcccatgcagaattggctaacagttttatatattacatacacatatgcaccaagctatctcataatattgctacaaattcatagtaaacagtggaacaagacagattcaaattgaaaatgatccctttcctgagatgcttttaacttgtcaagttatttggataaccttcattttccatgatgaaggaaatcagtcagcgtcagcctttaaatgtaagtaagtatttggcacctagcacatagtaggcattttaagggtaacttatctctaggtgagggtcatcaaccagtttttattttcaggtttctctgtcttatgtctggac

SEQ ID NO: 437094 - DNA, 558 bp, Homo sapiens
gggccatatggcaactacagacacagtggattgtatacaggaaagaaaaccgagcttaacaaacccaaatcttcataatgagcaggaaacaaacctgacctttgctccagatggagacactatctccatcttgaaagattattcactattcaaaaatccttcaagagatgttctggagaaattagcaactcagattcccatgcagaattggctaacagttttatatattacatacacatatgyaccaagctatctcataatattgctacaaattcatagtaaacagtggaacaagacagattcaaattgaaaatgatccctttcctgagatgcttttaacttgtcaagttatttggataaccttcattttccatgatgaaggaaatcagtcagcgtcagcctttaaatgtaagtaagtatttggcacctagcacatagtaggcattttaagggtaacttatctctaggtgagggtcatcaaccagtttttattttcaggtttctctgtcttatgtctggacttaaacttggacggttcttcacagataggtacttgcc

SEQ ID NO: 437095 - DNA, 558 bp, Homo sapiens
gggccatatggcaactacagacacagtggattgtatacaggaaagaaaaccgagcttaacaaacccaaatcttcataatgagcaggaaacaaacctgacctttgctccagatggagacactatctccatcttgaaagattattcactattcaaaaatccttcaagagatgttctggagaaattagcaactcagattcccatgcagaattggctaacagttttatatattacatacacatatgcaccaagstatctcataatattgctacaaattcatagtaaacagtggaacaagacagattcaaattgaaaatgatccctttcctgagatgcttttaacttgtcaagttatttggataaccttcattttccatgatgaaggaaatcagtcagcgtcagcctttaaatgtaagtaagtatttggcacctagcacatagtaggcattttaagggtaacttatctctaggtgagggtcatcaaccagtttttattttcaggtttctctgtcttatgtctggacttaaacttggacggttcttcacagataggtacttgcc

SEQ ID NO: 437096 - DNA, 558 bp, Homo sapiens
gggccatatggcaactacagacacagtggattgtatacaggaaagaaaaccgagcttaacaaacccaaatcttcataatgagcaggaaacaaacctgacctttgctccagatggagacactatctccatcttgaaagattattcactattcaaaaatccttcaagagatgttctggagaaattagcaactcagattcccatgcagaattggctaacagttttatatattacatacacatatgcaccaagctatctcataatattgctacaaattcatagtaaacagtggaacaagacagattcaaattgaaaatgatccctttcctgagatgcttttaacttgtcaagktatttggataaccttcattttccatgatgaaggaaatcagtcagcgtcagcctttaaatgtaagtaagtatttggcacctagcacatagtaggcattttaagggtaacttatctctaggtgagggtcatcaaccagtttttattttcaggtttctctgtcttatgtctggacttaaacttggacggttcttcacagataggtacttgcc

SEQ ID NO: 437097 - DNA, 613 bp, Homo sapiens
aagcagtggagcacatccatgctactcctcactaaaggagaagaggttccttactttctgtgtgatgtcaccaacaagtctttgactatgtaaaggttattttttcagaaactttcctagaaaacaaatcttcaaaattcacccattcactaaacagtctttagcctttccattatattacaggaactaattgtaggtgttaaggaaacaaatacatgaattttgaccacaggaggctcagggtctktaggaaaaacagttagataaacagcaattataatttagtgtgacaaagatctgtaatagacagtgaatgaatcaaaggctcaagtattctgatcagagactggggaaggcaggtgacagaaggctttactgaagaaatgacatttaagttgggctcaaaataatatatacagaataatatttttgagcacttattatatgtcaggcactataacaagcactttatggtacatgcatttcttttatgtgacacagctaccatatgaaattggtattattattattatcccatcttacagattagaaaaaataatgaggctcacagaggttgggcaacatatcccaacccacacaattaataagtggt

SEQ ID NO: 437098 - DNA, 613 bp, Homo sapiens
aagcagtggagcacatccatgctactcctcactaaaggagaagaggttccttactttctgtgtgatgtcaccaacaagtctttgactatgtaaaggttattttttcagaaactttcctagaaaacaaatcttcaaaattcacccattcactaaacagtctttagcctttccattatattacaggaactaattgtaggtgttaaggaaacaaatacatgaattttgaccacaggaggctcagggtctgtaggaaaaacagttagataaacagcaattataatttagtgtgacaaagatctgtaatagacagtgaatgaatcaaaggctcaagtattctgatcagagactggggaaggsaggtgacagaaggctttactgaagaaatgacatttaagttgggctcaaaataatatatacagaataatatttttgagcacttattatatgtcaggcactataacaagcactttatggtacatgcatttcttttatgtgacacagctaccatatgaaattggtattattattattatcccatcttacagattagaaaaaataatgaggctcacagaggttgggcaacatatcccaacccacacaattaataagtggt

SEQ ID NO: 437099 - DNA, 615 bp, Homo sapiens
atatgtcaatgtatgttcattgattgtaacaaatgtaccacacgggtggggggtgttgataatggaggaggccagcaggggagggcagtgggtatatgggatgtctttgtaccttcttctcaatattgctgtaaatctaaaactgcttgaaaaaagtaatcatccacattatgaacactaatatcatgaatcactgaaaaactcacaggttttcctaaaccaggggcttcaataaatcagttcgcatttaacatatctatcttcaggtccaaaatttaacatggttcatttgtttattttctacctttcacaggaatttggtacagataggtgggaggagcaacagatgatggcagttccattggatactatattctttttaaaaaagaaagtagtagaaaatacttaacataaaatctakccttttagcaaatctcagtgtacagacagaacggtgtggtttactatatgcacattgttgtagggcagttctcttgaacttattcattttggatgactgcaactctgtatccattgaacagcaattccccattctccccactcctggaaaccatcactctactttctgcttctataagtttgactgttctagaa

SEQ ID NO: 437100 - DNA, 621 bp, Homo sapiens
gaaagtagctgaaaaggagagcttggaaatacaacaaaagagaagcagtaagaaaattagggaattagccaagggacaaacatgtaaataataggaattccaaaaacagaaaacaaagaaaattaataaacatataaatcaaataartgattcaggaaaaaattccagaactgaaatataaaaattttcagattgaaaagcctactgagtgcccagcacaagagacaagagaaaacccagagaaggaccttcccagtgaaattccagagtaaagggagaaagaagattccccagagttcattctttaaaagtaggtcctagccaaagaggaatcagaatgactcactgcaatcttgaaagctaggagacgatgggacaatgatttaaatattctcaagaaaaagtaatcccaatctaattttccctacaaaggaaaattattaattgtaggggttgaaaaaagcaaaggtctcagacaacttattcctgcatcctccctcaagaaactactgatgggtgtgttctgccttaacagggatataaagaaagaaaacaacatgagatgcagaaaccagggaaactaatacaaagaagagagaccaaggctaccccaggatgatg

SEQ ID NO: 437101 - DNA, 621 bp, Homo sapiens
gaaagtagctgaaaaggagagcttggaaatacaacaaaagagaagcagtaagaaaattagggaattagccaagggacaaacatgtaaataataggaattccaaaaacagaaaacaaagaaaattaataaacatataaatcaaataaatgattcaggaaaaaattccagaactgaaatataaaaattttcagattgaaaagcctactgagtgcccagcacaagagacaagagaaaacccagagaaggaccttcccagtgaaattccagagtaaagggagaaagaagattccccagagttcattctttaaaagtaggtcctagccaaagaggaatcagaatgactcactgcaatcttgaaagctaggagacgatgggacaatgatttaaatattctcragaaaaagtaatcccaatctaattttccctacaaaggaaaattattaattgtaggggttgaaaaaagcaaaggtctcagacaacttattcctgcatcctccctcaagaaactactgatgggtgtgttctgccttaacagggatataaagaaagaaaacaacatgagatgcagaaaccagggaaactaatacaaagaagagagaccaaggctaccccaggatgatg

SEQ ID NO: 437102 - DNA, 640 bp, Homo sapiens
taaaactttcaaattgtctacttcttgaattttccatttaacaatttcagactgtggttaactggataaataaaacaatggaaagggaaactgtggataaatggaaacaactgtagtctcaacttaatatttttaagatcttcaaaatattctgcaatttagagaaaagtgagatatctaaacaaatccaaggtgggcggatcacgaggtcaggacatcaagaccatcctggctaacacggtgaaaacccatctctactaaaaatacaaaaaattagctgggagtggtggtgcgtacctgtagtcccagatactcaggaggctgagccaggagaatggcgtgaacctgggaggcggagctcgcagtgagccatgattgcaccactgcactccagcctgggcaacagagcaagactctgtctcaagataaaaacagaacaaaacaaaactgtgacaaaactatayagaaatgcttaaggaaaaagatgacaatcctgccattctttctaatttaatcatcttgataagtgtgaagtcttttgacagattctcagcacttgtgtgtgtatttgtgtgtgtatgtatacatatatatatatatctccacatattatcactatattatcattagtttaccagaa

SEQ ID NO: 437103 - DNA, 640 bp, Homo sapiens
taaaactttcaaattgtctacttcttgaattttccatttaacaatttcagactgtggttaactggataaataaaacaatggaaagggaaactgtggataaatggaaacaactgtagtctcaacttaatatttttaagatcttcaaaatattctgcaatttagagaaaagtgagatatctaaacaaatccaaggtgggcggatcacgaggtcaggacatcaagaccatcctggctaacacggtgaaaacccatctctactaaaaatacaaaaaattagctgggagtggtggtgcgtacctgtagtcccagatactcaggaggctgagccaggagaatggcgtgaacctgggaggcggagctcgcagtgagccatgattgcaccactgcactccagcctgggcaacagagcaagactctgtctcaagataaaaacagaacaaaacaaaactgtgacaaaactatacagaaatgcttaaggaaaaagatgacaatcctgcyattctttctaatttaatcatcttgataagtgtgaagtcttttgacagattctcagcacttgtgtgtgtatttgtgtgtgtatgtatacatatatatatatatctccacatattatcactatattatcattagtttaccagaa

SEQ ID NO: 437104 - DNA, 591 bp, Homo sapiens
ggttaccaaccaagctgctgaggttgacaggtacaattcacttcactgcctgagacccgcccccttagcttccattacctgggcttttctgactattaggtgtgtgacagaagatcaatactggcgagagatgaatatatgtaatcaacctaacagaagcaagttgaaatcctttggtgtgtggtatcataaaaggaggaaggtcaatagggacactgggtcggactgaaaagcagccttgccccaaagcaaatcctggcactttcctctggcccaccttttccctccaagctacagcacatggtacctttctctagagcccagaggctttatgttctctagcaaagtggtctgcatccttacgttgatcataagttcagtgattataaaagttgaggtctttgggaaacccaagaattagagtygtggacttgaaagtaagaaatagggaaaacagcacagttatttctgactttttggctctactgtttatagttttgcctgtgcaaagcaatacaaattcatgttgtcagccagtgacataaacagatttttctttcctgaagcgaatctgataattatgatgttgta

SEQ ID NO: 437105 - DNA, 595 bp, Homo sapiens
taagtggcactgtggtaattttttaggctgaagggtgaagagagaacataaataaggctagaaaacagtatgtcctcggagtgctgtgagtgtcyggcacttccatccaaagccaacagtgtttgtgtccagagtggaattactgacattggccacataggctcagggtggctaggcacgtctgtggtgataactctgataaactattagcactatttttatttaatagatacaccattgaactggcttattttcttcagcagaaatatgccacccagatattattcaaaacctcacatgtggtaggaaataagttggtttcgcagtaccaatttttttcccccaccagtaatgacaacttgccttacttgtaaagaaagccctttcccaagtaggtttctaaaggaggcagttcgatctctctctttttgcaggcatgaaaatattttcctcaatagttgggttttgctacagttctatcaccttctgttcttcacattctccctggacaaattcaaccactctcatgccttcaatatgtttgtggccaagtctgtaccttcatagctgattatttctctcagttccagaccta

SEQ ID NO: 437106 - DNA, 595 bp, Homo sapiens
taagtggcactgtggtaattttttaggctgaagggtgaagagagaacataaataaggctagaaaacagtatgtcctcggagtgctgtgagtgtccggcacttccatccaaagccaacagtgtttgtgtccagagtggaattactgacattggccacataggctcagggtggctaggcacgtctgtggtgataactctgataaactattagcactatttttatttaatagatacaccattgaactggcttattttcttcagcagaaatatgccacccagatattattcaaaacctcacatgtggtaggaaataagttggtttcgcagtaccaatttttttcccccaccagtaatgacaacttgccttacttgtaaagaaagccctttcccaagtaggtttctaaaggaggcagttcgatctctctctttttgcaggcatgaaaatattttcctcaatagttgggttttgctacagttctatcaccttctgttcttcacattctccctrgacaaattcaaccactctcatgccttcaatatgtttgtggccaagtctgtaccttcatagctgattatttctctcagttccagaccta

SEQ ID NO: 437107 - DNA, 525 bp, Homo sapiens
gaatgactcttttccttttggagaataacctataagcttaaggcaggaaagaatgaggtaaataaacaaaaagaagcaaagacaagacagagtgggagcagcatcattcaggtctctggatttatgcccaaattgtattctcccttaaaatttctagttatctgagccagtgatttcctcttcttgcttgagctagtttgatttgagtttctatcagttgtatctgaaagagtcctaatgataccttacattacagcacacaattaaaattatatatttaaaggacaaggttattggatgacaagaatgctaatcaagaaagaaaaatgggatgggcatggtggctcacgcctgtaatcccagcactttgggaagcaggcagatcacctgaggtcaggagttcgagaccaacccggccaacatggtgaaaccctgtctctactaaaaatacaaaaattagctggtggtgcaygcctgtaatcccagctactcaagaggctgaggcatgagaatcacttgaaccca

SEQ ID NO: 437108 - DNA, 520 bp, Homo sapiens
cactcttgtacaaagcaggcatcccttgaggctctgtgacttccatctgcctaagattctaacatctggtagaagctgatatgaggctattttctggagttctttttgaactgtttgatgaacttctcacctagccccactttcagcagttctcattgaaaaacagtgcattttgtcataatcttttttttgaggagctgataatgaggaaataataaagaagagaaggaaaaaagggaggaaaaaagaatgaagagggaagaaattagaaaccaacattacttgcaaraagaatagcttaatacttttatatatattatataatttaatatttacagctgttgacagaaaacccaaattctgcaaaagcatattgaaagaagtttattctgagaagaggcagaacaagatggttgaatagaagcctttattaatcatcctccctgtaagaacatcaaatttagctgtccacacataaaagcaccttcataagaaccaaaagccaagtgagcaaccacag

SEQ ID NO: 437109 - DNA, 614 bp, Homo sapiens
atttgaaaatacagtcagaggagaaaacagaaaaagaatgagaaagaatgaagcatgtctacaacttctagaaaatagcctgaaaaggccaaatttaagagttactcatcttaaagaagatatatgtgtgtgtgtgtgtgtgtggtggtgggttgggggttggttttcaaagggataataaaagagaactccccaaacttaaagatatcaatattcaagtacaagaatgttatggaacactgagaagatttaacccaaataagactatttcaacttagtaatcaaactcccaaatgtcaaggatataaagaaaggattctaaaarcaaccagagaaaagaaagaaagaacatacaatggagctccaaaacatctggcagcagactttccagtggaaaccttacaggccaggagagagtggcatgacatatttaaaatgctgaaggaaaaaaaaaaccaaacttttatcctagaatagtatatccagtgaaaatatccttcaaatgcagagaaataaacaatttcccagacaaacaaaaggtgagggatttcatcaacactgaaccaggcctaaaagaaatgctaaaaggaattcttcagtctgaaagaaaagga

SEQ ID NO: 437110 - DNA, 532 bp, Homo sapiens
caaatccattgcctgcttccttgcacatgaagccctattttactgtctgcttctaaagataaaagcctacattcacaaggataaagtttcaagcccaaagaaacacctcacaggacctagtggggaaggtggagcatctaagtcagacctcctgtatttttgcccagacctcacaaccttctggttgtgtgacmttgaacaagtcccattacttctgccagccttactttcctcatctgtaaaatgggaataatcatcacacctgagttactgcccatcacacaggttggtgtgaggaaccaatgagataatgtgaatgaattcggtatgattgagttgctatcagaagtggtcatcctgaccccaaccactcaaaccatctctatagagtttatctgattcctcatcaccacaaacctggggccagattccactgtcaatcaaagagagaaaagaggttggaatccccagcggacatttcattccattagttctactaaataattctacagtagagaccgatagacccaga

SEQ ID NO: 437111 - DNA, 532 bp, Homo sapiens
caaatccattgcctgcttccttgcacatgaagccctattttactgtctgcttctaaagataaaagcctacattcacaaggataaagtttcaagcccaaagaaacacctcacaggacctagtggggaaggtggagcatctaagtcagacctcctgtatttttgcccagacctcacaaccttctggttgtgtgacattgaacaagtcccattacttctgccagccttactttcctcatctgtaaaatgggaataatcatcacacctgagttactgcccatcacacaggttggtgtgaggaaccaatgagataatgtgaatgaattcrgtatgattgagttgctatcagaagtggtcatcctgaccccaaccactcaaaccatctctatagagtttatctgattcctcatcaccacaaacctggggccagattccactgtcaatcaaagagagaaaagaggttggaatccccagcggacatttcattccattagttctactaaataattctacagtagagaccgatagacccaga

SEQ ID NO: 437112 - DNA, 617 bp, Homo sapiens
aatatgggaatgtaagcacagactgcacaagggcctcatcaataaaagacggcttggaatttgctgttgtcagggtttattcatgaatttggggagaagggcactgctggttgcacagattcttaagaattcagacacaggagctccttacagggttaacwtccttccatgattgctccagtggtcctcaaactgctccagggaccagcagcatcagcaccacctggggactagttagaaaaggcaagttcttgggccccatcccaggcccactgaatgaagactcctgcaggtaagcacagcagtgtggttcggcaaacctgccctgcgactctgagaactactggccaacactgccctgccattttgaagacaatgaatgagcttcactgtcttgggctggggttcaaacaactcccaagagcagggagaagcaaaaacgctgtgggaaccatgcaaaagactactggctgctgctgctctgctctgcaaatgcagggtcgtacagctaggtgatgagttcagtgagcttttggaggcaagcctggaaaacgaacattcacatatgtatgctgtttctaggaaaaaatgtatttttgataataaaaacctttcac

SEQ ID NO: 437113 - DNA, 548 bp, Homo sapiens
gtaaatgtgatggctagggcccagttactttcaaagtttggtcaaaatttaattttgaastcttttattgaattaaaaaaattagtgaagcaaatcgatctaaaatttgatgttggcttttgtttgatgaaaatcatagatgtcatctttgtcttactgtacttaagaatgttctttgggccaggcacggtggctcacgcctgtaatcccagcactttgggaggccgaggggatcacgaggtcaggagatcaagaccatcctggccaacatggtgaaaccccatctctactaaaaatacaaaaattagctaggcatggtggtgcgcacctattgtcccagctactcgggaagctgaggcaggagaatcgcttgaactgggaggcagaggttgcagtgagccaaggtcatgccacactgcactccagcctggtgactgagcaagactccatctcaaaaaagaaaaaaaaatgttctttgacacacacacacacacacacacacacacacgaaaataacacaatgccaagacttataagtgaatattata

SEQ ID NO: 437114 - DNA, 591 bp, Homo sapiens
actgtgtcagtttacatatagcataaagaccttttagttacattaagtttcctctctctctttctttgtacaatctttatcatatattttacttgtaaaaattttgtaaatccataatacattgttaatatttttgttttaatatgtcaattatctttcaaagggattaaaaagatccaaaatgcattgtaaaatttattatcaattttataattctcagtttttttattcctttgtgtarattcagatttctatatataatcattttctttagttttgaagcatttctcttaaaaacagtccttttctgttggcaataaattctttttttgcttttctaaataatgctttatttcacttaagcttttgaaatttatttttgttggatctagaattttaggttgacaaattttattttcttctgtcagtaatttacaatgttgcaccattgtgtgttgggccttatataagtttctgaatacaagtcttctgtcattctctgttctactatacaaaatatctatttttttctggatgccttcaatattttatttttatctttggatttcagcagtttggctatgatatgtc

SEQ ID NO: 437115 - DNA, 591 bp, Homo sapiens
actgtgtcagtttacatatagcataaagaccttttagttacattaagtttcctctctctctttctttgtacaatctttatcatatattttacttgtaaaaattttgtaaatccataatacattgttaatatttttgttttaatatgtcaattatctttcaaagggattaaaaagatccaaaatgcattgtaaaatttattatcaattttataattctcagtttttttattcctttgtgtagattcagatttctatatataatcattttctttagttttgaagcatttctcttaaaaacagtccttttctgttggcaataaattctttttttgcttttctaaataatkctttatttcacttaagcttttgaaatttatttttgttggatctagaattttaggttgacaaattttattttcttctgtcagtaatttacaatgttgcaccattgtgtgttgggccttatataagtttctgaatacaagtcttctgtcattctctgttctactatacaaaatatctatttttttctggatgccttcaatattttatttttatctttggatttcagcagtttggctatgatatgtc

SEQ ID NO: 437116 - DNA, 626 bp, Homo sapiens
tagtaagtattgaagtcatatagtgttagtccttcaacttctccttcaaatggtggctgctctaggtcttttgcctctccatatactttygaaacagttatcaataaacacaaaataacttgctggaattttgactgggattccattgtacctatagatcaagtcgagaagaactgacattttgatgtactcagtcttcttttctataaacatgggctatctcttcatttatttattacttctttgatctgttttaatagagttttgtagttttcctcatatatatcttttgcatattagatttatacctaagtatttcactttttagggtactaatgtaactagtattttgttttcaatttcaaattccactttttcgttgctggtatataggaaagtgattaacttttgtatattcactttgtatcttgcaacctcagtgtaattgcttataagttccaaacattgtttgtgtgtctgtgtgtcaattcttttcaactctgtacacaatcatgttttctgtgaacaaagacagttttgtttcttcctttccaataagtatatcttttatttcccttcttgttttattgcatcaattcagattttcagtgtgatgttgtaagaag

SEQ ID NO: 437117 - DNA, 626 bp, Homo sapiens
tagtaagtattgaagtcatatagtgttagtccttcaacttctccttcaaatggtggctgctctaggtcttttgcctctccatatactttcgaaacagttatcaataaacacaaaataacttgctggaattttgactgggattccattgtacctatagatcaagtcgagaagaactgacattttgatgtactcagtcttcttttctataaacatgggctatctcttcatttatttattacttctttgatctgttttaatagagttttgtagttttcctcatatakatcttttgcatattagatttatacctaagtatttcactttttagggtactaatgtaactagtattttgttttcaatttcaaattccactttttcgttgctggtatataggaaagtgattaacttttgtatattcactttgtatcttgcaacctcagtgtaattgcttataagttccaaacattgtttgtgtgtctgtgtgtcaattcttttcaactctgtacacaatcatgttttctgtgaacaaagacagttttgtttcttcctttccaataagtatatcttttatttcccttcttgttttattgcatcaattcagattttcagtgtgatgttgtaagaag

SEQ ID NO: 437118 - DNA, 626 bp, Homo sapiens
tagtaagtattgaagtcatatagtgttagtccttcaacttctccttcaaatggtggctgctctaggtcttttgcctctccatatactttcgaaacagttatcaataaacacaaaataacttgctggaattttgactgggattccattgtacctatagatcaagtcgagaagaactgacattttgatgtactcagtcttcttttctataaacatgggctatctcttcatttatttattacttctttgatctgttttaatagagttttgtagttttcctcatatatatcttttgcatattagatttatacctaagtatttcactttttagggtactaatgtaactagtattttgttttcaatttcaaattccactttttcgttgctggtatataggaaagtgattaacttttrtatattcactttgtatcttgcaacctcagtgtaattgcttataagttccaaacattgtttgtgtgtctgtgtgtcaattcttttcaactctgtacacaatcatgttttctgtgaacaaagacagttttgtttcttcctttccaataagtatatcttttatttcccttcttgttttattgcatcaattcagattttcagtgtgatgttgtaagaag

SEQ ID NO: 437119 - DNA, 588 bp, Homo sapiens
ctttggtaaatagtttctcttgagggcaggccttaaaaataacataaggctctcgtgtatttcaaaatggttaatttcccctccctaggccactagtatgagggaatttttcttcaatctttcytttgagaacctggttgatctcctagaggtaaaagtcacaaatgtgtgtgcccccccctttataattgggtcttcctggagtttttaactctctgacttgtccacgtttacctcgaagcaattcgttaattgcagtttaggttttcctactactgtggtagtgggcccctcagaggtttctacttgtgctctggtaacttggtgattctttgtattcacctgtcaattcatccaatttgtggggcagcagtttgccctgtgacttcacttctctgacagatctatgaagagttgttgatatttcattttgtttagctttactttttgttaagatgaaaggaagacttccaagcttctttcatgctgaatgagaaaccaaagtctctcctttgtttatctttaaattccgatttctacaagattttctgtttcacctagggtcagtttaggtaatttgtttgtttc

SEQ ID NO: 437120 - DNA, 441 bp, Homo sapiens
ttaccctgcattatgcttacagatttaattcctcacatttgttgttttactaaggaagcattttggcttacccctcagtttataatctcatatgaatgcatgggaatttatatacattattcatatggtctgtcttcaatggaaaaaaataccctatcttgagtttttagcatggaggaatacctccaactaggaaaactcactgtataagaatacctyacttaaacaattaacagatttttcacccttaatcaatggcattcctgagtaaatatttaaaataaatgctgtaaaaatattaaaaatgctctctaaaatgttgcttgaatgtaggtctaatgtggacttacagcacagaacagctgacataatgctgacattttcacacaaaattagaagtgatagaaagttaaaaatttttctaatattttaaaaatacag

SEQ ID NO: 437121 - DNA, 591 bp, Homo sapiens
ttaggctaaattcacttcctttgtaaatactgaaataccagatgccttctataacaaaacaaaagcataacacttgaataatttatcacatgaggtacstaattttcatcgttatatttgagttttgcagaatgataatcatgacttcaggtgcagcattctctctaccccacacatccttccttcttgtctctgcctggaaaaaaatctattctctcttcaaaatgcagctttattttttctctgcctttatgaaattccccttgactacctgggacagagttagtggtccccccgatcttcttatagttttttcatctattaaagcccttgttacactgtatttatatcacttctccccatgtgacttttcccattctaacctataatgtaccagagggcagagatccttaatattttttattctttaacaagcatttattaaacacctaatttggtgcaggcaccaggctaatagctagagatacagaaaaacataattctacttacaagttgcttaccatccagggaggagatagaaaaacatatacaatatagcgaggagagtaacatgatgcagtcaagcatggg

SEQ ID NO: 437122 - DNA, 593 bp, Homo sapiens
atacacaaatacaagaggctgaacaaatcctaagcacaagaaagataaagattatactaatacacaactaataaaattgttcaaaatcattgataacaagaaaaatcttaaaggtagtgagataaaaaagacacaccatgtaaaaagaaataaagatgaggatgacagcagatttcttactgtaaaaaattcaggctggtaagatagtggaaaaacacaaaaaacactgaaagaaaactcagtataaaattcattagacatcagaaatatatttaaaatcaaaggygaggatatataaaaactgaaagaattcatcaccagaaaactatcactaaaagaactgttacaggaagtacttcaggcagaaggaaaatgatgctgcatgaaaatctggatctgtacaaagaacaagcaccactagaaatgataactatgtgagtaaatagatacaatatttttcttattatttaaacctctgttaaaatatctgacactttagcaaaaataacaacaatgtattgtagtgtttataacatatgtatacttgaaatatatgacaacaatatcataaaggctatttatggaagggaaga

SEQ ID NO: 437123 - DNA, 600 bp, Homo sapiens
acaatatcataaaggctatttatggaagggaagacatgaaagtattgtccttatactacatattaagtgctaaaatattgtttgaaggtaggctgtgataagttaaagatgtatattatgaaccctaaagcaacaactgaaatgacaaaactagttattaactaatatgccartaaaagaaatacaataaaataattttttaaaatacaaaggaagacagaaaaagaagaaaaataaataaccaaggggaaaagtagaaaacaaatagcaggataatagatgaacaattaatcaaatcaataatcactttaaatacaaatggcctaaacaccctaagtaaaagataaagattgttgtattgattttttaaaaaaacacaagacccaacaatatattgcatagaataaatgtattttaaatacaaagacaaatataagtcaaaaatacaagactgaaaaatatataccatggtaataatacaaaaataaagcttcagtgtctggattagtatcagacaaggcaggtttctgagcaaaggatattgccagggctacaaaatataatttcataatgataaaagcatcaatgtgtcaaaaggac

SEQ ID NO: 437124 - DNA, 592 bp, Homo sapiens
ttcagcacaatcaccttaagaaaatgatccccccccaaaaaattctaaagagcccaccctaacccccccaaaatatgctctgtagcttctaatcacccattaccccaaataaggtagctgaggtagagtagaatacactgccctagtgtaaatagataaatgtatagataaatgatatractgggacattgtatgtcttcatagtacctacattcattattagaaaaatattactacagaattgaaattatccttactatagagacatgttaattgcaattataagcattagatttagcgagaaaagcaagatcacacatagatttcttctccaatttccctaagtatgatgttttatgcaatctttagcttatagatatttttgtttcttttgtcatataaaaattcatgaaatatataggtaactaaattttcataagtatgacagttttaagtttcttgtaaataaatcagtaattatgctatatcaaatttaatgaagtattgcaattgttatctctttattgtagtatgaaatttagcccctcatgatggggttgagggctctggattgatttgctgccttttctgt

SEQ ID NO: 437125 - DNA, 592 bp, Homo sapiens
ttcagcacaatcaccttaagaaaatgatccccccccaaaaaattctaaagagcccaccctaacccccccaaaatatgctctgtagcttctaatcacccattaccccaaataaggtagctgaggtagagtagaatacactgccctagtgtaaatagataaatgtatagataaatgatataactgggacattgtatgtcttcatagtacctacattcattattagaaaaatattactacagaattgaaattatccttactatagagacatgttaattgcaattataagcattagatttagcgagaaaagcaagatcacacatagatttcttctccaatttccctaagtatgatgttttatgcaatctttagcttatagatatttttgtttcttttgtcatataaaaattcatgaaatatataggyaactaaattttcataagtatgacagttttaagtttcttgtaaataaatcagtaattatgctatatcaaatttaatgaagtattgcaattgttatctctttattgtagtatgaaatttagcccctcatgatggggttgagggctctggattgatttgctgccttttctgt

SEQ ID NO: 437126 - DNA, 576 bp, Homo sapiens
ttattcttttaagtagaggaaatgaggacacagatacactcagagaaaagaacatgggaagacacaggaagaagatggccatctataagccaaaaggaaaagtctcagaaaaaaacaatctagcaacagcttgatcttgagcttctggactccaaaatggtgagaaaatgaatttctgttgtttaagccaccmaggcagtggtactgtgttatggcagccctggaaaactaatgcagttccacgaacccctactgaggtccaggaatgccatggcagtagactgcattcacaagttcattcaccaatgtgtttggagaacccgacatgcactgtgctaatatttctggctacacagatgaatgtgagaacaagttctttaacgtcaccgcctttctaaattttcatggacaaagcacgctgccacactgacaccagtgaaaaacccagggctttgagtccaaatgactgatttccccagatcaccggcttccctctcctctatgttctgaaccttcttcccctaatcccttgtttgaattgtccataaccacaagcagcaacactgaaagctttct

SEQ ID NO: 437127 - DNA, 576 bp, Homo sapiens
ttattcttttaagtagaggaaatgaggacacagatacactcagagaaaagaacatgggaagacacaggaagaagatggccatctataagccaaaaggaaaagtctcagaaaaaaacaatctagcaacagcttgatcttgagcttctggactccaaaatggtgagaaaatgaatttctgttgtttaagccacccaggcagtggtactgtgttatggcagccctggaaaactaatgcagttccacgaacccctactgaggtccaggaatgccatggcagtagactgcattcacaagttcattcaccaatgtgtttggagaacccgacatgcactgtgctaatatttctggctacacagatgaatgtgagamcaagttctttaacgtcaccgcctttctaaattttcatggacaaagcacgctgccacactgacaccagtgaaaaacccagggctttgagtccaaatgactgatttccccagatcaccggcttccctctcctctatgttctgaaccttcttcccctaatcccttgtttgaattgtccataaccacaagcagcaacactgaaagctttct

SEQ ID NO: 437128 - DNA, 499 bp, Homo sapiens
atcgtgccattgcactccagcctgagtgacaagagtggaactctgtctcaaaaaaaaaaaaaaaaaaaaaaggtttctacctggctcctgtgatagttcttactccacaggtcaaagaaccagtgtgagtttctgtaactacaaaatatgtccactgtaaaatacattgacaaaccaggaaaatgatccctgcttgggtgggtggatatagacagcccactgtgagctgtatggacctgagccaaaactccattcattacctgttgcccatgcacyttctactctaagagaaggaacaagatgacaaaattttggtgggtttccaggaataagtgtcaacacaaatatagtgttgaatagctctcaaagctgttaatactgtcttttaatcaatgtatgataacctgagtaaatggtggaaggtccttttgggagaggaaagcagggataactactctacatgcaattgtcgtggtgttgcagagttcttcctcctaga

SEQ ID NO: 437129 - DNA, 563 bp, Homo sapiens
ctgtccagcaaaagaactatcaacagagtaaaaagacaacctacagaagggggggaaatattcacaaattttgcattcaacaaacatctagtatccagaatttataaggaattcaagtttaacaagcaaaaaacaaataaccccattaaaaagtgggcaaaatacatgaacagacacttcttaaaagaaaacatacaagcagccacaaacatgaaaaagtgttcaacatcactaatcatcagagaaatgcaaattgaaaccacaatgagataccttctcacatcagtcagaatagctattattaaaaagttataaaacaacacatgcaggtgaagctccagagaaaagggaatgcttatactctgctggtggraatgtaaattagttgagctactgtggaaagcagttagaatatttctcaaagaacttaaaacagaattaccattcaacccagcaatctttgatgggtgtatacccaaatgaaaataaattattctaccaaagacacatgtactatattcattgcagcaccattcacaatagcaaagacatggaaacaacat

SEQ ID NO: 437130 - DNA, 607 bp, Homo sapiens
agagtctaaatgtaccgaggagccttctggtttccccagaacacacatatggttcacgaactctaccctactctctcaattccctttacaaggacaatcaaaattctgttttgttttcactgtctgacagcctaactacctagcccactgtattggtctgttttcacactgctataaaggactgcctgagactgggtaatttataaagaaaagaagtttaattgactcacagttccacatggcaggggaggcctcaggaaatgtgcaatcatggtggaagtgaaagcaggcatgtcttacatagcagcaggtaagagagagaagagcacaggggggaactgccaaacactttttaaaaccatcagatctcctgagaactcattcattatcaggagaacagcctagggggagactgcccccatgatccartcacctcccaccaggttcctccctcaacatgtggggattatagggattacaattagagatgagatctggttggggacatagagccaaactatcaaccactgaaaatcaactttgaatcaactcctatgaaaaggctgtaatatcaggaagcaattagtaataagatctacaacaccaa

SEQ ID NO: 437131 - DNA, 595 bp, Homo sapiens
gtacaaaattaactattatggtgcttgtcttatagtaggtatttagaatacttttaaaatttacacttcatagaaataattatcttagaaagttaaaaagaatgcttagaggggtaggatggtatgcctttttgtatcaactcagacaagatttgttgaagaatcaagtttagagtttagatttaaatttaggtacaagagtcacacttaatagggagcagggagggacaagtctagacatagggaatattttgagcaaaaattcagaagcaggataggtgacccttgtaatataactgccatataatacccagggccagcgttttacaacctgaaagaagatgtcataaatactgatggtttggcagcaaaagcagccccaagtggcctcttcaaggtctatgtaacttcagatcttctctcgtcactctctgcckcactcattcaatttataggcagcaataagtcattcctcatccccttccaccccttaactaagtggccctatgaccttcttaggggtggaaatcaaaatgagagagatgaatttaaaaaacaacaaaattaagtacatttttagttaagtgtcaggttg

SEQ ID NO: 437132 - DNA, 628 bp, Homo sapiens
acaaaagaacacatgacagactccagaaattctatttttcagcatgagataaaaacaaaatagatcttgtcattgtacatggatgaaaatgcaataaaaataagtgatttgatcatcctactgagtggcactgagacaaaatctttattatgtgtgatatgggatttgatgacaagartcataaaatgaagaccagaaatcagtatagagtgtaatgtgtaatgtataaccttgtctcggggaatttctctaatcgtctcttgaactgaagttaagaattgggtaaaaattaactaaaagaaactataattcctattatcctttctcaagttaatacaacaagctcttagtacctgtaggtattaggaaacttgctgcagtcagctctgcctcttagaaaaagccagtgaatcaaccagctttttgccctttgctagttgcagtgtcatggaaacaaagacttgatccacaaagccagccaggtcatttaaaatatccaccctttcaaagaaaagacatacaaagactgttttatagttttggattttttataagcagcagagtatttaaacctgacccattttttttctgatataacaaattgtcagcaataaccataatagtaaag

SEQ ID NO: 437133 - DNA, 547 bp, Homo sapiens
tgttccctttctcccatgtgatacatttgccatgatataatacaacaagaaggtcctcaccagatgcctgcaccttgattttggactactgagcctctagaactatgagaaaaataatttctgttctttgtaagttacctagtctcaggtatcctgttacagcagcccaaaatgaactaagacactctctttccctaattgttccaattcatctgacaattatattttgaatcctcaaagtatttgggcaaaccttttcacattttcttcattagttgaaatatttactgtgttactaatatgatatagagtataacaggtattcaataaaaactggaaactggttagattttttagaaactggtttttgattactacgcagcaaccactctgatcaacatggtcattatttyagcatttaactaaatgtgttagtttcatgtgtttcattaaaccctgaagagaaaggtagatacaggtttgaaagtacacagaatatgaactctaacttcaaagcatttaaattctgtcaagggtaacagctgtg

SEQ ID NO: 437134 - DNA, 583 bp, Homo sapiens
agacatcccctattgccactgccctagctaaatggctactgagctgtaggaattttgatattctcctcaactattcagaatagagcacaagggatattgagagaacttgasatatgcacccaggaatattaagactacatgtgcatttcaaaactttcagctgcttttcacctggggagtcaagtggatgccacagcacttagcttgactcaagtcatttggaatgactccacctagaaagcattttgtgggggagaggggactccaggagaaaaggcaaagatgtgttacaggaagcaagagatcaggaaatcagccagagagaataacaccatattggggaagagtgcagtatgcaggttctcagaaggggatctctagagagatgctctatggaagaccaggtatttgtgtacctaccatgacatgccagtccccaagaaagaatcacaagccacattggctaaataaaaagacattactcttttccttcttctttctcttcttttctgcctctcctctctcaaacttggagaagccagaggaatagcatagtacatgggagagaaagaagagaaagatg

SEQ ID NO: 437135 - DNA, 571 bp, Homo sapiens
gcacttagcttgactcaagtcatttggaatgactccacctagaaagcattttgtgggggagaggggactccaggagaaaaggcaaagatgtgttacaggaagcaagagatcaggaaatcagccagagagaataacrccatattggggaagagtgcagtatgcaggttctcagaaggggatctctagagagatgctctatggaagaccaggtatttgtgtacctaccatgacatgccagtccccaagaaagaatcacaagccacattggctaaataaaaagacattactcttttccttcttctttctcttcttttctgcctctcctctctcaaacttggagaagccagaggaatagcatagtacatgggagagaaagaagagaaagatgaaagtcaaaattacaacccatccatattttttctgctgttctccattctctggatcaaacctgggctctaaaaagggaataatcatagaatgtatttaaagtagcctaagattttactgataatgaatatgttttttacacctaaaagtaatctaaaattatgacattagccaagtgctgaca

SEQ ID NO: 437136 - DNA, 571 bp, Homo sapiens
gcacttagcttgactcaagtcatttggaatgactccacctagaaagcattttgtgggggagaggggactccaggagaaaaggcaaagatgtgttacaggaagcaagagatcaggaaatcagccagagagaataacaccatattggggaagagtgcagtatgcaggttctcagaaggggatctctagagagatgctctatggaagaccaggtatttgtgtacctaccatgacatgccagtccccaagaaagaatcacaagccacattggctaaataaaaagacattactcttttccttcttctttctcttcttttctgcctctcctctctcaaacttggagaagccagaggaatagcatagtacatgggagagaaagaagagaaagatgaaagtcaaaattacaacccatccatattttttctgctgttctccattctctggatyaaacctgggctctaaaaagggaataatcatagaatgtatttaaagtagcctaagattttactgataatgaatatgttttttacacctaaaagtaatctaaaattatgacattagccaagtgctgaca

SEQ ID NO: 437137 - DNA, 595 bp, Homo sapiens
tcacaatcctaaaaatatatgcacctaacactggtgctcccaaatttatgaaacaattagtaatakacctaagaaatgaaatagacagcaacaccataatagtgggggccttcaatactccagtgacagcactagagaggtcatcaagacagaaagtcaagaaagatacaatggatttaaattataccttggaacaaatgcacttaacagatatatacagaacattctatccgataaccacagaatacacattctattcaatagcacatggaattttctccaagatagaccatatgatgtctataaaattctcaataattttaagaaaattgaaattatatcaagtactctctcagatcacagtgcaataaaactggaaatcaactccaaaaggaaccttcaaaaccatgcaaatacatggaaattaaataacctgctcctgaataatcactgggtcaaaaatgaaatcaagttggaaattaaaaaattcttcgaactgaatgataatcatgacacaaccaatcaaaatctctggaatacagcaaaggtagtgccaagagtaaagttcatagccctaaattcctacttcaaaaaa

SEQ ID NO: 437138 - DNA, 579 bp, Homo sapiens
tcctgagcccaatttccacagggtcatgtgaagaagacygggtgatgcttgtccatgcagagggttatgttacagaagagaaccccaaagttagggaacttcaatttctttttcagttgacattatgcttgtcctttgctgtggaggaagagactatatttaatacactggacagtaagcacatgtgccctttaatctggaggaagacactatctctatctttcaagactgttctcagtacaaacatttgtggaaagacagtctaggacaaaggcagttagtgccgccacttataagcaatcagaaatatgaaagacccataaaatattgtttgctaacagtagggctaagaatagaacacatggaagagggctgccctgggtgcaagcaagatagatattcagcatcttcaataatatcagtgatcaatgctctttcctgaaaacaaaatacaacaaaacaaatttttttgctctaattttacatttgtttcaattacaggtgagttgaataatatatgagtaatattcaaattagaatatttgattatttatccttaaacaaaaataacatgtacat

SEQ ID NO: 437139 - DNA, 579 bp, Homo sapiens
tcctgagcccaatttccacagggtcatgtgaagaagaccgggtgatgcttgtccatgcagagggttatgttacagaagagaaccccaaagttagggaayttcaatttctttttcagttgacattatgcttgtcctttgctgtggaggaagagactatatttaatacactggacagtaagcacatgtgccctttaatctggaggaagacactatctctatctttcaagactgttctcagtacaaacatttgtggaaagacagtctaggacaaaggcagttagtgccgccacttataagcaatcagaaatatgaaagacccataaaatattgtttgctaacagtagggctaagaatagaacacatggaagagggctgccctgggtgcaagcaagatagatattcagcatcttcaataatatcagtgatcaatgctctttcctgaaaacaaaatacaacaaaacaaatttttttgctctaattttacatttgtttcaattacaggtgagttgaataatatatgagtaatattcaaattagaatatttgattatttatccttaaacaaaaataacatgtacat

SEQ ID NO: 437140 - DNA, 583 bp, Homo sapiens
tttttcagttgacattatgcttgtcctttgctgtggaggaagagactatatttaatacactggacagtaagcacatgtgcyctttaatctggaggaagacactatctctatctttcaagactgttctcagtacaaacatttgtggaaagacagtctaggacaaaggcagttagtgccgccacttataagcaatcagaaatatgaaagacccataaaatattgtttgctaacagtagggctaagaatagaacacatggaagagggctgccctgggtgcaagcaagatagatattcagcatcttcaataatatcagtgatcaatgctctttcctgaaaacaaaatacaacaaaacaaatttttttgctctaattttacatttgtttcaattacaggtgagttgaataatatatgagtaatattcaaattagaatatttgattatttatccttaaacaaaaataacatgtacatcagagttaatttggggaaactttcagttatacagtaagtgtttcaacacacaagactgtcacatatgttcctttatagagtaagttttcaaaaggatgcaaataattcagca

SEQ ID NO: 437141 - DNA, 579 bp, Homo sapiens
tcctgagcccaatttccacagggtcatgtgaagaagaccgggtgatgcttgtccatgcagagggttatgttacagaagagaaccccaaagttagggaacttcaatttctttttcagttgacattatgcttgtcctttgctgtggaggaagagactatatttaatacactggacagtaagcacatgtgccctttaatctggaggaagacactatctctatctttcaagactgttctcagtacaaacatttgtggaaagacagtctaggacaaaggcagttagtgccrccacttataagcaatcagaaatatgaaagacccataaaatattgtttgctaacagtagggctaagaatagaacacatggaagagggctgccctgggtgcaagcaagatagatattcagcatcttcaataatatcagtgatcaatgctctttcctgaaaacaaaatacaacaaaacaaatttttttgctctaattttacatttgtttcaattacaggtgagttgaataatatatgagtaatattcaaattagaatatttgattatttatccttaaacaaaaataacatgtacat

SEQ ID NO: 437142 - DNA, 583 bp, Homo sapiens
tttttcagttgacattatgcttgtcctttgctgtggaggaagagactatatttaatacactggacagtaagcacatgtgccctttaatctggaggaagacactatctctatctttcaagactgttctcagtacaaacatttgtggaaagacagtctaggacaaaggcagttagtgccgccacttataagcaatcagaaatatgaaagacccataaaatattgtttgctaacagtagggctaagaatagaacacatggaagagggctgccctgggtgcaagcaagatagatattcagcatcttcaataatatcagtgatcaatgctctttcctgaaaacaaaatacaacaaaacaaatttttttgctctaattttacatttgtttcaattacaggtgagttgaataatatatgagtaatattcaaattagaatatttgattatttatccttaaacaaaaataacatgtacatcagagttaatttggggaaactttcagttatacagtaagtgttycaacacacaagactgtcacatatgttcctttatagagtaagttttcaaaaggatgcaaataattcagca

SEQ ID NO: 437143 - DNA, 586 bp, Homo sapiens
agtatcaaaccattagttttttcctttttgtacttttatagtttttgtagttaaaaattttactggcatgattatatatatgaarttaaatagaaaatcttattttctggccattaatattatttattttattttatgattattactgaacatagttttgctctatgggagagagagctgataaagcaaacaaacaaataaaactatcttccccgggtgtcaaaggtactgctgtagggctatcaacaatgagccagcacaaagattatgactaaccactagtctgaataaacgtaactgagtcttcagtattaacaaaatcgaaagtgactgaaaatcataggattgattggggttattgttaagagagccatcctccagagtaaaacaggaattctgcagcacacagatagtatagttactgggatgatcaaactgtttttttcatacctcaataagtcaaagctcctcattataccagttatgttctacttccttgttccagctatcatgcaagagtccttgaaacaatcttggttgcaatctacaaccttggttacatcaattgccaagcccttagtgtgtt

SEQ ID NO: 437144 - DNA, 641 bp, Homo sapiens
ttatgagtttttttcagtctgctggggagtatgagtactattttaagccctgtatgaccaccaggtactgttccaattctttttcaaacattagatagtgttcttacacacatgtgttagtcagtactcagctaagtatttgaagggaccctctgcagatcttcagagttgtccccatgtgcagttctctcctttccattacttgtacacactctagctgtgtctctctggatgctcagttccatctaatcaactctgaaattctgctagggtccacttgggttaaatcctcccttcactgcatcctagatattcactcaaggaaatgacctgagagaattgtagggatccccccacttgcatgccatttctcagagattattggtttttattacctgatgggtggtatcctgaaaactgttctggagatatyttgtctggtcttgtgacaatttcagatggcagagcaaatccagtcctttttagtctaccttgactggaagtgaaaatcccgactcatttatttttaaagtttgcttttaaatgataggaagattggtctctagtatatcattttagctcacagtatatttttatggtagataatagtagcttcaatttatgcctcgtaaatcattgat

SEQ ID NO: 437145 - DNA, 507 bp, Homo sapiens
aatatcttttaacctttattccacctttttttttttttttttttttttttttttttttgccacagacctgttgtttaagacccaaactcttacttgaacactcagtatgaaaaacatgaaagcaggctgtgcactgttggattactgacatcatggaagcactgaaccaggaggtatttatcccttttgtactatttcactggtgtcttttgatgttaccaaagtgtaggcagagcaccccatattttcttaracagccagtagtcaacatctgatcccaatccagagttggtgtggatgagcagttagaattataaagattaaaaagttgtttcctgtctcttccaaattgtgtgatagaatatggaagctctggctcaggttgctcatacctgtaattctagcactttgggaggccaaggcaggaggattgctggagctcaggaattcgagaccagcctgggcaacaaggtgaaacccaatctctaccaaaaatacaaaaaatta

SEQ ID NO: 437146 - DNA, 479 bp, Homo sapiens
taatggcacctttcttggaaacagcaatttggaggatatgatgactccactatcattttaaagcttcacagattagaaggactgccattataaattccactttacatataaaatctgatgcttggatggattatcttgacaatgttcacacctataaaaagtcataatgttaagaccagaatctagtccagtgttctatccaactatccagcactcacctcttyttctgactacggcagttttaaaatgataggaactcagccaacattgggctgtaagcagaggattcgcctttattctaccccagcagcctaatgcctgacctaattctaatacctgaaacaatggtcttgttgaattaaatatcatatgacactttgttagaaatagcctatttaataaataaaattcagaacaatagtggcaaacaaagataactcatggttaggtggaatggtgggaaaatgctatggtattag

SEQ ID NO: 437147 - DNA, 602 bp, Homo sapiens
agtgcttcaaatatgcacatgtgcagccctcaaccctgccacttttctcccagaggatggggaaccaatcragcatgactgccaacaacttatagtctagacttatgctgcccaagatgatctcttagaagtccccttagctaatcctgaccttaacctatataccgatgaaagttcatttgtggagaatgggatatgaagggcagcttatgccatagttaaggtgatgtaactgtacttgaaagtaagcctcttctcccagggaccagcacccagttaggagaactagtggcacttacccaagccttagaactgggaaagggaagaagaataaatgtgtatacagatagtatgcttatctaagcctacatgaccatgctgcaatatggaaagaaaggtagttcctaacctctgggggaacccccattaactgccacaaggaaatcatggagttattgcactcatgcaaaaacccaaggaggtggcagtcttacactgctgaagccaacagaaaggggaaggagaggggagaacagcaccataagcggctggcagaggcaaggaaagaccagcagagagaaagagagagacaaagtcaaaaa

SEQ ID NO: 437148 - DNA, 602 bp, Homo sapiens
agtgcttcaaatatgcacatgtgcagccctcaaccctgccacttttctcccagaggatggggaaccaatcgagcatgactgccaacaacttatagtctagacttatgctgcccaagatgatctcttagaagtccccttagctaatcctgaccttaacctatataccgatgaaagttcatttgtggagaatgggatatgaagggcagcttatgccatagttaaggtgatgtaactgtacttgaaagtaagcctcttctcccagggaccagcacccagttaggagaactagtggcacttacccaagccttagaactgggaaagggaagaagaataaatgtgtatacagatagtatgcttatctaagcctacatgaccatgctgcaatatggaaagaaaggkagttcctaacctctgggggaacccccattaactgccacaaggaaatcatggagttattgcactcatgcaaaaacccaaggaggtggcagtcttacactgctgaagccaacagaaaggggaaggagaggggagaacagcaccataagcggctggcagaggcaaggaaagaccagcagagagaaagagagagacaaagtcaaaaa

SEQ ID NO: 437149 - DNA, 602 bp, Homo sapiens
agtgcttcaaatatgcacatgtgcagccctcaaccctgccacttttctcccagaggatggggaaccaatcgagcatgactgccaacaacttatagtctagacttatgctgcccaagatgatctcttagaagtccccttagctaatcctgaccttaacctatataccgatgaaagttcatttgtggagaatgggatatgaagggcagcttatgccatagttaaggtgatgtaactgtacttgaaagtaagcctcttctcccagggaccagcacccagttaggagaactagtggcacttacccaagccttagaactgggaaagggaagaagaataaatgtgtatacagatagtatgcttatctaagcctacatgaccatgctgcaatatggaaagaaaggtagttcctaacctctgggggaacccccattaactgccacaaggaaatcatggagttattgcactcatgcaaaaacccaaggaggtggcagtcttacactgctgaagccaacagaaargggaaggagaggggagaacagcaccataagcggctggcagaggcaaggaaagaccagcagagagaaagagagagacaaagtcaaaaa

SEQ ID NO: 437150 - DNA, 618 bp, Homo sapiens
tgcctttaactcttctgtgacttccctcccccttcttattagggccagaattcgttgttacctacaagcttttacatgacctggcattaactaccctatagtctgatcacacactcatgattctttatggaagcaatattccatagaactctctgcaatgatggtaatgttcaatacctttaatatccaatacagtaaccaattgtcacatgtgactatgttagttaaaatttaaaatttagtttctcagttgcrataaccagatttcaagcactcaataaccatatgtactagtggctattgtgttagacattgcatagagcttgcatcaatgcagaatgttctatttgacagtgatcctttagatagattaaccttgcttcagttattcaaataccctaaaattcttctcacataaaagcttttccagatgcgctctctctccctacctctttgcctagctatttcctattcatttgggcagaggttttagaacccaaacgttttatattcctgtggattacttccccttcacagtacttttactaattttaattaattattgattgattctttctcactgcattgtaatctttattatggcagagactatgtctg

SEQ ID NO: 437151 - DNA, 546 bp, Homo sapiens
atcacagatggtgatttgaataaatgtgcataaggcattgagaagtgcgatgtatgttttacaggtcaggttctccaagaaacagactgtaagactctgatatttgtgcacaggaagtatttattataaagtgttcttgggatcaacaccggggaggaaacaagggaagtaggactgaccaaagcaaaaggctggactgtgatgaagggaagtataacagtgacttcagccartcctataaggagctctgaaactgagatggccctagaaatgtcactatcctttctttaaactatatagatggggcaaatccttattttatagatttgtagagataaagcaattagccatttccacaactgccaccccttcaaccttcttgcttattataactgtatccgtctgacctctataattttggcatcctgtcatcctcacttctgtcagggagtctagtctataacagcatctcttaatatcacttctggcatagagagggcagccacaattgaggttttaaaggtgctggtgcctgttccacaagct

SEQ ID NO: 437152 - DNA, 552 bp, Homo sapiens
tctcaggacacagctgtgatttgtgatcagccaaactagtggcctcagcggtgatatgtacttcagttctgaagggggatctcagtgaaatatgacaacatccactacagtatagattccattggaaaaatcagaaggtactacatgtaagatttctgaagtacagttgactgaaaaatataasgttaagtttatggattgaggaaaacatgtagaaagttaagtctagaaggaaatggagataatatgttgccatggatatcagaattcccaaagacttcatgagactagtgatttcatgactatgattttgttaattctattatgctcatctatatcttgcagtaggatcattattgttatactatactcactgcatagtttgtactataacagagaagggataaaatatataacttaaacattacatggatgaaatgtattttggtgtagaatgaaatgatgtgttattttcaacatcaactgcatagaatgtgcctacctatcaacagccacaggccaacttttgaatcagtacctgtggccaaggta

SEQ ID NO: 437153 - DNA, 552 bp, Homo sapiens
tctcaggacacagctgtgatttgtgatcagccaaactagtggcctcagcggtgatatgtacttcagttctgaagggggatctcagtgaaatatgacaacatccactacagtatagattccattggaaaaatcagaaggtactacatgtaagatttctgaagtacagttgactgaaaaatataaggttaagtttatggattgaggaaaacatgyagaaagttaagtctagaaggaaatggagataatatgttgccatggatatcagaattcccaaagacttcatgagactagtgatttcatgactatgattttgttaattctattatgctcatctatatcttgcagtaggatcattattgttatactatactcactgcatagtttgtactataacagagaagggataaaatatataacttaaacattacatggatgaaatgtattttggtgtagaatgaaatgatgtgttattttcaacatcaactgcatagaatgtgcctacctatcaacagccacaggccaacttttgaatcagtacctgtggccaaggta

SEQ ID NO: 437154 - DNA, 609 bp, Homo sapiens
atgtaattttacaaagtaggaaactgaggcctcggaatattaagtaatttgttcaagatcacaccatcagtgtggaaccagaatccagacaaccagtctcttggttcagtaccctttttcataccactgtgtcttgtgaaactgtatgcgtgtaaccacacaggtatgtgtggttgatgaatggttttaggtttaatacttctttagcaccttagccttccagtaccattaattgaaagaataataaaacatcacatatcattatttaaacttacacagcattgcaagttcyatctagctggatccctggggacatacaaagctaagggagtggggatagggtgaccagggataaatagggtagatgtaaaattcagtcagtagaaaggtgagtggagcctttgaactgctcagttttgaagatagagagaaatagagagaagtaaatctagggaaaagagaatacctttagaaatggatactcccatgaggtaataaactgggaaaaacttaactgcttgatagcttttccttgaactaaaataaggtcacatatagcattcaatttaaattccttcccttatattttgcagtttgctttggttccta

SEQ ID NO: 437155 - DNA, 541 bp, Homo sapiens
aaaaactacacatttctttttctttgtttaaattatcatacctacaatgagtatgcatgtacttttagttttcaactcaagccctatagaagacatactctagtatatcttacacacatcattcctaaaaagttaagacttggcttgctgctcatagagatattaaaatamacatctaaaatgttttacttgtagttttgggccccttttggcattggcctgatctaaacaggttaccctgaggtcactgggggccataaatcaggggggtggactggtggctaagacagcctgcatagctttagtgcaatgtgctattttagtttatgcccctgcaatgacaccatctctttggcaccagccaaagaaagcttcctagacatctatgggaagagaatgttttgcagtaatccaaggcagaggtcacacaagcatgaattactgtggggacgtctttgtctgctccagaccctgggacaaataaagtagggaaagtgacttccaactaaagcatttatccaggaattcgggggtggaaatt

SEQ ID NO: 437156 - DNA, 599 bp, Homo sapiens
aagacttggcttgctgctcatagagatattaaaatacacatctaaaatgttttacttgtagttttgggccccttttggcattggcctgatctaaacaggttaccctgaggtcactgggggccataaatcaggggggtggactggtggctaagacagcctgcatagctttagtgcaatgtgctattttagtttatgcccctgcaatgacaccatctctttggcaccagccaaagaaagcttcctagacatctatgggaagagaatgttttgcagtaatccaaggcagaggtcacacaagcatgaattactgtggggasgtctttgtctgctccagaccctgggacaaataaagtagggaaagtgacttccaactaaagcatttatccaggaattcgggggtggaaattgatccaagcaatcttggcaaattgtgaaagcaaagagtgaccaattcttttcaacccaggaaactaggccagcctctttctgccccttttccaatcccattattgggtccacttgagaaacccagatatttcttgagaaagattcagcatagttaaatagcaatgcttgtatttatttatgttataaaatgt

SEQ ID NO: 437157 - DNA, 599 bp, Homo sapiens
aagacttggcttgctgctcatagagatattaaaatacacatctaaaatgttttacttgtagttttgggccccttttggcattggcctgatctaaacaggttaccctgaggtcactgggggccataaatcaggggggtggactggtggctaagacagcctgcatagctttagtgcaatgtgctattttagtttatgcccctgcaatgacaccatctctttggcaccagccaaagaaagcttcctagacatctatgggaagagaatgttttgcagtaatccaaggcagaggtcacacaagcatgaattactgtggggacgtctttgtctgctccagaccctgggacaaataaagtagggaaagtgacttccaactaaagcatttatccaggaattcgggggtggaaattgatccaagcaatcttggcaaattgtgaaagcaaagagtgaccaattcttttcaacccaggaaactaggccagcctctttctgccccttttccaatcccrttattgggtccacttgagaaacccagatatttcttgagaaagattcagcatagttaaatagcaatgcttgtatttatttatgttataaaatgt

SEQ ID NO: 437158 - DNA, 551 bp, Homo sapiens
gagaaacatgagtgtggtcaaggcctgacccttgccagataacaggtaagccaggacagaaagctgataggaagctgggctgctctgtaaattgacgctggatctctctgcaagcaggggccatctgcagagtgggtagccttgtgcagatggaggactgtgggagaggtgcccacatattcttcctatccygggcccctctgtctccctgagatcttgccttcaggttctcatctgaagacagtggtatttagaagaaaatctaagactgtttctatgaatcagagtgccttccagagctgcacgtgcagtgaggaatagccagctgggttcttacctccttgtgtagaattgtcaacccaggatggtggcagacaggagagccctccttcgaagtcccacagccccaaccacagtccagggcatcgtctgtgggattcagactgctgcttgaccaggtccccttgcccagtcacaattaagaatgccatcacactgagtcaggagaatggccggcgaagcagaacaagacaattaagtcacattgacac

SEQ ID NO: 437159 - DNA, 553 bp, Homo sapiens
tctataccaggggcttttaacacataaggaagagttgccaacatataactaggcatctaggcataaagaacactgtgtgatagacttctacttttttttttttttttagatggagtttcgctcatcgcccaggctggagtacaatggcacaatctccgctcactgcaatctccgcctcttgggttcaagcgattctccagtctcagcctcttgagtagttgggattacaggtgcccaccaccacgcctggctaatttttgtatttttagtagagatggggttttaccatgttggccaggctgctcttcaactcctcacctcaggtgatctgcccaactyggcctcccaaagtgttggaattacaggcgtgagccaccgcgcccggcctgtgtgatggacttctaatgagaacaacacctagcacataaaccagggcttggctactggtggtccacagttgtcacacgttgcctcagaacattggtattacatatttaaaattcaaagaataaactgccaacatttaaacttgagagctttcacatagaaatta

SEQ ID NO: 437160 - DNA, 191 bp, Homo sapiens
ccttctgtcactatgtctggtggtaaagagagtgcattccagagcagaaatgcctgggtgcaaactygtagcaccctatttagtatcttcatgacattaacatccttatgcctcagtctcttaatctataaaatgtgaggataagaatgagggccgctgccttagggttatgctgatgacttcatgagtaa

SEQ ID NO: 437161 - DNA, 593 bp, Homo sapiens
gaaaataaagccaccatgacataatttaaatacaacacaaagcatgatttcttgaacaattcttagaatctgcggttcctcattgtaccacccacactaaaaaggcttgtctctcttgagagaattttctctcttggagggattttgactttcaccttcacagggcgaaagggtgaggctgtagcagagatgcgatgggctgctggtgtcacaaggcccaggcattgcttgttctgaccctagagcctaacctgggtgaaacccttgtgcatcaaacctggggcgtgggagtggaaaaggaaactcatgaagttggaaagaactgaaaacaaatttccatttctttctcatttcatcagaaatggtgtcctcactaagggtcttttagttgcaagcaagacaaatccactgcaactataaacggatttttttaggtggggggatgaaaaggtaacaaaaggtaaacagattaagaagaaagaaataatattgcctttatttgcacwtaatgtgattgtctatgtagaaaatccaaaagaattaactaagaaaactcctggaactaataagcagttacagcagggacacaggat

SEQ ID NO: 437162 - DNA, 507 bp, Homo sapiens
gattgccaatttttccgttctaagcttatcttcatagttgtgagcatttttcaggtcctcaaaagagttagtatctaagtataaattttctctttaaggtgtttgcttaaagaggaaacatctttaagaagtgaaagctgaagaatggggcctaagatcaaacttcaaggtgttggkggcctaaacgcctgccatcaaagtaacacaacagaatgataacttggtaaacagcagcgaagctcaatagatattcttcaaattgatttaagttgtgataaaaacccaacttatgattttaaatatttctgtagctagaacaacatagcagaaagacaacatcaaaatattaaccatgattacattctacatgactagattacaaggggttctttgcgacactctaatttttcttcagcgaacttgtattgcttgggtaattacacatacacaaaaaccttactactgttccttttaaaaaattactgaatagagttttttaaaaaattg

SEQ ID NO: 437163 - DNA, 534 bp, Homo sapiens
tttccgttctaagcttatcttcatagttgtgagcatttttcaggtcctcaaaagagttagtatctaagtataaattttctctttaaggtgtttgcttaaagaggaaacatctttaagaagtgaaagctgaagaatggggcctaagatcaaacttcaaggtgttggtggcctaaacgcctgccatcaaagtaacacaacagaatgataacttggtaaacagcagcgaagctcaatagatattcttcaaattgatttaagttgtgataaaaacccaactwatgattttaaatatttctgtagctagaacaacatagcagaaagacaacatcaaaatattaaccatgattacattctacatgactagattacaaggggttctttgcgacactctaatttttcttcagcgaacttgtattgcttgggtaattacacatacacaaaaaccttactactgttccttttaaaaaattactgaatagagttttttaaaaaattgctagacgtagtttcttgcggaaaataatcaaattcacg

SEQ ID NO: 437164 - DNA, 603 bp, Homo sapiens
tgcttataccattttaagtttatgtcacttacaaccaaaagagtctggttaatgcaacaagaaagtgtgtgatccctctaaggtttacattttagcattagacaggtcttcaatccaaagagatgcattcgtgtggcagaatgttagtcactcatgtcaagctaaggtggccagaatattttgaagtgggcttaagaactagggacactcataccctgccctatgtaccagtgactggctcatctgcctggcaccaagtcttgcccagctcaaaggacagaccctgttggcccaaaggagcttcttggttggcttcaggcctgaaaaggcagccagccctatgtgttccctccatgagaaaacatttctcactgagatccattcaaagcacttcttatcaccaacaggagtaagctctgcgataggagtgaagagtgtcactaagtgagaatcagctacggtggcagctygtcctagaaatgtcacgtctcatcctgcctccgtgtgctggcctatccaagttcaggtttcaggcaggcagctggactcagcaggaagagtctctttttctgaaagctaaaatgactcttcagctgtaagtta

SEQ ID NO: 437165 - DNA, 620 bp, Homo sapiens
taatgttattgaagcatgtctgtcttcataaacactttgtaaaaaaaaaaaaaagtgtacaatgataacataattattattaggcatgtaccatttccagaattcactgtaagttctacagagatgcaccagagctgtggwtactttagctggtggggttcgggcagctgggactcactgttgcaatggtcacaaatgccctaatcattgagtcccaaatgtctagttgaacttaatgcttaataacatctatctacccagagggcaacaaaatgtttgttcctggcttgcgaggccactgatattttcatttttttttcctacagaactattggcctgaggcccctggaaacattgcttcattgcttggccttataagaatttacttgacctattttgtggaagcacatttaccccagtcttagaggtttttccatgcaaaagagataaatgaaaatttttactgctaagtttcattcacctgagccaatcacagctactgaaatgaccaggttggtaaatgctgttttaatgaaacaggctctccacaggtccagatggggtaggtccatgcctcaaaaatgaaaaattctctttttagctccttagctggattactg

SEQ ID NO: 437166 - DNA, 561 bp, Homo sapiens
gctctcttttgtgtggttgggataagaggatgggtgtccattttgataatcactacatttctcaactactgtcctatgtcctttaatctccacaacttcatgaggtgggtgctattatcccattttacagatgaagcaatgggggctctgagggcttgaaaaacattcctaagatcaggcagctagtgagtggcagatttgactaattccagagctcactctgttacctcatgtctggacaacttatgggagtgactgcacacagtccagttcactgaagcatccccgtggctcttggggacctgcactacctccctcacctcccacctcagaactacctggttaccacgtgaacctgagggccctasctattccacttcaaaaagttagcataacctctgtaggcctgtttcattttaagtgggtggaattgtgtctcccctgttgaattcatatgttgaagtcctaacccccagtacctcagaatgtgaccttacttagaaacagggccattgaagatataattagttaggatgaacttatatcatattggaggaggat

SEQ ID NO: 437167 - DNA, 558 bp, Homo sapiens
aaatttatggcacttaaagcagaaaggagaagggcagaagattctttctcaaaaatagctcaaaatagtacttatgctaaattagcatattttgggggacacattctggtccccttcgaatccatattagaaaagaaagactaaagatrgggaaattcagtgcttagttaagggagatgtaggtcacagagagtagttttcactaagaaatgaggagtaagtctgaaacaacaatgaaagaatcttgcttttcagtgattgaggcaaacagctccaataattggatttggggaagagaacaaaagtatagatgaaccagtataaggcaactactttgatcaaatggtgatttgtgacaacctgtactaaatttaacagcagaatttcatcaaggtcataagcacaggaacatagcaaagcttttatactccaaagagttggtgcccactttatgccatactaggtctgtgaattacaatgatatgaaaggtctggtccttgctttgtggaactttactcacttcattcatttggagaatagtaatgaatacctactat

SEQ ID NO: 437168 - DNA, 492 bp, Homo sapiens
aagttcttacagggatgactgaactgttccatctgaacaaaaagaaaatatattcatttaaacaagcctaaagtgcagctatctaacaggcgaggtggatggggttgggtgcatagggtttgctgctttagtgctgatttctcaaatcttttattttctctgctgacctctgcagtaccatagaacacagtccaggcattagacttgcagccacaggatctaggtcttgtgtgtcagttttgaaggcagcatgccctgctagactgcaacatcctagaagacaaaggtcagccaagatctttgcgtgaggcctgatagaaatcaatgttccagacattttaaaaatcaatgacttcattgatttccagwagttctctaggcaagagcgatcagagactttagaagttcatatcaacatggaagtggtagaatgacacctgagagagtagtgggtggtcaccaggtcacaggtgtcagggtgatcggaacact

SEQ ID NO: 437169 - DNA, 498 bp, Homo sapiens
ccataaagctatgttaacagattggagctgtttgcagacaaggtcccaaagacagcagaaaattttcgtgctctgagcactggagagaaaggatttggttataagggttcctgctttcacagaattattccagggtttatgtgtcagggtggtgacttcacacgccataatggcactggtggcaagtcaccactgggagaaatttgaagatgagaacttcatcctaaagcatacaggtcctgraatcttgtccatggcaaatgctggacccaacacaaatggttcccagtttttcatctgcactgccaagactgagtggttggatggcaagcatgtggtctttggcaaagtgaaagaaggcatgaatattgtggaggccatggagcgctttgggtccaggaatggcaagaccagcaagaagatcaccattgctgactgtggacaactcgaataagtttgacttgtgttttatcttaaccaccagatcattccttctgt

SEQ ID NO: 437170 - DNA, 498 bp, Homo sapiens
ccataaagctatgttaacagattggagctgtttgcagacaaggtcccaaagacagcagaaaattttcgtgctctgagcactggagagaaaggatttggttataagggttcctgctttcacagaattattccagggtttatgtgtcagggtggtgacttcacacgccataatggcactggtggcaagtcaccactgggagaaatttgaagatgagaacttcatcctaaagcatacaggtcctgamatcttgtccatggcaaatgctggacccaacacaaatggttcccagtttttcatctgcactgccaagactgagtggttggatggcaagcatgtggtctttggcaaagtgaaagaaggcatgaatattgtggaggccatggagcgctttgggtccaggaatggcaagaccagcaagaagatcaccattgctgactgtggacaactcgaataagtttgacttgtgttttatcttaaccaccagatcattccttctgt

SEQ ID NO: 437171 - DNA, 498 bp, Homo sapiens
ccataaagctatgttaacagattggagctgtttgcagacaaggtcccaaagacagcagaaaattttcgtgctctgagcactggagagaaaggatttggttataagggttcctgctttcacagaattattccagggtttatgtgtcagggtggtgacttcacacgccataatggcactggtggcaagtcaccactgggagaaatttgaagatgagaacttcatcctaaagcatacaggtcctgaaatcttgtccatggcaaatgctggacccaacacaaatggwtcccagtttttcatctgcactgccaagactgagtggttggatggcaagcatgtggtctttggcaaagtgaaagaaggcatgaatattgtggaggccatggagcgctttgggtccaggaatggcaagaccagcaagaagatcaccattgctgactgtggacaactcgaataagtttgacttgtgttttatcttaaccaccagatcattccttctgt

SEQ ID NO: 437172 - DNA, 498 bp, Homo sapiens
ccataaagctatgttaacagattggagctgtttgcagacaaggtcccaaagacagcagaaaattttcgtgctctgagcactggagagaaaggatttggttataagggttcctgctttcacagaattattccagggtttatgtgtcagggtggtgacttcacacgccataatggcactggtggcaagtcaccactgggagaaatttgaagatgagaacttcatcctaaagcatacaggtcctgaaatcttgtccatggcaaatgctggacccaacacaaatggttcccagtttttcatctgcactgccaagactgagtggttggatggcaagcatgtggtstttggcaaagtgaaagaaggcatgaatattgtggaggccatggagcgctttgggtccaggaatggcaagaccagcaagaagatcaccattgctgactgtggacaactcgaataagtttgacttgtgttttatcttaaccaccagatcattccttctgt

SEQ ID NO: 437173 - DNA, 546 bp, Homo sapiens
gaattttctagaatataactggctgatagtgaagtcttgaatgcccaactctcaactgactgagcaagaatcatggctggctggcacagccaggcggacaagtgtggcttggtggaaagagtatggtccaaagaccacagtcaagtcctggccctgccccttaccagctatgtgacttacatgccagcaagtctcagtttcctcagcagtcagatagaggtgatgatacacattgcatggggttctataaatcaagtctagagtagaaagaggtttaatgacatatgactgacgggtggtgccatgtggaaaattaccttgatgcaacagaagcctccaagtatatgctgcaagacaagctrtcccagaggtcatggaacagagaggctcacaggccaaattaaaaggctcaaatcacatatttgattaaattattttgaaacacataaggagatgaaagagaataagatggagtccattaagatgcttacaacagggttacaagtgaggtggaaggtccacactacgtaaaaccggggctgtgca

SEQ ID NO: 437174 - DNA, 383 bp, Homo sapiens
actagccaggactttcagtacaatgttgaataggaatgatgagagaagacatccttgacttcttcttaaccttaataagacagtatccagtttctcccaataagcataatatattaaaaactgtatagtttctatagatgttcttcattaagttgaagtaattctccctcattttgagcttgctgaragtgtgtgttgtgaatgggtgatgaatttttttgaaatgcattttccacatcagttggtatgatcatatgatttttctcctttaggctgttgatgtgattgatttttgaaagctgaactagctatgcctatctaagataaatcttacttggtcattgtatatcattccttttagttgttctacttttaattagcac

SEQ ID NO: 437175 - DNA, 383 bp, Homo sapiens
actagccaggactttcagtacaatgttgaataggaatgatgagagaagacatccttgacttcttcttaaccttaataagacagtatccagtttctcccaataagcataatatattaaaaactgtatagtttctatagatgttcttcattaagttgaagtaattctccctcattttgagcttgctgagwgtgtgtgttgtgaatgggtgatgaatttttttgaaatgcattttccacatcagttggtatgatcatatgatttttctcctttaggctgttgatgtgattgatttttgaaagctgaactagctatgcctatctaagataaatcttacttggtcattgtatatcattccttttagttgttctacttttaattagcac

SEQ ID NO: 437176 - DNA, 383 bp, Homo sapiens
actagccaggactttcagtacaatgttgaataggaatgatgagagaagacatccttgacttcttcttaaccttaataagacagtatccagtttctcccaataagcataatatattaaaaactgtatagtttctatagatgttcttcattaagttgaagtaattctccctcattttgagcttgctgagagtgtgtgttgtgaatgggtgatgaatttttttgaaatgcattttccacatcagttggtatgatcatatgatttttctcctttargctgttgatgtgattgatttttgaaagctgaactagctatgcctatctaagataaatcttacttggtcattgtatatcattccttttagttgttctacttttaattagcac

SEQ ID NO: 437177 - DNA, 366 bp, Homo sapiens
cagtttctcccaataagcataatatattaaaaactgtatagtttctatagatgttcttcattaagttgaagtaattctccctcattttgagcttgctgagagtgtgtgttgtgaatgggtgatgaatttttttgaaatgcattttccacatcagttggtatgatcatatgatttttctcctttaggctgttgatgtgattgatttttgaaagctgaactagctatgcctatctaagataaatcttacttggtcattgtatatcattccttttagttgttctacttttaattagcactaagatataaaggcataatttaatgttttatawatttataatttgcaacaaaaattatgactgttatttg

SEQ ID NO: 437178 - DNA, 538 bp, Homo sapiens
atttttaaaaaatcacaaaagatcatttccaggrgtttaaagaagacttggtcttcacaataaaaagacccataaaataccaaaaattaaaataaaaagagacatattttagtaaatcaaatttcagaacaaaagggggaaattattctagcatccactcagaggttctcataaaagactgtgagtcattgccatacttttgtaaaaccaaatgctagaagacaaagaagatatgtcaacagagttatggcagaagaaattatgtttcctgataagccattgttcattgcaggagcaacctagaggcatttgcaaactagcaaaagctcaaaaagagttttatctgcttacctttcctgaaattgttacataaagatgaatgttaattaaatattataaatgggtttgaggtatgtaatgatctcatcacccatgtagtgagcttagtacccaataggtagtttttcagctcttgctcccaccttctctcccccacctagtggtccccagtatctattgttgccatctttatgtccat

SEQ ID NO: 437179 - DNA, 464 bp, Homo sapiens
ctatattttctgttttgagcttgttgaataaacaatatttagaaaaaatgaagggttactgccacataatgattagcactacagaaaagcttcaccttgagttaaatagttttctgtggctggcctgtccatgatgtgtaacactgaatgtagaagaaaatgcttttggagttacaaataacaattttttggaataaaatgtattgtaagatggggacttctcgttctgttctagtcactctgtccgtttggcaatcacttgctcttttgggccattgtaagtctctgaayaaacaagagacaaactgtgttcatattttgagtggcaagtttaatttagacaatctgcaaatttgagaaaaagattctatcaattccctctgagcttttttcaccctttcaaattggccaaagctgtgccagtctttccacagccgcgactgggctcaaaagtgtgtacatag

SEQ ID NO: 437180 - DNA, 629 bp, Homo sapiens
acattatctcttcttctatttcctaatgatgttattgaggtaagctacattgttcagtcatatgatgagggaagagaggaaaggatggggctcaagatgagtaaggatggatatgagttaaactctgtgctttgtaagctttcctccatgagacatttgatgttactttatgtgggaaatgtggcaagagggtttgccttagagtgggcatgtctgaggcaaaatataaaacaaaacaaaataaaacagatcatttgaataggaaaccagaaagctgaattgagtccatttctcaaagacgacattcctgcctatcactggtaatgtgcacgttcttaagtaactcacatgtttctccctcagtccttccgtataatttctaccatatctacttccagagcctctgtattttaaccttcctttcagaaaatcactggtaaccagaagccagccactctggctataattaaatatccaaactgattgtatttgaactgtctcatttgggrccatgtttaggaaattatcataaagttggtctattctcttaaaccatcaacttctcagaagctaagtcatcatttttctctagtatatatgtaagctctgtttccatggtggtgggtggg

SEQ ID NO: 437181 - DNA, 620 bp, Homo sapiens
ttggtacacaaatagggttttatttacattctcttgtttaaatgttgtctacttcacatatctcttggatatatttcttgctaaaatatacatccataacattattcataatggatataggtatcatggatataaagcatatggcccagctaataaatcttaaacatacatattatacctgactcagcaattctgctaktagggttgctatgctcttttatggctatataataatttatgtcactagtatcctattaatggatatttaggttaaaatgttttgctcttatgatcaatattgcacttagtgttgttgaacctgtatgtttccatatatcaggagcctactataaaataaattcctactagtaaaactgctgaaccagaggatatatgtattttttaaatatgctagttagaccgtgtgcattatgtccatgaatatgaatgattaatttctagatgaaattcatagcaaaacataaattcaattctatttgaaatgggacagatgttataattaatgattggcttctaaaatctgagggatctcaaaataaattctttattttactctaaaacaaaagagtttacagttccttgtttgaacattgcacaga

SEQ ID NO: 437182 - DNA, 620 bp, Homo sapiens
ttggtacacaaatagggttttatttacattctcttgtttaaatgttgtctacttcacatatctcttggatatatttcttgctaaaatatacatccataacattattcataatggatataggtatcatggatataaagcatatggcccagctaataaatcttaaacatacatattatacctgactcagcaattctgctagtagggttgctatgctcttttatggctatataataatttatgtcactagtatcctattaatggatatttaggttaaaatgttttgctcttatgatcaatattgcacttagtgttgttgaacctgtatgtttccatatatcaggagcctactataaaataaattcctactagtaaaactgctgaaccagaggatatatgtattttttaaatatgctagttagaccrtgtgcattatgtccatgaatatgaatgattaatttctagatgaaattcatagcaaaacataaattcaattctatttgaaatgggacagatgttataattaatgattggcttctaaaatctgagggatctcaaaataaattctttattttactctaaaacaaaagagtttacagttccttgtttgaacattgcacaga

SEQ ID NO: 437183 - DNA, 631 bp, Homo sapiens
acaacacatgattggctgtgaaacagtgtacagaaacatgtagctccacctgttcagatattcaaaagtcatttcatggttattataagataaatttatttggacatgcctagtcatgcatgcattagacatgtgtctcagccaaaataaattgcatttcattataaaatggaaaaccaaagctcacaataggtccatttttcttattttgttctttttcaaatcaattattttacttcctccattctctgttttatttatttgtctttgtctttctctatctctgtctcttttaatgtaagaatatctttaagaaaagtttctaactatacgtttctaattatacatttaaagacagcatgtatgtgcatacattcgcacacacattttatatatatayacacacacacacacacatgctctttaaatgttaataattaatcacataaccctccttttggtggctttggtctcactgtcagaattgctaagtaggaaggtacaggcagccagtgatggctcccttgtcaatctcagtgagcctgagcagtcgctggagcttgcagtatcagttgctaggcaacctgttcatctgctgtgcctgatatttcaattcggcagcagtaaaggt

SEQ ID NO: 437184 - DNA, 630 bp, Homo sapiens
tattaatgttctggatataataaatgaggctagcgtgtctagccaagtatttgtttaaagggcacttcttgagaacaaacttttttaagtctgaaaagcagcagctatgtaagtattccaggttgccaatcttgctaaatcattttcctaaataaaatgtctgggattctatgacattcattggaaatgatttcaaatagtctactctttaccctgagtttatttagaagaagcaaataatcgttgtaacaagatggcttgaatcacaggtttgctaatttatccactcttgtccaagttttctgtatttataaaaatagaacttgtctttgtattcgggctacaataacaaaaatattatgaactgagtggcttataaagaacagaaatttattcattacagttctagaatctggaaagtccaagatcaagataccagcagatttgatgtctggggagggccaatctgtttcatacatggtgccttctatgcatcstcatttggtggaaggggtgaaccaacgacctcaggtctcttttacaagaacacttatccaattcatgagggctctgctctcatgacttaatcaactcccaaagcctccaccttcaaataccaccacctttgag

SEQ ID NO: 437185 - DNA, 565 bp, Homo sapiens
aactccagtgcagcatggatactgcgatttataatttttcttaaaatgataatgattatcttaatttgtaataagagctaaatcctccctctccccttgatctgtggtcrttatcccaaaacacagctgtggatttataaaagaaaaaatgatgcctacggttactattttgcaagttctatattcttgaatgtgtgtaaaacacatgtgaagtctttctccacaaagctgcaggttttcaagtgttttagaacctatattaaaatgttactgtggaacagaccagaggcaaacattgagggtggatatctttgcatctcaatccaggctttcttgggaactaatttcagctatggtgattattaacagtcaaagttttatttgcattttaataggagattcttgaagaaaatccttcgattcaaaagaatgaaactaaaatgatagattaggattgatgttttagggacatttactagatatacctcaattaaatcacagagatgcttgtttaatctctaacgcgtggaagaaaatgtgttaactgaaattgtatatgcctata

SEQ ID NO: 437186 - DNA, 544 bp, Homo sapiens
ttgtaaaacagttttaacttttgaataatgaaaatcttactcagaaatgactggtacatttttaatgtacccacaacaaaaccttttttttgtagtcttgtaagtgaaagaaaaagccaattcttaatgtgtaagaagtgctgaatatgagacaatgatttgctgcaacttatttgcatttgtgcatcttataggacctcctggttcctgccaaacttgattacccttattattaaagcaaaaatattaaatctctcttgtttgaaaaacatacatcaagttggggatgaragctatcttgttcttttttgcagaaggtcatgcatacaaggaagaggcatatggaactatttcaagaactaaatcagaaatttcaaactttggacagatttcgggatataccaaatacaagcagtatggtaagtatgctttgcttcaatgcctgagtagaagatgcatcatgtcagatattattcctgccttccaggacctcctaatggtgggaacataagatgagtctacatagaaaaaaaaagtataagcc

SEQ ID NO: 437187 - DNA, 526 bp, Homo sapiens
atagtgtgaaatattgcaagtattaacaaaatgtgacacagagatataaagtgaacacatgctgttggaaaaatgacaccaatatatttkctcaatgccaggttgccccaaaccttcaatttgtaaaaaatgcaatatctgcaaagtgctgattggtccattttgcaaagtgcaaaatgttaagtgcagtgaagcaatgtatacctgtatttgagtcttgttgtttaatctattcagctacttaacgctttttcattgaagaatttaatctatttacatttaaggtaattatcgatacgtaacgacctatcactgccatttttttaactgttttccagttgttttctagatccttttttcccccctcccttactattttcttttgtggttaagtcatttactctagtagtatgttttgattccttgctttttatttccagtgtatctattataggtttttgctttgcggttactgttatgtttaccaaaaacataacaggttgttttaaactggtaacaacttaac

SEQ ID NO: 437188 - DNA, 560 bp, Homo sapiens
gcaacatgacaaaatcttatctctacaaaaaatgcaaaacttaaccaggtgttgtggcacatgtctatagccccagctactatgagggctgaggtggaaggatcacttgagccctgaatgttgaggctgcagtgagctgtgatcatgccactkaaccccggcctgggtgacagagcaagaccatttcaaaaaaaaaaaaaaaaaaagagagagcgagtcatgtctggaggtggagaagtctcctactgtttgttattgtatcattgcttataaatgattgcacattagaatgatttctaagttattttactcaacacagatattttctcaaatatgtaaatatcaaattgctaggttttttttctccttcaaaatgcaattgacaagtaaaagttaacctgcttgaccttgctttatgcttagaaagtcagacttggactgactggctcatctattgttatttttgctgagtctggtaacaattagcaaaacatcacaggcatttttactgtaacatatcactcctgtattactgagaagacagcaagagatagtaaatg

SEQ ID NO: 437189 - DNA, 388 bp, Homo sapiens
aatggccagcttaaatattttgccactgacagactgcttcttggacttcttaaaacatctttgcttcaggctttaaggctaacacactccccagagtccacacactatgataatattctgccaactcatatatccctaaaactcttgtggctagttaatgtcataccaggggaatagccctttcatgtagccagtctccagaacagcattgcatttctggattcttgctttctggaaastatacagaaaatactgtagtgatattcttgtgttctgtaaccaaatgccttattgaaattgtatgcccacctccagagatcctagtacctagtaagcattcagtaatttttttaaaagaatggtgaaaaattgaattatttttccatcc

SEQ ID NO: 437190 - DNA, 638 bp, Homo sapiens
ggggtgtggttcccaggccaatggagttatgctatgttcccagggggattatgactgcctctgctgagtcatatgggtcgccagggaagtggaggaaagctggcagtcacaggcctcaccctgctctcacatagcccgtagtcctaaacactgatttcactcccattttgttcccccaacagcaccaagtctatttgcaggcaactggygaccaggattgagaacttgccccagaccacaagcccccccactgagaaatcaagcagactcacagtttcgtggcatctcagggagcctacagcattgatccagtttcttcaaaggttctgtggattctcttggctttcctgatatgttcatgcagtagttcttggagcaaaagttcacaatgtgagtctccacttgctgctctgtccatccgagtgagagctgcaagctagtcctgcctcgtctctgccatcttaattgataatcctgaatctattttatttaatgttctattataacattattctttaaagctgctgttctccattacccctcctcactcttaaagtctcaactggattttacctctgttgtaatttcttccatggtcacaaccttaagttgttcaggactaggtttagtttcatata

SEQ ID NO: 437191 - DNA, 638 bp, Homo sapiens
ggggtgtggttcccaggccaatggagttatgctatgttcccagggggattatgactgcctctgctgagtcatatgggtcgccagggaagtggaggaaagctggcagtcacaggcctcaccctgctctcacatagcccgtagtcctaaacactgatttcactcccattttgttcccccaacagcaccaagtctatttgcaggcaactggcgaccaggattgagaacttgccccagaccacaagcccccccactgagaaatcaagcagactcacagtttcgtggcatctcagggagcctacagcattgatccagtttcttcaaaggktctgtggattctcttggctttcctgatatgttcatgcagtagttcttggagcaaaagttcacaatgtgagtctccacttgctgctctgtccatccgagtgagagctgcaagctagtcctgcctcgtctctgccatcttaattgataatcctgaatctattttatttaatgttctattataacattattctttaaagctgctgttctccattacccctcctcactcttaaagtctcaactggattttacctctgttgtaatttcttccatggtcacaaccttaagttgttcaggactaggtttagtttcatata

SEQ ID NO: 437192 - DNA, 605 bp, Homo sapiens
agctgctgtgaatggttgatgtagggttttccttgcacaataacacttggccaagtgcgggggaggcacaaaaaaaatttggagtggatgtatcatgtattgcctttattgtggtgatggtttcacaggtgtatccatatgtctagactcatcaaattatgcacatcatatatgtgtagttttttatatattgatyatatcttaataagccccttaaaaaagaagcgattataagagccagtggcagtgctgtagactgtgttctgttctcctgtgggactttcaataaggctttttccaaccacgacatttcagcaagccttgtcttgttctccctaccttcctcaaactcctcttggttcttcttctcagctcccatcctgtcctcctttctctcacaactcctaaatttacattttacagtctctactaattctgacaggatactgttatatatttatttccataaatttgtctgttatttttattgaagttatacttgcacacattgaaaagtcaaatggttctataaggtttcctatgagaaatagcagactcttacctgttttacctcaccattttctgctcctcattcaaacatatgt

SEQ ID NO: 437193 - DNA, 543 bp, Homo sapiens
ggtctgtgcttgggttcctgagaaatctgtatacttggtgaacaatttcttggctactccacaataatagcagcacacttcatggaattaccttttaaaaaatttatatatagatagatatataacaacctctaggaactgatgcttttgataccctcataaaaatatawaaaaaaaaagaccacactgtacttataattcaagcattctgaaaatcctaataaaatttttgtcatcagataaatgatctgctgctcaattaaaataaactgtgctgattatgaatgcctggtccctgttcaggaggccacagaatggatttctatgaagtactctctgattcactgctgaacttggcagggatagaggtttgtcttggccttctcctccatgccttttctctgcggcaagagaatagcgctgggctcatactgaggctggtgctccatcatgagcaccacaccatctgagttaaccagccccagtacagcttcatatgcaccctcatgtttttctcttcaagggagcttagcaaacaggctt

SEQ ID NO: 437194 - DNA, 543 bp, Homo sapiens
ggtctgtgcttgggttcctgagaaatctgtatacttggtgaacaatttcttggctactccacaataatagcagcacacttcatggaattaccttttaaaaaatttatatatagatagatatataacaacctctaggaactgatgcttttgataccctcataaaaatataaaaaaaaaaagaccacactgtacttataattcaagcattctgaaaatcctaataaaatttttgtcatcagataaatgatctgctgctcaattaaaataaactgtgctgattatgaatgcctggtccctgttcaggaggccacagaatggatttctatgaagtactctctgattcactgctgaacttggcagrgatagaggtttgtcttggccttctcctccatgccttttctctgcggcaagagaatagcgctgggctcatactgaggctggtgctccatcatgagcaccacaccatctgagttaaccagccccagtacagcttcatatgcaccctcatgtttttctcttcaagggagcttagcaaacaggctt

SEQ ID NO: 437195 - DNA, 643 bp, Homo sapiens
ctggtgctccatcatgagcaccacaccatctgagttaaccagccccagtacagcttcatatgcaccctcatgtttttctcttcaagggagcttagcaaacaggcttcctgccaaatgagtacatgggttagtaaaattgggagacatgatcataattggagagcctcagttcaaagcataattagtgtcatgttttatacttgcatctctccatgaagaaaagtgggtcmagttctcacctgtctgaggaatgaccaagagtgagattgtgcaaataaactgctttatccaaagtctccaattggatgggtcatctgatatgatttatctgcgtagaggatggatataaagaactccggaagtgaaaaggaaatggataattgcctaaaagctggtcatgctccaagattctgaaacaaaagggaagaaaagtttccagcagaactgccttgttgtggaggctgtttgctgaaagtgacttgtgggagtatccctctttttaggaaagggtggcagccgaatctgtccatggaggtcatgaggtggttgaagaccctaagagaggaggaggccctgtcatgaatttgctccattctttattcagctttcctgatacttgagtcactaggaaggctggacagca

SEQ ID NO: 437196 - DNA, 643 bp, Homo sapiens
ctggtgctccatcatgagcaccacaccatctgagttaaccagccccagtacagcttcatatgcaccctcatgtttttctcttcaagggagcttagcaaacaggcttcctgccaaatgagtacatgggttagtaaaattgggagacatgatcataattggagagcctcagttcaaagcataattagtgtcatgttttatacttgcatctctccatgaagaaaagtgggtcaagttctcacctgtctgaggaatgaccaagagtgagattgtgcaaataaactgctttatccaaagtctccaattggatgggtcatctgatatgatttatctgcgtagaggatggatataaagaactcyggaagtgaaaaggaaatggataattgcctaaaagctggtcatgctccaagattctgaaacaaaagggaagaaaagtttccagcagaactgccttgttgtggaggctgtttgctgaaagtgacttgtgggagtatccctctttttaggaaagggtggcagccgaatctgtccatggaggtcatgaggtggttgaagaccctaagagaggaggaggccctgtcatgaatttgctccattctttattcagctttcctgatacttgagtcactaggaaggctggacagca

SEQ ID NO: 437197 - DNA, 602 bp, Homo sapiens
cattagcctctgtatcaccttgattgtccttcctattattttctagcaacctgtatcaatgcccgttcttggaaataaataagtacgcccttatttattttccacrtaaatccatcaaactcttacagtttgatttgtcagtctgtatgacctcagagaccctaagtcccttaaaaatgggaaccatgtcttgttcaatatcacatcacccacttctaacacagtatttagactgcagctaattctgaatatatatttgttggatgtattaaaaaagtatgtatctttataaaccacctcaagtccactttaggataaagcacaacataattgctacataaaattatattccattctatgtataaaattcattatgaatcttagaagtgaaattctaattttgagagaggggaaacaggataatgctagtttaggaattaatctgaaaaattgatacacacttgtagctggtaaaataaaagaatagaaattgaaaggctaaccttcgactctaattactgagattattctcttttgttgaaaatccctttttaaaggcgagctcgcctttcttcctggaggttagtggatagtgggaaggg

SEQ ID NO: 437198 - DNA, 590 bp, Homo sapiens
cccttatttattttccacataaatccatcaaactcttacagtttgatttgtcagtctgtatgacctcagagaccctaagtcccttaaaaatgggaaccatgtcttgttcaatatcacatcacccacttctaacacagtatttagactgcagctaattctgaatatatatttgttggatgtattaaaaaagtatgtatctttataaaccacctcaagtccactttaggataaagcacaacataattgctacataaaattatattccattctatgtataaaattcattatgaatcttagaagtgmaattctaattttgagagaggggaaacaggataatgctagtttaggaattaatctgaaaaattgatacacacttgtagctggtaaaataaaagaatagaaattgaaaggctaaccttcgactctaattactgagattattctcttttgttgaaaatccctttttaaaggcgagctcgcctttcttcctggaggttagtggatagtgggaagggaggtgtactcagcaacccctcaagaggcttttgagactcatacattggtggttgctaagagagaatcattttcac

SEQ ID NO: 437199 - DNA, 602 bp, Homo sapiens
cattagcctctgtatcaccttgattgtccttcctattattttctagcaacctgtatcaatgcccgttcttggaaataaataagtacgcccttatttattttccacataaatccatcaaactcttacagtttgatttgtcagtctgtatgacctcagagaccctaagtcccttaaaaatgggaaccatgtcttgttcaatatcacatcacccacttctaacacagtatttagactgcagctaattctgaatatatatttgttggatgtattaaaaaagtatgtatctttataaaccacctcaagtccactttaggataaagcacaacataattgctacataaaattatattccattctatgtataaaattcattatgaatcttagaagtgaaattctaattttgagagaggggaaacaggataatgctagtttaggaattaatctgaaaaattgatacacacttgtagctggtaaaataaaagaatagaaattgaaaggctaaccttcgactctaattactgagattattctcttttgttgaaaatccctttttaamggcgagctcgcctttcttcctggaggttagtggatagtgggaaggg

SEQ ID NO: 437200 - DNA, 571 bp, Homo sapiens
ttccaatttcctttttatttttcattatagaatgtcatgtttagtgagaatattatagttgtcgagtgtaagccttccctgctccccaaatctggcgtttaactgattataatcaattaccaagtgaacagaaaataggtacttgaattactatccaaactccactcaatatattaaacatcatctgaaactatggctaaagaaagagaggcaatctgtataaatacttatcatacctaaacyatgtgcagtgatgtgtgcctgtaattctagctacgtgggaggctgaggtaggaggattgcttaagcccaggagtgtgagaccagcctgggcaacataaaaaaacccaaaaccaaaaaccaaaacaacaacaaaaacacttaccataactggaaattaaattaataaaatgtttaatgcattagatgttttcagcactgattaaccttacttctgagaatatatggggaagaaaggttaatagtaaacatttaatgaaaggttaatttttaggatgtgtggagggaattaattaattatgctttagtcaaatattctaaagtctcatga

SEQ ID NO: 437201 - DNA, 399 bp, Homo sapiens
atgtgaccatcctctgcatcagcataaaagtatacactttattctaaattattagcagaaataatgactggtctktaaatcactgcaattcattcaactccaaaaagaaagattcttggaaataaagtataattctcattccaggagggtaagacagtgaatgtacctgaaagaaaccaaagcaatagtagtaatacctaaaaacaaatgactcaatgtgtccttagccttagttaacaatttctcattaggaagaggcagaaaacatggatagctagaaaaacttaagcaattctgtctgacaaaatgagatctgaaaaattctttttcagatattaaaacaattataccagtgtttatttattttcataaataagaagattgaaacccagtattgtg

SEQ ID NO: 437202 - DNA, 637 bp, Homo sapiens
attccctactctcatcagaacagggaagcaattttcttgactttgtctagttctagggtttcacaaaagatttctctaaatactaggagtttgytatttaaaaaatcctaattgttttttcaaatttaccttaggaaggcaaacacactcttagggaaaggtcataggaatttcagagaagattgttcagagtaccaggcccaggcacaagcatttaattgtccacactaatatcttccccaaaaaagaaaatgtagtacctattttttgttgttcaagcatcactggagtgtctaagctgctatgttctctgcctgtaaagaggacatttttttgcaattaatactgataatatttgacaatacaatttattcagctactcaggatagtctcaggatagaggaaggaaaatttgactttctgcacttaaagtagagtaatataagtagaatcaaaagagttcaagtcatctatcctcatatctcaaatcttaaagtcaaaatatttattactattctgctgcatccatcctgtggatagagttaggacgttctatctgcagaattctaggttccttcctatttcttaacctcggtgctctccagaatacaacagctagccccattctagttcccag

SEQ ID NO: 437203 - DNA, 594 bp, Homo sapiens
agggataggaaagttagacaggcaatggaaggcaacaaatacggagtgtgtaatcaagctgattaccacggagggcaactgaagcaaaactttatggggaaactctggtaaatggtgttaaaaacattccttgragttattccagccccaggatgaaaagactggtgtttgtatatcagctcctgtaggccattgcttgagtgctgctgcctggagtgttaatttcttggcacatcaagtctgccctgtatgtaggcagagcaacatttgttggcttctgagaaaacccttaggcaaaaaaagaagcaaatccttactgttagaattttgcatctaaaatccaaaagatatagacaaagaaccaactgtttctgctttgctaaacctccatgccctgatcgtttctattgacactctacattaagatcaccctgtgatattattgccttcttcaaagaactaaccagtcaagttttccttgagaaacagagtataagagagttagaacaagctacattagttgatgttttagttaattcccaaggctgcaagttaatcttctgaaccttgggtttcatgtgcttttcaggctaa

SEQ ID NO: 437204 - DNA, 621 bp, Homo sapiens
atccatggcctgtgatgtcctcctgtgggatgtcagtatatgtgactaataaattgctgtgaactcatctgtccattgttggatgtcatgtttctggccaccttggattattcaagatgtgtatccctcccccaccaggaatgtgaacaacaggcaatcaaaacacagctcatacctggaaagtcagaataataagattttttctttataaaaaacttattaggtaacttttcaactgatcactgttgctaataagtggccaggtaaaagatgtatatgaacattaaagaattatgtacaactatgattgtaaccacagcattttgcaaagacacattaaacagattagaatggttaagtggtatgttaagtgaatgagaggtgaatacagggataaaagggaatttaaaaaacaaacaaaaagggaatcttgggtagaacatatgtaataacatgtcatgaattgaggccaggaaaaacaaascctatttgaaaactccctgcccaatttaaggcagtaatacatgcacatggtgaatgtgtgtgcaatggctgattgttttctacattggaaacctatttatttttatataccaattttgttaccagcaacattattga

SEQ ID NO: 437205 - DNA, 603 bp, Homo sapiens
actacaacattccattgaatgatttggctatataattatttttatctattaatatgtgcttatttcactgcataagatcttctaaatcaagcaattataacttattataacaagccaaacaattcagaagtctaaagttaataatctgcattgagttcacaccttcttacaatattaatccctgagagtaactattattaacratttgatctatatattttcacatctttatgctcttaaaaacatttacagacatttaaaattactttcaagaagaagtaattcaatccttgggtacgaaaccatagaaactgagatgtattttaattaatacactaattatttttattaaataaagttttatttaaaagaaatgtactttttgagtttatttaggtaatatcctagtcaatataaaggacatctaatttgactcatacaagattgtaattatcacaattttacaaagcagagtttgctttaaaatatattaagtaaaaattataataaaaagatttaccacagaatcacatggttttatactactatacaactgatttaggatcaagaaaaatatttaatattgttttgcattaaggcagg

SEQ ID NO: 437206 - DNA, 509 bp, Homo sapiens
ttctatccacaataaacaataacaagcagagaactgtgatctctcaaagtagacaaagcaagaaaccagagacagactataatgaggtggtgacaggcaagctctctcgtcaagaattcaaaatagaaactttaagaaaattcagtgatctctaaaattacacagaaaagcaactcagaaatctatcagagaaatttaacagaggtttaaataaaataatttaaaaatcctggatataagaaatatatttgctatactgaaaaatttcttagaagatctcaaaaagcagactggatcaagcaaasaatcagttaactcaaagacaagctattggaaaatacacagtcagaggaaagaaaagaaaaaagtggaaaggaatgaggaatgcctacaagatatagacaattacctcaaaagagcaaatctaagaattattgttgttcaagtgggattggagtaagagcaaaggggagaaagcttgtttaaagaaataataatagaacactttt

SEQ ID NO: 437207 - DNA, 564 bp, Homo sapiens
tgcagtactatcagaggcattcagggaagcatttcatcacaaaacaacattaatatttctaaataggaatatatgaatatttgcaygaagtggaataaacacagacagtaaatagttttaggtgagttctggtgagtttctgacatcaaatgacttcaggctagcttagtttcaacctctaaattagtgaaaaagagacatttaattttaagtgcttttggggtttcaaaattgaaaataagggactatggacctaaattatttaaaaacctgaaaactaaactaataattatcttaaattgatgattctcccataatagatctactaaggaatcattttaagcagtgatagaattaacgttaaaatataaatgcctaggatatatgataaagtgagaaaaagaacagcaacgttatccatttcttttgtgcaacaaaatttctggtgatatttcctttctgttgagagaaataatgcaagacttaaaggctactgggaggggacatgcagattttatacattgcctggggtccttttttgaaacttgacttcttcctcttctt

SEQ ID NO: 437208 - DNA, 566 bp, Homo sapiens
gactgaaatacaatagttagggacttcaaaaccctactctcactgatggacagataatccagacagaaatctgtaagaaacgtcagggttaaactacatgctagacaacattaggcctgacatttacagagcattttatccaactgtggcagaatacacatttttcttatcatcacatgaacattctttaaaataaaattatttaaagccacaaaacaaatcttgacacttgtttcacacttcaagccttgattactacttttcagaaaagtaaaacttacatcaaatatcttttctgrgcacaatgaaatgaaactagaaatcaataacaagaggaaccttagaaactacacaaacacatagaaattaacatgctcctgaacaatcaatggatcaatgaagatattaagaaggaaatttaaactttgttgaaacaaatgaaagtagaaataaaacataccaaaatctatagggtacagcaaaagtggtactaagagtgaagtttatagcaataaatgcctatctcaaacaagtagaatacttcaaattaacaacctaaaattaca

SEQ ID NO: 437209 - DNA, 564 bp, Homo sapiens
tgcagtactatcagaggcattcagggaagcatttcatcacaaaacaacattaatatttctaaataggaatatatgaatatttgcacgaagtggaataaacacagacagtaaatagttttargtgagttctggtgagtttctgacatcaaatgacttcaggctagcttagtttcaacctctaaattagtgaaaaagagacatttaattttaagtgcttttggggtttcaaaattgaaaataagggactatggacctaaattatttaaaaacctgaaaactaaactaataattatcttaaattgatgattctcccataatagatctactaaggaatcattttaagcagtgatagaattaacgttaaaatataaatgcctaggatatatgataaagtgagaaaaagaacagcaacgttatccatttcttttgtgcaacaaaatttctggtgatatttcctttctgttgagagaaataatgcaagacttaaaggctactgggaggggacatgcagattttatacattgcctggggtccttttttgaaacttgacttcttcctcttctt

SEQ ID NO: 437210 - DNA, 653 bp, Homo sapiens
tatataccttgtaccataggtctatcattctctgtctaagggggaggataatatacgtatggtacaaggatgtcctatgtaagttgactgagccaagtccagcatagataagccaaccccatccaccagagacacatacattaaataaatccttactaatgtatacttttagatttttgaaatccattgttattcagcaatagctaatttattcatctactcttaactctttctttaccatctgrccttaggtgacacacacttcttacctcaattataccacttctgctgaagtattctgaagtaaaaactgattttcctaatgtggatgatgggttgatgggtgcagcaaaccactatagcacatgtatacctatgtaacaaacctgcacgttctgcacatgtaccccagaactcaaagtataataattattttaaaaagccaaaaaaatgattttcctttgggttgtgtactacagggaaagaaggcacatttggagttcttgaagtccaatgtcaattctagataattgaagtttttcaacctcttgcaaaagctcctcttccttcaagtcttattatttgtattgtgtcccttgtcatacacacaatttgctgctgctatgaaaagggccagctcattctctgttact

SEQ ID NO: 437211 - DNA, 653 bp, Homo sapiens
tatataccttgtaccataggtctatcattctctgtctaagggggaggataatatacgtatggtacaaggatgtcctatgtaagttgactgagccaagtccagcatagataagccaaccccatccaccagagacacatacattaaataaatccttactaatgtatacttttagatttttgaaatccattgttattcagcaatagctaatttattcatctactcttaactctttctttaccatctgaccttaggtgacacacacttcttacctcaattataccacttctgctgaagtattctgaagtaaaaactgattttcctaatgtggatgatgggttgatgggtgcagcaaaccactatagcacatgtatacctatgtaacaaacctgcacgttctgcacatgtaccccagaactcaaagtataataattattttaaaaagccaaaaaaatgattttcctttgggttgtgtactacagggaaagaaggcacatttggagttcttgaagtccaatgtcaattctagataattgaagtttttcaaccycttgcaaaagctcctcttccttcaagtcttattatttgtattgtgtcccttgtcatacacacaatttgctgctgctatgaaaagggccagctcattctctgttact

SEQ ID NO: 437212 - DNA, 653 bp, Homo sapiens
tatataccttgtaccataggtctatcattctctgtctaagggggaggataatatacgtatggtacaaggatgtcctatgtaagttgactgagccaagtccagcatagataagccaaccccatccaccagagacacatacattaaataaatccttactaatgtatacttttagatttttgaaatccattgttattcagcaatagctaatttattcatctactcttaactctttctttaccatctgaccttaggtgacacacacttcttacctcaattataccacttctgctgaagtattctgaagtaaaaactgattttcctaatgtggatgatgggttgatgggtgcagcaaaccactatagcacatgtatacctatgtaacaaacctgcacgttctgcacatgtaccccagaactcaaagtataataattattttaaaaagccaaaaaaatgattttcctttgggttgtgtactacagggaaagaaggcacatttggagttcttgaagtccaatgtcaattctagataattgaagtttttcaacctcttgcaaaagctcctcttccttcaagycttattatttgtattgtgtcccttgtcatacacacaatttgctgctgctatgaaaagggccagctcattctctgttact

SEQ ID NO: 437213 - DNA, 610 bp, Homo sapiens
ttaaagcacacacactcactttctccaggagagtgttggcagaaatcacacaggcttaaagattgatgacatttcaagtaaacagtttctaacctcttctgggtttttagacccgtcagtaatcctgttacttgcccctgatccatttctttactccttactgtcaccagaattgctgaatctttctcacattctcaagtctcttttccaatcccagttgccctcactttcaagggagacgactttactgcccactttatagaaaatatatcacatccatcaggagcatccccattgtccttcccataccccaatcaccaacmtctccactggactataagcttcttaggggcataaatggggattaataatctttgtgtgggtgaaattcaatgcagctgaaaacggtggcctcacacttagcctcttaatacatatttgctcaattgctctgaactcaaaaaatgattcatctttctttatatgttttattctatccaagcatagttgttctatctattctttgaatcccattctcttacatctcttccaaatttgcttcatctcctgtaattgcaaagagccactcatgcttagtctcccccttccc

SEQ ID NO: 437214 - DNA, 640 bp, Homo sapiens
gcagctcagtgcaagcctgaaggtgccccttggcaccaacagcctgggtgccatgaatggcatgttgacggcaggaggccaacagtttcctctgtggaaagggacaggtcctgcccatcttcaagtcagagacagcctgaagcatggggtcgggctgccagctccaggtggagtccgtggccccaagtgagaacttatggtgcttttttcaggcccacctatggccacccatggatcagtcagcatgtacttccttttgagtccataaaaaccccagactcagccagactcagctagacatagggatgacctgcctgcagataggagctacccactctgggtctcctctcctctgagggctgcaggctcaaccaggatgacctgcctgcagataggtgctacctgctaagggtyccctctctgctgagagctacacactcattgggatgacctgcatgtggaaaggagctacccacttcaggtctcctgagaactgtactgttgctcaataaagcttctcttccccttgctcagcctccagttgtccatatgcctcattcttcctggacacaggaaaagaactcaggacccaccaaatgccaggacagaaaaaagctttaacacaaacagggctgaaaca

SEQ ID NO: 437215 - DNA, 596 bp, Homo sapiens
aggtgctacctgctaagggtcccctctctgctgagagctacacactcattgggatgacctgcatgtggaaaggagctacccacttcaggtctcctgagaactgtactgttgctcaataaagcttctcttccccttgctcagcctccagttgtccatatgcctcattcttcctggacacaggaaaagaactcaggacccaccaaatgccaggacagaaaaaagctttaacacaaacagggctgaaacatgcactccacccctctgctcaccacactgtgggcaatgggaaggagagaagagctgtgacccttctaggatcccaaacctaggggctcccttagccagggctgtgacaccttcttgggggctctgcagtttctggcatctctaagcttccagatgccaccacgttcccctcatccaaccacaggctgcatgaygctggtgcttgtgccagtgcctggagctgcccaccccactgcagcagccagcgtgcctggctgtgtgcagtggccagacctgccacttgttcgctcacacaccctttgctcctttgtgcctggctcacttttggcaggcatgggatcccggctggt

SEQ ID NO: 437216 - DNA, 448 bp, Homo sapiens
cacacaaaaccatcttgtctaccaaactaattctgcaaattgtcttttctgggatctgtaaactcttggtccctttgatactttctctctcttcactttcactcagggatgcccaacctaaaaatggcagaaagtatgggacagctcagagcatgtgccatcatgagatgcttaactacttaggaaaaaccattgtgatattatttttttctgtcaaattagcaaatattttaaagccagcattcgatattaatgtaggtttagcaaagtgggcatctaatgtactataagtggaatgtaaactggtatgacattcctggaaagaaatttgtaatgtgaatcaagagatttttttaaatacacatactctttcacctagtaacttgccttctgtggaatagtcaaatatacgaatgaagatttaakgctcctctctataagacagtat

SEQ ID NO: 437217 - DNA, 642 bp, Homo sapiens
agctccctgatttcccaaggcttacactctaagaaggaaaggcctgcaaggctaattgtaatccgtttacaacaattatgggaaagaatgacacaacataatttggaatctttgaaccatgttgcttgtgcttcactgttgcttttcagtgctgttgggagtgatttcatttgcctgagccattctgtctgccgtttctttgaaactagcccttgtactcattctattccttttatacttttttttttattactgtgagagaatagtaataggttttatataaaggctgatgggtctacttaattgctgattgtactattccccttatttcacatctacagagcttggcaagcaaacagatgccattatcagagctatttctttgttattcaaggtctattgttgccatcattctaaaagtaatattcaagagcagagccttgggttcttctaattactgaagtcaacacagttttcaactttttcaaattacttttggactcattcttcctattactttctctcttttccttccttcttctatcccttttaccacctctcactctcacacaygcttattaagccctgggcagcatgccaaatgctggagaaacagagataagaaagctttgttatggccag

SEQ ID NO: 437218 - DNA, 585 bp, Homo sapiens
tggtatctccactgagaagccttttaaaaagtagatagatgttttgtcagttttatgtcctaggaatgtctttctgaaatacctgggagctatccctttgaaatgtcagcaacaagagagagagaacaaccctatttcccagtttctgtgggagggtrgaagtctaacttcagtaggcaccttattcaaagttgcaaaaatacctcctgtcataaagacatgagaagtttgtttttttcctctggatgaagccaattaactaacatagattgttgttccaattgccatgataaagttatgatgaacaatgtgtgacaaaaggtgctgtccagtcctcttacttgaggattattgtttatcttgaaaataggtatgcaatgagttgtatctgcttggtcgtttaaaagggagagattcctttctatttttgcaatcttttagcacattgcctgtgatggacatcacattggtttaatgcctattcagtaataaatatgttttttctctactaccttggtgggaggaatattgggtggaaagaatgttttgtttttaattgtatttccccaacactctatacacaca

SEQ ID NO: 437219 - DNA, 581 bp, Homo sapiens
aaagttatgatgaacaatgtgtgacaaaaggtgctgyccagtcctcttacttgaggattattgtttatcttgaaaataggtatgcaatgagttgtatctgcttggtcgtttaaaagggagagattcctttctatttttgcaatcttttagcacattgcctgtgatggacatcacattggtttaatgcctattcagtaataaatatgttttttctctactaccttggtgggaggaatattgggtggaaagaatgttttgtttttaattgtatttccccaacactctatacacacaatcaggccattatactgagctcttcatttccagtctatttcccaaacccaattcatcctccacactgcagccagagtgagctttctataagatggctttagcaatggcattccctcctaaaactctttactgacttatcaccagctctgagaaaacagctatatttaatgagtttttctgtgtctcaggtactacaataaaggcctacatgtattagctcacttaattctcacagcaatcctgggaagtaagtactatttttacacacaagtggatataaaaacggc

SEQ ID NO: 437220 - DNA, 581 bp, Homo sapiens
aaagttatgatgaacaatgtgtgacaaaaggtgctgtccagtcctcttacttgaggattattgtttatcttgaaaataggtatgcaatgagttgtatctgcttggtcgtttaaaagggagagattcctttctatttttgcaatcttttagcacattgcctgtgatggacatcacattggtttaatgcctattcagtaataaatatgttttttctctactaccttggtgggaggaatattgggtggaaagaatgttttgtttttaattgtatttccccaacactctatacacacaatcaggccattatactgagctcttcatttccagtctatttcccaaacccaattcatcctccacactgcagccagagtgagctttctataagatggctttagcaatggcattccctcctaaaactctttactgacttatcaccagctctgagaaaacagctatatttaatgagyttttctgtgtctcaggtactacaataaaggcctacatgtattagctcacttaattctcacagcaatcctgggaagtaagtactatttttacacacaagtggatataaaaacggc

SEQ ID NO: 437221 - DNA, 574 bp, Homo sapiens
acttacccaatagatagtataataaaatgtgtgttaagttgcagtgattaaaacactgtgatatagtgaatgaaaagaaggatttataaaatcacatagagcctgaaattaccttacatatatttgagattaggatatagatagttttaactaaaaagctttctgcatagtaaaataaataattaactgaatgaacagaaactgaatgaacagaaattctcctatagaacgggagaaaatatttgcaaactatgcatgtgacagggaattaatatccaaaatttgtaagraactaaacaacaacaaaaaagacaaataatcccattaaaaagtgggcaaggaacatgaatagacatttttcaaaagaagacatgaaaatggttagcagaaatatgaaaaaatgctcaacatcactattcatcagagaactgcaaattaaaaccacaatgagacatcatcttacacaaatcagagtgtctattattaaaaggaaaaaatttaacagatattgtcaaagatgtggagaaaagggaactcttatacactgttggtgggaatataaattagtacaacc

SEQ ID NO: 437222 - DNA, 574 bp, Homo sapiens
acttacccaatagatagtataataaaatgtgtgttaagttgcagtgattaaaacactgtgatatagtgaatgaaaagaaggatttataaaatcacatagagcctgaaattaccttacatatatttgagattaggatatagatagttttaactaaaaagctttctgcatagtaaaataaataattaactgaatgaacagaaactgaatgaacagaaattctcctatagaacgggagaaaatatttgcaaactatgcatgtgacagggaattaatatccaaaatttgtaaggaactaaacaacaacaaaaaagacaaataatcccattaaaaagtgggcaaggaacatgaatagacatttttcaaaagaagacatgaaaatggttagcagaaatatgaaaaaatgctcaacatcactattcatcagagaactgcaaattaaaaccacaatgagacatcatcttacacaartcagagtgtctattattaaaaggaaaaaatttaacagatattgtcaaagatgtggagaaaagggaactcttatacactgttggtgggaatataaattagtacaacc

SEQ ID NO: 437223 - DNA, 500 bp, Homo sapiens
agcatttttataagggttttyataatgaaaaactggtgaaagattagtaatagcaaatggaagaggcattgttttattaagaaaatcctgtctctctgtatctctttgctttcagaaatgtttttaaatcagagcacagagcacatacatctaaggggattgagatattctttgaggaaagaagaaaccttaaaatttagaataatcaactaaattttaagattacatcattaaatttaaagttgaaatttactgcacttctatctcacagtccagaggttcccaaactttctcagttcataacattcttagtatctcagtatttcttttcatgacattctcggttttttattaaataattagtttccaactacttaataaatatctatatcttaacaaatttgtaactatttgaaaagctaatacacatatattttaaaaatgttttatttcatccttaataatcataacaacatactgatggaaggtgtgtacctgct

SEQ ID NO: 437224 - DNA, 618 bp, Homo sapiens
agggttttcataatgaaaaactggtgaaagattagtaatagcaaatggaagaggcattgttttattaagaaaatcctgtctctctgtatctctttgctttcagaaatgtttttaaatcaragcacagagcacatacatctaaggggattgagatattctttgaggaaagaagaaaccttaaaatttagaataatcaactaaattttaagattacatcattaaatttaaagttgaaatttactgcacttctatctcacagtccagaggttcccaaactttctcagttcataacattcttagtatctcagtatttcttttcatgacattctcggttttttattaaataattagtttccaactacttaataaatatctatatcttaacaaatttgtaactatttgaaaagctaatacacatatattttaaaaatgttttatttcatccttaataatcataacaacatactgatggaaggtgtgtacctgctagtcactgtaaatttttcaaattggattccatcacacccttcctcatttcctcttccatgttagtttctgtatgatacttgctttttcctccctatgcacctaaaacactacctgacataaagaaaatgc

SEQ ID NO: 437225 - DNA, 552 bp, Homo sapiens
tttttcaaattggattccatcacacccttcctcatttcctcttccatgttagtttctgtatgatacttgctttttcctccctatgcacctaaaacactacctgacataaagaaaatgcccaacaaatggatcaacagaagcattggaggtggagagagctgrgtttcccccctggcttcactataaaccaactaaataactttggacttagcttctgtgagtctcagcttttattttgtttaaacagagatggtaaaagtgaatgactatctggattattttaatgatttaatgagcaactaaaatgctcagcacagtgtctgacatgttttactgcttttaagtgatactttttaatactatcactaccactccagagttttgctttcacagttattaagttttctagaaagcagattttaaaatctgacaaccataaatacctatcgtcaaaataccaaaaggaaatagaggattataattatatttaagggattcctcaaagttctgttgcagataagaattcagaggggttatagaaatagcacagaa

SEQ ID NO: 437226 - DNA, 570 bp, Homo sapiens
actttggacttagcttctgtgagtctcagcttttattttgtttaaacagagatggtaaaagtgaatgactatctggattattttaatgatttaatgagcaactaaaatgctcagcacagtgtctgacatgttttactgcttttaagtgatactttttaatactatcactaccactccagagttttgctttcacagttattaagttttctagaaagcagattttaaaatctgacaaccataaatacctatcgtcaaaataccaaaaggaaatagaggattataattatatttaagggattcctcaaagttctgttrcagataagaattcagaggggttatagaaatagcacagaaaatttggctcaaatcatacttttgcttctcatcagctttgctgctacttagaattgcgaaccctcagcttctctttctgttaagtagaagaaaataatactgctcagagcaatgatattaagaaaactggaataaatattctcctttatctccatgaggagaagaggctgcgaattcctgcctggtaaaattttgggtcccaaggctggcaattga

SEQ ID NO: 437227 - DNA, 545 bp, Homo sapiens
gctggcaattgagtggtctctcaacaccatactttatagtgtgtggataaaattgcttaagttagtatccaaaggtgtttcctatttagtcttgacatacactatctaaaacttggctacattgttaatcagagtttggtctggaaaattaaaaccattctaagtattttacccagaaaagttttgaataccaagtgtcagaggctcacaaagcaattggaagagctgttggatgttgaagagtaaaagtcaggacagcctctgctagctttcagttagctgaaagcacaggaattgcagggaaccaccactgctgaatcatgtgtggacatccccaaactattgtcaagaccacrcgattgctgctttctagagcccatgtgcctgctgaccactgctggggaaataattgcttcttctctccaaccttctaaacatcatgtgagaacctctcattgattcctacataaaccagaaatctgctagcaaggaagcataggaaaagtagtttccaggcttctagcctctgaaatatgagagagaat

SEQ ID NO: 437228 - DNA, 388 bp, Homo sapiens
ccaaacctcaacttcagaaattcctggcaaactatgtattagctagtacmtgataaaatgaaacctccatccttgttaattccttacgtgcagagctgttcatattaaataatgtctcttttgtttttactcatgctttgtttttacttatacttacgcatttctgaacaaacgatagcaaagcaaaaaaaacaaaaacaaaaaaaaaacctttattcagttcatcctaatcccaataatcaaaacattacagacaaatggacacgtaggccaaagtttcacttggaaagcctaaccacaattaacacgttaatatgaatgctactctgtgacagtggcagtgaccccttgcaggatacctttctgcatttctgcccctactgccctg

SEQ ID NO: 437229 - DNA, 533 bp, Homo sapiens
gggttattattcattattaattataataatttattaaatgtctattgtaagttctggaaaagggtaaagcttgactctacattccatgaatgttaacctacagtatggyttatcatacctacagaatgggatctcaccatttagacatgaggatatcaggaaaaactgcttttaaatcttgtgatgttgcttaacactggtcctcactgttagtggtagtacttaatatctgtagtgggcctcataattatcacctttttttgaatttgaatttttgtaatatgcttcccccaaaaaataggatagaatcataatacaacttgcctaacagtgtaccacatatctaaaatcagtttttaaaaatgattactattttttgtagataaattttttatcttggcctgagaatagttttcctcctattttagtcacatagtcaaactaccgtataataagatttttctcatgtattcaagatctacagattaacaaaactcatctctcctttaacaaaaaaatgaagctttacagaa

SEQ ID NO: 437230 - DNA, 473 bp, Homo sapiens
ggacatttctgaacttcatcctatctacctcttcacctgacagttatttttatcctttataataaaccagtggacctaagtaaatggcttcctgagttctgtgagccattctaacaaattgcaaaacctgaggaggaagccatggggacccccaatttatagccagtcaattagaagtaaaaatttgcatctgaagtgaggttgtgagattgagctcttaaacctrtggagtctgacattaaacctgagcagttagtcagtttaaattgaattgtaggataccaagtcagtgtcatagaattggagaagtggattttgaaaagagaattggaaaagatatgacacattttgtgttaggaggaaaaaaccctctcaatccatgttcagaaatctctagctatagctacattatagcagcaactaaaagtgacaccaacaaacttgatatatatgacagctctctggattatctc

SEQ ID NO: 437231 - DNA, 653 bp, Homo sapiens
attaattgctgctcccactgataaaaaattaattgactgttatcaatttttgagccaccatgttacagaggctggattacacatcgctcaggataaaattcaacagaccactcctgttcaatatttaggaatggtagtcaataaagaatgtattcaacctcaaaagtttcagattaggaaagattccttgaaaattttaaatgatttccaaagacttttgggtaacattaattatttaagacctactttaggcattccaacatatgtgctatctaacttgttttccgtgctatgtggagtttccaatctctgctgtcccaggactttgacccctgaggcttcactggaactggagtcagtacagggaagaatccaaactgcccagttgtctagggtacagcggtctcagcctttcagcttctggttttcacttmattacactcccctactgggctaatagttcaatgtgatgatttagtggagtggtgttttcttccttattctgtgtcaaaaactttgtctgtttatctggatcgaatagccaccctaattggacaagctcaatgtagaatacttaaaatttctggatttgatcccaatttaattgtggttcctttaagtcagctcgaagttcaagctgctttcaacattcc

SEQ ID NO: 437232 - DNA, 653 bp, Homo sapiens
attaattgctgctcccactgataaaaaattaattgactgttatcaatttttgagccaccatgttacagaggctggattacacatcgctcaggataaaattcaacagaccactcctgttcaatatttaggaatggtagtcaataaagaatgtattcaacctcaaaagtttcagattaggaaagattccttgaaaattttaaatgatttccaaagacttttgggtaacattaattatttaagacctactttaggcattccaacatatgtgctatctaacttgttttccgtgctatgtggagtttccaatctctgctgtcccaggactttgacccctgaggcttcactggaactggagtcagtacagggaagaatccaaactgcccagttgtctagggtacagcggtctcagcctttcagcttctggttttcacttcattacactcccctactgggctaatagttcaatgtgatgatttagtggagtggtgttttcttccttattctgtgtcaaaaactttgtctgtttatctggaycgaatagccaccctaattggacaagctcaatgtagaatacttaaaatttctggatttgatcccaatttaattgtggttcctttaagtcagctcgaagttcaagctgctttcaacattcc

SEQ ID NO: 437233 - DNA, 596 bp, Homo sapiens
aaactaacaaatgaattctagacttaaatttggcacttaaccagtttgacctagttgacacctacagaacattacatccatcaatacacattcttctcacctgtacatggaacatactccaaggttaaccacatgctcagccataaagtaagtctcaagaaattmaaaaaaaaatcaaaattataccaaccatagtctcagaccacagtagattaaaatagaaactgatactaggaagatcaccaaaacctgcacaattacatggaaactaaacaacttgctcctgaatgattttgaggtaaacaatgaaattaagacagacataaaaaaatgttaaaaaaaaactttgaaataaacaaaaaccttttggatgcagataaagcagtgttaagagaagtttagagcactaaatgcctacctcataaagttaaaaatatctcaaattaacaatctaatatcccacacctaggagaactagaaaactgagaacaaattaaccccaaaactagcaggaaaaaaaaagaaataactaaagtcaacaaaatttacatgtgaaaaaccatactgagaatcaagaaaatcctaaagttggttat

SEQ ID NO: 437234 - DNA, 496 bp, Homo sapiens
tcctcattgccctagcacatagtcttcatgagggctccactcaygctgcaaacttctgcctggacatccaggcattttcatacatcctctgaaatctaggcagaggttttcaaacttcaattcttgacttctgtgcacctataggcacaacaccatgtaaaagccaccaaagcttgttgcttgcaccctctgaatctatggtctgagctatatgttggccccttttagccatggctgggatgcagggcaccaagtcctaaaactgcacaaagcagcaaggccctgggcccaggcatgaaaccatttttttcctcctagacctccggaactatgatggaaggggctgctgtgaagatctctgtcatgccttggagacattttccccattgtcttgacaattaacatttggctcctcattacttatgcaaatttctgcagcaggcttgaattcctcctcagaaaatgggttttcctattctatcacatcatcaggctg

SEQ ID NO: 437235 - DNA, 598 bp, Homo sapiens
tctatatcccaaacctcagcattatgcaatatattcagtaacaaamctgcacatgtacctcctgcatctaaaataaaagttgaaatttaaaaaataatagcaaataaaaaaccacatgttctcacttatatgtgggagctaaacaatggatacacatggacatacagagaggaaaaatagacactgaagactccaaaaggtgggagggtggaaggtggctgaaagatgaaatattacctatcgagtacaatgtatactatttagatgagtacactaaaagcccagacttcactgctatgtaatatacccatgtaacacaactgcatttgtgtcccctaaatctatcaaaataaatgaacaaataaatacatatatcataaaaaagaatggcaatgaagacataatatttccaatatgcaaggactgatatatattacttctcatatactcttctaggaagccattgaagatgtgtttctaataaaaatggagatgtttaaaaaaatctgcaaagtttctatctattcctctccgactgattatcaacctctgttcattaaccagtgctttcctgctgatcttcaggagtttgacacag

SEQ ID NO: 437236 - DNA, 631 bp, Homo sapiens
tgtgtaggctattagagttacataaaggattaataatagctagagaggttttaagataaacaagatgacagataaatatatatatatatatatatatayacacacacacacatatatgtgtgtatataaataacattaatgctacaaattgattttatttctatatttttaaaaatcatacttaattcaataaaacattaaaatgctcaataaaacctatactcaataccatttatatagtatccttagggcttagcaaaattcttggtcacataatgggcatttaagaagatacatacttcttatttgttgagatagataaaaggcaagttacggaaagtagaaaggcagaaaccagaccaaaataaagtaatacatctaaattttttcttacatgaaagatgtttaaagcaaaatatagttggtcctttgtaatatgggttctactttcttgaatcctaccatccaaagttaaaaaacaattaggaaacaattccacaaaattgcaaaaagcaaaatttgaattttcagacaccaagaactatgttaaatccatgcaaataagtaatttgtaggcattgcattggtactataagtaatcagagatgattaaagtatacaggagggtgtt

SEQ ID NO: 437237 - DNA, 631 bp, Homo sapiens
tgtgtaggctattagagttacataaaggattaataatagctagagaggttttaagataaacaagatgacagataaatatatatatatatatatatatatacacacacacacatatatgtgtgtatataaataacattaatgctacaaattgattttatttctawatttttaaaaatcatacttaattcaataaaacattaaaatgctcaataaaacctatactcaataccatttatatagtatccttagggcttagcaaaattcttggtcacataatgggcatttaagaagatacatacttcttatttgttgagatagataaaaggcaagttacggaaagtagaaaggcagaaaccagaccaaaataaagtaatacatctaaattttttcttacatgaaagatgtttaaagcaaaatatagttggtcctttgtaatatgggttctactttcttgaatcctaccatccaaagttaaaaaacaattaggaaacaattccacaaaattgcaaaaagcaaaatttgaattttcagacaccaagaactatgttaaatccatgcaaataagtaatttgtaggcattgcattggtactataagtaatcagagatgattaaagtatacaggagggtgtt

SEQ ID NO: 437238 - DNA, 432 bp, Homo sapiens
atacagagggccaaagagtaaacacacacagagatacagactcacaaacaaaaacacataaagacagggaaagacacaatcatagagagaaatacacagatatactacacatccagagggagacacagagacaatagacaaagggtcacacacagattcaaagatatgcagagggaaatgaaagmcaaaaaaaaaaaaaaaaaacaaacaccaaagaagactcccagagacacatccacatagagacacacacacaggcacacagaaagactcatggagcaatagagatacgcacagagaagcacacaaagggcagaggcaacacaaatattgaatcatacatgaagagataccccaggaagagacacatggagagacacaaatacagaatctcctatattttgtaggagtggcctttatcacaggtattga

SEQ ID NO: 437239 - DNA, 534 bp, Homo sapiens
  misc_feature (1)...(534): n = A,T,C or G
ttaccaactggaggcttcaaacatgtgcagtttattatacattagttgtacctcagtaaagctgtttttaaacatatgcgtctttcacactcttcctggaactgcctcctgtttatccttaagactcagcttcagcatctgtcaccttcctgaggaagggttcttggccacggctccttctctctctcacatgttcactctgcttaggcctcctctatgctcacctgtttctctgtaataacatttattagggtgttctctaatgactgattggagtgatgaaggatggaggacagggcttcatcttttagatgtatcctgggaacctgccgtggggccagtcttatagatgctcagcragtgtttgttgaatgaatgaataaataaaagaagtttataatgcaggaacagaaaaccaaatactgcatatactcatatattagtgggggctaaatgatatgaacttatgaacacaaagaaggaaacaacagacactgggatccactggaggnnnnnnnnnnnnnnnnnnnnnnn

SEQ ID NO: 437240 - DNA, 534 bp, Homo sapiens
  misc_feature (1)...(534): n = A,T,C or G
ttaccaactggaggcttcaaacatgtgcagtttattatacattagttgtacctcagtaaagctgtttttaaacatatgcgtctttcacactcttcctggaactgcctcctgtttatccttaagactcagcttcagcatctgtcaccttcctgaggaagggttcttggccacggctccttctctctctcacatgttcactctgcttaggcctcctctatgctcacctgtttctctgtaataacatttattagggtgttctctaatgactgattggagtgatgaaggatggaggacagggcttcatcttttagatgtatcctgggaacctgccgtggggccagtcttatagatgctcagcgagtgtttgttgaatgaatgaataaataaaagaagtttataatgcaggaacagaaaaccaaatactgcatatactcatmtattagtgggggctaaatgatatgaacttatgaacacaaagaaggaaacaacagacactgggatccactggaggnnnnnnnnnnnnnnnnnnnnnnn

SEQ ID NO: 437241 - DNA, 552 bp, Homo sapiens
caattcttatggttaccttaggaagagctgctcagttgtttaaaatgtagcttggtctatggttttaattatctgttttacaaaatgagctttttgcatcttggaatccttctcttctcttatgtattctgaccttgaagrgtcactgtatttggaagggatgggaccatgatctcattctttggaatggtttgtaatcattttagttttaaggaaccacaaactcaccttcaagctgtgtgtacaactgagcccatattagttgaaattgtcatgcttgttagaaatgcccacacacaaagtgcagccagatgtgtcacagagaaaaatatgtaagccaattactttacatacagagcaggatgctgcggaaaattcatccaagtagccctttcaatctacctattttgaaaatgttctctataagctctagcagtacagaatgcacctgttcctgggcctttgttcaaaataatgtctgggcctgagggagctgatttgtggcacaaaaggtctttagatgagcagaggcccagaaaatttccttagctc

SEQ ID NO: 437242 - DNA, 552 bp, Homo sapiens
caattcttatggttaccttaggaagagctgctcagttgtttaaaatgtagcttggtctatggttttaattatctgttttacaaaatgagctttttgcatcttggaatccttctcttctcttatgtattctgaccttgaagggtcactgtatttggaagggatrggaccatgatctcattctttggaatggtttgtaatcattttagttttaaggaaccacaaactcaccttcaagctgtgtgtacaactgagcccatattagttgaaattgtcatgcttgttagaaatgcccacacacaaagtgcagccagatgtgtcacagagaaaaatatgtaagccaattactttacatacagagcaggatgctgcggaaaattcatccaagtagccctttcaatctacctattttgaaaatgttctctataagctctagcagtacagaatgcacctgttcctgggcctttgttcaaaataatgtctgggcctgagggagctgatttgtggcacaaaaggtctttagatgagcagaggcccagaaaatttccttagctc

SEQ ID NO: 437243 - DNA, 518 bp, Homo sapiens
gggcaggaacctgccacacatatcctgaccatgtctctctgcttcaatgtttttatctaggattttaycaagaatgctcctgatttgagagccaggagaaaaatattctaaaaaaaaaacaacgaaaaacaaaagcaaatgacaagtgttccattttaacacacggggtgtaatgggtttaatgagaaacctgtgtttgctcactaatttacagcaattaagaactcagttctgacatctgtagattagaactatttatctagagatcaggcatattttatggaattgctaatcagtatagaaaaatatctaagtgggaagcaggttgtttatctgcctctctgaatggtgtcaatatctggtagttctgtatcataggatccctttttagttcagtgacatttatccccccaatgctttagtcatcccagttcaagaacttgtttgtatccactttgtcatgctgacagtctgtctgttttgaaaggattacaactctgtacatccatggatgacat

SEQ ID NO: 437244 - DNA, 518 bp, Homo sapiens
gggcaggaacctgccacacatatcctgaccatgtctctctgcttcaatgtttttatctaggattttaccaagaatgctcctgatttgagagccaggagaaaaatattctaaaaaaaaaacaacgaaaaacaaaagcaaatgacaagtgttccattttaacacacggggtgtaatgggtttaatgagaaacctgtgtttgctcactaatttacagcaattaagaactcagttctgacatctgtagattagaactatttatctagagatcaggcatattttatggaattgctaatcagtatagaaaaatatctaagtgggaagcaggttgtttayctgcctctctgaatggtgtcaatatctggtagttctgtatcataggatccctttttagttcagtgacatttatccccccaatgctttagtcatcccagttcaagaacttgtttgtatccactttgtcatgctgacagtctgtctgttttgaaaggattacaactctgtacatccatggatgacat

SEQ ID NO: 437245 - DNA, 553 bp, Homo sapiens
cttgactatagactggtattcactggaaagcacatttgattggtttcatgtattaagatctggcagtgagcatttttcagttacatcttctgcaatagtatttactttgtgcaatttttcccagagaccagaactttgcagtgactaattctatgaatgatcatggtaaaactcgctcgtaaaatgtgatgcctgtctttgattccactcttctaacaacatgcttttgcaacaagcaccatttgtttggttccacttgtgggcagggcctatgtgtttctaggacattagggccaccttaaatccatccatactttatttccttgaatttaacaagartgtacagcccccataatgctgtttaaagtgatggggtggtagtattggtgtgggggcggtctgaggagggaggtctagaacgtttattgctgcagtgctgtcacatagcaaattgcctaacctagtggcctctaataacaagcattgattttttgctcagacatctacagagaggctaggggttggctgatctaggccaggctccactgggctt

SEQ ID NO: 437246 - DNA, 584 bp, Homo sapiens
  misc_feature (1)...(584): n = A,T,C or G
actttaaaaaaagagtggttacttctcctttccattgaattctggatcttaaaactactctcttccaggtttccagattccttttgcataattaaaaatgcaaatgttaaagcatttttaatccatgaagaattaatcagtcacatcacaaactcctctctttcagcatatactcctctgaatagataggtgagacttcaagcctgcaaggaaggatacccaggttcaggcttaggcagctgggaaggaggggacagtttaggagaaacaagactatctggacagtgcctggttatcagttttaacatattttgggggactgttactagagcaccaccagccttattattttggtgcaatgaaagtaaatagcctggagaagcgacagataaaataggcagygtctgcagaatgtgaaccagtggttacaggctagccaacaatggacaaaattgttattcggcttacctagaatttcaaaagtaaagtagtgaacattttaaatttgggagagaaagcagtctttctagcttcttttaataaaaagcaacaccaggccagcatcnnnnnnnnnnnnnnnnnnn

SEQ ID NO: 437247 - DNA, 561 bp, Homo sapiens
gcaatcagtatttttttaccaagctctctgaatggttctcatatacacagtgcatatagatgagaaccgctgttgtaaggtttctgttccctctcatcgtacctaaggaagtggttgagttggcttgcctgtggggcacaggtgcggggcaggcttcagtgattccctgcagataggctcattgctccttttagcctgaatgggtatccttagccacattcaggaagcacatagtagtatccaatttgaagatgtagaagccttgtacaccgcatggtctgcctctgacatcaaagactgcaatccccgtagtaattatggacgttccatataattcagggtcacatagttctgtgcacgctgggctaggaatctctgtagtgtgtgatcctaggtacccttccttaaacctgtcaggaaaaaacaacaaaaaccaaaacccagatcattactgaaccaaaagcaaaccctcttcatttagttagaacgtgaaattaagttccagttgggtacaaagccaatgtgttggyggaggctgagtgttggtattggactaaaact

SEQ ID NO: 437248 - DNA, 570 bp, Homo sapiens
agccttgtgtcgtcaagcagcccaatttacagacctgttcacctttaatgttccaggccaatcagttcagatttgtcagaagaaaagcaaagaaagacaagcttttattgactgagaaaataatcaaattgaatgtattgacagtatattctagaagctctagtgaaattgatacatgaaggtacaggggcccctcccaatatgttaaatgatgaaagactattccatatttttagaagatgttaacatgatgatcctgtacatgaacatgttcaattttaratgcttaaacctttgggattcttcaaaatatgtggaattatatgtagacttatgtccgtttgagaattttacgtactctactgtgacagaatttctctttccaagctacctctcacaaatcacatcacgcaggaggggtgcagccagcagaaccctggcacacactgagtaaccagggcaacatgcttttgtgaagagacctgatcttccgaatagctttgcagctttccattctgctagcagcttggagggtatatatgataagaagaagatgtggttcttgtcctc

SEQ ID NO: 437249 - DNA, 550 bp, Homo sapiens
gaacttgatgatgtgtgacccacgcccaacacagtgtgacccaagcccccaggagggttctctaagtgagtttggtcggaggctgccattcacagtgacttgtatttgccacagcagctctttctaagcccagtcctgggattatctcagggatcatcccacaccccagcggggagatgggccaagtccccacctgacctcatcttaggtagagaggcttccatggaagtgtgggctggctgtggggggttgagacctagccccgttcttttgacatttcaccctgtgttctccaaactccagyaagcagcttccatagctcattaaatttgactgaaggtctgatggcttgcaaagcaaattctttacaactgttataaaggtttcattgcttaagcatataatctagcaaaactgccaagccccctccactccctaaactctaagacttgccagggaagagaacagtggccagtggactgcaggagtaactgcactcagcccagaactccctggaggacacagggaaggttctggaaaggtggcggta

SEQ ID NO: 437250 - DNA, 550 bp, Homo sapiens
gaacttgatgatgtgtgacccacgcccaacacagtgtgacccaagcccccaggagggttctctaagtgagtttggtcggaggctgccattcacagtgacttgtatttgccacagcagctctttctaagcccagtcctgggattatctcagggatcatcccacaccccagcggggagatgggccaagtccccacctgacctcatcttaggtagagaggcttccatggaagtgtgggctggctgtggggggttgagacctagccccgttcttttgacatttcaccctgtgttctccaaactccagcaagcagcttccatagctcattaaatttgactgaaggtctgatggcttgcaaagcaaattctttacaactgttataaaggtttcattgcttaagcatataatctagcaaaactgccaagccccctccactycctaaactctaagacttgccagggaagagaacagtggccagtggactgcaggagtaactgcactcagcccagaactccctggaggacacagggaaggttctggaaaggtggcggta

SEQ ID NO: 437251 - DNA, 566 bp, Homo sapiens
tgccaaaatattctattacttatcatactcaagacacatgtttcagagaaacgaccacagagtacccaaaataattcagagtgctgagaatcagatgcttctacagaacatttcaaaaagaaccaacccaaatggaacgctgatatgtagtaagtgattaacaaatgtcattgtggtgaattgaaatgtggaagactttcttcattgctatttacttatttgatgtaggcttgatttaaggaagcaggtgatggctttgagaatctgtactaatgagrtctgtgactgtatgtgaggaaactcccactctgaagccagcttcttcatctgtgaaatagagatgatttcaaacttcctcatcagtagtttacaggaactaactgaaataatgtttgcaatggtttattaaaaatcctggctcacagtgaacacacataaaatggcaaatattaaaaccagtgagaacaccactgctttggtgggtcagaaagaggccaagatagtaattttagatgaaccaatgcttttagcaactattaagaattacagtttggttgcccccaccc

SEQ ID NO: 437252 - DNA, 406 bp, Homo sapiens
aggaaatttaatctcattgcctggccattctaaacaagatggtttcttgatttgtgaacccgtggcaggcagagtaatttggaaactggcctatagagaacattagaaagtaaaactgtatcctcctgccaccctgcaaaaaaaaaaaaagaaaaaaaagtcctatttacaccctataaaataatacaaaagattcaggaatcgattcttctggtttatgatttctaacaattccatagggtcaaaattgaaagcaacctttgcaagcatgaaacttgcccacaaatraagatcaagttcaaaattattggcaaggattgacaacaacaaaaaccaggagataaagattcaaaattaaaatatagccatttaccttcattactgacaacagttcaaacatatgtcc

SEQ ID NO: 437253 - DNA, 596 bp, Homo sapiens
ctgcaaaaaaaaaaaaagaaaaaaaagtcctatttacaccctataaaataatacaaaagattcaggaatcgattcttctggtttatgatttctaacaattccatagggtcaaaattgaaagcaacctttgcaagcatgaaacttgcccacaaatgaagatcaagttcaaaattattggcaaggattgacaacaacaaaaaccaggagataaagattcaaaattaaaatatagccatttaccttcattactgacaacagttcaaacatatgtccaccaagatgcaattcccttcggatgcatttggccgtctctacataaaatcaatacatccatacaayttacagagaggtgctaggcactgtccctcctgcagagcctcaccacaccaagaacaatctttttaagataataaaagtacaacttgactatcacgggtaaatacatatgctagaaacttgctagaaaacatttcacgtgtgtgaaaagagaggagaattggagaagttaaaaaaaaaaaatcccaggttcaatatccactccttcctcccccattatcatacctccctggaaagcttttttttaaaatgcataattc

SEQ ID NO: 437254 - DNA, 568 bp, Homo sapiens
tcacacctgtaatcccagcactttaagaggctgtagcaggtggaaggtttgagcgcaagagcttgagaccggcaacatggcaagacgtcatctttacaatttttttttttaaattagctaggtgtgctggtgcacacctgtaatcccagctacttgggaagctgaggggtgaggattgcttgaacccgggagccggaggttgcagtgagctgagattccaccactgaactccagcctgggcaacaaagtgagagtctgtctcaaaaaaaaaaacaaaaaagaagaagaagaaagaaagaaaacaaaaaagaaaaaaaaaagaaaagaaaagaaaggcaaggcagggcagggcagggcaacctcctggttactatgctcagtatcagggtgaggggatcacttgtaccccaaacccgaacatcacacaatattcccatgtaacacacctcctactcaggagaccgaggcaggagaatcgcttgaacccgggaggcgggagatcacaccactgtactccagcctgggcracaagagagagattttgtctcaaaaaataaataaataaata

SEQ ID NO: 437255 - DNA, 324 bp, Homo sapiens
ggtacctggggaggtaagaagtaatctatgtaacaggaatggggaaagagagcaggtaggtagagagacgagtgtttttttttttttttttggagatggagtctcactctgtcacccaggctggagygatctctgatcactgcaacctacacctcccgggttcaagcaattctcctgcctcagcctcccaagtagttgggattacaaacatacaaacacaacaaaaacaaaaaacaaacaaacaaaaacacttttatttaggtctaggggtacatgtgtgggtttgttatataggtaaactcatgtcataggggtttgttgtac

SEQ ID NO: 437256 - DNA, 611 bp, Homo sapiens
tttcagtggtgttgggagggccttggaacaaggagtgaatggaagatgagggagtggagggaggccatgtatggactctttctacagaccaggctgttgaaggagagagggctaacrggaaatgtagtgcagggggaagttttttgaagatgggagaaagaagacaacttttatatatttcatttcatttgattccttataaatttgtaaggaagatagagcttgtattatgtcagtgaagttgaaaatagagcacagaaaaattaagatacagcacccccaaaactgagaacttctgacataatacactgttggaaatatttatttcagagtgaagaaaatattggaagttaggcttgttaattggtctgcatggttcataattactctttcttattaactatttaaggaacatgagaccaggaagttaaatacccaggtatatgcagatgtatatctagaattggtaccaaagtaaatacaggcataccttggagatactgtaggttccattatagactaccacaataaagtgaatatcaccataaagcaaggcacacaaatattttggtttaccagtgtatgtaaatattatgtttatattctactgc

SEQ ID NO: 437257 - DNA, 538 bp, Homo sapiens
gatcttcctgccttggactcccacagtgctgggaatacaggcatgagccactggaccctggccttaactacatattttttacatctgcacagtgttttggaaaaagtggttcaactgaaagaatgaaaagttgggggcagaatttgctttaaaaaaaaattaaaaaaagggcattgaaaaaagtttcagtggtgttgggagggccttggaacaaggagtgaatggaagatgagggagtggagggaggccatgtatggactctttctacagaccaggctgttgaaggagagagggctaacgggaaatgwagtgcagggggaagttttttgaagatgggagaaagaagacaacttttatatatttcatttcatttgattccttataaatttgtaaggaagatagagcttgtattatgtcagtgaagttgaaaatagagcacagaaaaattaagatacagcacccccaaaactgagaacttctgacataatacactgttggaaatatttatttcagagtgaagaaaatattggaagttagg

SEQ ID NO: 437258 - DNA, 562 bp, Homo sapiens
aaacctgtgtctactaaaaatacaaaaattagccggacaaggtggagggttcctgtaatctcatctgctcgggaggctgaggcagagaattgcttgaacgcgggaggcagaggttgtggtgagccgagatcgtgccactgcactacagccagggtgacagagtgagactctgtctaaaaaataaaaataaaaatraagtctctaaaatcttcattgaaaactcatttcgtctcaagacatcatttattttgcaaatgtattcttcatggtggcatgtgaatttgtaatgtgatatagaaattttggaatttacttttttgttgttttttggttgttatctttctttttttaaaattttattattattatactttaagttttagggtacatgtgcacgacatgcaggttggttacatatgtatacatgaatttacttttaaaaagttttaaataagaaggaaatactttctaggtaaatttaattgtatatagaagacctaatgggtgagaatctgccttgaaagctggagacacgtcaataaataagaatacacaattagaa

SEQ ID NO: 437259 - DNA, 538 bp, Homo sapiens
gatcttcctgccttggactcccacagtgctgggaatacaggcatgagccactggaccctggccttaactacatattttttacatctgcacagtgttttggaaaaagtggttcaactgaaagaatgaaaagttgggggcagaatttgctttaaaaaaaaattaaaaaaagggcattgaaaaaagtttcagtggtgttgggagggccttggaacaaggagtgaatggaagatgagggagtggagggaggccatgtatggactctttctacagaccaggctgttgaaggagagagggctaacgggaaatgtagtgcagggggaagttttttgaagatgggagaaagaagacaacttttatatatttcatttcatttgattccttataaatttgtaaggaagatagagcttgtattatgtcagtgaagttgaaaatagagyacagaaaaattaagatacagcacccccaaaactgagaacttctgacataatacactgttggaaatatttatttcagagtgaagaaaatattggaagttagg

SEQ ID NO: 437260 - DNA, 599 bp, Homo sapiens
cccgtgtggtagacagaataatggccccaaagatgtccatgtcctaatcccatgtggtgaaaacaataatgttcccaaagatcttcacatcctaatcccatgtgrgagacagaataatggcctcaaagatgtccacatcctaatcctcatgtgggagacagaataatggccccaaagatgtccacatcctaatctccatttggtagacagaataatggcctcaaatatgtccatgtcctaatcccatgtggcagacagaataatggccccaaagatgtccacgtcctaatcctcatgtgatagacagaataatggccccaaagatgtacacatcctaatccccatgtggcagacagaataatggccccaaagatgtccacgtcctaatccccatgtgatagacagaataatggccccaaagatgtacacatcctaatccccacgtggcagacagaataatggccccaaagatgtccacgtcctaatccccatgtggtagacagaataatgaccccaaagatgtccacatactaatccccatgtggtagacagaataatggcctcaaagatgtacacatccttatccccacgtggcagac

SEQ ID NO: 437261 - DNA, 599 bp, Homo sapiens
cccgtgtggtagacagaataatggccccaaagatgtccatgtcctaatcccatgtggtgaaaacaataatgttcccaaagatcttcacatcctaatcccatgtgagagacagaataatggcctcaaagatgtccacatcctaatcctcatgtgggagacagaataatggccccaaagatgtccacatcctaatctccatttggtagacagaataatggcctcaaatatgtccatgtcctaatcccatgtggcagacagaataatggccccaaagatgtccacgtcctaatcctcatgtgatagacagaataatggccccaaagatgtacacatcctaatccccatgtggcagacagaataatggccccaaagatgtccacrtcctaatccccatgtgatagacagaataatggccccaaagatgtacacatcctaatccccacgtggcagacagaataatggccccaaagatgtccacgtcctaatccccatgtggtagacagaataatgaccccaaagatgtccacatactaatccccatgtggtagacagaataatggcctcaaagatgtacacatccttatccccacgtggcagac

SEQ ID NO: 437262 - DNA, 507 bp, Homo sapiens
tccccatgtggtagacagaataatggcctcaaagatgtacacatccttatccccacgtggcagacagaataatggccccaaagatgtccacatcctaatccccatgtgggagacagaataatggtcccaaagatacccatgtcctaatcctcatgtgatacagagaataatggtcccawagatgtccatgtcctaatactaggtagcagacaggataatggccccaaggatgtctacatcctaatccccatgtggttgacagagtaagcacccccttccccccctcaaaaaaaaatccacatcctaattctagaaatctgtaaaaacctgtcatggctaaaaagattttgcagatgtgattagtttaagaatcatgagatgaaatgaccctggattatccagctgggtctaagatcatcacaggatctttgtaagagggaggcaggagtgccagagccagaggaggtgatgttaggacaaaagcaaaggtcagagtcacagagaaat

SEQ ID NO: 437263 - DNA, 609 bp, Homo sapiens
gaagttttgctgacaccttggttttaggccagtgagacccagggtgggcttcaaaactacaacactgtaagacaatacatttgtgttgctttaagccaatacgaatgtgatcattggtgatggcggccagaggacactcacagaaggagtaatgtactggaggtctgcagcaggaatgaatttggcatgactggggggatgcccaagggggcagcaaagaagaacaagcaaaggctaaacgtgatgactccttgttttagaagaacccccttcagaagaagaatcagtaaagcaaaggctgaactcaactttgtcttcttttcttccccagacataatttacgttattttattgggaccacagagtcccagttggagcaagtgaccagggrcagagttacaaagaagccatagggaagtagttagattgtattctgacttcgatgtgaaattattggcgggttttgagtggcaatgagggatgtcttattcagctcgggttgccataacaaaaattatagactgggtggcttaagtaacagccattgatttctcacagttctggagatggggaagtccgagatcaaggtatggcagatttattgtctgg

SEQ ID NO: 437264 - DNA, 463 bp, Homo sapiens
tatctagaattggtaccaaagtaaatacaggcataccttggagatactgtaggttccattatagactaccacaataaagtgaatatcaccataaagcaaggcacacaaatattttggtttaccagtgtatgtaaatattatgtttatattctactgcagtctattaaatgttcaatagcgttatatttaaaaaaccaatgtgcatactttaatttaaaaatactttattgctaaaaaatgctactgatcatctgagctttcagtaaattgtaagrttttttgctgatagaggatgttggtggctgctgactgatcccagcagtgattgctgatggttggggtgcctctggcagtttcttacaataagacaacaatgaagtttgctacattgattgcctctttctttcgtgaaagatttctctgtagcacttgatgctgtttcatagcattttttacccaaaag

SEQ ID NO: 437265 - DNA, 463 bp, Homo sapiens
tatctagaattggtaccaaagtaaatacaggcataccttggagatactgtaggttccattatagactaccacaataaagtgaatatcaccataaagcaaggcacacaaatattttggtttaccagtgtatgtaaatattatgtttatattctactgcagtctattaaatgttcaatagcgttatatttaaaaaaccaatgtgcatactttaatttaaaaatactttattgctaaaaaatgctactgatcatctgagctttcagtaaattgtaaggttttttgctgatagaggatgttggtggctgctgactgatsccagcagtgattgctgatggttggggtgcctctggcagtttcttacaataagacaacaatgaagtttgctacattgattgcctctttctttcgtgaaagatttctctgtagcacttgatgctgtttcatagcattttttacccaaaag

SEQ ID NO: 437266 - DNA, 541 bp, Homo sapiens
atgttggtggctgctgactgatcccarcagtgattgctgatggttggggtgcctctggcagtttcttacaataagacaacaatgaagtttgctacattgattgcctctttctttcgtgaaagatttctctgtagcacttgatgctgtttcatagcattttttacccaaaagtagaactttttttcaaaattggagtcagctcaaaccctgccactgctttaacaactaaggttatatagtattctaaatcctttgttgtcattcaataatttcacagccttttcaccaggagtagtttccatctttaagaaaccactttcttgggtcatctgtaaggaacaactcctaatctgtgcaagttttatcatgagattgcagcaattcagtcacatcttcaggctccacttctaattctcttgctgtttccactacatctgcagtaacttcctccacttgagtcttgaacctctcaaagtcatccatgagagttggaatcaacttcttccaaacacctgttcgtgttgatattttgacttcctct

SEQ ID NO: 437267 - DNA, 463 bp, Homo sapiens
tatctagaattggtaccaaagtaaatacaggcataccttggagatactgtaggttccattatagactaccacaataaagtgaatatcaccataaagcaaggcacacaaatattttggtttaccagtgtatgtaaatattatgtttatattctactgcagtctattaaatgttcaatagcgttatatttaaaaaaccaatgtgcatactttaatttaaaaatactttattgctaaaaaatgctactgatcatctgagctttcagtaaattgtaaggttttttgctgatagaggatgttggtggctgctgactgatcccagcagtgattgctgatggttggggtgcctctggcagtttcttacaataagacaacaatgaagtttgctacattgattgcctctttctttcrtgaaagatttctctgtagcacttgatgctgtttcatagcattttttacccaaaag

SEQ ID NO: 437268 - DNA, 533 bp, Homo sapiens
ttggttcttagtctgtccatctgtatacaagcatgaactgtacagtcaactgccttgtagagaggggctggtttttggttatgtcttaaatcttaactccttttaattattctgaattttagtgggattcctgtatcattgtagatttggaaagtattgagtaggagatgataatctataatcaggattctgagttggtaagattttatagatctgaawaaagtaatttcttgaccttggcctcaataagaaagtcagaacttgacccttatttaccagcaccatccccctccccccacaatatttgaagtgtttaaatcatttattttgaaattcttatgtgatccaagaccactgttcacttaagctagtttatttgtttattaaaacaaaagaagtaggctgcagttacgtgtttctttttttgttgtttggtgtcaggagtagaatacatttggccagcttcatgagaggattagaaagttggagaaggaaaaatagaattgtttatggagccaggagaataattgtct

SEQ ID NO: 437269 - DNA, 533 bp, Homo sapiens
ttggttcttagtctgtccatctgtatacaagcatgaactgtacagtcaactgccttgtagagaggggctggtttttggttatgtcttaaatcttaactccttttaattattctgaattttagtgggattcctgtatcattgtagatttggaaagtattgagtaggagatgataatctataatcaggattctgagttggtaagattttatagatctgaataaagtaatttcttgaccttggcctcaataagaaagtcagaacttgacccttatttaccagcaccatccccctccccccacaatatttraagtgtttaaatcatttattttgaaattcttatgtgatccaagaccactgttcacttaagctagtttatttgtttattaaaacaaaagaagtaggctgcagttacgtgtttctttttttgttgtttggtgtcaggagtagaatacatttggccagcttcatgagaggattagaaagttggagaaggaaaaatagaattgtttatggagccaggagaataattgtct

SEQ ID NO: 437270 - DNA, 533 bp, Homo sapiens
ttggttcttagtctgtccatctgtatacaagcatgaactgtacagtcaactgccttgtagagaggggctggtttttggttatgtcttaaatcttaactccttttaattattctgaattttagtgggattcctgtatcattgtagatttggaaagtattgagtaggagatgataatctataatcaggattctgagttggtaagattttatagatctgaataaagtaatttcttgaccttggcctcaataagaaagtcagaacttgacccttatttaccagcaccatccccctccccccacaatatttgaagtgtttaaatcatttattttgaaattcttatgtgatccaagaccactgttcacttaagctagtttattygtttattaaaacaaaagaagtaggctgcagttacgtgtttctttttttgttgtttggtgtcaggagtagaatacatttggccagcttcatgagaggattagaaagttggagaaggaaaaatagaattgtttatggagccaggagaataattgtct

SEQ ID NO: 437271 - DNA, 539 bp, Homo sapiens
aactttttttcaaaattggagtcagctcaaaccctgccactgctttaacaactaaggttatatagtattctaaatcctttgttgtcattcaataatttcacagccttttcaccaggagtagtttccatctttaagaaaccactttcttgggtcatctgtaaggaacaactcctaatctgtgcaagttttatcatgagattgcagcaattcagtcacatcttcaggctccacttctaattmtcttgctgtttccactacatctgcagtaacttcctccacttgagtcttgaacctctcaaagtcatccatgagagttggaatcaacttcttccaaacacctgttcgtgttgatattttgacttcctctcatgaattatgaatgttcttaatgacatctacggtggtgaagtctttccagaaggttttcagtttattttgcccaaatctactacaggaatcactttttttttttttttgagacagagtctctctttgtcggcctggctggagtgcagtggtgtgatcttggtttactgcaa

SEQ ID NO: 437272 - DNA, 539 bp, Homo sapiens
aactttttttcaaaattggagtcagctcaaaccctgccactgctttaacaactaaggttatatagtattctaaatcctttgttgtcattcaataatttcacagccttttcaccaggagtagtttccatctttaagaaaccactttcttgggtcatctgtaaggaacaactcctaatctgtgcaagttttatcatgagattgcagcaattcagtcacatcttcaggctccacttctaattctcttgctgtttccactacatctgcagtracttcctccacttgagtcttgaacctctcaaagtcatccatgagagttggaatcaacttcttccaaacacctgttcgtgttgatattttgacttcctctcatgaattatgaatgttcttaatgacatctacggtggtgaagtctttccagaaggttttcagtttattttgcccaaatctactacaggaatcactttttttttttttttgagacagagtctctctttgtcggcctggctggagtgcagtggtgtgatcttggtttactgcaa

SEQ ID NO: 437273 - DNA, 539 bp, Homo sapiens
aactttttttcaaaattggagtcagctcaaaccctgccactgctttaacaactaaggttatatagtattctaaatcctttgttgtcattcaataatttcacagccttttcaccaggagtagtttccatctttaagaaaccactttcttgggtcatctgtaaggaacaactcctaatctgtgcaagttttatcatgagattgcagcaattcagtcacatcttcaggctccacttctaattctcttgctgtttccactacatctgcagtaacttcctccacttgagtcttgaacctctcaaagtcatccatgagagttggaatcaacttcttccaaacacctgttcrtgttgatattttgacttcctctcatgaattatgaatgttcttaatgacatctacggtggtgaagtctttccagaaggttttcagtttattttgcccaaatctactacaggaatcactttttttttttttttgagacagagtctctctttgtcggcctggctggagtgcagtggtgtgatcttggtttactgcaa

SEQ ID NO: 437274 - DNA, 539 bp, Homo sapiens
aactttttttcaaaattggagtcagctcaaaccctgccactgctttaacaactaaggttatatagtattctaaatcctttgttgtcattcaataatttcacagccttttcaccaggagtagtttccatctttaagaaaccactttcttgggtcatctgtaaggaacaactcctaatctgtgcaagttttatcatgagattgcagcaattcagtcacatcttcaggctccacttctaattctcttgctgtttccactacatctgcagtaacttcctccacttgagtcttgaacctctcaaagtcatccatgagagttggaatcaacttcttccaaacacctgttcgtgttgatattttgacttcctctcatgaattatgaatgttcttaatgacatctacggtggtgaagyctttccagaaggttttcagtttattttgcccaaatctactacaggaatcactttttttttttttttgagacagagtctctctttgtcggcctggctggagtgcagtggtgtgatcttggtttactgcaa

SEQ ID NO: 437275 - DNA, 530 bp, Homo sapiens
ctcattgatgcatgggctgcaggatagatgttgtattgtactggcaggcatgaaagtaacattcttctttctgaacatatccatcaaagccctckaatgacctggtccattgttagtgagtgctaatattttgaaatgaatgttttttccttagcagtaggtcttgacagtggactgaaaatattcagtaagccaacctctaaacagatgtgctgtcatccaggagactgttgttccatatgtagatagcaagcagattagatatagcataattcttaagagctctaggacttttttgagtggcaaatgagcattagcttcaacgtcaagttaccagctgcattagcccctaacaagagagtcagtttttatttatttatttatttatttatttatttttaaaagagacaagagtctcgccttgttgtccaggctggccttgaactcctgggctcaagtgattctcttaccttggcctctcaaagtgctggaataacaggtgtggccccagcctgacctttgaagcaagg

SEQ ID NO: 437276 - DNA, 521 bp, Homo sapiens
acttgtactacatggctatttattagggtaaggaagtatgatctctttaacgtacatggtattttaaaaatatcttattctggtgtgtyttcttgattgtaaaaccccacttaacattttgggcttctatttatatctttttactttaaagtaacactattctgtggttattcttgtggcatattaaagtgatattttaaggaatacttaaccaaattctatataaaatgtatctactctaagttagaaatcttggtgcccttactggtcttatgatcttggaagtcacttaagatcctgagctctgtgttaagccagtgctggttcaagttctggatctaccattgaataattgaccatgacttctttatacttcagtttccccaattgttgaataggaataatgattgttgtgatgagtccataaaaaatacagtcttactgactttatggtggccgaaatttcaagagtaacacagtaacagttaagtcatactgggactcaggctaatcttttcttc

SEQ ID NO: 437277 - DNA, 558 bp, Homo sapiens
ttttttaattaaaaagttaaaacttgtactacatggctatttattagggtaaggaagtatgatctctttaacgtacatggtattttaaaaatatcttattctggtgtgtcttcttgattgtaaaaccccacttaacattttgggcttctatttatatcttkttactttaaagtaacactattctgtggttattcttgtggcatattaaagtgatattttaaggaatacttaaccaaattctatataaaatgtatctactctaagttagaaatcttggtgcccttactggtcttatgatcttggaagtcacttaagatcctgagctctgtgttaagccagtgctggttcaagttctggatctaccattgaataattgaccatgacttctttatacttcagtttccccaattgttgaataggaataatgattgttgtgatgagtccataaaaaatacagtcttactgactttatggtggccgaaatttcaagagtaacacagtaacagttaagtcatactgggactcaggctaatcttttcttccgttgccctaggcatt

SEQ ID NO: 437278 - DNA, 507 bp, Homo sapiens
aatgtaggtgcagttcagtaatgattcaaatgaagttttcattatattctatttttgaaaaattaccaataactacatatataactgaaatcacattatgtaactgtcagtataaaggaatggctcaggtaaaaccaaatagaagttgtatatttaatattttaataatttttttaattaaaaagttaaaacttgtactacatggctatttattagggtaaggaagtatgatctctttaacgtacatggtattttaaaaatatcttattctggtgtgtcttcttgattgtaaaaccccacttaacattttgggcttctatttatatctttttactttaaagtaacmctattctgtggttattcttgtggcatattaaagtgatattttaaggaatacttaaccaaattctatataaaatgtatctactctaagttagaaatcttggtgcccttactggtcttatgatcttggaagtcacttaagatcctgagctctgtgttaagcca

SEQ ID NO: 437279 - DNA, 521 bp, Homo sapiens
acttgtactacatggctatttattagggtaaggaagtatgatctctttaacgtacatggtattttaaaaatatcttattctggtgtgtcttcttgattgtaaaaccccacttaacattttgggcttctatttatatctttttactttaaagtaacactattctgtggttattcttgtggcatattaaagtgatattttaaggaatacttaaccaaattctatataaaatgtatctactctaagttagaaatcttggtgcccttactggtcttatgatcttggaagtcacttaagatcctgagctctgtrttaagccagtgctggttcaagttctggatctaccattgaataattgaccatgacttctttatacttcagtttccccaattgttgaataggaataatgattgttgtgatgagtccataaaaaatacagtcttactgactttatggtggccgaaatttcaagagtaacacagtaacagttaagtcatactgggactcaggctaatcttttcttc

SEQ ID NO: 437280 - DNA, 521 bp, Homo sapiens
acttgtactacatggctatttattagggtaaggaagtatgatctctttaacgtacatggtattttaaaaatatcttattctggtgtgtcttcttgattgtaaaaccccacttaacattttgggcttctatttatatctttttactttaaagtaacactattctgtggttattcttgtggcatattaaagtgatattttaaggaatacttaaccaaattctatataaaatgtatctactctaagttagaaatcttggtgcccttactggtcttatgatcttggaagtcacttaagatcctgagctctgtgttaagccagtgctggttcaagttctggatctaccattgaataattgaccatgacttctttatacttcagtttccccaaytgttgaataggaataatgattgttgtgatgagtccataaaaaatacagtcttactgactttatggtggccgaaatttcaagagtaacacagtaacagttaagtcatactgggactcaggctaatcttttcttc

SEQ ID NO: 437281 - DNA, 379 bp, Homo sapiens
cagattagatatagcataattcttaagagctctaggacttttttgagtggcaaatgagcattagcttcaacgtcaagttaccagctgcattagcccctaacaagagagtcagtttttatttatttatttatttatttatttatttttaaaagagacaagagtctcgccttgttgtccaggctggccttgaactcctgggctcaagtgattctctyaccttggcctctcaaagtgctggaataacaggtgtggccccagcctgacctttgaagcaaggcattgattttccctctctagctgtgaaagtcctagatggcatcttcttctaatggaaggctcttttgtctacttaaaacaccttgtttagtatagccacctc

SEQ ID NO: 437282 - DNA, 452 bp, Homo sapiens
gtggttgttcagaagtaaaatgctttagtttcagttatatagattttaataagatactactttctatataatttatcaggyactttaggcattttaatttgcaaatttaggacaatttgctttaacgtttcttcacttttgtccattggatgtaatttccatagagtattcatttccctaagtaaaaaccgaaaccaaaccgacaactaatggtcactgaagaaagagtgattaaatgctaagattataatggtatttgcattttaatgttaccagctctctacagtttaaagtttatgcatttatcgattgcttatgtttctcattgcattctttggcctactggttttggttgtttatagctatagaatatagaattccttatggttatccatttctccttttaagtagagtgatagttgttagaagaaaaataaccccccaatactttc

SEQ ID NO: 437283 - DNA, 452 bp, Homo sapiens
gtggttgttcagaagtaaaatgctttagtttcagttatatagattttaataagatactactttctatataatttatcaggcactttaggcattttaatttgcaaatttaggacaatttgctttaacgtttcttcacttttgtccattggatgtaatttccataragtattcatttccctaagtaaaaaccgaaaccaaaccgacaactaatggtcactgaagaaagagtgattaaatgctaagattataatggtatttgcattttaatgttaccagctctctacagtttaaagtttatgcatttatcgattgcttatgtttctcattgcattctttggcctactggttttggttgtttatagctatagaatatagaattccttatggttatccatttctccttttaagtagagtgatagttgttagaagaaaaataaccccccaatactttc

SEQ ID NO: 437284 - DNA, 418 bp, Homo sapiens
aaaatatattcttttattgtttgacatttgtcttgtttttctttaaaatgttatctttgtggagtaaacatttttctttatgctgtttaacatcttcagattagttcagggtattgctgaatgtggttgttcagaagtaaaatgctttagtttcagttatatagattttaataagatactactttctatataatttatcaggcactttaggcattttaatttgcaaatttaggacaatttgctttaacgtttcttcacttttgtccattggatgtaatttccatagagtattcatttccctaartaaaaaccgaaaccaaaccgacaactaatggtcactgaagaaagagtgattaaatgctaagattataatggtatttgcattttaatgttaccagctctctacagtttaaagttt

SEQ ID NO: 437285 - DNA, 418 bp, Homo sapiens
aaaatatattcttttattgtttgacatttgtcttgtttttctttaaaatgttatctttgtggagtaaacatttttctttatgctgtttaacatcttcagattagttcagggtattgctgaatgtggttgttcagaagtaaaatgctttagtttcagttatatagattttaataagatactactttctatataatttatcaggcactttaggcattttaatttgcaaatttaggacaatttgctttaacgtttcttcacttttgtccattggatgtaatttccatagagtattcatttccctaagtaaaaaccraaaccaaaccgacaactaatggtcactgaagaaagagtgattaaatgctaagattataatggtatttgcattttaatgttaccagctctctacagtttaaagttt

SEQ ID NO: 437286 - DNA, 515 bp, Homo sapiens
ggttgttcagaagtaaaatgctttagtttcagttatatagattttaataagatactactttctatataatttatcaggcactttaggcattttaatttgcaaatttaggacaatttgctttaacgtttcttcacttttgtccattggatgtaatttccatagagtattcatttccctaagtaaaaaccgaaaccaaaccgacaactartggtcactgaagaaagagtgattaaatgctaagattataatggtatttgcattttaatgttaccagctctctacagtttaaagtttatgcatttatcgattgcttatgtttctcattgcattctttggcctactggttttggttgtttatagctatagaatatagaattccttatggttatccatttctccttttaagtagagtgatagttgttagaagaaaaataaccccccaatactttcttctagtgttaattcttaaagtgtgattgacttttatttactttttggtgcagtaattgcagttc

SEQ ID NO: 437287 - DNA, 379 bp, Homo sapiens
cagattagatatagcataattcttaagagctctaggacttttttgagtggcaaatgagcattagcttcaacgtcaagttaccagctgcattagcccctaacaagagagtcagtttttatttatttatttatttatttatttatttttaaaagagacaagagtctcgccttgttgtccaggctggccttgaactcctgggctcaagtgattctcttaccttggcctctcaaagtgctggaataacaggtgtggccccagcctgayctttgaagcaaggcattgattttccctctctagctgtgaaagtcctagatggcatcttcttctaatggaaggctcttttgtctacttaaaacaccttgtttagtatagccacctc

SEQ ID NO: 437288 - DNA, 515 bp, Homo sapiens
ggttgttcagaagtaaaatgctttagtttcagttatatagattttaataagatactactttctatataatttatcaggcactttaggcattttaatttgcaaatttaggacaatttgctttaacgtttcttcacttttgtccattggatgtaatttccatagagtattcatttccctaagtaaaaaccgaaaccaaaccgacaactaatggtcactgaagaaagagtgattaaatgctaagattataatggtatttgcattttaatgttaccagctctctacagtttaaagtttatgcatttatcgattgcttatgtttctcattgcattctttggcctactggttttggttgtttatagctatagaatatagaatyccttatggttatccatttctccttttaagtagagtgatagttgttagaagaaaaataaccccccaatactttcttctagtgttaattcttaaagtgtgattgacttttatttactttttggtgcagtaattgcagttc

SEQ ID NO: 437289 - DNA, 540 bp, Homo sapiens
atttgcattttaatgttaccagctctctacagtttaaagtttatgcatttatcgattgcttatgtttctcattgcattctttggcctactggttttggttgtttatagctatagaatatagaattccttatggttatccatttctccttttaagtagagygatagttgttagaagaaaaataaccccccaatactttcttctagtgttaattcttaaagtgtgattgacttttatttactttttggtgcagtaattgcagttcatgagtcaatgttgatgtcatataaaccttaatttttaatgtttcattgtagtgatgtctctgtagcagcaaacatttaagttatttgttatagttaaatgtttaaatcactgttagtgattagcttattttgccttccttgaagcaatttgtcctaaatttccatacgtttgcatttgtttttgctgtcctaaaattccttagttgctggctttgaccttttatgttgctgagttttacacatctattttctcaactgccatatcttaggaggctt

SEQ ID NO: 437290 - DNA, 540 bp, Homo sapiens
atttgcattttaatgttaccagctctctacagtttaaagtttatgcatttatcgattgcttatgtttctcattgcattctttggcctactggttttggttgtttatagctatagaatatagaattccttatggttatccatttctccttttaagtagagtgatagttgttagaagaaaaataaccccccaatactttcttctagtgttaattcttaaagtgtgattgacttttatttactttttggtgcagtaattgcagttcatgagtcaatgttgatgtcatataaaccttaatttttaatgtttcattgtagtgatgtctctgtagcagcaaacatttaagttatttgttatasttaaatgtttaaatcactgttagtgattagcttattttgccttccttgaagcaatttgtcctaaatttccatacgtttgcatttgtttttgctgtcctaaaattccttagttgctggctttgaccttttatgttgctgagttttacacatctattttctcaactgccatatcttaggaggctt

SEQ ID NO: 437291 - DNA, 620 bp, Homo sapiens
tattatttaacttatggtgagggaaacacctaagtattttcctgagcatctggataattttaaatatacataattcwtctacttaggtaggtgccaggttttttcaaggagtaattaattagtacaaacaagggtgagggggcagggaacaccatactctggtacttaatgtctgaaattatcagggaatttaacacattttcccataggtttatttcttgtgtaagaagtcagataaattatttccatttcaagtatttattattcagattatttaaagcaaagctttcacaaagccttttgtcagctttcctgtaatcctcaaataatttttcctggctggatgctttggcttactcccataatcctggcactttgggaggcagaagcaggaggatcacttgagcccaagagttctaggctgcagtgagctgtgatcacaccactgcagtccaacctgagagacagatcaagttcttgtctcaaaaataaaagtaataacaataataataaattttcctctaaatacaacggtgaatgaggtagaaatgttgagttcataagagaactgttgaatagtgaaggaaactgacttaattctaatgacaggaagaatactg

SEQ ID NO: 437292 - DNA, 620 bp, Homo sapiens
tattatttaacttatggtgagggaaacacctaagtattttcctgagcatctggataattttaaatatacataattcatctacttaggtaggtgccaggttttttcaaggagtaattaattagtacaaacaagggtgagggggcagggaacaccatactctggtacttaatgtctgaaattatcagggaatttaacacattttcccataggtttatttcttgtgtaagaagtcagataaattatttccatttcaagtatttattattcagattatttaaagcaaagctttcacaaagccttttgtcagctttcctgtaatcctcaaataatttttcctggctggatgctttggcttactcccataatcctggcactttgggaggcagaagcaggaggatcacttgagcccaagagttctaggctgcagtgagctgtgatcacaccactgcagtccaacctgagwgacagatcaagttcttgtctcaaaaataaaagtaataacaataataataaattttcctctaaatacaacggtgaatgaggtagaaatgttgagttcataagagaactgttgaatagtgaaggaaactgacttaattctaatgacaggaagaatactg

SEQ ID NO: 437293 - DNA, 620 bp, Homo sapiens
tattatttaacttatggtgagggaaacacctaagtattttcctgagcatctggataattttaaatatacataattcatctacttaggtaggtgccaggttttttcaaggagtaattaattagtacaaacaagggtgagggggcagggaacaccatactctggtacttaatgtctgaaattatcagggaatttaacacattttcccataggtttatttcttgtgtaagaagtcagataaattatttccatttcaagtatttattattcagattatttaaagcaaagctttcacaaagccttttgtcagctttcctgtaatcctcaaataatttttcctggctggatgctttggcttactcccataatcctggcactttgggaggcagaagcaggaggatcacttgagcccaagagttctaggctgcagtgagctgtgatcacaccactgcagtccaacctgagagacagatcaagttcttgtctcaaaaataaaagtaataacaataataataaattttcctctaaatacaayggtgaatgaggtagaaatgttgagttcataagagaactgttgaatagtgaaggaaactgacttaattctaatgacaggaagaatactg

SEQ ID NO: 437294 - DNA, 200 bp, Homo sapiens
tgggtgacagagcaaaactctgtctcaaaaataaaagggggaaatattcrattaataaacaacagcctcacatgtgctcaccactgggttgaagcaaagccttcttccaaaagcaaaaattggaaaaatatgctaccgacagactgcccctaaaggtaatattaaacagggactccaaaggcagaagagaagctgaccca

SEQ ID NO: 437295 - DNA, 200 bp, Homo sapiens
tgggtgacagagcaaaactctgtctcaaaaataaaagggggaaatattcgrttaataaacaacagcctcacatgtgctcaccactgggttgaagcaaagccttcttccaaaagcaaaaattggaaaaatatgctaccgacagactgcccctaaaggtaatattaaacagggactccaaaggcagaagagaagctgaccca

SEQ ID NO: 437296 - DNA, 200 bp, Homo sapiens
tgggtgacagagcaaaactctgtctcaaaaataaaagggggaaatattcgattaataaacaacagcctcrcatgtgctcaccactgggttgaagcaaagccttcttccaaaagcaaaaattggaaaaatatgctaccgacagactgcccctaaaggtaatattaaacagggactccaaaggcagaagagaagctgaccca

SEQ ID NO: 437297 - DNA, 611 bp, Homo sapiens
ttcagttaaaatgagaggcacgtgacttttcctttccctgaattgtttgggcattatatatgacttccgttgcactacagtgtcagagttggttgctgcagagagcacatatatttcaaattgctgctctgcatgctacgaatcacaatracatagttactgtttgtcagtatgtgtgtgtgtgtgggcaccacacatattgccctggcatcttatttatttctctcattaccagtgcatacttacctatcatgttaaaacaagaaaaggagaaaagtggactttatatgtaacactttagaggcatagtggaatgtatattattattaacaaattagatagcaaagcattatatttgttatgctagaagactatggctgtgctaaaagaatataatatatgtcaacattgccagactgggcacttctcacaatattcccaaccaacaggaataaaactaaaggtcagaaaaaaaaaatagtaaattaaaacaaaattttatcacagcagaatttcttctcaaaaacaaaaaatggaaattaggctataattaaagtaagtttttcaatggcttgttagccaagcaaggaaaaccattaccaacagtagtt

SEQ ID NO: 437298 - DNA, 611 bp, Homo sapiens
ttcagttaaaatgagaggcacgtgacttttcctttccctgaattgtttgggcattatatatgacttccgttgcactacagtgtcagagttggttgctgcagagagcacatatatttcaaattgctgctctgcatgctacgaatcacaataacatagttactgtttgtcagtatgtgtgtgtgtgtgkgcaccacacatattgccctggcatcttatttatttctctcattaccagtgcatacttacctatcatgttaaaacaagaaaaggagaaaagtggactttatatgtaacactttagaggcatagtggaatgtatattattattaacaaattagatagcaaagcattatatttgttatgctagaagactatggctgtgctaaaagaatataatatatgtcaacattgccagactgggcacttctcacaatattcccaaccaacaggaataaaactaaaggtcagaaaaaaaaaatagtaaattaaaacaaaattttatcacagcagaatttcttctcaaaaacaaaaaatggaaattaggctataattaaagtaagtttttcaatggcttgttagccaagcaaggaaaaccattaccaacagtagtt

SEQ ID NO: 437299 - DNA, 611 bp, Homo sapiens
ttcagttaaaatgagaggcacgtgacttttcctttccctgaattgtttgggcattatatatgacttccgttgcactacagtgtcagagttggttgctgcagagagcacatatatttcaaattgctgctctgcatgctacgaatcacaataacatagttactgtttgtcagtatgtgtgtgtgtgtgggcaccacacatattgccctggcatcttatttatttctctcattaccagtgcatacttacctatcatgttaaaacaagaaaaggagaaaagtggactttatatgtaacactttagargcatagtggaatgtatattattattaacaaattagatagcaaagcattatatttgttatgctagaagactatggctgtgctaaaagaatataatatatgtcaacattgccagactgggcacttctcacaatattcccaaccaacaggaataaaactaaaggtcagaaaaaaaaaatagtaaattaaaacaaaattttatcacagcagaatttcttctcaaaaacaaaaaatggaaattaggctataattaaagtaagtttttcaatggcttgttagccaagcaaggaaaaccattaccaacagtagtt

SEQ ID NO: 437300 - DNA, 616 bp, Homo sapiens
aacactttagaggcatagtggaatgtatattattattaacaaattagatagcaaagcattatatttgttatrctagaagactatggctgtgctaaaagaatataatatatgtcaacattgccagactgggcacttctcacaatattcccaaccaacaggaataaaactaaaggtcagaaaaaaaaaatagtaaattaaaacaaaattttatcacagcagaatttcttctcaaaaacaaaaaatggaaattaggctataattaaagtaagtttttcaatggcttgttagccaagcaaggaaaaccattaccaacagtagttaattaaattatgttttattatggtaaccaaagatgtgtccatagaaaataaactttaaaaaagactattagcctttcagtgagagtaattgctctaaaagttaaggacattgggagtaatatcaagtcattttggaaagaagggtgaatgatttttcatggttttcttaggcttttgatggatgaataggtgttaccagtactgttcagttgttacatattccagaagtcagtgctgagtttgaagtgattgaagaattagtatttatgcatagtctatgtgaaacaagtacaaga

SEQ ID NO: 437301 - DNA, 616 bp, Homo sapiens
aacactttagaggcatagtggaatgtatattattattaacaaattagatagcaaagcattatatttgttatgctagaagactatggctgtgctaaaagaatataatatatgtcaacattgccagactgggcacttctcacaatattcccaaccaacaggaataaaactaaaggtcagaaaaaaaaaatagtaaattaaaacaaaattttatcacagcagaatttcttctcaaaaacaaaaaatggaaattaggctataattaaagtaagtttttcaatggcttgttagccaagcaaggaaaaccattaccaacagtagttaattaaattatgttttattatggtaaccaaagatgtgtccrtagaaaataaactttaaaaaagactattagcctttcagtgagagtaattgctctaaaagttaaggacattgggagtaatatcaagtcattttggaaagaagggtgaatgatttttcatggttttcttaggcttttgatggatgaataggtgttaccagtactgttcagttgttacatattccagaagtcagtgctgagtttgaagtgattgaagaattagtatttatgcatagtctatgtgaaacaagtacaaga

SEQ ID NO: 437302 - DNA, 503 bp, Homo sapiens
gcctttcagtgagagtaattgctctaaaagttaaggacattgggagtaatatcaagtcattttggaaagaagggtgaatgatttttcatggttttcttaggcttttgatggatgaataggtgttaccagtactgttcagttgttacatattccagaagtcagtgctgagtttgaagtgattgaagaattagtrtttatgcatagtctatgtgaaacaagtacaagagaaaatattttcagaaaagttgagcaaacactaacttagtacaacctgaagtggaatccgctaagatgcgttacagttgatagtggcaaaaataactgtggagcagaaagacttgagttggacaaatttacaaagcttgttaaatgtcaggtgtttaaagcctgattatttattgtattatttattagcaggtactttgcagaaaatatttaaatctgtcatgttttagtgaacgattatataatagtgtcagcagtgattttgacttgcatttgtg

SEQ ID NO: 437303 - DNA, 574 bp, Homo sapiens
tctgctatgcagcacggcagccatacttaattatgatatattgcagtcctgaaaaatgaaaaggtagttgatgttaactgttttcaccacaaaaaacaataacttttagatcatgcatttgttaattagctagatttaatcattttataatctatatgtaattcaaaacatacataataaacttacacaatgttattttcaattaaaaacaaattttaaaattatgcttaaaaattttttttattcaagctagaatttgaatatagctaaatatcttcaataaataagaaaaattaaaataatttcaaaaattaaaactaagagatttgcttgccaataggagccgcataagagtgtactcaagaagaaaataacattttcctgtataaaggtaaaattaaaatgaaggggtgagagacagacctkgagaatacaaaatcatagtggacattgaactgaggaaagcacacagttcttggcaccaaaaaattaaaagatattgagatattataaaagtacaattcacatgttttatttaaatcagaaagaaaattatgtgctttttgtataattt

SEQ ID NO: 437304 - DNA, 444 bp, Homo sapiens
ttgctgtaatccatgggtaaaaacaatttagcttcatgcatgaaatataaaaaacagtaaattagcacagatttggtggggggatgaaggtgtgtctggttatatattcaaagtcatttatcattacactgtcycctaaataaaaatatgaaaggcaatgcaaacatcttgacacttagtattcttgtctaataaacacaagtgactgaggtaaaaaatattgctctaaaaccaccagatatgtttgattttataaaggaaatatcatctaggtgattaaatggttattactctctctacaaaactttagtaagtgaatccatttatcataaatgtcagaatcaaacaatgaaaagttcccaccaacatgcatctgcaccatcagcatggttgagttctgctgtcaagttgaaatcagaaaaaaaaaaaaaaaagaaattaaaa

SEQ ID NO: 437305 - DNA, 524 bp, Homo sapiens
gtgtgtctggttatatattcaaagtcatttatcattacactgtcccctaaataaaaatatgaaaggcaatgcaaacatcttgacacttagtattcttgtctaataaacacaagtgactgaggtaaaaaatattgctctaaaaccaccagatatgtttgattttataaaggaaatatcatytaggtgattaaatggttattactctctctacaaaactttagtaagtgaatccatttatcataaatgtcagaatcaaacaatgaaaagttcccaccaacatgcatctgcaccatcagcatggttgagttctgctgtcaagttgaaatcagaaaaaaaaaaaaaaaagaaattaaaacaaggggaggcaccaagatggccaaataggaacagctctggtctacagcttccagcactatcaacacagaagacagatgatttctgcatttccaactgaagtacctggaactggttggacagtgggtgtagcccacggagagggtgagctgaagcagggtggggcatca

SEQ ID NO: 437306 - DNA, 541 bp, Homo sapiens
attgccctcaactgttaagtcaaatgcttaatagctttgaaagttggcttttcctatagatttcataatattttgtaacaaattcacctaaaattacaaggcagaacagtgattataagtgaaccttatactgtggtaaggtcacttctacaagaataatgaatcatgaaaatcaagagaaagaacaaatagtaggaaaatatcttccaattccttttggcccttcatatttccacctaaactcataagcttttaaaaagataattatttttatttatacttaaaaagataatataggataatatttttgtaaaagagttcttgagatacagcactgaatrtaaagaaaatattggagcattcaactacatttgagaaataacttctgtttattaaaagataccgtaagaatgaaagcacaagccctaatgaatattcctgtttgatactaaaccaaagcttgagaagtggtagtttctcaagtttttcaagtggtttggtgcaatctgaagactgcaatcccatcaatgaactttatatc

SEQ ID NO: 437307 - DNA, 541 bp, Homo sapiens
attgccctcaactgttaagtcaaatgcttaatagctttgaaagttggcttttcctatagatttcataatattttgtaacaaattcacctaaaattacaaggcagaacagtgattataagtgaaccttatactgtggtaaggtcacttctacaagaataatgaatcatgaaaatcaagagaaagaacaaatagtaggaaaatatcttccaattccttttggcccttcatatttccacctaaactcataagcttttaaaaagataattatttttatttatacttaaaaagataatataggataatatttttgtaaaagagttcttgagatacagcactgaatgtaaagaaaatattggagcattcaactacatttgagaaataacttctgtttattaaaagatacygtaagaatgaaagcacaagccctaatgaatattcctgtttgatactaaaccaaagcttgagaagtggtagtttctcaagtttttcaagtggtttggtgcaatctgaagactgcaatcccatcaatgaactttatatc

SEQ ID NO: 437308 - DNA, 555 bp, Homo sapiens
tgccacaggtatacatatgtaacaaacctgcacgttgtgcacatgtaccctaaaacttaaagtataataataatacattttaaaaaagagaatttctttgttagttttcatcacaatgattgatctgtctaaagctgtcagtgggatgttcaaatcccgcactattttttttaaattatactttaaattttagggtacatatgcacaacgtgcaggttagttacatatgtatacacgtgccatgtttgtgtgctgcacccagtaactcgcccccactattattgtgtggctgtctaagtctttttgcaggtttagaagtatttgttttatgaatcagagtgccctaatgttggatgcctatattttcaggatttttatgtcttcttgttgaactaaatccttcatcattatgtaatgccctttattttttttttactgttcttrgtttaaagtctgttttatatgacatagcaatagcaacctctggtctttttgtttttcatttgtatgagagatctttctccaaccttttcctttcatcccatggatggcatt

SEQ ID NO: 437309 - DNA, 394 bp, Homo sapiens
gattgaggatatttttgtgtggattatattcccaacaacttttccaatttttttttttagatggagtctctctctgtcccacagggtggagttcaaaggcacaaccttggctcactgcaacctgcacctcccaggttcaagcaattatgctgcctcagcctcccaagtagttgggactacaggcatgcaccaccacacctggctaattacgyatttttagtagagactgggtttctacatgttggtcaggctggtctcgaactcccaacctcaggtgatcagcctgcctcagcctcccaaagtgctggggttagaggcatgagccaccacgcccagcctgttttaactctttgattatctcaatcttccaattccccccaaccaccagtgaatt

SEQ ID NO: 437310 - DNA, 394 bp, Homo sapiens
gattgaggatatttttgtgtggattatattcccaacaacttttccaatttttttttttagatggagtctctctctgtcccacagggtggagttcaaaggcacaaccttggctcactgcaacctgcacctcccaggttcaagcaattatgctgcctcagcctcccaagtagttgggactacaggcatgcaccaccacacctggctaattacgtatttttagtagagactgggtttctacatgttggtcaggctggtctcgaactcccaacctcaggtgatcagcctgcctcagcctcccaaagtgctggggttagaggcatgagccaccaygcccagcctgttttaactctttgattatctcaatcttccaattccccccaaccaccagtgaatt

SEQ ID NO: 437311 - DNA, 542 bp, Homo sapiens
tccagggctaattttaatcctgggcaggaattggacacattcccatggctaggatgagtccctggaggctggaggtgacaccaacccacaggacccagtgccaagataatcccccaaatgacccctatgcatgtggtctcatgagagcagggactggggctgatcttgggcctgagtctcttgagcatagaaggctcaactaagccctttctcaatctgtctcaattttagttatagggacactatggctagtgcagaggtcacgtgasagggaaaccccgagaggcaggaagttgggggcctttctggactgatgtcctagagctgagacaggaagtgaattccatgcagaagaaacagcaggtacaaggatcccaagggggagagaaacagcagtgaggttggagtgggtggggagggcaagaggccacagaggctgggccacactgggccttctgagctgcaggaggctctgggttttagtctaagagcaaagacgagctatgagagggttttgaggagagaagggatggggctgattt

SEQ ID NO: 437312 - DNA, 542 bp, Homo sapiens
tccagggctaattttaatcctgggcaggaattggacacattcccatggctaggatgagtccctggaggctggaggtgacaccaacccacaggacccagtgccaagataatcccccaaatgacccctatgcatgtggtctcatgagagcagggactggggctgatcttgggcctgagtctcttgagcatagaaggctcaactaagccctttctcaatctgtctcaattttagttatagggacactatggctagtgcagaggtcacgtgacagggaaaccccgagaggcaggaagttgggggcctttctggactgatgtcctagagctgagacaggaagtgaattccatgcagaagaaacagcaggtacaaggatcccaaggkggagagaaacagcagtgaggttggagtgggtggggagggcaagaggccacagaggctgggccacactgggccttctgagctgcaggaggctctgggttttagtctaagagcaaagacgagctatgagagggttttgaggagagaagggatggggctgattt

SEQ ID NO: 437313 - DNA, 621 bp, Homo sapiens
cccctagactagacagccctctagatcaggcctaggagtggacagtaaaatttagagagtgcaacaggtgaagagagacgtgactgactccctcctctttagcttcccttgacaacttcctctcagactgccccagctgatatcctgcccaaaaacacacatgcttgcaaatccagccactaaccattgacctgtcttggactcaagtgtgaagagtcagccaagaatgcagacctggaagcctagggtgtatgtgtgtgtatttgtagtcaagtgaaaatcccacccaagctccagacagaccctggtggcccattctgcagatgttggtgaggttggtatttctgtggaggtgtcagcaaaggttgaatgtgccaggcatgaggcaaaggccaaggtttagggggacttctacacacacaacttcccccttgcctcgtccagccagaaagcagagagcagtggcatctgcccagcacagagrcagatggatggatccactcacccgaggatagagcagggaagacgggacaggagaaatccaagagggcttctcaggggaggaggcatgtagtttggcttagatacagaggctagacaggggcctgagcagatgagtag

SEQ ID NO: 437314 - DNA, 587 bp, Homo sapiens
gtgttccagcctgggagacagaatgtaaaaaaatagtaataacagaaagtatacatcaatctcaattttttttaaaaaggcagatggttttacagttgttttatcaaaactcaaagaacaggaaagcccaaattatttcaacaaagtcagaccttttaaacagatgatagctgcccaagtcatttttatgaaacttctttatatcaaaacctaagtctaaaaagagaaaagtgttgaccttgatacgggctgtgttaggcagagatttcaatgaagtcctctctgaagaggtgacatttgatctgagacctgaagcaccagaaagaggcagccaagccaggaagaggcaggaatgggaaggtctagggaaagactggtcctggcaggcggaactgcagtggcaaaggcccagcggtgatcaggagcttggcatttgcaaaaataaagagtgtgtgtgaytggacagcgtgagcaagtgggcagaggaggagatcgtgatagggtgtgcattggtcaggccacctaggtcctggagcccacagtgagaagcatgggcttgactctgagggcaaaggagagccacggat

SEQ ID NO: 437315 - DNA, 368 bp, Homo sapiens
tttactatttgtttgttctttcttccttcaggatgttctgagaatccttctttttatcattctcctttctggttcaataacttttctcactattcttttgstgtagttttgtctcatgactaatttttagttctcattcatctcacaatttcttgatttccctttcattactaatggatgtttttgctggatatagaattctttgttgtcggttcttttaggacttgcaaaaatgttatgctgctttgttctggcctccatggtttcaggtgagaaatctgctgtcatttgagttgtttttcatctgtggataaggtgtcatttctcttatttatctcaaggtttttaagtttagtcattagttttca

SEQ ID NO: 437316 - DNA, 650 bp, Homo sapiens
tggtttgttcttttctagtgtgtttggctattttagcttgttaatttgagatctttctctctttttatgtaggcatttagtgttataaactctcctcttaacattgttttttctgtatcacagacgttttggtatgttatgtttctattttcatttgtttcaggaatttctttaaatttctgccttaattctgttatttacacaaaagtcattcacgagcagatgtttagtttccatgtacctctgtggttctgcgagttctcgatattgacttctaattttattccacagtggtctgagaagatacttaatatagttgtgatttttaaaaatttattgaggcttattttatgactgagcatgtggtcaattttggagaatgttccatgtgcaaatgagaaaaatgtacattctrtggtttctgggtggagtattctgtagatatctattaggtctgtttggtcaagagcccaatttgagtccacagtttcattgttagttttctgcctaataatctgcctaactaatctgcttactgctgtcggtggggtgttgaagtcctccacaattattgtacagctgtgtatctcttttcttaggtctagtaatatttattctaaaaatctgggtgctccaatgttggctgcata

SEQ ID NO: 437317 - DNA, 597 bp, Homo sapiens
ccaggtgtatgtgaagattccagtttcatagtaggcctttgttgactcactgatggagacgtacacctagtaaatgctgagtaggaatgaaaactytggacttgcattatacctttgtgaataccaccctggctcaaaaggttcctgcttttcacttggcctccactgacactgggatggaggggtggttaagttatcactgagcagtgctttgagtttggattctccagtaggcctctgctgtcatatctctgtagagggagggatagggatatgtccttatcattgggtgggtgttgaactcaggctccccactttttttccacccacactctagagggaggaagccacgttactgctcagtgggtatgagtgtcctgtgtccccacttggcctgctgtggtatcatgttgtctgtgggtaggagtggggaatggctgactatgtcctccttttaagtcttggcaaaaggtatatggcttggggttttatttgtaccctttggcttaaactggttggttgttgtctgtgagtttttttttcttggtagcctgccgcttccctgcttttttgacaagagacagcagaattttcttg

SEQ ID NO: 437318 - DNA, 535 bp, Homo sapiens
ctttgttgactcactgatggagacgtacacctagtaaatgctgagtaggaatgaaaactctggacttgcattatacctttgtgaataccaccctggctcaaaaggttcctgcttttcacttggcctccactgacactgggatggaggggtggttaagttatcactgagcagtgctttgagtttggattctccagtaggcctctgctgtcatatctctgtagagggagggatagggatatgtccttatcattgggtgggtgttgaactcaggctccccactttttttccacycacactctagagggaggaagccacgttactgctcagtgggtatgagtgtcctgtgtccccacttggcctgctgtggtatcatgttgtctgtgggtaggagtggggaatggctgactatgtcctccttttaagtcttggcaaaaggtatatggcttggggttttatttgtaccctttggcttaaactggttggttgttgtctgtgagtttttttttcttggtagcctgccgcttccctgcttttt

SEQ ID NO: 437319 - DNA, 535 bp, Homo sapiens
ctttgttgactcactgatggagacgtacacctagtaaatgctgagtaggaatgaaaactctggacttgcattatacctttgtgaataccaccctggctcaaaaggttcctgcttttcacttggcctccactgacactgggatggaggggtggttaagttatcactgagcagtgctttgagtttggattctccagtaggcctctgctgtcatatctctgtagagggagggatagggatatgtccttatcattgggtgggtgttgaactcaggctccccactttttttccacccacactctagagggaggaagccrcgttactgctcagtgggtatgagtgtcctgtgtccccacttggcctgctgtggtatcatgttgtctgtgggtaggagtggggaatggctgactatgtcctccttttaagtcttggcaaaaggtatatggcttggggttttatttgtaccctttggcttaaactggttggttgttgtctgtgagtttttttttcttggtagcctgccgcttccctgcttttt

SEQ ID NO: 437320 - DNA, 535 bp, Homo sapiens
ctttgttgactcactgatggagacgtacacctagtaaatgctgagtaggaatgaaaactctggacttgcattatacctttgtgaataccaccctggctcaaaaggttcctgcttttcacttggcctccactgacactgggatggaggggtggttaagttatcactgagcagtgctttgagtttggattctccagtaggcctctgctgtcatatctctgtagagggagggatagggatatgtccttatcattgggtgggtgttgaactcaggctccccactttttttccacccacactctagagggaggaagccaygttactgctcagtgggtatgagtgtcctgtgtccccacttggcctgctgtggtatcatgttgtctgtgggtaggagtggggaatggctgactatgtcctccttttaagtcttggcaaaaggtatatggcttggggttttatttgtaccctttggcttaaactggttggttgttgtctgtgagtttttttttcttggtagcctgccgcttccctgcttttt

SEQ ID NO: 437321 - DNA, 596 bp, Homo sapiens
attttgcctggaagtggaagtctgcatgcatttttgyctttttttccctgaatatagagttctgggatgattatgtttttcttcttcaagcatttaaaagatgttgcattgtttcctgtcttccatggtttctaatgagaagtcaggtgtggtgtcagtagtatcattattcccatgtatatagtaatgttttgatattctctggctgctttcaggattttctctttatatttggttttcagcagtctgactatgatgtgcctaggtgtggttttctttgtattcatcctgcttgggggttgctgagcttcttgaaagtgtaagttgatatttttcaccaaatttgtgaaaagcttgacttttatttcttattctttttctgtctcatttctctctcctcttcctctgtaactctaattacatgaatgttagtatatttgatattttgtaggttactgagggtctgttcgtcttcttcccagtgtttttacttttagttcctcagaatagatacactattcatgtattttcaaggagatgggccaattttctaccaatctcttgttaagcccatccactaaaattttcattgaaag

SEQ ID NO: 437322 - DNA, 596 bp, Homo sapiens
attttgcctggaagtggaagtctgcatgcatttttgtctttttttccstgaatatagagttctgggatgattatgtttttcttcttcaagcatttaaaagatgttgcattgtttcctgtcttccatggtttctaatgagaagtcaggtgtggtgtcagtagtatcattattcccatgtatatagtaatgttttgatattctctggctgctttcaggattttctctttatatttggttttcagcagtctgactatgatgtgcctaggtgtggttttctttgtattcatcctgcttgggggttgctgagcttcttgaaagtgtaagttgatatttttcaccaaatttgtgaaaagcttgacttttatttcttattctttttctgtctcatttctctctcctcttcctctgtaactctaattacatgaatgttagtatatttgatattttgtaggttactgagggtctgttcgtcttcttcccagtgtttttacttttagttcctcagaatagatacactattcatgtattttcaaggagatgggccaattttctaccaatctcttgttaagcccatccactaaaattttcattgaaag

SEQ ID NO: 437323 - DNA, 607 bp, Homo sapiens
tataatccacacaaaaatatcctcaatcacattagagtggccaacatgccaattcaagaaatttagagtacttttgtgaagtactatacaggacaacaatcaccaagacacagttatcagattctccaaggtcaacatgaaaataaaagccttaacaggagttagaggaaagggtcaggtcactttcgaagggaactctattaggctaacagtagacctatcagcagaaaccttacaatccttaaaatcttaggagcctattttcagcatccttaaagaaaataaattccaaccaataatttcatatcctgccaaactaagcttcwtaagcaaagaagaaataaaatcctttcctggcaagcaaatgctaagagaatttgttaccattacactagccttacaagaggttctttagggaaatgaaaaataaaacctgctaacataaaacacacttaaatacatagcccaaagaccatgtaaagcaactacacagttgaatctacgaaacaaccagctaacaaaacaatgacaagatacaaatctcacatatcgatattaaccttgaatgtaaatggtccaaacaccctacttaagagggacagagtgg

SEQ ID NO: 437324 - DNA, 607 bp, Homo sapiens
tataatccacacaaaaatatcctcaatcacattagagtggccaacatgccaattcaagaaatttagagtacttttgtgaagtactatacaggacaacaatcaccaagacacagttatcagattctccaaggtcaacatgaaaataaaagccttaacaggagttagaggaaagggtcaggtcactttcgaagggaactctattaggctaacagtagacctatcagcagaaaccttacaatccttaaaatcttaggagcctattttcagcatccttaaagaaaataaattccaaccaataatttcatatcctgccaaactaagcttcttaarcaaagaagaaataaaatcctttcctggcaagcaaatgctaagagaatttgttaccattacactagccttacaagaggttctttagggaaatgaaaaataaaacctgctaacataaaacacacttaaatacatagcccaaagaccatgtaaagcaactacacagttgaatctacgaaacaaccagctaacaaaacaatgacaagatacaaatctcacatatcgatattaaccttgaatgtaaatggtccaaacaccctacttaagagggacagagtgg

SEQ ID NO: 437325 - DNA, 607 bp, Homo sapiens
tataatccacacaaaaatatcctcaatcacattagagtggccaacatgccaattcaagaaatttagagtacttttgtgaagtactatacaggacaacaatcaccaagacacagttatcagattctccaaggtcaacatgaaaataaaagccttaacaggagttagaggaaagggtcaggtcactttcgaagggaactctattaggctaacagtagacctatcagcagaaaccttacaatccttaaaatcttaggagcctattttcagcatccttaaagaaaataaattccaaccaataatttcatatcctgccaaactaagcttcttaagcaaagaagaaataaaatcctttccyggcaagcaaatgctaagagaatttgttaccattacactagccttacaagaggttctttagggaaatgaaaaataaaacctgctaacataaaacacacttaaatacatagcccaaagaccatgtaaagcaactacacagttgaatctacgaaacaaccagctaacaaaacaatgacaagatacaaatctcacatatcgatattaaccttgaatgtaaatggtccaaacaccctacttaagagggacagagtgg

SEQ ID NO: 437326 - DNA, 398 bp, Homo sapiens
aaatcctttcctggcaagcaaatgctaagagaatttgttaccattacactagccttacaagaggttctttaggraaatgaaaaataaaacctgctaacataaaacacacttaaatacatagcccaaagaccatgtaaagcaactacacagttgaatctacgaaacaaccagctaacaaaacaatgacaagatacaaatctcacatatcgatattaaccttgaatgtaaatggtccaaacaccctacttaagagggacagagtggtaagttggaagactcaaccatatactgtcttcaagagacctatctaatatgtaatgccatccatgggatgaaaggaaagggttggagaaagatctctcatacaaatgaaaaacaaagagaccagaggttgctat

SEQ ID NO: 437327 - DNA, 634 bp, Homo sapiens
gtatataaagctgctgtgagcatttatgtaacatgcttcgttgtagatgtatcttttcatgtttcttgggtaaatacctaggactggaatttctgacttgttggaaataatattcttaactttggaaaacagtttcacagtttcttaaaaagtgtctgtatacttttccatttctagagatctgagagttccatttgctgtacattgttgccagcaytggatattgccactgtttctaaattttagccatctggttggcatttagtgacaatttattgtgggtttgattttgcattctctgatgattaattagattgagcttctttttatgtctttttttttgccatttgtgtatctttggtgacatgtctgttaaagtattttgtctctaccaccatttttttccaattgatttgcttgtcatcttcttgagttctaagttttttttaatatattattcacagaagtcagttattggagatgcattttataaatatttttgcctaatgtgtgacttgttttcatttatttagcaatgtttattgaacagcagagggtttcattttgatgacatttgtcatttgttaattttttgaagttgaaaaaattatgctctttatgctttattaaaaaa

SEQ ID NO: 437328 - DNA, 634 bp, Homo sapiens
gtatataaagctgctgtgagcatttatgtaacatgcttcgttgtagatgtatcttttcatgtttcttgggtaaatacctaggactggaatttctgacttgttggaaataatattcttaactttggaaaacagtttcacagtttcttaaaaagtgtctgtatacttttccatttctagagatctgagagttccatttgctgtacattgttgccagcactggmtattgccactgtttctaaattttagccatctggttggcatttagtgacaatttattgtgggtttgattttgcattctctgatgattaattagattgagcttctttttatgtctttttttttgccatttgtgtatctttggtgacatgtctgttaaagtattttgtctctaccaccatttttttccaattgatttgcttgtcatcttcttgagttctaagttttttttaatatattattcacagaagtcagttattggagatgcattttataaatatttttgcctaatgtgtgacttgttttcatttatttagcaatgtttattgaacagcagagggtttcattttgatgacatttgtcatttgttaattttttgaagttgaaaaaattatgctctttatgctttattaaaaaa

SEQ ID NO: 437329 - DNA, 634 bp, Homo sapiens
gtatataaagctgctgtgagcatttatgtaacatgcttcgttgtagatgtatcttttcatgtttcttgggtaaatacctaggactggaatttctgacttgttggaaataatattcttaactttggaaaacagtttcacagtttcttaaaaagtgtctgtatacttttccatttctagagatctgagagttccatttgctgtacattgttgccagcactggatattgccactrtttctaaattttagccatctggttggcatttagtgacaatttattgtgggtttgattttgcattctctgatgattaattagattgagcttctttttatgtctttttttttgccatttgtgtatctttggtgacatgtctgttaaagtattttgtctctaccaccatttttttccaattgatttgcttgtcatcttcttgagttctaagttttttttaatatattattcacagaagtcagttattggagatgcattttataaatatttttgcctaatgtgtgacttgttttcatttatttagcaatgtttattgaacagcagagggtttcattttgatgacatttgtcatttgttaattttttgaagttgaaaaaattatgctctttatgctttattaaaaaa

SEQ ID NO: 437330 - DNA, 634 bp, Homo sapiens
gtatataaagctgctgtgagcatttatgtaacatgcttcgttgtagatgtatcttttcatgtttcttgggtaaatacctaggactggaatttctgacttgttggaaataatattcttaactttggaaaacagtttcacagtttcttaaaaagtgtctgtatacttttccatttctagagatctgagagttccatttgctgtacattgttgccagcactggatattgccactgtttctaaattttagccatctggttggcatttagtgacaatttattgtgggtttgattttgcattctctgatgattaattagattgagcytctttttatgtctttttttttgccatttgtgtatctttggtgacatgtctgttaaagtattttgtctctaccaccatttttttccaattgatttgcttgtcatcttcttgagttctaagttttttttaatatattattcacagaagtcagttattggagatgcattttataaatatttttgcctaatgtgtgacttgttttcatttatttagcaatgtttattgaacagcagagggtttcattttgatgacatttgtcatttgttaattttttgaagttgaaaaaattatgctctttatgctttattaaaaaa

SEQ ID NO: 437331 - DNA, 398 bp, Homo sapiens
aaatcctttcctggcaagcaaatgctaagagaatttgttaccattacactagccttacaagaggttctttagggaaatgaaaaataaaacctgctaacataaaacacacttaaatacatagcccaaagaccatgtaaagcaactacacagttgaatctacraaacaaccagctaacaaaacaatgacaagatacaaatctcacatatcgatattaaccttgaatgtaaatggtccaaacaccctacttaagagggacagagtggtaagttggaagactcaaccatatactgtcttcaagagacctatctaatatgtaatgccatccatgggatgaaaggaaagggttggagaaagatctctcatacaaatgaaaaacaaagagaccagaggttgctat

SEQ ID NO: 437332 - DNA, 398 bp, Homo sapiens
aaatcctttcctggcaagcaaatgctaagagaatttgttaccattacactagccttacaagaggttctttagggaaatgaaaaataaaacctgctaacataaaacacacttaaatacatagcccaaagaccatgtaaagcaactacacagttgaatctacgaaacaaccagctaacaaaacaatgacaagatacaaatctcacatatcgatattaaccttgaatgtaaatggtccaaacacccyacttaagagggacagagtggtaagttggaagactcaaccatatactgtcttcaagagacctatctaatatgtaatgccatccatgggatgaaaggaaagggttggagaaagatctctcatacaaatgaaaaacaaagagaccagaggttgctat

SEQ ID NO: 437333 - DNA, 535 bp, Homo sapiens
ttaaaagaagaaaagattattgtttttgcttcaatttcaaagtaatcaaaactaagtgtactagtattaaatagttaaagctagtagatcaataatgaaatttaatgttattgctttttgctatattttttgagtttactagtgatgtaaaagatttgagttatttgctgtgattatataaatactcttttgatgcataaatcagctgttaacatcatgttaatttgtgacattaataattttactgatagcccttctgtgattcttatttttggyagtggtttttacctggtaagtagcattttgtcagctggcaggtactggaaatctgctttatcacttctttttttaagaaaagtggaaaacacaaacagtttgttcaccaaagttatatttcaaggattccattcaaccagaatctggttcaccttattgactcaacttgggggtatatgtactagatttttacatacatctgtttggagaaactcgttttatctgtgtaatgtttgtaagaccagaagttcttttactg

SEQ ID NO: 437334 - DNA, 371 bp, Homo sapiens
cataaatcagctgttaacatcatgttaatttgtgacattaataattttactgatagcccttctgtgattcttatttttggcagtggtttttacctggtaagtagcattttgtcagctggcaggtactggaaatmtgctttatcacttctttttttaagaaaagtggaaaacacaaacagtttgttcaccaaagttatatttcaaggattccattcaaccagaatctggttcaccttattgactcaacttgggggtatatgtactagatttttacatacatctgtttggagaaactcgttttatctgtgtaatgtttgtaagaccagaagttcttttactgttcttgaaataaaacttttaagaagctgagt

SEQ ID NO: 437335 - DNA, 261 bp, Homo sapiens
atatttcaaggattccattcaaccagaatctggttcaccttattgactcaacttgggggtatatgtactagatttttacatacatctgtttggagaaactcgttttatctgtgtaatgtttgtaagaccagaagttcttttactgttcttgaaataaaacttttaagaagctgagtattyttctgttagtttcaaatttggactaaaattacaccaaggttttggactaaagaggaagcaaataatctgttcttatgttct

SEQ ID NO: 437336 - DNA, 571 bp, Homo sapiens
tggctaactttatgtcttccttaaattatgaaattctataaagtatccttstctattttaaaattatactcatttttataacttacatgctttatttgtatatatccaggatactagatatttgtaatccaaattggaggttattttttgtcatttgatttttttttctgtaatgtgtgttctcaccacatagaagtttttacatttttatgtagtcagatttattcatgtttttatttatggttatgttaaagattatagctattagggacctatttcttcagggtttataatttatgtatgttgttacaaatagagaaattactttttctttgacccaataggtagagggcacttttgtggactcagaaagcttgcctctcctattttattttaggaaaatttctgagattctgcctcctcatttccaagccagagtttaaaatatttacatttttacttcatagtgttaagacattgtgtaatgtaagtataatgtgtaaaaaaaaatcttaaaaatctaatagtgatttggcagagaccaaagcatggagggccttgaaatgctgct

SEQ ID NO: 437337 - DNA, 571 bp, Homo sapiens
tggctaactttatgtcttccttaaattatgaaattctataaagtatccttgtctattttaaaattatactcatttttataacttacatgctttatttgtatatatccaggatactagatatttgtaatccaaattggaggttattttttgtcatttgatttttttttctgyaatgtgtgttctcaccacatagaagtttttacatttttatgtagtcagatttattcatgtttttatttatggttatgttaaagattatagctattagggacctatttcttcagggtttataatttatgtatgttgttacaaatagagaaattactttttctttgacccaataggtagagggcacttttgtggactcagaaagcttgcctctcctattttattttaggaaaatttctgagattctgcctcctcatttccaagccagagtttaaaatatttacatttttacttcatagtgttaagacattgtgtaatgtaagtataatgtgtaaaaaaaaatcttaaaaatctaatagtgatttggcagagaccaaagcatggagggccttgaaatgctgct

SEQ ID NO: 437338 - DNA, 628 bp, Homo sapiens
ttacccatagtttattggctaactttatgtcttccttaaattatgaaattctataaagtatccttgtctattttaaaattatactcatttttataacttacatgctttatttgtatatatccaggatactagatatttgtaatccaaattggaggttattttttgtcatttgatttttttttctgtaatgtgtgttctcaccacatagaagtttttacatttttatgtagtcagatttattcatgtttttatttatggttatgttaaagattatagctattagggacctatttcttcagggtttataatttatgtatgttgttacaaatagagaaattactttttctttgacccaataggtagagggcayttttgtggactcagaaagcttgcctctcctattttattttaggaaaatttctgagattctgcctcctcatttccaagccagagtttaaaatatttacatttttacttcatagtgttaagacattgtgtaatgtaagtataatgtgtaaaaaaaaatcttaaaaatctaatagtgatttggcagagaccaaagcatggagggccttgaaatgctgctctatttgttatctattattataaagcaactaccataaactta

SEQ ID NO: 437339 - DNA, 571 bp, Homo sapiens
tggctaactttatgtcttccttaaattatgaaattctataaagtatccttgtctattttaaaattatactcatttttataacttacatgctttatttgtatatatccaggatactagatatttgtaatccaaattggaggttattttttgtcatttgatttttttttctgtaatgtgtgttctcaccacatagaagtttttacatttttatgtagtcagatttattcatgtttttatttatggttatgttaaagattatagctattagggacctatttcttcagggtttataatttatgtatgttgttacaaatagagaaattactttttctttgacccaataggtagagggcacttttgtggactcagaaagcttgcctctcctattttattttaggaaaatttctgagattctgcctcctcatttccaagccagagtttaaaatatttacatttttacttcatagtgttaagacattgtgtaatgtaagtataatgtgtaaaaaaaaatyttaaaaatctaatagtgatttggcagagaccaaagcatggagggccttgaaatgctgct

SEQ ID NO: 437340 - DNA, 571 bp, Homo sapiens
tggctaactttatgtcttccttaaattatgaaattctataaagtatccttgtctattttaaaattatactcatttttataacttacatgctttatttgtatatatccaggatactagatatttgtaatccaaattggaggttattttttgtcatttgatttttttttctgtaatgtgtgttctcaccacatagaagtttttacatttttatgtagtcagatttattcatgtttttatttatggttatgttaaagattatagctattagggacctatttcttcagggtttataatttatgtatgttgttacaaatagagaaattactttttctttgacccaataggtagagggcacttttgtggactcagaaagcttgcctctcctattttattttaggaaaatttctgagattctgcctcctcatttccaagccagagtttaaaatatttacatttttacttcatagtgttaagacattgtgtaatgtaagtataatgtgtaaaaaaaaatcttaaaamtctaatagtgatttggcagagaccaaagcatggagggccttgaaatgctgct

SEQ ID NO: 437341 - DNA, 564 bp, Homo sapiens
tccaaattggaggttattttttgtcatttgatttttttttctgtaatgtgtgttctcaccacatagaagtttttacatttttatgtagtcagatttattcatgtttttatttatggttatgttaaagattatagctattagggacctatttcttcagggtttataatttatgtatgttgttacaaatagagaaattactttttctttgacccaataggtagagggcacttttgtggactcagaaagcttgcctctcctattttattttaggaaaatttctgagattctgcctcctcatttccaagccagagtttaaaatatttacatttttacttcatagtgttaagacattgtgtaatgtaagtataatgtgtaaaaaaaaatcttaaaaatctaatagtgatttggcagagaccaamgcatggagggccttgaaatgctgctctatttgttatctattattataaagcaactaccataaacttaatatcttaaaacagcacccatttacttaggtcagaactcagggcaggctcaactgtgctctctgtttaaggtctcaca

SEQ ID NO: 437342 - DNA, 628 bp, Homo sapiens
ttacccatagtttattggctaactttatgtcttccttaaattatgaaattctataaagtatccttgtctattttaaaattatactcatttttataacttacatgctttatttgtatatatccaggatactagatatttgtaatccaaattggaggttattttttgtcatttgatttttttttctgtaatgtgtgttctcaccacatagaagtttttacatttttatgtagtcagatttattcatgtttttatttatggttatgttaaagattatagctattagggacctatttcttcagggtttataatttatgtatgttgttacaaatagagaaattactttttctttgacccaataggtagagggcacttttgtggactcagaaagcttgcctctcctattttattttaggaaaatttctgagattctgcctcctcatttccaagccagagtttaaaatatttacatttttacttcatagtgttaagacattgtgtaatgtaagtataatgtgtaaaaaaaaatcttaaaaatctaatagtgatttggcagagaccaaagcakggagggccttgaaatgctgctctatttgttatctattattataaagcaactaccataaactta

SEQ ID NO: 437343 - DNA, 564 bp, Homo sapiens
tccaaattggaggttattttttgtcatttgatttttttttctgtaatgtgtgttctcaccacatagaagtttttacatttttatgtagtcagatttattcatgtttttatttatggttatgttaaagattatagctattagggacctatttcttcagggtttataatttatgtatgttgttacaaatagagaaattactttttctttgacccaataggtagagggcacttttgtggactcagaaagcttgcctctcctattttattttaggaaaatttctgagattctgcctcctcatttccaagccagagtttaaaatatttacatttttacttcatagtgttaagacattgtgtaatgtaagtataatgtgtaaaaaaaaatcttaaaaatctaatagtgatttggcagagaccaaagcatggagggccttgaaatgytgctctatttgttatctattattataaagcaactaccataaacttaatatcttaaaacagcacccatttacttaggtcagaactcagggcaggctcaactgtgctctctgtttaaggtctcaca

SEQ ID NO: 437344 - DNA, 564 bp, Homo sapiens
tccaaattggaggttattttttgtcatttgatttttttttctgtaatgtgtgttctcaccacatagaagtttttacatttttatgtagtcagatttattcatgtttttatttatggttatgttaaagattatagctattagggacctatttcttcagggtttataatttatgtatgttgttacaaatagagaaattactttttctttgacccaataggtagagggcacttttgtggactcagaaagcttgcctctcctattttattttaggaaaatttctgagattctgcctcctcatttccaagccagagtttaaaatatttacatttttacttcatagtgttaagacattgtgtaatgtaagtataatgtgtaaaaaaaaatcttaaaaatctaatagtgatttggcagagaccaaagcatggagggccttgaaatgctgctctatttrttatctattattataaagcaactaccataaacttaatatcttaaaacagcacccatttacttaggtcagaactcagggcaggctcaactgtgctctctgtttaaggtctcaca

SEQ ID NO: 437345 - DNA, 564 bp, Homo sapiens
tccaaattggaggttattttttgtcatttgatttttttttctgtaatgtgtgttctcaccacatagaagtttttacatttttatgtagtcagatttattcatgtttttatttatggttatgttaaagattatagctattagggacctatttcttcagggtttataatttatgtatgttgttacaaatagagaaattactttttctttgacccaataggtagagggcacttttgtggactcagaaagcttgcctctcctattttattttaggaaaatttctgagattctgcctcctcatttccaagccagagtttaaaatatttacatttttacttcatagtgttaagacattgtgtaatgtaagtataatgtgtaaaaaaaaatcttaaaaatctaatagtgatttggcagagaccaaagcatggagggccttgaaatgctgctctatttgttatctattattataaagcaaytaccataaacttaatatcttaaaacagcacccatttacttaggtcagaactcagggcaggctcaactgtgctctctgtttaaggtctcaca

SEQ ID NO: 437346 - DNA, 608 bp, Homo sapiens
tgattaacctggaccagaacaagagtcataagccagtcattgaactgttcattacttcaggtcaattcatatacagaataatttcatagattaggttttatttcagtcagctttatttcactttctaaagygaagagttgtttaaacctcggatctcattaacagcattttaataaacacagtattagggtgggtttacttccctagatggcgaatctcatggattatatgttgattcttattggcttaatttttgaatcgggcattatttattgtaattctttagtcttacagttttgcatgtttgaagctatattttttcctctgaataccacatttgccacatctcagagatatttttgatgtttcttaatcatttaaaaataatacatgatttttcttcttgattgaaactctgcccgttatatagaaaggacttttaaattttgccagtggatagatttgggagtttatccttatattatgaatttctaatttttattgtattaggtctagggacgcatctgcttttactggatataacctaggaaatacctgctttttaaaatatgtggacatttctttatgaccatacatgtgaagttttt

SEQ ID NO: 437347 - DNA, 608 bp, Homo sapiens
tgattaacctggaccagaacaagagtcataagccagtcattgaactgttcattacttcaggtcaattcatatacagaataatttcatagattaggttttatttcagtcagctttatttcactttctaaagtgaagagttgtttaaacctcggatctcattaacagcattttaataaacacagtattagggtgggtttacttccctagatggcgaatctcatggattatatgttgattcttattggcttaatttttgaatcgrgcattatttattgtaattctttagtcttacagttttgcatgtttgaagctatattttttcctctgaataccacatttgccacatctcagagatatttttgatgtttcttaatcatttaaaaataatacatgatttttcttcttgattgaaactctgcccgttatatagaaaggacttttaaattttgccagtggatagatttgggagtttatccttatattatgaatttctaatttttattgtattaggtctagggacgcatctgcttttactggatataacctaggaaatacctgctttttaaaatatgtggacatttctttatgaccatacatgtgaagttttt

SEQ ID NO: 437348 - DNA, 608 bp, Homo sapiens
tgattaacctggaccagaacaagagtcataagccagtcattgaactgttcattacttcaggtcaattcatatacagaataatttcatagattaggttttatttcagtcagctttatttcactttctaaagtgaagagttgtttaaacctcggatctcattaacagcattttaataaacacagtattagggtgggtttacttccctagatggcgaatctcatggattatatgttgattcttattggcttaatttttgaatcgggcattatttattgtaattctttagtcttacagttttgcatgtttgaagctatattttttcctctgaataccacatttgccacatctcagagatatttttgatgtttcttaatcatttaaaaataatacatgatttttcttcttgattgaaactctgcccgttatatagaaaggacttttaaattttgccagtggrtagatttgggagtttatccttatattatgaatttctaatttttattgtattaggtctagggacgcatctgcttttactggatataacctaggaaatacctgctttttaaaatatgtggacatttctttatgaccatacatgtgaagttttt

SEQ ID NO: 437349 - DNA, 626 bp, Homo sapiens
atctacttaatatcctcatttgagagctatgttaaagtctaatctatgcatgttatttctactcagctttactttctatatgtgacatatatttattaggtgtataaactttaatgactatggcttcttttggaatttacactgcaacataaaacttatgttattataaattatctttgacttrttcactgctttttagtttaaattctgtttctttgcaattattgctatacctgcattttttggatagcgtttgtgttttttcccctcaagtctgtttttgaattgtgtatgtcactgtgcattgtgcatatgtatgaatatatatgtatgtatatatatatatatacagccgctcctgtgttgctgtaaagaaatacctgtcgctgggtaattgataacaaaaagaggtttaattggctcacgattctgcagacagtacaggaagtgtggtgctggcatctgcttctggtgagggcttcaagaagtttgaaatcatttagccggttgcggtgacaggtgcctgtaatccctgctactcaggagactgaggcaggagaatcgcttgaacctggggggcggaggttgcagtgagccgagatcgggccattgcactccagcctggg

SEQ ID NO: 437350 - DNA, 626 bp, Homo sapiens
atctacttaatatcctcatttgagagctatgttaaagtctaatctatgcatgttatttctactcagctttactttctatatgtgacatatatttattaggtgtataaactttaatgactatggcttcttttggaatttacactgcaacataaaacttatgttattataaattatctttgacttgttcactgctttttagtttaaattctgtttctttgcaattattgctatacctgcattttttggatagcgtttgtgttttttcccctcaagtctgtttttgaattgtgtatgtcactgtgcattgtgcatatgtatgaatatatatgtatgtatatatatatatatacagccgctcctgtgttgctgtaaagaaatacctgtcgctgggtaattgataacaaaaagaggtttaattggctcacgattctgcagacagtacaggaagtgtggtgctggcatctgcttctggtgagggcttcaagaagtttgaaatcatttagccggktgcggtgacaggtgcctgtaatccctgctactcaggagactgaggcaggagaatcgcttgaacctggggggcggaggttgcagtgagccgagatcgggccattgcactccagcctggg

SEQ ID NO: 437351 - DNA, 626 bp, Homo sapiens
atctacttaatatcctcatttgagagctatgttaaagtctaatctatgcatgttatttctactcagctttactttctatatgtgacatatatttattaggtgtataaactttaatgactatggcttcttttggaatttacactgcaacataaaacttatgttattataaattatctttgacttgttcactgctttttagtttaaattctgtttctttgcaattattgctatacctgcattttttggatagcgtttgtgttttttcccctcaagtctgtttttgaattgtgtatgtcactgtgcattgtgcatatgtatgaatatatatgtatgtatatatatatatatacagccgctcctgtgttgctgtaaagaaatacctgtcgctgggtaattgataacaaaaagaggtttaattggctcacgattctgcagacagtacaggaagtgtggtgctggcatctgcttctggtgagggcttcaagaagtttgaaatcatttagccggttgcggtgrcaggtgcctgtaatccctgctactcaggagactgaggcaggagaatcgcttgaacctggggggcggaggttgcagtgagccgagatcgggccattgcactccagcctggg

SEQ ID NO: 437352 - DNA, 626 bp, Homo sapiens
atctacttaatatcctcatttgagagctatgttaaagtctaatctatgcatgttatttctactcagctttactttctatatgtgacatatatttattaggtgtataaactttaatgactatggcttcttttggaatttacactgcaacataaaacttatgttattataaattatctttgacttgttcactgctttttagtttaaattctgtttctttgcaattattgctatacctgcattttttggatagcgtttgtgttttttcccctcaagtctgtttttgaattgtgtatgtcactgtgcattgtgcatatgtatgaatatatatgtatgtatatatatatatatacagccgctcctgtgttgctgtaaagaaatacctgtcgctgggtaattgataacaaaaagaggtttaattggctcacgattctgcagacagtacaggaagtgtggtgctggcatctgcttctggtgagggcttcaagaagtttgaaatcatttagccggttgcggtgacaggtgcctgtaatcccwgctactcaggagactgaggcaggagaatcgcttgaacctggggggcggaggttgcagtgagccgagatcgggccattgcactccagcctggg

SEQ ID NO: 437353 - DNA, 507 bp, Homo sapiens
aagaacaggagcagaggagatgggtggagatgccatacactttygaacaaccagatcttgtgagaactcactcgttatcgcaaggacagcaccaagccatgagggatttgcccccatgacccaaacacctcccataaggccccacctccaacatcggggattacatttcaacatgaaattttggcggggacaaatatccaaagtatttcattcattttatattatatatgtgtacacacacacacatacataaatgaagtctgtagtatagttacatgtaaaatatgtgtatgtgttaagtagtatattttgcatattttgaaagttgctgtcttttactagagaatttaaactatttacatttgttatccgtggacttgaatgttagcttaacagacattaaaattttggttttaaataatttcttatagacctaggaaaataatgattttttggggggtttctttttaattcagtattggtaatgagaactgatgcccgattctt

SEQ ID NO: 437354 - DNA, 521 bp, Homo sapiens
aagaacaggagcagaggagatgggtggagatgccatacactttcgaacaaccagatcttgtgagaactcactcgttatcgcaaggacagcaccaagccatgagggatttgcccccatgacccaaacacctcccataaggccccacctccaacatcggggattacatttcaacatgaaattttggcggggacaaatatccaaagtatttcattcattttatattatatatgtgtacacacacacacatacataaatgaagtctgtagtayagttacatgtaaaatatgtgtatgtgttaagtagtatattttgcatattttgaaagttgctgtcttttactagagaatttaaactatttacatttgttatccgtggacttgaatgttagcttaacagacattaaaattttggttttaaataatttcttatagacctaggaaaataatgattttttggggggtttctttttaattcagtattggtaatgagaactgatgcccgattcttctttttttgtaatg

SEQ ID NO: 437355 - DNA, 507 bp, Homo sapiens
aagaacaggagcagaggagatgggtggagatgccatacactttcgaacaaccagatcttgtgagaactcactcgttatcgcaaggacagcaccaagccatgagggatttgcccccatgacccaaacacctcccataaggccccacctccaacatcggggattacatttcaacatgaaattttggcggggacaaatatccaaagtatttcattcattttatattatatatgtgtacacacacacacatacataaatgaagtctgtagtatagttacatgtaaaatatgtgtatgtgttaagtagtatattttgcatattttgaaagttgctgtcttttactagagaatttaaactatttacatttgttatccrtggacttgaatgttagcttaacagacattaaaattttggttttaaataatttcttatagacctaggaaaataatgattttttggggggtttctttttaattcagtattggtaatgagaactgatgcccgattctt

SEQ ID NO: 437356 - DNA, 521 bp, Homo sapiens
aagaacaggagcagaggagatgggtggagatgccatacactttcgaacaaccagatcttgtgagaactcactcgttatcgcaaggacagcaccaagccatgagggatttgcccccatgacccaaacacctcccataaggccccacctccaacatcggggattacatttcaacatgaaattttggcggggacaaatatccaaagtatttcattcattttatattatatatgtgtacacacacacacatacataaatgaagtctgtagtatagttacatgtaaaatatgtgtatgtgttaagtagtatattttgcatattttgaaagttgctgtcttttactagagaatttaaactatttacatttgttatccgtggacttgaatgttagcttaacagacattaaaattttggttttaaataatttcttatagacctaggaaaataatgrttttttggggggtttctttttaattcagtattggtaatgagaactgatgcccgattcttctttttttgtaatg

SEQ ID NO: 437357 - DNA, 497 bp, Homo sapiens
gttaattagctttgtaattgttacttatgtattatatattacttattatattattaatattttaacttgcttgatttcttttatgtgtagtgtataagagtgttgacatttgagaagttccctgtagaaatctattctttgatattgtctatgattttacaagtcctttttatttggtttaggaagatacattccagactgtgtatatatagtaaacgttttcttttaatgccgagtgctcttcattagctatttaattgtaacatatgggtttgaagcgttcccctaaatgtagtgttttattttccttcttttattcactgatacctttatatgatattgtaaattagtatgttagatatattccagtactyttcgtaatagtttagctaatataatatttttcattgcagatatgattaagagaacatattggtgtttctaaaatgagaaagacattgagaagctggtcaatttaaattattttctgttattat

SEQ ID NO: 437358 - DNA, 497 bp, Homo sapiens
gttaattagctttgtaattgttacttatgtattatatattacttattatattattaatattttaacttgcttgatttcttttatgtgtagtgtataagagtgttgacatttgagaagttccctgtagaaatctattctttgatattgtctatgattttacaagtcctttttatttggtttaggaagatacattccagactgtgtatatatagtaaacgttttcttttaatgccgagtgctcttcattagctatttaattgtaacatatgggtttgaagcgttcccctaaatgtagtgttttattttccttcttttattcactgatacctttatatgatattgtaaattagtatgttagatatattccagtacttttcrtaatagtttagctaatataatatttttcattgcagatatgattaagagaacatattggtgtttctaaaatgagaaagacattgagaagctggtcaatttaaattattttctgttattat

SEQ ID NO: 437359 - DNA, 448 bp, Homo sapiens
gctggtcaatttaaattattttctgttattatgtacttacctctcattatattttatctgccaagattatttttagtgcaaaaggcttctgmaaaacttgccatatggtatcaaaataagcgattttagattttaacaatttagcagaaattagttatgctaatgagttgttataaatatttttcaacagattgattgtactttttctttcgacatttatgtgaactttctgtttggacatttagactaccaaggtgttgtatttgcagttaattctgggttctgttaatgcactaaacatatttagataccttgggagttacaatataaaaaattacctgttttgtaaaagctggttattacactttatcaatgaagacaaatattttttctgtgtttctaatacattaatacccttgagtgccaaaatagcactgaaatgttattc

SEQ ID NO: 437360 - DNA, 448 bp, Homo sapiens
gctggtcaatttaaattattttctgttattatgtacttacctctcattatattttatctgccaagattatttttagtgcaaaaggcttctgcaaaacttgccatatggtatcaaaataagcgattttagattttaacaatttagcagaaattagttatgctaatgagttgttataaatatttttcaacagattgattgtactttttctttcgacatttaygtgaactttctgtttggacatttagactaccaaggtgttgtatttgcagttaattctgggttctgttaatgcactaaacatatttagataccttgggagttacaatataaaaaattacctgttttgtaaaagctggttattacactttatcaatgaagacaaatattttttctgtgtttctaatacattaatacccttgagtgccaaaatagcactgaaatgttattc

SEQ ID NO: 437361 - DNA, 520 bp, Homo sapiens
ctactttctactgaaaactgtgttctaatagtgtataccttcagttacatgttagyaatcataaattcgtttgtaaaataataaactaaatactgacgtgagataagtcgctgttgttgatcatgtatataatgaaaagtttatgggcacataacagttaaaagatatactaaagttatgagtactctgcctttttccaaaataggtttatggagactcataaaaatacataagcaataggataaaactaaaaataagtaaggaaatttggcaatggaaaatttagataggataaatatgaagataatagagagtccccccaaaaatatgtaattccagtcaaaccacaaatttggccccataccttttcaacagtcaatacaaagaaggaaatatgagcccttaatctgattcttactatttataacatcacttgatataatgatataataataagacatcccttgatagaatgcaatgaaaaattgtcttaaagtagccaccttgcagtagaaaaata

SEQ ID NO: 437362 - DNA, 520 bp, Homo sapiens
ctactttctactgaaaactgtgttctaatagtgtataccttcagttacatgttagtaatcataaatycgtttgtaaaataataaactaaatactgacgtgagataagtcgctgttgttgatcatgtatataatgaaaagtttatgggcacataacagttaaaagatatactaaagttatgagtactctgcctttttccaaaataggtttatggagactcataaaaatacataagcaataggataaaactaaaaataagtaaggaaatttggcaatggaaaatttagataggataaatatgaagataatagagagtccccccaaaaatatgtaattccagtcaaaccacaaatttggccccataccttttcaacagtcaatacaaagaaggaaatatgagcccttaatctgattcttactatttataacatcacttgatataatgatataataataagacatcccttgatagaatgcaatgaaaaattgtcttaaagtagccaccttgcagtagaaaaata

SEQ ID NO: 437363 - DNA, 520 bp, Homo sapiens
ctactttctactgaaaactgtgttctaatagtgtataccttcagttacatgttagtaatcataaattmgtttgtaaaataataaactaaatactgacgtgagataagtcgctgttgttgatcatgtatataatgaaaagtttatgggcacataacagttaaaagatatactaaagttatgagtactctgcctttttccaaaataggtttatggagactcataaaaatacataagcaataggataaaactaaaaataagtaaggaaatttggcaatggaaaatttagataggataaatatgaagataatagagagtccccccaaaaatatgtaattccagtcaaaccacaaatttggccccataccttttcaacagtcaatacaaagaaggaaatatgagcccttaatctgattcttactatttataacatcacttgatataatgatataataataagacatcccttgatagaatgcaatgaaaaattgtcttaaagtagccaccttgcagtagaaaaata

SEQ ID NO: 437364 - DNA, 520 bp, Homo sapiens
ctactttctactgaaaactgtgttctaatagtgtataccttcagttacatgttagtaatcataaattcgtttgtaaaataataaactaaatactgacgtgagataagtcgctgttgttgatcatgtatataatgaaaagtttatgggcacataacagttaaaagatatactaaagttatgagtactctgcctttttccaaaataggtttatggagactcataaaaatacataagcaataggataaaactaaaaataagtaaggaaatttggcaatggaaaatttagataggataaatatgaagataatagagagtccccccaaaaatatgtaattccagtcaaaccacaaatttggccccataccttttcaacagtcaatacaaagaaggamatatgagcccttaatctgattcttactatttataacatcacttgatataatgatataataataagacatcccttgatagaatgcaatgaaaaattgtcttaaagtagccaccttgcagtagaaaaata

SEQ ID NO: 437365 - DNA, 480 bp, Homo sapiens
aattgtcttaaagtagccaccttgcagtagaaaaataccagtttcatagggctgtttcttatagcagccttcaaactaagtcagtggtataaaatcaaggcctaaatgactaaattagatttctttgggtttttttttttttttttttttttcgagatggagtctcgctctgtcaccctgyctggaatgcagtggcatggccttggctcactgcaaactccgctttccgggttcaggtgatttctcctgcctcagcctcccaagtaggtgggattacaggcgcacaccataacacccagctaattttttgtatttttagtagagacggggtttcactatgttggctagatttgtctcggactcctgacctcgtgatctgcccgtctcagcctcccaaactgctgggatacagaggtgtgagccatcgtgcccggcctccttggggatcttaaacagtgcattctaactacacagcgttct

SEQ ID NO: 437366 - DNA, 480 bp, Homo sapiens
aattgtcttaaagtagccaccttgcagtagaaaaataccagtttcatagggctgtttcttatagcagccttcaaactaagtcagtggtataaaatcaaggcctaaatgactaaattagatttctttgggtttttttttttttttttttttttcgagatggagtctcgctctgtcaccctgtctggaatgcagtggcatggccttggctcactgmaaactccgctttccgggttcaggtgatttctcctgcctcagcctcccaagtaggtgggattacaggcgcacaccataacacccagctaattttttgtatttttagtagagacggggtttcactatgttggctagatttgtctcggactcctgacctcgtgatctgcccgtctcagcctcccaaactgctgggatacagaggtgtgagccatcgtgcccggcctccttggggatcttaaacagtgcattctaactacacagcgttct

SEQ ID NO: 437367 - DNA, 480 bp, Homo sapiens
aattgtcttaaagtagccaccttgcagtagaaaaataccagtttcatagggctgtttcttatagcagccttcaaactaagtcagtggtataaaatcaaggcctaaatgactaaattagatttctttgggtttttttttttttttttttttttcgagatggagtctcgctctgtcaccctgtctggaatgcagtggcatggccttggctcactgcaaactccgctttccgggttcaggtgatttctcctgcctcagcctcccaagtaggtgggattacaggcgcacaccataacacccrgctaattttttgtatttttagtagagacggggtttcactatgttggctagatttgtctcggactcctgacctcgtgatctgcccgtctcagcctcccaaactgctgggatacagaggtgtgagccatcgtgcccggcctccttggggatcttaaacagtgcattctaactacacagcgttct

SEQ ID NO: 437368 - DNA, 549 bp, Homo sapiens
aatttaaagaatattgcagataggatgttttgtcacctttttaacatcttttataaatatttcttcctatcctaattgtgtgtcatggcagaagttactttttatgcttttaaaatgatactgtcttaaatcatastgttattatgagggttaaatgaaaacaatgaatggaattcacataacattgtgccttgtatatattaattgctttaaaaagcgtagttattttacctcctatctaaagcttaagttatgagaatgataatacatattgagtatatgtattttctgttgcttcctaaagggcagagcagtagctgtgatagttgactgagttaggagtaaggttgacatctttttataaaagttgagaaatttaacaaaatcatgcatctcattataaagaaatccgctaaagagagtatctgtgaagaaggccaagattttcatcaggaaacacttttagggtgctctgtcataggtaaatggctggtcattgttgcaacattgttttcatgatgatacaaggatacgttaaccttgtctgga

SEQ ID NO: 437369 - DNA, 549 bp, Homo sapiens
aatttaaagaatattgcagataggatgttttgtcacctttttaacatcttttataaatatttcttcctatcctaattgtgtgtcatggcagaagttactttttatgcttttaaaatgatactgtcttaaatcatagtgttattatgagggttaaatgaaaacaatgaatggaattcacataacattgtgccttgtatatattaattgctttaaaaagygtagttattttacctcctatctaaagcttaagttatgagaatgataatacatattgagtatatgtattttctgttgcttcctaaagggcagagcagtagctgtgatagttgactgagttaggagtaaggttgacatctttttataaaagttgagaaatttaacaaaatcatgcatctcattataaagaaatccgctaaagagagtatctgtgaagaaggccaagattttcatcaggaaacacttttagggtgctctgtcataggtaaatggctggtcattgttgcaacattgttttcatgatgatacaaggatacgttaaccttgtctgga

SEQ ID NO: 437370 - DNA, 549 bp, Homo sapiens
aatttaaagaatattgcagataggatgttttgtcacctttttaacatcttttataaatatttcttcctatcctaattgtgtgtcatggcagaagttactttttatgcttttaaaatgatactgtcttaaatcatagtgttattatgagggttaaatgaaaacaatgaatggaattcacataacattgtgccttgtatatattaattgctttaaaaagcgtagttattttacctcctatctaaagcttaagttatgagaatgataatacatattgagtatatgtattttctgttgcttcctaaagggcagagcagtagctgtgatagttgaytgagttaggagtaaggttgacatctttttataaaagttgagaaatttaacaaaatcatgcatctcattataaagaaatccgctaaagagagtatctgtgaagaaggccaagattttcatcaggaaacacttttagggtgctctgtcataggtaaatggctggtcattgttgcaacattgttttcatgatgatacaaggatacgttaaccttgtctgga

SEQ ID NO: 437371 - DNA, 549 bp, Homo sapiens
aatttaaagaatattgcagataggatgttttgtcacctttttaacatcttttataaatatttcttcctatcctaattgtgtgtcatggcagaagttactttttatgcttttaaaatgatactgtcttaaatcatagtgttattatgagggttaaatgaaaacaatgaatggaattcacataacattgtgccttgtatatattaattgctttaaaaagcgtagttattttacctcctatctaaagcttaagttatgagaatgataatacatattgagtatatgtattttctgttgcttcctaaagggcagagcagtagctgtgatagttgactgagttaggagtaaggttgacatctttttataaaagttgagaaatttaacaaaatcatgcatctcattataaagaaatccgctaaagagagtatctgtgaagaaggccaagattttcatcaggaaacacttttagggtgctctgtcataggtaaatggctggtcattgttgcaacattrttttcatgatgatacaaggatacgttaaccttgtctgga

SEQ ID NO: 437372 - DNA, 603 bp, Homo sapiens
ttcttatgtgttgtctggactttcttaagcaatagtttcatcaagtttaaggatctgtgataagctctgttctaatttaagctcaatgtttttgtcttttttatttatctcttctctttttacagctgtctcttaggaaatgaccttttctaaagatgatcattttgtttcctctcacttttctcctgccataagaaccttgctccctttacttcatttagcttcattgtatgccactgttggcatttcgtgtctacttttgtgtatactcaaatactcatcactttcattgatcactagtaaagtttgctgaggagtcartttgattagtagtcaagagcctgatcttagaagccaaatagacctggattttactcctctcccctcttaaattatctttagttatagcctgtctttttgctttttcaactgtttaaagaaaaatttcttagttgattattgctttaaacttaatgtctctggcttacagacatgtgtgtctaaatattcatatttaatttctatgatgacaccaaacctatccagtagtattgataatcttcttatacacgacctccataaggttgtttcagtattcccaca

SEQ ID NO: 437373 - DNA, 575 bp, Homo sapiens
tatgtcctttctatcaaaaatgaaccaatttatgatgcttccattgttagattaatgatttattttaaatgcctatcacttaaagagccatttaaaagtgattttagcagtaagtccttcacttaaaatatgttcaataagacttgattcatgttaggcagttggggatacaaagttaaaaaagttaaggcccctgtccttcaaggattcacagagttgtgctgtaaataaatgattatgtaacagaagtttcttgtaagcatatgggtaaaagtaatattcaacaactaaatggrtatttgggtgtggtaataggtattcaggaaataatgtgcagattttttttttttgagacagggtctcactctgtcccccaggctggagtgccgtggcataaactctagtcactgcagcctccaccacctgggttcaagcgattctcctgcctcagcctcctgagtagctgggactacaggcatgtgccaccacaccctgctaattttgtatttttagtagagatggggtttcaccatgttggcccggctggtctcgaactcctgacctcaggtgatcca

SEQ ID NO: 437374 - DNA, 575 bp, Homo sapiens
tatgtcctttctatcaaaaatgaaccaatttatgatgcttccattgttagattaatgatttattttaaatgcctatcacttaaagagccatttaaaagtgattttagcagtaagtccttcacttaaaatatgttcaataagacttgattcatgttaggcagttggggatacaaagttaaaaaagttaaggcccctgtccttcaaggattcacagagttgtgctgtaaataaatgattatgtaacagaagtttcttgtaagcatatgggtaaaagtaatattcaacaactaaatgggtatttgggtgtggtaataggtattcaggaaataatgtgcagattttttttttttgagacagggtctcactctgtcccccaggctggagtgccgtggcataaactctagtcactgcagcctccaccwcctgggttcaagcgattctcctgcctcagcctcctgagtagctgggactacaggcatgtgccaccacaccctgctaattttgtatttttagtagagatggggtttcaccatgttggcccggctggtctcgaactcctgacctcaggtgatcca

SEQ ID NO: 437375 - DNA, 575 bp, Homo sapiens
tatgtcctttctatcaaaaatgaaccaatttatgatgcttccattgttagattaatgatttattttaaatgcctatcacttaaagagccatttaaaagtgattttagcagtaagtccttcacttaaaatatgttcaataagacttgattcatgttaggcagttggggatacaaagttaaaaaagttaaggcccctgtccttcaaggattcacagagttgtgctgtaaataaatgattatgtaacagaagtttcttgtaagcatatgggtaaaagtaatattcaacaactaaatgggtatttgggtgtggtaataggtattcaggaaataatgtgcagattttttttttttgagacagggtctcactctgtcccccaggctggagtgccgtggcataaactctagtcactgcagcctccaccacctgrgttcaagcgattctcctgcctcagcctcctgagtagctgggactacaggcatgtgccaccacaccctgctaattttgtatttttagtagagatggggtttcaccatgttggcccggctggtctcgaactcctgacctcaggtgatcca

SEQ ID NO: 437376 - DNA, 608 bp, Homo sapiens
taagacttgattcatgttaggcagttggggatacaaagttaaaaaagttaaggcccctgtccttcaaggattcacagagttgtgctgtaaataaatgattatgtaacagaagtttcttgtaagcatatgggtaaaagtaatattcaacaactaaatgggtatttgggtgtggtaataggtattcaggaaataatgtgcagattttttttttttgagacagggtctcactctgtcccccaggctggagtgccgtggcataaactctagtcactgcagcctccaccacctgggttcaagcgattctcctgcctcagcctcctgagtagctgggactacaggcatgtgccaccacaccctgctaattttgtatttttagtagagatggggtttcaccatgttggcccggctggtctcgaactcctgacctcaggtgatccatccgctttggcctcccagagtgctgggattacaggcgtgagcctctgtgcccagccatgagcagagttttgaaggctgggagcacagcagaaaaacyaaatttcaagcagagggaacagaatgtgtaaaagcacacagacatgaatagcatgttatgtgaggtgcatggc

SEQ ID NO: 437377 - DNA, 366 bp, Homo sapiens
  misc_feature (1)...(366): n = A,T,C or G
nnnnnatgatgtccataattatgtggattttaatgcttttacacctagaaattaatatagatgaatatagaattagtctattaagtaatgtgtttgtgtatgaatatgtagcttctgtctttaatgttcttccacataagacattttccagtaatyaaaaaaaagcccttatgtgatttgaatagtctgtttatgcttaagaagcatcttagtctaattgataaaaacgtttccttaattttgtctcttgtctgattttgtaatttcaaaatatatttagcattcaaagaaaatgtttatgttacactgcaaagctttcttagttggtattttccttgtttggttctttgcagtgagcatatattg

SEQ ID NO: 437378 - DNA, 594 bp, Homo sapiens
ttgtctgattttgtaatttcaaaatatatttagcattcaaagaaaatgtttatgttacactgcaaagctttcttagttggtattttccttgtttggttctttgcagtgagcatatattgagcattaattaggtatccagcattatcattggcattaggaatagaaaattaaagaagacctgcttatggtcttaagtagatatagccacaaataattgcaaaactatacgattaaatttaatgtggttacatttagattaaataccctacagtgtttttattgatacctctttytgattagatgacaattcaatgtgaataacttcaaatgtctgaaaggttcatgatgcaaatcctttcaaatgattttactgtgtagtcagaaaaaatttaaattcttatacaacaatttcattgttttactgttaattatagcgaaggaagatgcaaactgtgcagtgtgcgacagcccgggagacctcttagatcagttcttttgtactacttgtggtcagcactatcatggaatgtgcctggatatagcggttactccattaaaacgtgcaggttggcaatgtcctgagtgcaaagtgtg

SEQ ID NO: 437379 - DNA, 622 bp, Homo sapiens
ttcccaggactgatgattttcatgattacttatgttgcaaaacataagtttaaagataagccatcattaatgctatcttactttttagacaatcgggagaagatagcaagatgctagtgtgtgatacgtgtgacaaagggtatcatactttttgtcttcaacgaattatgaaatctgtaccaaccaacggctggaaatgcaaagtaagttgtttacttttttaaatcctctgtatgttttatatggagaacagacaaatcggatatctattcaaatctatacattaccatcagctttttaaaaacagctttattgacatataactgacatacagtaaactgtacactcttcaagataatgaacatagtcatcaccgtcaaagtttcctggtgcctcttggcttgctttgtggctgttcaaacccaaaccctctgtcttcctagtctgctttttcactatagattagtattcacttcctagaatttttaataaaagcttcatatagtatatactcrtttttggtctggcttctttaactcagtgtaattattttgaaatgcatccctattgctgcacagatcagtagtgattcttttgtattactgagtgctggagataccac

SEQ ID NO: 437380 - DNA, 622 bp, Homo sapiens
ttcccaggactgatgattttcatgattacttatgttgcaaaacataagtttaaagataagccatcattaatgctatcttactttttagacaatcgggagaagatagcaagatgctagtgtgtgatacgtgtgacaaagggtatcatactttttgtcttcaacgaattatgaaatctgtaccaaccaacggctggaaatgcaaagtaagttgtttacttttttaaatcctctgtatgttttatatggagaacagacaaatcggatatctattcaaatctatacattaccatcagctttttaaaaacagctttattgacatataactgacatacagtaaactgtacactcttcaagataatgaacatagtcatcaccgtcaaagtttcctggtgcctcttggcttgctttgtggctgttcaaacccaaaccctctgtcttcctagtctgctttttcactatagattagtattcacttcctagaatttttaataaaagcttcatatagtatatactcgtttttggtctggcttctttaactmagtgtaattattttgaaatgcatccctattgctgcacagatcagtagtgattcttttgtattactgagtgctggagataccac

SEQ ID NO: 437381 - DNA, 593 bp, Homo sapiens
tttagttagatgaagtccttttaccttattttttgacttgttgattcaacaagttacaattgaccactattaattgttcctatcaatttatcatatttttaaacaaataacttgtggctgttatttagcaagtaggtcaggccagtgttaatatattgtgttttttaccagtataaaattgttctttattctatgtaatgtgttttttgttgagggatcaggaagggcaggtattttgctttgcctgacactatggccacgtagggtgttagtttaacggttgaatggttatcttttcacatcttattttggattcttttgtgttataaaaatgtatcttttgaaaagcttaatagaggtaactggattgacggttgtaattgaaatgcttggctgttttgaggcaaaatttttctwtttttctcttcttttacttcctgcaatgatttataattcagaatctcattttgtgaatgtaaatgattataaatattaaagatataaattttctcccattccccactgaaaataaagtttttattccccttttctctgtttgattcgattaacctagattgtaaaccctgtcacaa

SEQ ID NO: 437382 - DNA, 593 bp, Homo sapiens
tttagttagatgaagtccttttaccttattttttgacttgttgattcaacaagttacaattgaccactattaattgttcctatcaatttatcatatttttaaacaaataacttgtggctgttatttagcaagtaggtcaggccagtgttaatatattgtgttttttaccagtataaaattgttctttattctatgtaatgtgttttttgttgagggatcaggaagggcaggtattttgctttgcctgacactatggccacgtagggtgttagtttaacggttgaatggttatcttttcacatcttattttggattcttttgtgttataaaaatgtatcttttgaaaagcttaatagaggtaactggattgacggttgtaattgaaatgcttggctgttttgaggcaaaatttttctatttttctcttcttttacttcctgcaatgatttataattcagaatctcattttgtgaatgtaaatgattataaatattaaagatataaattttctcccattccccactgamaataaagtttttattccccttttctctgtttgattcgattaacctagattgtaaaccctgtcacaa

SEQ ID NO: 437383 - DNA, 588 bp, Homo sapiens
taacttgaaaaaatttaatcataatcctttttttcttcctgaaagctttgggagatgtgtgaatccccatccccgcctccaccccccrccccagcacctttttaaaaaaatatatttactttaaaaattaccttctttacactctctaataatatctagtaactactggaaaatttttgtctcttgctcttaatcttctttattatggttttcattgtcttgagaactggtagagaattctgggtgtctttctcagcttgttctgtctcccctttggtgtgcttcttttcgatttgctctttgtaatctgctattctcttttgagagtgacaggattacataatttctgggaatactattggatacttaatctttttattctgttctatgaaggcactatagtgtggtggttaaaagcttatgctgtggagtcaaactgcagttttttcagttactaaattgatgatctttggctacctgtttaacttccctaagtcagtgtatagaaggttaacggtacttacctcacagggatgttggatttaatgaagtggtatctataaagtgcccagcacaatgcctaacaca

SEQ ID NO: 437384 - DNA, 588 bp, Homo sapiens
taacttgaaaaaatttaatcataatcctttttttcttcctgaaagctttgggagatgtgtgaatccccatccccgcctccaccccccgccccagcacctttttaaaaaaatatatttacttwaaaaattaccttctttacactctctaataatatctagtaactactggaaaatttttgtctcttgctcttaatcttctttattatggttttcattgtcttgagaactggtagagaattctgggtgtctttctcagcttgttctgtctcccctttggtgtgcttcttttcgatttgctctttgtaatctgctattctcttttgagagtgacaggattacataatttctgggaatactattggatacttaatctttttattctgttctatgaaggcactatagtgtggtggttaaaagcttatgctgtggagtcaaactgcagttttttcagttactaaattgatgatctttggctacctgtttaacttccctaagtcagtgtatagaaggttaacggtacttacctcacagggatgttggatttaatgaagtggtatctataaagtgcccagcacaatgcctaacaca

SEQ ID NO: 437385 - DNA, 588 bp, Homo sapiens
taacttgaaaaaatttaatcataatcctttttttcttcctgaaagctttgggagatgtgtgaatccccatccccgcctccaccccccgccccagcacctttttaaaaaaatatatttactttaaaaattaccttctttacactctctaataatatctagtaactactggaaaatttttgtctcttgytcttaatcttctttattatggttttcattgtcttgagaactggtagagaattctgggtgtctttctcagcttgttctgtctcccctttggtgtgcttcttttcgatttgctctttgtaatctgctattctcttttgagagtgacaggattacataatttctgggaatactattggatacttaatctttttattctgttctatgaaggcactatagtgtggtggttaaaagcttatgctgtggagtcaaactgcagttttttcagttactaaattgatgatctttggctacctgtttaacttccctaagtcagtgtatagaaggttaacggtacttacctcacagggatgttggatttaatgaagtggtatctataaagtgcccagcacaatgcctaacaca

SEQ ID NO: 437386 - DNA, 563 bp, Homo sapiens
ttgtttttgataaccccttataattagatgagaggcatgcattattggccagaatactgcaaaatgctgatccatcctcagggtatcacaactggaagcacayattattccactttccctcatgagaatcacctggtcaggctgttgcccaatttctattcccccctcccttgtatctaataaagcagtatgtgaggatactttaagaccatgcaaatatcttgcttttcctcagaatttccttctagatttgaaaaacttactccctaggccgggtgtggtggctcacacctgtaatcccagcactttgggaggctgaagtgggtggatcagttgaggtcaggagttcgagatcagcctggccaacatggtgaaaccctgtctgtactaaaaatacaaaaattagccaggcatggtagcgggtgccatgtaatcccagctactcaggatgctgagaccggagaatcgcttgaacccaggaggcgaggttgcagtgagttggactcatgctactacactccagcctgggtgacagagatagactctgtctcaaaaaacagcaa

SEQ ID NO: 437387 - DNA, 563 bp, Homo sapiens
ttgtttttgataaccccttataattagatgagaggcatgcattattggccagaatactgcaaaatgctgatccatcctcagggtatcacaactggaagcacacattattccactttccctcatgagaatcacctggtcaggctgttgcccaatttctattcccccctcccttgtatctaataaagcagtatgtgaggatactttaagaccatgcaaatatcttgcttttcctcagaatttccttctagatttgaaaaacttactccctaggccgggtgtggtggctcacacctgtaatcccagcactttgggaggctgaagtgggtggatcagttgaggtcaggagttcgagatcagcctggccaacatggtgaaaccctgtctgtactaaaaatacaaaaattagccaggcatggtagcgggtgccatgtaatcccagctactcaggatgctgagaccggagaatcgcttgaacccaggaggygaggttgcagtgagttggactcatgctactacactccagcctgggtgacagagatagactctgtctcaaaaaacagcaa

SEQ ID NO: 437388 - DNA, 547 bp, Homo sapiens
aagatgagatttcagtttggtatcagtttggtatcagaacatgtataggcctgggcaatatagtgagaccctatctctacaaaaataaaaaaagtatctgggcatggtgacacatgcctgcagtcccagcagcttgggaggctgaggtgggaggaccacttgagcccaggaggttgaggctgcagtgagccatgtttstgctactgcactccagcttgggtcacagactgagatcctgtgtcaaaaaaaaaaaaagaacatagataaatagataaattttagtcacttattggtaaatgaggctagcagtgtctttttactataacttaaaaattaccttgatgagattgagttaaaggtttaacatactggtatcctgatttaaaatttaccggtgactatgtttctgatatctaagtttatagatttcctgagattagtcttttaatttacagacaatgatgaagaacgattatatgcaaagaatattttggctaggttggcaggtatggttaagcaaaataaatattggtggttagcaaatctt

SEQ ID NO: 437389 - DNA, 547 bp, Homo sapiens
aagatgagatttcagtttggtatcagtttggtatcagaacatgtataggcctgggcaatatagtgagaccctatctctacaaaaataaaaaaagtatctgggcatggtgacacatgcctgcagtcccagcagcttgggaggctgaggtgggaggaccacttgagcccaggaggttgaggctgcagtgagccatgtttgtgctactgcactccagcttgggtcacagastgagatcctgtgtcaaaaaaaaaaaaagaacatagataaatagataaattttagtcacttattggtaaatgaggctagcagtgtctttttactataacttaaaaattaccttgatgagattgagttaaaggtttaacatactggtatcctgatttaaaatttaccggtgactatgtttctgatatctaagtttatagatttcctgagattagtcttttaatttacagacaatgatgaagaacgattatatgcaaagaatattttggctaggttggcaggtatggttaagcaaaataaatattggtggttagcaaatctt

SEQ ID NO: 437390 - DNA, 547 bp, Homo sapiens
aagatgagatttcagtttggtatcagtttggtatcagaacatgtataggcctgggcaatatagtgagaccctatctctacaaaaataaaaaaagtatctgggcatggtgacacatgcctgcagtcccagcagcttgggaggctgaggtgggaggaccacttgagcccaggaggttgaggctgcagtgagccatgtttgtgctactgcactccagcttgggtcacagactgagatcctgtgtcaaaaaaaaaaaaagaacatagataaatagataaattttagtcactkattggtaaatgaggctagcagtgtctttttactataacttaaaaattaccttgatgagattgagttaaaggtttaacatactggtatcctgatttaaaatttaccggtgactatgtttctgatatctaagtttatagatttcctgagattagtcttttaatttacagacaatgatgaagaacgattatatgcaaagaatattttggctaggttggcaggtatggttaagcaaaataaatattggtggttagcaaatctt

SEQ ID NO: 437391 - DNA, 563 bp, Homo sapiens
atgctggggaatttctcattttggtgtttttattaattgctaactcttgtgggatttcttttttcaagtaggacttatttcagtagtttcatggaaaaaatcttagaattgtactattgattctcagtaagtaaagataaatcttcctgtgtctgctttacatcatgtacattctaccctttaagaatgagttccatttctaagtgagatttaagtaaaactgcatggcaaaatgaggatacwataggtacgaattatttattgttttacaaatttgctactttctgaagtgttttttaaaattgcaagataaatagtggagaagtgttaattcacaatagtaatttggagttttaagtttcatgattgaaattgcttcaagtgaagttttaagtttcatgatttaaatggattaaagtttggctttttataggaataatatcttgattttaatcgtataatttttaaactgtaaggccaggcttttaagaaaatcatttttaatgtgaaaattagtctcctctatatcaaacccagatatattttattctctaaagacaagg

SEQ ID NO: 437392 - DNA, 563 bp, Homo sapiens
atgctggggaatttctcattttggtgtttttattaattgctaactcttgtgggatttcttttttcaagtaggacttatttcagtagtttcatggaaaaaatcttagaattgtactattgattctcagtaagtaaagataaatcttcctgtgtctgctttacatcatgtacattctaccctttaagaatgagttccatttctaagtgagatttaagtaaaactgcatggcaaaatgaggatacaataggtacraattatttattgttttacaaatttgctactttctgaagtgttttttaaaattgcaagataaatagtggagaagtgttaattcacaatagtaatttggagttttaagtttcatgattgaaattgcttcaagtgaagttttaagtttcatgatttaaatggattaaagtttggctttttataggaataatatcttgattttaatcgtataatttttaaactgtaaggccaggcttttaagaaaatcatttttaatgtgaaaattagtctcctctatatcaaacccagatatattttattctctaaagacaagg

SEQ ID NO: 437393 - DNA, 648 bp, Homo sapiens
tcaaaacaatatttcagcatttagtataaaaatgaacaagatgctttatacttaaaacatcagttctggctagctgcattagaagtgctcggaggtcacatatgatggtggctgccttattgcacgatgcaagacaaaacattttgagaaatacaaaaacagcagttccagaattattggtgaaattaaaataccaraagaattcaagatcgacaaactaagactgtggctgtgctttcacaatttttaaggactgaagtagaaatattctttttctgttgttcatggaacacattttaatacagataattgctaaaccatttgttgcggcaacaaatcattcacatcttcaagtatattcagttttaaatatataatccaaataacccaatattggagattttctgaaggtgagatgttaggacacagaaaatggaatttatatctcaggtattggacatccattatgaaatatcaaatcatatagaattattttcctttaaggaggttagtaattaaaagtttagttttttgtatttttcctttcatatggaatatttcaggtgctatttagttagaaatatgatgcttattttctttatgacatgtttgagatatatctcaaatgtatgatttagaacctaactg

SEQ ID NO: 437394 - DNA, 648 bp, Homo sapiens
tcaaaacaatatttcagcatttagtataaaaatgaacaagatgctttatacttaaaacatcagttctggctagctgcattagaagtgctcggaggtcacatatgatggtggctgccttattgcacgatgcaagacaaaacattttgagaaatacaaaaacagcagttccagaattattggtgaaattaaaataccaaaagaattcaagatcgacaaactaagactgtggctgtgctttcacaatttttaaggactgaagtagaaatattctttttctgttgttcatggaacacattttaatrcagataattgctaaaccatttgttgcggcaacaaatcattcacatcttcaagtatattcagttttaaatatataatccaaataacccaatattggagattttctgaaggtgagatgttaggacacagaaaatggaatttatatctcaggtattggacatccattatgaaatatcaaatcatatagaattattttcctttaaggaggttagtaattaaaagtttagttttttgtatttttcctttcatatggaatatttcaggtgctatttagttagaaatatgatgcttattttctttatgacatgtttgagatatatctcaaatgtatgatttagaacctaactg

SEQ ID NO: 437395 - DNA, 648 bp, Homo sapiens
tcaaaacaatatttcagcatttagtataaaaatgaacaagatgctttatacttaaaacatcagttctggctagctgcattagaagtgctcggaggtcacatatgatggtggctgccttattgcacgatgcaagacaaaacattttgagaaatacaaaaacagcagttccagaattattggtgaaattaaaataccaaaagaattcaagatcgacaaactaagactgtggctgtgctttcacaatttttaaggactgaagtagaaatattctttttctgttgttcatggaacacattttaatacagataattgctaaaccatttgttgcrgcaacaaatcattcacatcttcaagtatattcagttttaaatatataatccaaataacccaatattggagattttctgaaggtgagatgttaggacacagaaaatggaatttatatctcaggtattggacatccattatgaaatatcaaatcatatagaattattttcctttaaggaggttagtaattaaaagtttagttttttgtatttttcctttcatatggaatatttcaggtgctatttagttagaaatatgatgcttattttctttatgacatgtttgagatatatctcaaatgtatgatttagaacctaactg

SEQ ID NO: 437396 - DNA, 648 bp, Homo sapiens
tcaaaacaatatttcagcatttagtataaaaatgaacaagatgctttatacttaaaacatcagttctggctagctgcattagaagtgctcggaggtcacatatgatggtggctgccttattgcacgatgcaagacaaaacattttgagaaatacaaaaacagcagttccagaattattggtgaaattaaaataccaaaagaattcaagatcgacaaactaagactgtggctgtgctttcacaatttttaaggactgaagtagaaatattctttttctgttgttcatggaacacattttaatacagataattgctaaaccatttgttgcggcaacaaatcattcacatcttcaagtatattcagttttaaatatataatccaaataacccaatattggagattttctgaaggtgagatgttargacacagaaaatggaatttatatctcaggtattggacatccattatgaaatatcaaatcatatagaattattttcctttaaggaggttagtaattaaaagtttagttttttgtatttttcctttcatatggaatatttcaggtgctatttagttagaaatatgatgcttattttctttatgacatgtttgagatatatctcaaatgtatgatttagaacctaactg

SEQ ID NO: 437397 - DNA, 329 bp, Homo sapiens
atggaatttatatctcaggtattggacatccattatgaaatatcaaatcatatagaattatkttcctttaaggaggttagtaattaaaagtttagttttttgtatttttcctttcatatggaatatttcaggtgctatttagttagaaatatgatgcttattttctttatgacatgtttgagatatatctcaaatgtatgatttagaacctaactgactacaggaatagtaacacatttttctgatggctgtgaatagaataagattccttttgttttttgttttttttgcctattacaatagatgcaggatttcacaaagatgaggaa

SEQ ID NO: 437398 - DNA, 329 bp, Homo sapiens
atggaatttatatctcaggtattggacatccattatgaaatatcaaatcatatagaattattttcctttaaggaggttagtaattaaaagtttagtttttygtatttttcctttcatatggaatatttcaggtgctatttagttagaaatatgatgcttattttctttatgacatgtttgagatatatctcaaatgtatgatttagaacctaactgactacaggaatagtaacacatttttctgatggctgtgaatagaataagattccttttgttttttgttttttttgcctattacaatagatgcaggatttcacaaagatgaggaa

SEQ ID NO: 437399 - DNA, 527 bp, Homo sapiens
cccattttcaacatttctataggtatatgtgctttgcgacctgggtttaagaaagtggttattgacactgacacatattgtaatcaactcagtagattttagaacatcaagctaatgaccytaccctagaccaattaaaatgcacttctaggatcatctttaactgtaaccctgaaagtggagtcctgaactagagaaatgtgctacttgtcttactgatttttaaaaatgcattaaaattaatactataaggaatgctctttaaaaatggtggaaaataaagtggaaattttaaatttgtcatattaaattataacatttgtttttatttctgtcttcagtccatttctctcattgcacaattgtattcccattctaattaggaaattctgagataataatcttaggtcttcttgtatgatttaccctgtatgtatcatcacatcttatagaaagatattgaatgtaatcacactactatgatctacttcagacaccctcatgttctaattgctttcatggtggta

SEQ ID NO: 437400 - DNA, 459 bp, Homo sapiens
tgctttgcgacctgggtttaagaaagtggttattgacactgacacatattgtaatcaactcagtagattttagaacatcaagctaatgaccctaccctagaccaattaaaatgcacttctaggatcatctttaactgtaaccctgaaagtggagtcctgaactagagaaatgtgctacttgtcttactgatttttaaaaatgcattaaaattaatactataaggaatgctctttaaaaatggtggaaaataaagtggaaattttaaatttgtcatattaaatyataacatttgtttttatttctgtcttcagtccatttctctcattgcacaattgtattcccattctaattaggaaattctgagataataatcttaggtcttcttgtatgatttaccctgtatgtatcatcacatcttatagaaagatattgaatgtaatcacactactatgatctac

SEQ ID NO: 437401 - DNA, 459 bp, Homo sapiens
tgctttgcgacctgggtttaagaaagtggttattgacactgacacatattgtaatcaactcagtagattttagaacatcaagctaatgaccctaccctagaccaattaaaatgcacttctaggatcatctttaactgtaaccctgaaagtggagtcctgaactagagaaatgtgctacttgtcttactgatttttaaaaatgcattaaaattaatactataaggaatgctctttaaaaatggtggaaaataaagtggaaattttaaatttgtcatattaaattataacatttgtttttatttctgtcttcagtccatttctctcattgcacaattgtattcccattctaattaggaaattctgagataataatcttaggtcttcttgtatgatttaccctgtatgtatcatcacrtcttatagaaagatattgaatgtaatcacactactatgatctac

SEQ ID NO: 437402 - DNA, 663 bp, Homo sapiens
gtggtggccacgagtgtgctgctagtggtggaagtgacaagaagtagaaggatcggagacaaaacttgaagataaaaagtcttgaatttgctgatgatttgcattgacgaagtgttgggggagaggactgaaggagcagaggagagtgacaagggactggatgccatttataaggatggggaagactgggatgaaaccggttaagggagaaattttaaacatggcaaacttaagaggggttttgtgtgagaaaatggaaatgctaagaaggaagttgaaaatcctgctaatttggagatctttgattaaaaccagaaataagaatgtgggaagcatcaacttccaagatrccctcattgtagataacaccatttaggatctaggctcaagccctgggaaactccagggctttggaagtcaaatagaggaagaacacgtacaggagatgaagaaagattagcgaggaaggcagtgaaatatccacaggtggactgctgccaaatccagcagaaccgtatgccagatgtcaggagcatgagtaaaatgagaaaagagaaatggcttttgacaacacatccctactaatagtagggaagaagacataggtacagattcaagttgattggaaattatgaaagtgaggtaattgacctgcagtggttg

SEQ ID NO: 437403 - DNA, 423 bp, Homo sapiens
tattacaaatacatttgctaactactagcaaatattttatgtaataacttcgctattttattaaaatcctgtttttaaaattctgaaatgtcattttaagtataggagacaggtgaaattgttcaagtttacyactaaaccaggaataaggaaacttagattctcgtccttttttcaaaaagaaaaattttaaaaccaggcttattgaggtatagttgatataagctatatttgacttgacatgtacaattccatcagctttgatatatatatatatacacccttgaaaatgataccacaatcatgacagtgaatatattcatctcccaacgtttcttcatgtccctctgtaattttctgcattccccctgccatccgtccttgtccccaagattagtttgcattttctagagttgtatataa

SEQ ID NO: 437404 - DNA, 423 bp, Homo sapiens
tattacaaatacatttgctaactactagcaaatattttatgtaataacttcgctattttattaaaatcctgtttttaaaattctgaaatgtcattttaagtataggagacaggtgaaattgttcaagtttaccactaaaccaggaataaggaaacttagattctcgtccttttttcaaaaagaaaaattttaaaaccaggcttattgaggtatagttgatataagctatatttgacttgacatgtacaattccatmagctttgatatatatatatatacacccttgaaaatgataccacaatcatgacagtgaatatattcatctcccaacgtttcttcatgtccctctgtaattttctgcattccccctgccatccgtccttgtccccaagattagtttgcattttctagagttgtatataa

SEQ ID NO: 437405 - DNA, 423 bp, Homo sapiens
tattacaaatacatttgctaactactagcaaatattttatgtaataacttcgctattttattaaaatcctgtttttaaaattctgaaatgtcattttaagtataggagacaggtgaaattgttcaagtttaccactaaaccaggaataaggaaacttagattctcgtccttttttcaaaaagaaaaattttaaaaccaggcttattgaggtatagttgatataagctatatttgacttgacatgtacaattccatcagctttgatatatatatatatacacccttgaaaaygataccacaatcatgacagtgaatatattcatctcccaacgtttcttcatgtccctctgtaattttctgcattccccctgccatccgtccttgtccccaagattagtttgcattttctagagttgtatataa

SEQ ID NO: 437406 - DNA, 423 bp, Homo sapiens
tattacaaatacatttgctaactactagcaaatattttatgtaataacttcgctattttattaaaatcctgtttttaaaattctgaaatgtcattttaagtataggagacaggtgaaattgttcaagtttaccactaaaccaggaataaggaaacttagattctcgtccttttttcaaaaagaaaaattttaaaaccaggcttattgaggtatagttgatataagctatatttgacttgacatgtacaattccatcagctttgatatatatatatatacacccttgaaaatgataccacaatcatgayagtgaatatattcatctcccaacgtttcttcatgtccctctgtaattttctgcattccccctgccatccgtccttgtccccaagattagtttgcattttctagagttgtatataa

SEQ ID NO: 437407 - DNA, 543 bp, Homo sapiens
cttatgtatgtttactaaatcagaaaacatttaatatagctaaattttaaataatcaacaacagaaaataaaaatattttgccccaccgtcttaaggttacaaagacttagaggtatattttatttacatgcatgcatacayacacacaaacacacaaacacaaatcatatatagatgtgtagaaaatatagaaaagtagaaaaatgtatacaaatatttgaaatacattatgtggaatcatgtttgtatttttttagcttaggaaagaaagccattaaaagacttacatgtcaataaccatgatactataggattttagtagttgcagagtattacattacttaaataaatgattcatggaatagtctttttttattggacaagggattttaccctccccctcaatctttgagagttagaaacaatgcagagatgagtgtctttatagttaaaactttgtacatttcataatttactcatgataaattttcaagttgaattcctaggccaaagggtatacagattttaaagactttcaatgt

SEQ ID NO: 437408 - DNA, 626 bp, Homo sapiens
gacacttgtgaagtttaggtcagagctttctgttctccttggcttatatctgtggtctaggaaaatgatatttctatcaccttctggataaatcacactattatctatgcaggcaacaatagcacatattttctcaaagactacctttgccctcaagttaggttttatttttctagcagtctaaaggtcatgaaataaattataaaataaaaacagtgggtcttcaagctagatgatactgttttctttcttgcatggacaattattttaaaatattttggtttttctgcacttattatttaaatatgactccccacccccacttgaatctagggacattgtagttttctactgcagactttatttctggtttatactgggaatatattktttatcgttttcagtgaaagcattcactggttaaatttccttttaaaaataataatggatctttacaatttctttgagctgctcagtgtgtataatgtgttgaattttctgtaagtggttgggaggtagaaatagatactttatctctattttagccatttccataattatatatctcaatagtcttgtcaatgcatcattagtcctatgactgaattaatgattacttttagtag

SEQ ID NO: 437409 - DNA, 626 bp, Homo sapiens
gacacttgtgaagtttaggtcagagctttctgttctccttggcttatatctgtggtctaggaaaatgatatttctatcaccttctggataaatcacactattatctatgcaggcaacaatagcacatattttctcaaagactacctttgccctcaagttaggttttatttttctagcagtctaaaggtcatgaaataaattataaaataaaaacagtgggtcttcaagctagatgatactgttttctttcttgcatggacaattattttaaaatattttggtttttctgcacttattatttaaatatgactccccacccccacttgaatctagggacattgtagttttctactgcagactttatttctggtttatactgggaatatattgtttatcrttttcagtgaaagcattcactggttaaatttccttttaaaaataataatggatctttacaatttctttgagctgctcagtgtgtataatgtgttgaattttctgtaagtggttgggaggtagaaatagatactttatctctattttagccatttccataattatatatctcaatagtcttgtcaatgcatcattagtcctatgactgaattaatgattacttttagtag

SEQ ID NO: 437410 - DNA, 605 bp, Homo sapiens
ccacttgaatctagggacattgtagttttctactgcagactttatttctggtttatactgggaatatattgtttatcgttttcagtgaaagcattcactggttaaatttccttttaaaaataataatggatctttacaatttctttgagctgctcagtgtgtataatgtgttgaattttctgtaagtggttgggaggtagaaatagatactttatctctattttagccatttccataattatatatctcaatagtcttgtcaatgcatcattagtcctatgactgaattaatgattacttttagtagtcacttaatttcttactgatgatgatgattctacttctgtgaatcatcttggatgattctctaaaatcttagaaagctrattttgttaatgctatgcatataacacatcaatacattttctctattaaaagaattaaagcgttataggtagatcagaatttaccattactaactcctcagtcctccttatttccctgttaccagtttggtatatttatatattaggttgatccatatgaaattgccaatattatttctgaactgatgaaaagcagcaatttcttatgagtcaacctat

SEQ ID NO: 437411 - DNA, 605 bp, Homo sapiens
ccacttgaatctagggacattgtagttttctactgcagactttatttctggtttatactgggaatatattgtttatcgttttcagtgaaagcattcactggttaaatttccttttaaaaataataatggatctttacaatttctttgagctgctcagtgtgtataatgtgttgaattttctgtaagtggttgggaggtagaaatagatactttatctctattttagccatttccataattatatatctcaatagtcttgtcaatgcatcattagtcctatgactgaattaatgattacttttagtagtcacttaatttcttactgatgatgatgattctacttctgtgaatcatcttggatgattctctaaaatcttagaaagctaattttgttaatgctatgcatataacacatcaatacattttctctattaaaagaattaaagygttataggtagatcagaatttaccattactaactcctcagtcctccttatttccctgttaccagtttggtatatttatatattaggttgatccatatgaaattgccaatattatttctgaactgatgaaaagcagcaatttcttatgagtcaacctat

SEQ ID NO: 437412 - DNA, 543 bp, Homo sapiens
cttatgtatgtttactaaatcagaaaacatttaatatagctaaattttaaataatcaacaacagaaaataaaaatattttgccccaccgtcttaaggttacaaagacttagaggtatattttatttacatgcatgcatacacacacacaaacacacaaacacaaatcatatatagatgtgtagaaaatatagaaaagtagaaaaatgtatacaaatatttgaaatacattatgtggaatcatgtttgtatttttttagcttaggaaagaaagccattaaaagacttacatgtcaataaccatgatactrtaggattttagtagttgcagagtattacattacttaaataaatgattcatggaatagtctttttttattggacaagggattttaccctccccctcaatctttgagagttagaaacaatgcagagatgagtgtctttatagttaaaactttgtacatttcataatttactcatgataaattttcaagttgaattcctaggccaaagggtatacagattttaaagactttcaatgt

SEQ ID NO: 437413 - DNA, 257 bp, Homo sapiens
atgtttttatattatagtgctatacctcaaatactgttctgcaatttattttttcactcaacagtgtctttttgataatttctttcatggcagtctatacaagtttctacctccctacttttaaaatgtttcgtactttcctartgtttggatttgtcattgctttacttactccctaatgattaatattggcattattaacacttgtagtcattagggttcatatgactataaattgctcttataaagcattagta

SEQ ID NO: 437414 - DNA, 543 bp, Homo sapiens
cttatgtatgtttactaaatcagaaaacatttaatatagctaaattttaaataatcaacaacagaaaataaaaatattttgccccaccgtcttaaggttacaaagacttagaggtatattttatttacatgcatgcatacacacacacaaacacacaaacacaaatcatatatagatgtgtagaaaatatagaaaagtagaaaaatgtatacaaatatttgaaatacattatgtggaatcatgtttgtatttttttagcttaggaaagaaagccattaaaagacttacatgtcaataaccatgatactataggattttagtagttgcagagtattacattacttaaataaatgattcatggaatagtctttttttattggacaagggattttmccctccccctcaatctttgagagttagaaacaatgcagagatgagtgtctttatagttaaaactttgtacatttcataatttactcatgataaattttcaagttgaattcctaggccaaagggtatacagattttaaagactttcaatgt

SEQ ID NO: 437415 - DNA, 543 bp, Homo sapiens
cttatgtatgtttactaaatcagaaaacatttaatatagctaaattttaaataatcaacaacagaaaataaaaatattttgccccaccgtcttaaggttacaaagacttagaggtatattttatttacatgcatgcatacacacacacaaacacacaaacacaaatcatatatagatgtgtagaaaatatagaaaagtagaaaaatgtatacaaatatttgaaatacattatgtggaatcatgtttgtatttttttagcttaggaaagaaagccattaaaagacttacatgtcaataaccatgatactataggattttagtagttgcagagtattacattacttaaataaatgattcatggaatagtctttttttattggacaagggattttaccctccccctcaatctttgagagttagaaacaatgcagagatgagtgtctttatagttaaamctttgtacatttcataatttactcatgataaattttcaagttgaattcctaggccaaagggtatacagattttaaagactttcaatgt

SEQ ID NO: 437416 - DNA, 485 bp, Homo sapiens
gttaaaactttgtacatttcataatttactcatgataaattttcaagttgaattcctaggccaaagggtatacagattttaaagactttcaatgttggcagatatcactgtaggataattataccaatttayactcttaacagtaatatatgagtgtatatatttacctattccttgccagttctggaaattgtgaatttaacagaatcttccaaaaagcattgaaaattggcctgggaatgtaaatatccttttcttccccattcagcttactaatgaatctatcataatctcagctgtctgaatctaaaagagaaccagtaaaattgagataacaagtttattgcaaaataaatgacctgaaagccacaggcattgggtggggtaggagaagggcaggtagtggtgactgaggtgactctgtgtttgggtttttgaaaagattgtagatttgaaggataatgagttcagagaagtagaaaggc

SEQ ID NO: 437417 - DNA, 604 bp, Homo sapiens
atggtaagtggagaaagataaggctgaataacctgacaagaaccacactgatgtgagagttttgattccatgctaaggaattttcaacttttcccaggtgcaaaaggaaaccaatgacaaagtcaatgactagagatttaaaatgtcactggtcargtgactgcttgtgacctgtaattgcttaactaattattatcacatgagtgtggggtctgttagccttaaatcactaccttaaccttgagaagttgatgatgcctttgttttctgagaacagtttcagtgtgcaggctgacagttctataggggtggcagaagaaaagtgtagggccagaaaaaaagagatacacagacttcttgtgatttttttaaagctatggaacatgatgaagtaacaaagcataagtatacccttcactatgaatgattatgttttcacatctttcactagatgtgtgtaagaaaaaatatttaatgtagcatgtattaaccaagcaattgagaggaataccgttcactacttacagtttatttcagaaatcagtgatttgaatttaattcataaattttggcaacataccttcatctagctcttgaacacctg

SEQ ID NO: 437418 - DNA, 596 bp, Homo sapiens
atgagtgtatatatttacctattccttgccagttctggaaattgtgaatttaacagaatcttccaaaaagcattgaaaattggcctgggaatgtaaatatcctttycttccccattcagcttactaatgaatctatcataatctcagctgtctgaatctaaaagagaaccagtaaaattgagataacaagtttattgcaaaataaatgacctgaaagccacaggcattgggtggggtaggagaagggcaggtagtggtgactgaggtgactctgtgtttgggtttttgaaaagattgtagatttgaaggataatgagttcagagaagtagaaaggcaaataggggctgttataaataaggacagtggcatgagccaacggggttatctctcatatttaaagaacatggctagatctggtttccctataagttgattccttactgttattctgagttgaatgcatatcttttgtctcagtgaagcctgaatggcttttgatgtctctgatctggaaaggttgtttgtgtatctcagaataagtcattttgctaaaaaaggctactcctgagggagaacagtggaaaaaagagttgga

SEQ ID NO: 437419 - DNA, 604 bp, Homo sapiens
atggtaagtggagaaagataaggctgaataacctgacaagaaccacactgatgtgagagttttgattccatgctaaggaattttcaacttttcccaggtgcaaaaggaaaccaatgacaaagtcaatgactagagatttaaaatgtcactggtcaggtgactgcttgtgacctgtaattgcttaactaattattatcacatgagtgtggggtctgttagccttaaatcactaccttaaccttgagaagttgatgatgcctttgttttctgagaacagtttcmgtgtgcaggctgacagttctataggggtggcagaagaaaagtgtagggccagaaaaaaagagatacacagacttcttgtgatttttttaaagctatggaacatgatgaagtaacaaagcataagtatacccttcactatgaatgattatgttttcacatctttcactagatgtgtgtaagaaaaaatatttaatgtagcatgtattaaccaagcaattgagaggaataccgttcactacttacagtttatttcagaaatcagtgatttgaatttaattcataaattttggcaacataccttcatctagctcttgaacacctg

SEQ ID NO: 437420 - DNA, 604 bp, Homo sapiens
atggtaagtggagaaagataaggctgaataacctgacaagaaccacactgatgtgagagttttgattccatgctaaggaattttcaacttttcccaggtgcaaaaggaaaccaatgacaaagtcaatgactagagatttaaaatgtcactggtcaggtgactgcttgtgacctgtaattgcttaactaattattatcacatgagtgtggggtctgttagccttaaatcactaccttaaccttgagaagttgatgatgcctttgttttctgagaacagtttcagtgtgcaggctgacagttctataggggtggcagaagaaaagtgtagggccagaaaaaaagagatacacagacttcttgtgatttttttaaagctatggaacatgatgaagtaacaaagcataagtatacccttcactatgaatgattatgttttcacatctttcactagatgtgtgtaagaaaaaatatttaaygtagcatgtattaaccaagcaattgagaggaataccgttcactacttacagtttatttcagaaatcagtgatttgaatttaattcataaattttggcaacataccttcatctagctcttgaacacctg

SEQ ID NO: 437421 - DNA, 604 bp, Homo sapiens
atggtaagtggagaaagataaggctgaataacctgacaagaaccacactgatgtgagagttttgattccatgctaaggaattttcaacttttcccaggtgcaaaaggaaaccaatgacaaagtcaatgactagagatttaaaatgtcactggtcaggtgactgcttgtgacctgtaattgcttaactaattattatcacatgagtgtggggtctgttagccttaaatcactaccttaaccttgagaagttgatgatgcctttgttttctgagaacagtttcagtgtgcaggctgacagttctataggggtggcagaagaaaagtgtagggccagaaaaaaagagatacacagacttcttgtgatttttttaaagctatggaacatgatgaagtaacaaagcataagtatacccttcactatgaatgattatgttttcacatctttcactagatgtgtgtaagaaaaaatatttaatgtagcatgtattaaccaagcaattgagaggaataccgttcactacttacagtttatttcagaaatcartgatttgaatttaattcataaattttggcaacataccttcatctagctcttgaacacctg

SEQ ID NO: 437422 - DNA, 485 bp, Homo sapiens
gttaaaactttgtacatttcataatttactcatgataaattttcaagttgaattcctaggccaaagggtatacagattttaaagactttcaatgttggcagatatcactgtaggataattataccaatttatactcttaacagtaatatatgagtgtatatatttacctattccttgccagttctggaaattgtgaatttaacagaatcttccaaaaagcattgaaaattggcctgggaatgtaaatatccttttcttccccattcagcttactaatgaatctatcataatctcagctgtctgaatctaaaagagaaccagtaaaattgagataacaagtttattgcaaaataaatgacctgaaagccacaggsattgggtggggtaggagaagggcaggtagtggtgactgaggtgactctgtgtttgggtttttgaaaagattgtagatttgaaggataatgagttcagagaagtagaaaggc

SEQ ID NO: 437423 - DNA, 596 bp, Homo sapiens
atgagtgtatatatttacctattccttgccagttctggaaattgtgaatttaacagaatcttccaaaaagcattgaaaattggcctgggaatgtaaatatccttttcttccccattcagcttactaatgaatctatcataatctcagctgtctgaatctaaaagagaaccagtaaaattgagataacaagtttattgcaaaataaatgacctgaaagccacaggcattgggtgsggtaggagaagggcaggtagtggtgactgaggtgactctgtgtttgggtttttgaaaagattgtagatttgaaggataatgagttcagagaagtagaaaggcaaataggggctgttataaataaggacagtggcatgagccaacggggttatctctcatatttaaagaacatggctagatctggtttccctataagttgattccttactgttattctgagttgaatgcatatcttttgtctcagtgaagcctgaatggcttttgatgtctctgatctggaaaggttgtttgtgtatctcagaataagtcattttgctaaaaaaggctactcctgagggagaacagtggaaaaaagagttgga

SEQ ID NO: 437424 - DNA, 563 bp, Homo sapiens
ataatctcagctgtctgaatctaaaagagaaccagtaaaattgagataacaagtttattgcaaaataaatgacctgaaagccacaggcattgggtggggtaggagaagggcaggtagtggtgactgaggtgaytctgtgtttgggtttttgaaaagattgtagatttgaaggataatgagttcagagaagtagaaaggcaaataggggctgttataaataaggacagtggcatgagccaacggggttatctctcatatttaaagaacatggctagatctggtttccctataagttgattccttactgttattctgagttgaatgcatatcttttgtctcagtgaagcctgaatggcttttgatgtctctgatctggaaaggttgtttgtgtatctcagaataagtcattttgctaaaaaaggctactcctgagggagaacagtggaaaaaagagttggaaaagtggattgtagctagttgaaaaaaggatttgaatgtcaagctttaggaattaggttcttatttggtatgttacaggcaaccatatggacttttgagcaggt

SEQ ID NO: 437425 - DNA, 563 bp, Homo sapiens
ataatctcagctgtctgaatctaaaagagaaccagtaaaattgagataacaagtttattgcaaaataaatgacctgaaagccacaggcattgggtggggtaggagaagggcaggtagtggtgactgaggtgactctgtgtttgggtttytgaaaagattgtagatttgaaggataatgagttcagagaagtagaaaggcaaataggggctgttataaataaggacagtggcatgagccaacggggttatctctcatatttaaagaacatggctagatctggtttccctataagttgattccttactgttattctgagttgaatgcatatcttttgtctcagtgaagcctgaatggcttttgatgtctctgatctggaaaggttgtttgtgtatctcagaataagtcattttgctaaaaaaggctactcctgagggagaacagtggaaaaaagagttggaaaagtggattgtagctagttgaaaaaaggatttgaatgtcaagctttaggaattaggttcttatttggtatgttacaggcaaccatatggacttttgagcaggt

SEQ ID NO: 437426 - DNA, 629 bp, Homo sapiens
tttatcagttaaatactcaaacttgcaaactggtaaaatgtggaaagataaaggattacctcatgctaagcatttatattttgaattccaaacactaccacatcaactataattttattttttgtatgtatgcatttagttttattatagcaaagcaacttgcacatttttaaatatttaaaactaagcgtcatctttcctttctagrgaaacaacaagaaaatttaaaaacaagcaggaacaaaattaaaatcgacaaagtcagttccaaataagatcctacaggatcttattgactctcccattgaatagcaggactcaagtcatcattaggagagaagtaatttaaaagcgtcatcttaaactgcaaagatgtccattaaacatgtcaaaggagaaaccttgttgtctaaatgcccacttaaccaacccgaacatctcaaactcatcctttgctgaccttctataaccccttttttagtttagctttttctataaataagagaaaatagatacatgttggcaaatgctaactgtccatattcatatagagacaaaatgtgctctctgagcccaatagagagtaaggattttcatcaaaataaaaatttattcagtaaaatggcctt

SEQ ID NO: 437427 - DNA, 596 bp, Homo sapiens
atgagtgtatatatttacctattccttgccagttctggaaattgtgaatttaacagaatcttccaaaaagcattgaaaattggcctgggaatgtaaatatccttttcttccccattcagcttactaatgaatctatcataatctcagctgtctgaatctaaaagagaaccagtaaaattgagataacaagtttattgcaaaataaatgacctgaaagccacaggcattgggtggggtaggagaagggcaggtagtggtgactgaggtgactctgtgtttgggtttttgaaaagattgtagatttgaaggataakgagttcagagaagtagaaaggcaaataggggctgttataaataaggacagtggcatgagccaacggggttatctctcatatttaaagaacatggctagatctggtttccctataagttgattccttactgttattctgagttgaatgcatatcttttgtctcagtgaagcctgaatggcttttgatgtctctgatctggaaaggttgtttgtgtatctcagaataagtcattttgctaaaaaaggctactcctgagggagaacagtggaaaaaagagttgga

SEQ ID NO: 437428 - DNA, 629 bp, Homo sapiens
tttatcagttaaatactcaaacttgcaaactggtaaaatgtggaaagataaaggattacctcatgctaagcatttatattttgaattccaaacactaccacatcaactataattttattttttgtatgtatgcatttagttttattatagcaaagcaacttgcacatttttaaatatttaaaactaagcgtcatctttcctttctagagaaacaacaagaaaatttaaaaacaagcaggaacaaaattaaaatcgacaaagtcagttccaaataagatcctacaggatcttattgactctcccattgaatagcaggactcaagtcatcattaggagagaagtaatttaaaagcgtcatcttaaactgcaaagatgtccattaaacatgycaaaggagaaaccttgttgtctaaatgcccacttaaccaacccgaacatctcaaactcatcctttgctgaccttctataaccccttttttagtttagctttttctataaataagagaaaatagatacatgttggcaaatgctaactgtccatattcatatagagacaaaatgtgctctctgagcccaatagagagtaaggattttcatcaaaataaaaatttattcagtaaaatggcctt

SEQ ID NO: 437429 - DNA, 629 bp, Homo sapiens
tttatcagttaaatactcaaacttgcaaactggtaaaatgtggaaagataaaggattacctcatgctaagcatttatattttgaattccaaacactaccacatcaactataattttattttttgtatgtatgcatttagttttattatagcaaagcaacttgcacatttttaaatatttaaaactaagcgtcatctttcctttctagagaaacaacaagaaaatttaaaaacaagcaggaacaaaattaaaatcgacaaagtcagttccaaataagatcctacaggatcttattgactctcccattgaatagcaggactcaagtcatcattaggagagaagtaatttaaaagcgtcatcttaaactgcaaagatgtccattaaacatgtcaaaggagaaaccttgttgtctaaatgcccacttaaccaacccgaacatctcaaactcatcctttgctgaccttmtataaccccttttttagtttagctttttctataaataagagaaaatagatacatgttggcaaatgctaactgtccatattcatatagagacaaaatgtgctctctgagcccaatagagagtaaggattttcatcaaaataaaaatttattcagtaaaatggcctt

SEQ ID NO: 437430 - DNA, 629 bp, Homo sapiens
tttatcagttaaatactcaaacttgcaaactggtaaaatgtggaaagataaaggattacctcatgctaagcatttatattttgaattccaaacactaccacatcaactataattttattttttgtatgtatgcatttagttttattatagcaaagcaacttgcacatttttaaatatttaaaactaagcgtcatctttcctttctagagaaacaacaagaaaatttaaaaacaagcaggaacaaaattaaaatcgacaaagtcagttccaaataagatcctacaggatcttattgactctcccattgaatagcaggactcaagtcatcattaggagagaagtaatttaaaagcgtcatcttaaactgcaaagatgtccattaaacatgtcaaaggagaaaccttgttgtctaaatgcccacttaaccaacccgaacatctcaaactcatcctttgctgaccttctataaccccytttttagtttagctttttctataaataagagaaaatagatacatgttggcaaatgctaactgtccatattcatatagagacaaaatgtgctctctgagcccaatagagagtaaggattttcatcaaaataaaaatttattcagtaaaatggcctt

SEQ ID NO: 437431 - DNA, 577 bp, Homo sapiens
cataatctcagctgtctgaatctaaaagagaaccagtaaaattgagataacaagtttattgcaaaataaatgacctgaaagccacaggcattgggtggggtaggagaagggcaggtagtggtgactgaggtgactctgtgtttgggtttttgaaaagattgtagatttgaaggataatgagttcagagaagtagaaaggcaaatagkggctgttataaataaggacagtggcatgagccaacggggttatctctcatatttaaagaacatggctagatctggtttccctataagttgattccttactgttattctgagttgaatgcatatcttttgtctcagtgaagcctgaatggcttttgatgtctctgatctggaaaggttgtttgtgtatctcagaataagtcattttgctaaaaaaggctactcctgagggagaacagtggaaaaaagagttggaaaagtggattgtagctagttgaaaaaaggatttgaatgtcaagctttaggaattaggttcttatttggtatgttacaggcaaccatatggacttttgagcaggtgaaaagtacagta

SEQ ID NO: 437432 - DNA, 596 bp, Homo sapiens
atgagtgtatatatttacctattccttgccagttctggaaattgtgaatttaacagaatcttccaaaaagcattgaaaattggcctgggaatgtaaatatccttttcttccccattcagcttactaatgaatctatcataatctcagctgtctgaatctaaaagagaaccagtaaaattgagataacaagtttattgcaaaataaatgacctgaaagccacaggcattgggtggggtaggagaagggcaggtagtggtgactgaggtgactctgtgtttgggtttttgaaaagattgtagatttgaaggataatgagttcagagaagtagaaaggcaaataggggctgttataaataaggacagtggcatgagccaacggggttatctctcatatttaaagaacatggctasatctggtttccctataagttgattccttactgttattctgagttgaatgcatatcttttgtctcagtgaagcctgaatggcttttgatgtctctgatctggaaaggttgtttgtgtatctcagaataagtcattttgctaaaaaaggctactcctgagggagaacagtggaaaaaagagttgga

SEQ ID NO: 437433 - DNA, 543 bp, Homo sapiens
tactttaaaaaatatcaccacacagatcgattcaccttcttttcctcatgtgtacacattcctgtgtattactgaatccagttaaggatacagaaggtgttatcttcctgccaaactggtattgttattcacacaacatattcagcccactagtcattcctcccctgatgaatctgcaatgcttaaaaacctgaagtctcaaaaataaatgagtatgtggktgagaccgatggtagtaaattatacattgtggaatgatttccctctttctttttattagaaactcaaatcaacctcagagttcctcacgttaaatcatctgcttaaatccttccaatagatgtctatctcagaagaaaagtaaaattacagtggccttagatgctctaagtaacctgccctccacctcccaccctgactcagctgctatatctctcctccctactcactccattcctactctatgtgagtcctgccactcgttagtctgaaatcctccttagtctgaaaatggggatccagtgtcaaactaataaatcacag

SEQ ID NO: 437434 - DNA, 543 bp, Homo sapiens
tactttaaaaaatatcaccacacagatcgattcaccttcttttcctcatgtgtacacattcctgtgtattactgaatccagttaaggatacagaaggtgttatcttcctgccaaactggtattgttattcacacaacatattcagcccactagtcattcctcccctgatgaatctgcaatgcttaaaaacctgaagtctcaaaaataaatgagtatgtgggtgagaccgatggtagtaaattatacattgtggaatgatttccctctttctttttattagaaactcaaatcaacctcagagttcctcacrttaaatcatctgcttaaatccttccaatagatgtctatctcagaagaaaagtaaaattacagtggccttagatgctctaagtaacctgccctccacctcccaccctgactcagctgctatatctctcctccctactcactccattcctactctatgtgagtcctgccactcgttagtctgaaatcctccttagtctgaaaatggggatccagtgtcaaactaataaatcacag

SEQ ID NO: 437435 - DNA, 543 bp, Homo sapiens
tactttaaaaaatatcaccacacagatcgattcaccttcttttcctcatgtgtacacattcctgtgtattactgaatccagttaaggatacagaaggtgttatcttcctgccaaactggtattgttattcacacaacatattcagcccactagtcattcctcccctgatgaatctgcaatgcttaaaaacctgaagtctcaaaaataaatgagtatgtgggtgagaccgatggtagtaaattatacattgtggaatgatttccctctttctttttattagaaactcaaatcaacctcagagttcctcacgttaaatcatctgcttaaatscttccaatagatgtctatctcagaagaaaagtaaaattacagtggccttagatgctctaagtaacctgccctccacctcccaccctgactcagctgctatatctctcctccctactcactccattcctactctatgtgagtcctgccactcgttagtctgaaatcctccttagtctgaaaatggggatccagtgtcaaactaataaatcacag

SEQ ID NO: 437436 - DNA, 533 bp, Homo sapiens
accagtaaaattgagataacaagtttattgcaaaataaatgacctgaaagccacaggcattgggtggggtaggagaagggcaggtagtggtgactgaggtgactctgtgtttgggtttttgaaaagattgtagatttgaaggataatgagttcagagaagtagaaaggcaaataggggctgttataaataaggacagtggcatgagccaacggggttatctctcatatttaaagaacatggctagatctggtttccctataagttgattccttactgttattctgagttgaatgcataycttttgtctcagtgaagcctgaatggcttttgatgtctctgatctggaaaggttgtttgtgtatctcagaataagtcattttgctaaaaaaggctactcctgagggagaacagtggaaaaaagagttggaaaagtggattgtagctagttgaaaaaaggatttgaatgtcaagctttaggaattaggttcttatttggtatgttacaggcaaccatatggacttttgagcaggt

SEQ ID NO: 437437 - DNA, 286 bp, Homo sapiens
ctatatctctcctccctactcactccattcctactctatgtgagtcctgccactcgttagtctgaaatcctccttagtctgaaaatggggatscagtgtcaaactaataaatcacagatagctatgcctctttttgtcctggacaaagttatatccaaatgatagtaattgagccttgaaataaaaattaggagcaaattttttatttaaaaatgaaagtaaattataaatgccagtgggaagattaaatcaaatatgatttggctaaaatttactgcattttccc

SEQ ID NO: 437438 - DNA, 577 bp, Homo sapiens
cataatctcagctgtctgaatctaaaagagaaccagtaaaattgagataacaagtttattgcaaaataaatgacctgaaagccacaggcattgggtggggtaggagaagggcaggtagtggtgactgaggtgactctgtgtttgggtttttgaaaagattgtagatttgaaggataatgagttcagagaagtagaaaggcaaataggggctgttataaataaggacagtggcatgagccaacggggttatctctcatatttaaagaacatggctagatctggtttccctataagttgattccttactgttattctgagttgaatgcatatcttttgtctcagtgaagcctgaatgkcttttgatgtctctgatctggaaaggttgtttgtgtatctcagaataagtcattttgctaaaaaaggctactcctgagggagaacagtggaaaaaagagttggaaaagtggattgtagctagttgaaaaaaggatttgaatgtcaagctttaggaattaggttcttatttggtatgttacaggcaaccatatggacttttgagcaggtgaaaagtacagta

SEQ ID NO: 437439 - DNA, 286 bp, Homo sapiens
ctatatctctcctccctactcactccattcctactctatgtgagtcctgccactcgttagtctgaaatcctccttagtctgaaaatggggatccagtgtcaaactaataaatcacagatagctatgcctctttttgtcctggacaaagttatatccaaatgatagtaattgagccttgaaataaaaattaggagcaaattttttatttaaaaatgaaagtaaattataaatgccagtgggaagattaaatcaaatatgattkggctaaaatttactgcattttccc

SEQ ID NO: 437440 - DNA, 463 bp, Homo sapiens
gaatctaaaagagaaccagtaaaattgagataacaagtttattgcaaaataaatgacctgaaagccacaggcattgggtggggtaggagaagggcaggtagtggtgactgaggtgactctgtgtttgggtttttgaaaagattgtagatttgaaggataatgagttcagagaagtagaaaggcaaataggggctgttataaataaggacagtggcatgagccaacggggttatctctcatatttaaagaacatggctagatctggtttccctataagttgattccttactgttattctgagttgaatgcatatcttttgtctcagtgaagcctgaatggcttttgatgtctctgatctggaaaggttrtttgtgtatctcagaataagtcattttgctaaaaaaggctactcctgagggagaacagtggaaaaaagagttggaaaagtggattgtagctagtt

SEQ ID NO: 437441 - DNA, 533 bp, Homo sapiens
accagtaaaattgagataacaagtttattgcaaaataaatgacctgaaagccacaggcattgggtggggtaggagaagggcaggtagtggtgactgaggtgactctgtgtttgggtttttgaaaagattgtagatttgaaggataatgagttcagagaagtagaaaggcaaataggggctgttataaataaggacagtggcatgagccaacggggttatctctcatatttaaagaacatggctagatctggtttccctataagttgattccttactgttattctgagttgaatgcatatcttttgtctcagtgaagcctgaatggcttttgatgtctctgatctggaaaggttgtttgtgtatctcagaataagtcattttgctaaaaaaggctactcctgagggagarcagtggaaaaaagagttggaaaagtggattgtagctagttgaaaaaaggatttgaatgtcaagctttaggaattaggttcttatttggtatgttacaggcaaccatatggacttttgagcaggt

SEQ ID NO: 437442 - DNA, 322 bp, Homo sapiens
ttataaataaggacagtggcatgagccaacggggttatctctcatatttaaagaacatggctagatctggtttccctataagttgattccttactgttattctgagttgaatgcatatcttttgtctcagtgaagcctgaatggcttttgatgtctctgatctggaaaggttgtttgtgtatctcagaataagtcattttgctaaaaaaggctactcctgagggagaacagtggaaaaaagagtwggaaaagtggattgtagctagttgaaaaaaggatttgaatgtcaagctttaggaattaggttcttatttggtatgtt

SEQ ID NO: 437443 - DNA, 533 bp, Homo sapiens
accagtaaaattgagataacaagtttattgcaaaataaatgacctgaaagccacaggcattgggtggggtaggagaagggcaggtagtggtgactgaggtgactctgtgtttgggtttttgaaaagattgtagatttgaaggataatgagttcagagaagtagaaaggcaaataggggctgttataaataaggacagtggcatgagccaacggggttatctctcatatttaaagaacatggctagatctggtttccctataagttgattccttactgttattctgagttgaatgcatatcttttgtctcagtgaagcctgaatggcttttgatgtctctgatctggaaaggttgtttgtgtatctcagaataagtcattttgctaaaaaaggctactcctgagggagaacagtggaaaaaagagttggaaaagtggattgtagctagttgaaaaaaggatttgaatgtcaagctttaggaattaggttcttatttggtatgttacaggcaaycatatggacttttgagcaggt

SEQ ID NO: 437444 - DNA, 549 bp, Homo sapiens
gacaaaaactccattgcagtgaagagcattactaggtggacaaaggycaaatgacaggtgaccagatcatgggtcttaggcctgtgatcctgaaagaatgtaaaaatgtggaagagaagatggaagatgttggctgagattctaatgctagcttgacgactaaaggcatttttaaaagataacataagtgaaaactgtgttcatcctaatggcatagaagaaacatattttgtagatctgaaaaaaaatgacttcatatcatcaatgttctttcttcagtgtttgaaattattaccatcattattatttttattttactcacttattcttgattaaccttgacgctaaattattgataatgtaccccctgcactcttttctaagccaaataattttatatatatataattattactttctatatataatgaatacatttacaatcatgcctgtatagggtgcacactatctatattcctaatgccctttgccctccatctttagaaatcaatttttgttattttttgttctctcattttatttttagca

SEQ ID NO: 437445 - DNA, 579 bp, Homo sapiens
gggctgttataaataaggacagtggcatgagccaacggggttatctctcatatttaaagaacatggctagatctggtttccctataagttgattccttactgttattctgagttgaatgcatatcttttgtctcagtgaagcctgaatggcttttgatgtctctgatctggaaaggttgtttgtgtatctcagaataagtcattttgctaaaaaaggctactcctgagggagaacagtggaaaaaagagttggaaaagtggattgtagctagttgaaaaaaggatttgaatgtcaagctttaggaattaggttcttatttggtatgttacaggcaaccatatggacttttgagcaggtgaaaagtacagtattaatgggtagggatagcttgggagggaaggagacatggacattgagcttcagaaaaaccagttagtaaaatgtttcagataatacattggtaatagaaaaagatccattgaaatgtgaggcattcacatggaaagaactggcagaatgtggtaattaayagctataaggaccccaaaataaaaggagtaatcaaacatcactcaaag

SEQ ID NO: 437446 - DNA, 598 bp, Homo sapiens
tggaaagaactggcagaatgtggtaattaacagctataaggaccccaaaataaaaggagtaatcaaacatcactcaaagcttttagcacagtttttgagaacagtgtcagaaggagaagacaactttgttcctaaaagttatattgtaaaataaatgtagcttatacatttttgaaagtgaaatctcaggattcatggtatcattacttctacttgccaaattattaaaatggtgttatatttcttaagatattttaaagcctctattgtagaacagaaatrgtagaaaatggaactaatgtttattaacagttactatggaagagggaatagaaatgtgttgctcttgaacaggtttattcaactttggcactattgacatcttgggctagctaattccttgtcacgggcagtatgtcctgtgtgtaggatgttaagcagcatttctggcctccacccactagatatagtagcacacccatgcccctcccctcctccctgcctctgtgacaaccaaaaatgtctttagacattgccagatgtcccttgggcagcaaaaattgctccctctccccagttaagagccattgttctagag

SEQ ID NO: 437447 - DNA, 553 bp, Homo sapiens
tggtaattaacagctataaggaccccaaaataaaaggagtaatcaaacatcactcaaagcttttagcacagtttttgagaacagtgtcagaaggagaagacaactttgttcctaaaagttatattgtaaaataaatgtagcttatacatttttgaaagtgaaatctcaggattcatggtatcattacttctacttgccaaattattaaaatggtgttatatttcttaagatattttaaagcctctattgtagaacagaaatagtagaaaatggaactaatgtttattaacagttactatggaagagggaatagaaatgtgttgctcttgaacaggtttattcarctttggcactattgacatcttgggctagctaattccttgtcacgggcagtatgtcctgtgtgtaggatgttaagcagcatttctggcctccacccactagatatagtagcacacccatgcccctcccctcctccctgcctctgtgacaaccaaaaatgtctttagacattgccagatgtcccttgggcagcaaaaattgctccctctcc

SEQ ID NO: 437448 - DNA, 553 bp, Homo sapiens
tggtaattaacagctataaggaccccaaaataaaaggagtaatcaaacatcactcaaagcttttagcacagtttttgagaacagtgtcagaaggagaagacaactttgttcctaaaagttatattgtaaaataaatgtagcttatacatttttgaaagtgaaatctcaggattcatggtatcattacttctacttgccaaattattaaaatggtgttatatttcttaagatattttaaagcctctattgtagaacagaaatagtagaaaatggaactaatgtttattaacagttactatggaagagggaatagaaatgtgttgctcttgaacaggtttattcaactttggcactattgacatyttgggctagctaattccttgtcacgggcagtatgtcctgtgtgtaggatgttaagcagcatttctggcctccacccactagatatagtagcacacccatgcccctcccctcctccctgcctctgtgacaaccaaaaatgtctttagacattgccagatgtcccttgggcagcaaaaattgctccctctcc

SEQ ID NO: 437449 - DNA, 553 bp, Homo sapiens
tggtaattaacagctataaggaccccaaaataaaaggagtaatcaaacatcactcaaagcttttagcacagtttttgagaacagtgtcagaaggagaagacaactttgttcctaaaagttatattgtaaaataaatgtagcttatacatttttgaaagtgaaatctcaggattcatggtatcattacttctacttgccaaattattaaaatggtgttatatttcttaagatattttaaagcctctattgtagaacagaaatagtagaaaatggaactaatgtttattaacagttactatggaagagggaatagaaatgtgttgctcttgaacaggtttattcaactttggcactattgacatcttgggctagctaattccttgtcacgggcagtatgtcctgtgtgtaggatgttaagcagcatttctggcctccacccactagatatagtagcacacccrtgcccctcccctcctccctgcctctgtgacaaccaaaaatgtctttagacattgccagatgtcccttgggcagcaaaaattgctccctctcc

SEQ ID NO: 437450 - DNA, 553 bp, Homo sapiens
tggtaattaacagctataaggaccccaaaataaaaggagtaatcaaacatcactcaaagcttttagcacagtttttgagaacagtgtcagaaggagaagacaactttgttcctaaaagttatattgtaaaataaatgtagcttatacatttttgaaagtgaaatctcaggattcatggtatcattacttctacttgccaaattattaaaatggtgttatatttcttaagatattttaaagcctctattgtagaacagaaatagtagaaaatggaactaatgtttattaacagttactatggaagagggaatagaaatgtgttgctcttgaacaggtttattcaactttggcactattgacatcttgggctagctaattccttgtcacgggcagtatgtcctgtgtgtaggatgttaagcagcatttctggcctccacccactagatatagtagcacacccaygcccctcccctcctccctgcctctgtgacaaccaaaaatgtctttagacattgccagatgtcccttgggcagcaaaaattgctccctctcc

SEQ ID NO: 437451 - DNA, 583 bp, Homo sapiens
attatatcacatttatttttattttttgtgggtatacagtagttgtgtgtataaatggggtatatgagatactttgatacaggcatgcaacatgtaacaatcacagcatggtaaatggggtayccatctcctcaagcatttactctgtattacaaaaattgaattatatgatttcagttattttaaaaggtacaactaaattattattgattataataattgtcaattattgacaattgcagtgttgtggtatcaagtactactgttgtgctaccagtacaaactgtgttatcagtacaaatactactgttgtgctatcagcacaaataccctgttgtgcaatcaaatagtacctctacctcttattcattctttttaactatttcttgtacccattagccatcctcacttccctccatggccctaccaaactgcccccctactatgcttctcagcctctggtaaccatccttctactctctatctccgttgaattcaactcaatgggatccttagcgcccataaataaatgagaacatgcaaagtttgtctttctgtgcctggcttatttcatttaacataa

SEQ ID NO: 437452 - DNA, 598 bp, Homo sapiens
tggaaagaactggcagaatgtggtaattaacagctataaggaccccaaaataaaaggagtaatcaaacatcactcaaagcttttagcacagtttttgagaacagtgtcagaaggagaagacaactttgttcctaaaagttatattgtaaaataaatgtagcttatacatttttgaaagtgaaatctcaggattcatggtatcattacttctacttgccaaattattaaaatggtgttatatttcttaagatattttaaagcctctattgtagaacagaaatagtagaaaatggaactaatgtttattaacagttactatggaagagggaatagaaatgtgttgctcttgaacaggtttattcaactttggcactattgacatcttgggctagctaattccttgtcacgggcagtatgtcctgtgtgtaggatgttaagcagcatttctggcctccacccactagatatagtagcacacccatgcccctyccctcctccctgcctctgtgacaaccaaaaatgtctttagacattgccagatgtcccttgggcagcaaaaattgctccctctccccagttaagagccattgttctagag

SEQ ID NO: 437453 - DNA, 472 bp, Homo sapiens
aaactgtgttatcagtacaaatactactgttgtgctatcagcacaaataccctgttgtgcaatcaaatagtacctctacctcttattcattctttttaactatttcttgtacccattagccatcctcacttccctccatggccctaccaaactgcccccctactatgcttctcagcctctggtaaccatccttctactctctatctccgttgarttcaactcaatgggatccttagcgcccataaataaatgagaacatgcaaagtttgtctttctgtgcctggcttatttcatttaacataataaccctcatccatgttgttaaaaatgacagaatctcattctttttttctggctccactgtgtatacatactacattttctttatccattcatctgttgattgacacttacgttgcttccaaatcttggctattttcaacaatgctgcaacaaacatgggaatgtagac

SEQ ID NO: 437454 - DNA, 472 bp, Homo sapiens
aaactgtgttatcagtacaaatactactgttgtgctatcagcacaaataccctgttgtgcaatcaaatagtacctctacctcttattcattctttttaactatttcttgtacccattagccatcctcacttccctccatggccctaccaaactgcccccctactatgcttctcagcctctggtaaccatccttctactctctatctccgttgaattcaactcaatgggatccttagcrcccataaataaatgagaacatgcaaagtttgtctttctgtgcctggcttatttcatttaacataataaccctcatccatgttgttaaaaatgacagaatctcattctttttttctggctccactgtgtatacatactacattttctttatccattcatctgttgattgacacttacgttgcttccaaatcttggctattttcaacaatgctgcaacaaacatgggaatgtagac

SEQ ID NO: 437455 - DNA, 472 bp, Homo sapiens
aaactgtgttatcagtacaaatactactgttgtgctatcagcacaaataccctgttgtgcaatcaaatagtacctctacctcttattcattctttttaactatttcttgtacccattagccatcctcacttccctccatggccctaccaaactgcccccctactatgcttctcagcctctggtaaccatccttctactctctatctccgttgaattcaactcaatgggatccttagcgcccataaataartgagaacatgcaaagtttgtctttctgtgcctggcttatttcatttaacataataaccctcatccatgttgttaaaaatgacagaatctcattctttttttctggctccactgtgtatacatactacattttctttatccattcatctgttgattgacacttacgttgcttccaaatcttggctattttcaacaatgctgcaacaaacatgggaatgtagac

SEQ ID NO: 437456 - DNA, 583 bp, Homo sapiens
attatatcacatttatttttattttttgtgggtatacagtagttgtgtgtataaatggggtatatgagatactttgatacaggcatgcaacatgtaacaatcacagcatggtaaatggggtatccatctcctcaagcatttactctgtattacaaaaattgaattatatgatttcagttattttaaaaggtacaactaaattattattgattataataattgtcaattattgacaattgcagtgttgtggtatcaagtactactgttgtgctaccagtacaaactgtgttatcagtacaaatactactgttgtgctatcagcacaaataccctgttgtgcaatcaaatagtacctctacctcttattcattctttttaactatttcttgtacccattagccatcctcacttccctccatggccctaccaaactgcccccctactatgcttctcagcctctggtaaccatccttctactctctatctccgttgaattcaactcaatgggatccttagcgcccataaataaatgagaayatgcaaagtttgtctttctgtgcctggcttatttcatttaacataa

SEQ ID NO: 437457 - DNA, 368 bp, Homo sapiens
attgacatcttgggctagctaattccttgtcacgggcagtatgtcctgtgtgtaggatgttaagcagcatttctggcctccacccactagatatagtagcacacccatgcccctcccctcctccctgcctctgtgacaaccaaaaatgtctttagacattgccagatgtcccttgggcagcaaaaattgctccctctccccagttaagagccatwgttctagagtacagaatcagtaccactaaataaatgttattggtgtgtttagaacagtgcctagcacatagctggtactcaaatatttgttgaataaatgagtagtcagattttcattgtgaattaaaaacagaacaaaacttgatgtctgac

SEQ ID NO: 437458 - DNA, 554 bp, Homo sapiens
aaaggccagtggggctggaatggagtgagtgagragtaataggtgcagaacacacatggccttagagatcatggctctaggtgttttgttttattttccaatttttaaaattgtgttaaaatacacataacataagcgtctgggatcccgcaggatgctggccccaaacaggccaatttgtcctgtctctgtgggatttgttggttctggaagatcagatttggtctgggtcacccaaatctgtctgtaccccaacctccactgtctgctcttacctccctaggtgttggctcaggtactgggcaaactttaccaggaatatatacattgtgtggaatttcttagcttccatttcaacaaagttgaaacttgggggaaatgatttgccaagggttacaacttggggaaaatgatgatagtttgctttacaaattgctctagttaaccaataaaagtatggcatgcctacccaggtacagtggaattcgaggtaaacagcagaacagatgcatgctcaggtacatttgagttggagataaacagcaaaacagatg

SEQ ID NO: 437459 - DNA, 554 bp, Homo sapiens
aaaggccagtggggctggaatggagtgagtgagaagtaataggtgcagaacacacatggccttagagatcatggctctaggtgttttgttttattttccaatttttaaaattgtgttaaaatacacataacataagcgtctgggatcccgcaggatgctggccccaaacaggccaatttgtcctgtctctgtgggatttgttggttctrgaagatcagatttggtctgggtcacccaaatctgtctgtaccccaacctccactgtctgctcttacctccctaggtgttggctcaggtactgggcaaactttaccaggaatatatacattgtgtggaatttcttagcttccatttcaacaaagttgaaacttgggggaaatgatttgccaagggttacaacttggggaaaatgatgatagtttgctttacaaattgctctagttaaccaataaaagtatggcatgcctacccaggtacagtggaattcgaggtaaacagcagaacagatgcatgctcaggtacatttgagttggagataaacagcaaaacagatg

SEQ ID NO: 437460 - DNA, 554 bp, Homo sapiens
aaaggccagtggggctggaatggagtgagtgagaagtaataggtgcagaacacacatggccttagagatcatggctctaggtgttttgttttattttccaatttttaaaattgtgttaaaatacacataacataagcgtctgggatcccgcaggatgctggccccaaacaggccaatttgtcctgtctctgtgggatttgttggttctggaagatcagatttggtctgggtcacccaaatctgtctgtaccccaacctccactgtctgctcttacctccctaggtgttggctcaggtactgggcaaactttaccaggaatatatacattgtgtggaatttcttagcttccayttcaacaaagttgaaacttgggggaaatgatttgccaagggttacaacttggggaaaatgatgatagtttgctttacaaattgctctagttaaccaataaaagtatggcatgcctacccaggtacagtggaattcgaggtaaacagcagaacagatgcatgctcaggtacatttgagttggagataaacagcaaaacagatg

SEQ ID NO: 437461 - DNA, 604 bp, Homo sapiens
ctgtctctgtgggatttgttggttctggaagatcagatttggtctgggtcacccaaatctgtctgtaccccaacctccactgtctgctcttacctccctaggtgttggctcaggtactgggcaaactttaccaggaatatatacattgtgtggaatttcttagcttccatttcaacaaagttgaaacttgggggaaatgatttgccaagggttacaacttggggaaaatgatgatagtttgctttacaaattgctctagttaaccaataaaagtatggcatgcctacccaggtacagtggaattcgaggtaaacagcagaacagatgcatgctcaggtacatttgagttggagataaacagcaaaacagatgcgtgctcaggtacacttgaattcgaggtgaacagcagtatgcatrcgtgcccagctacacttgaattcgagataaacagcagaaaagatgagtgcccatgtacacttgaatttgagataaacagcagtatggatgcatgctcaggtacacttgaattcaaggtgaacggcagcacgatgtgtgcccagctacacttgagttcgaggtaaacatcagcacgatgcatgcccag

SEQ ID NO: 437462 - DNA, 604 bp, Homo sapiens
ctgtctctgtgggatttgttggttctggaagatcagatttggtctgggtcacccaaatctgtctgtaccccaacctccactgtctgctcttacctccctaggtgttggctcaggtactgggcaaactttaccaggaatatatacattgtgtggaatttcttagcttccatttcaacaaagttgaaacttgggggaaatgatttgccaagggttacaacttggggaaaatgatgatagtttgctttacaaattgctctagttaaccaataaaagtatggcatgcctacccaggtacagtggaattcgaggtaaacagcagaacagatgcatgctcaggtacatttgagttggagataaacagcaaaacagatgcgtgctcaggtacacttgaattcgaggtgaacagcagtatgcatgcgtgcccagctacacttgaattcgagataaacagcagaaaagatgmgtgcccatgtacacttgaatttgagataaacagcagtatggatgcatgctcaggtacacttgaattcaaggtgaacggcagcacgatgtgtgcccagctacacttgagttcgaggtaaacatcagcacgatgcatgcccag

SEQ ID NO: 437463 - DNA, 552 bp, Homo sapiens
ttttatattttagtagagatggggtttcaccttgttacccagctggtctcaaattcctgagctcaggcaatccgcctgcctcggcctgccaaagtgctaggattacaggtgtgagccaccatgcccagccattcccagctagtttttgtagatactggggtctcgctgtgttgcctaggctggtctcaaacccatgggctcaagtgatcctcccattacagcctcccaaagtgctgggattacaggcacrggccactgtgccctgccctgtcttcctttttgaagtctctctctctgtgtctttacttttatacttattttttctctcgtcatgtctttgcccctgtcttttttggagtcttactctgtcacacaggctggattgcagtggcacagttctagctcactgcagccttgaactcctggggtcaagtgatcctctagctcaagtgatcctcctacttcagcctctgagtagctgggactctatgtgtgcaccaccacgcctggctcctttgcccatttttgtttgttttttggagacagagtctt

SEQ ID NO: 437464 - DNA, 552 bp, Homo sapiens
ttttatattttagtagagatggggtttcaccttgttacccagctggtctcaaattcctgagctcaggcaatccgcctgcctcggcctgccaaagtgctaggattacaggtgtgagccaccatgcccagccattcccagctagtttttgtagatactggggtctcgctgtgttgcctaggctggtctcaaacccatgggctcaagtgatcctcccattacagcctcccaaagtgctgggattacaggcacgggccactgtgccctgccctgtcttcctttttgaagtctctctctctgtgtctttacttttatacttattttttctctcgtcatgtctttgcccytgtcttttttggagtcttactctgtcacacaggctggattgcagtggcacagttctagctcactgcagccttgaactcctggggtcaagtgatcctctagctcaagtgatcctcctacttcagcctctgagtagctgggactctatgtgtgcaccaccacgcctggctcctttgcccatttttgtttgttttttggagacagagtctt

SEQ ID NO: 437465 - DNA, 545 bp, Homo sapiens
tatgtagctggtcctgccaatgaacagtaaattgacatccatttccttaataccacaaatagaacagaatcaaacaatataaaattgtgtcatattactcttttaacagtctcaccagattctttcagtaggcctcttatttaagtagtgttgattgtagctttcctwtgacaaaactctactgaggaacagctaaatccatgttagtgggcaactgagggccaatgttgagatgacagatgtgtgactgtatcattcccccactagagattgtgtgagaccccactgtcagccaaataaccttaaaatgtatggattatctctgtgtttattttctattaccaaatttacaataatgataaaagaagaattatacaaattatatgaatttgacatcttagctgtctctttgaacacaagaaaaacagaggagcaagagaatgcttttcttcctattcgtaatagatgacttacatttccttgggtattcatgaacaagttaagaccataaagaaaattggataccaccataacattataaacct

SEQ ID NO: 437466 - DNA, 574 bp, Homo sapiens
taatatatatttcataaacctgctgctttatctctttttttcttatttcattctttaagaattaatgaaatattctggaagtaccatctcaacatgtctgtgggaaaagaaaacaagaaaaagagggcttaatttaacattcattccacaaatatttctgaagaacttataaagtgtcagcactgttataggcagaggaatagactagtgattttttaaaaaatttctgatttcatagagtttatgttctcaggatagcctagtttccttactttctagatcttgctcccaagtgtgacggacagaaatgatcatgtgatgacccttagggaataaatgkaaggcagcacccaagggagtaagaaggcaccaaggagaagatgaacctcaggtagagggcagaccataggtcagccaccttggcccatctgaaggtagtatttactccctgtgctgaaccttggaagttttggattctaattttaaaaggaaagtggtagtctcattttcccagaaaacttacatgttcactctccattacagatttcttacaataattactccaccactacac

SEQ ID NO: 437467 - DNA, 574 bp, Homo sapiens
taatatatatttcataaacctgctgctttatctctttttttcttatttcattctttaagaattaatgaaatattctggaagtaccatctcaacatgtctgtgggaaaagaaaacaagaaaaagagggcttaatttaacattcattccacaaatatttctgaagaacttataaagtgtcagcactgttataggcagaggaatagactagtgattttttaaaaaatttctgatttcatagagtttatgttctcaggatagcctagtttccttactttctagatcttgctcccaagtgtgacggacagaaatgatcatgtgatgacccttagggaataaatgtaaggcagcasccaagggagtaagaaggcaccaaggagaagatgaacctcaggtagagggcagaccataggtcagccaccttggcccatctgaaggtagtatttactccctgtgctgaaccttggaagttttggattctaattttaaaaggaaagtggtagtctcattttcccagaaaacttacatgttcactctccattacagatttcttacaataattactccaccactacac

SEQ ID NO: 437468 - DNA, 552 bp, Homo sapiens
ggctatgtgacatcagttctctcaccccaggaaaatttaagagcataaatttatagtctgaaataaagcaagaaatgagaacctgtaaagtattctggtgccacaaaggagtgttacattgatgtacaaggctttttattagaaccaaagctatgttatgggggaaaacatattgcatacaaatatctatactcgaattataagtttattaaaaatctcctggattccatctagtcttacatattttgcaaggttttaaaatatataatagtggtgatcttctaacatatgttgagatsagaaaactctaactttcataacacaacttgattagggtaatagacaggataaacggcattatgataattcataattcatcttgaaaattataaaattgcaaagaaattgtgatgctttactcttccaagcagactgtaataaaaattgaactttgtacattggtatctgtagacagttttactttgatttacctatatacaagattctgtaattttggtctaaagtactttatagatcctgtttctggaccct

SEQ ID NO: 437469 - DNA, 552 bp, Homo sapiens
ggctatgtgacatcagttctctcaccccaggaaaatttaagagcataaatttatagtctgaaataaagcaagaaatgagaacctgtaaagtattctggtgccacaaaggagtgttacattgatgtacaaggctttttattagaaccaaagctatgttatgggggaaaacatattgcatacaaatatctatactcgaattataagtttattaaaaatctcctggattccatctagtcttacatattttgcaaggttttaaaatatataatagtggtgatcttctaacatatgttgagatcagaaaactctaactttcataacacaacttgattagggyaatagacaggataaacggcattatgataattcataattcatcttgaaaattataaaattgcaaagaaattgtgatgctttactcttccaagcagactgtaataaaaattgaactttgtacattggtatctgtagacagttttactttgatttacctatatacaagattctgtaattttggtctaaagtactttatagatcctgtttctggaccct

SEQ ID NO: 437470 - DNA, 646 bp, Homo sapiens
ttgatggacctggcatactttctgtatatgacctttcacaacaaaaatgggttgtcaactgggtgcggtggctcacacctataatcccagcactttgagagactgaggcaggcgaatcacctaaggtgaggagtttgagaccagcctggccaacatggtgaagccccatctctactaaaaatacaaaaattagccaggcatggtggcatgtgcctgtaatcccagctacaagggaggttgaggcaggagaaccactggaacgcagaaggtggaggttgctgtgagccaagatcgtgccactgcactccagcctgggagacagagcaagactgtgtctcaaagaaggaaaataataataataataaaaagttctctaatggcaatcagtacttacagtaatacagtataaacaaatctgtatatcttctatctatccatccatctatccattcattcatccattctttcttctatctatccatcaattkatagctttgcaagcaatgtaatatgcaaaaaccaaaatttttatattcataattttattttctttaaattgaaactatcaaccataagcaagttgttttcaacatggttagggtggtatcctttagcatttgattaataaaaattgaagcaatgtgct

SEQ ID NO: 437471 - DNA, 555 bp, Homo sapiens
atgaatgagaaggacataggaatatggtggccactgagaggaatgcatacttccactcaatacactgaaacatagcccacagcccaccagcttaaaatgtctagatacagttttatctacctttttatcatcacatgaattctcttttcctttaaaagacttttatcactactactccctaaataataaaaaagtgctatttcctttctcactacaaaaatattttttaagccaaaaatgtgtgtgctcttaaggttaatttgggagaactacagaaatctctttattaaggaacatggctttyggaattttcccaagatatcagttttaattctattctcttatttttcccatattttagtgtacttcttttaattggcaaataaaattgtatacatttatcatgtttagttttttgaatatataagtttcccaaattctgtcactttaccttcaaatatagctcttgaaactcctctccctcattacctctcaaaattgtctctttgtattaacagcctcagctctggttccttaatttctcactcaaacatt

SEQ ID NO: 437472 - DNA, 555 bp, Homo sapiens
atgaatgagaaggacataggaatatggtggccactgagaggaatgcatacttccactcaatacactgaaacatagcccacagcccaccagcttaaaatgtctagatacagttttatctacctttttatcatcacatgaattctcttttcctttaaaagacttttatcactactactccctaaataataaaaaagtgctatttcctttctcactacaaaaatattttttaagccaaaaatgtgtgtgctcttaaggttaatttgggagaactacagaaatctctttattaaggaacatggctttcggaattttcccaagatatcagttttaattctattctcttatttttcccatattttagtgtacttcttttaattggcaaataaaattgtatacatttatcatgtttagttttttgaatatataagtttcccaaattctgtcactttaccttcaaatatagctcttgaaactcctctccctcattacctctcaaaattgtctcyttgtattaacagcctcagctctggttccttaatttctcactcaaacatt

SEQ ID NO: 437473 - DNA, 454 bp, Homo sapiens
aggagtatcttggatttttcattatccgcttgaccatttggttttgattacaaaattaggctcccatatttgtgggttctgtatcatattcaaccagccatgaatcagaatattaaagaataataataaaacaaaaagatccatataaaaatacagtataataactacttccatcacgtttacattgtgtttggtattacaagtaatctagagatgatttaaagcatgtgggagkctatgcataggttatatgcaaatactgtgccattttatataagggacttgagcatccgcagattttggtatccaccagggattctggaacctattccctatgcatactgaggaacaactctatagcaattttgatacttctacaattctgaatttttagaacagatatgtaaatatacatgaatagtgccaatgatgtgcagaatgataattatcactc

SEQ ID NO: 437474 - DNA, 635 bp, Homo sapiens
attaataaagccaatcaagctttatgataaatattcattaagcatctaccayatgccaagcatataaatgtgaaataaccatttttgccatcatagaacataaaattcaattcataaaactggagatttttcttaaaaactgaaagctgtatattgagattaaatttgaaggaagagttattattttgttgaatatttaatttatcctttccatatccacagtttatttatttatttttatatttttttgagacggagtctcgctctgttgtccagcctggaatgcagcagcgcgatctctgctcactgcaacctctacctcccaggctcaagggattctcccacctcagtctccagagtaactggaatcacaggcacgtgccaccacgcccagccaattttgtatttttagtagaaacagggtttcatcatgttggccaggctggtcttgaactcctgacctcaagggatcctctcaagtgatactcagcctcccaagtgctaggattacaggcatgagccacaatgctcagccacatatccactgttttaatttaaaatttgggtctttaatggccttctggcctggccaccatggtacccaaccatttcacctttgcattagttccagagag

SEQ ID NO: 437475 - DNA, 635 bp, Homo sapiens
attaataaagccaatcaagctttatgataaatattcattaagcatctaccatatgccaagcatataaatgtgaaataaccatttttgccatcatagaacataaaattcaattcataaaactggagatttttcttaaaaactgaaagctgtatattgagattaaatttgaaggaagagttattattttgttgaatatttaatttatcctttccatatccacagtttatttatttatttttatatttttttgagacggagtctcgctctgttgtccagcctggaatgcagcagcgcratctctgctcactgcaacctctacctcccaggctcaagggattctcccacctcagtctccagagtaactggaatcacaggcacgtgccaccacgcccagccaattttgtatttttagtagaaacagggtttcatcatgttggccaggctggtcttgaactcctgacctcaagggatcctctcaagtgatactcagcctcccaagtgctaggattacaggcatgagccacaatgctcagccacatatccactgttttaatttaaaatttgggtctttaatggccttctggcctggccaccatggtacccaaccatttcacctttgcattagttccagagag

SEQ ID NO: 437476 - DNA, 622 bp, Homo sapiens
tgtttttaagtttacatggatttatagagcagacattgaggtatggttttactagaggcagaggagaaataagccaatggtttttgaatctaggcaggtcagccattttcctccttctccagtggggtgttgtctttttcagccaattatttttagacaatatgatcgttctcatgtgtaaaaatctgtttctgcacgtggatcatgtctagagttactattctctgttgtccagccttagtccccactgccatttggaaagtgtctttgctcataatagcaaacaattggaaacaagccaggaaactatgtagcatttacaaattggaatactatggagctgtaaagaagaggtagggatatctccatatacagaatgggagagatacaaggaggcaytgttaactaaaaaagcaagaccaaaccagtagcatgctacctgtggtatatgaaaacaaagagggataatatatcataggaaaacatgcataaaaacactttggaactaatgaaaaatctcctttaattaacatttcctagagaggtgaggaagactagaaacaaaacaggtaagagcatgaggtgtagtacctgttaaaaataagataatctggaaaaaaat

SEQ ID NO: 437477 - DNA, 622 bp, Homo sapiens
tgtttttaagtttacatggatttatagagcagacattgaggtatggttttactagaggcagaggagaaataagccaatggtttttgaatctaggcaggtcagccattttcctccttctccagtggggtgttgtctttttcagccaattatttttagacaatatgatcgttctcatgtgtaaaaatctgtttctgcacgtggatcatgtctagagttactattctctgttgtccagccttagtccccactgccatttggaaagtgtctttgctcataatagcaaacaattggaaacaagccaggaaactatgtagcatttacaaattggaatactatggagctgtaaagaagaggtagggatatctccatatacagaatgggagagatacaaggaggcactgttaactaaaaaagcaagaccaaaccagtagcatgctacctgtggtatawgaaaacaaagagggataatatatcataggaaaacatgcataaaaacactttggaactaatgaaaaatctcctttaattaacatttcctagagaggtgaggaagactagaaacaaaacaggtaagagcatgaggtgtagtacctgttaaaaataagataatctggaaaaaaat

SEQ ID NO: 437478 - DNA, 622 bp, Homo sapiens
tgtttttaagtttacatggatttatagagcagacattgaggtatggttttactagaggcagaggagaaataagccaatggtttttgaatctaggcaggtcagccattttcctccttctccagtggggtgttgtctttttcagccaattatttttagacaatatgatcgttctcatgtgtaaaaatctgtttctgcacgtggatcatgtctagagttactattctctgttgtccagccttagtccccactgccatttggaaagtgtctttgctcataatagcaaacaattggaaacaagccaggaaactatgtagcatttacaaattggaatactatggagctgtaaagaagaggtagggatatctccatatacagaatgggagagatacaaggaggcactgttaactaaaaaagcaagaccaaaccagtagcatgctacctgtggtatatgaaaacaaagagggataatayatcataggaaaacatgcataaaaacactttggaactaatgaaaaatctcctttaattaacatttcctagagaggtgaggaagactagaaacaaaacaggtaagagcatgaggtgtagtacctgttaaaaataagataatctggaaaaaaat

SEQ ID NO: 437479 - DNA, 545 bp, Homo sapiens
aggcatcttatttctttcttagagcagtatttattgcttcagccctgcttgacacaattttcccatgttgggaaagaggtatatgaacttcatagcttattcaggtgtttgcatgtgtctaatttcaaaaagtaaagtcaacaaaaatacataattcctttccttctttctaggctctagaattaagtcaagaaaataatgaaagtacttaaaagtttcaaaaatgcttctttgcttggtgttgagttagttaaaataactgtgttaatttaaaaattggccattgcaactttattctcatcttggtttcaaaacaaaaaaaaaamcccaaaattacattttaggtatacgagagcaagagataagagtatatatttttcctttcttatgggaatataaattttgtttttcctaactgaaacaatgaacaaatcactttggtgaggaggattttggaataaactgcattgaaaatatttttaggagggcttatttacatgatacaactattaggacctgatcatttatcactgattacatatatt

SEQ ID NO: 437480 - DNA, 589 bp, Homo sapiens
atattagtatttcaaatacataaggttttcatttgcctccttatgactagtaaggatttaatgctgtgttgaaaaatcttaacttgccttcctaacaattagggcaccaggtaatgtcacccagagactcatcaggacctatgactggaatagttcctcctcagggtcccagctcagaaagtcaatttcagttgtcagtgtcactgaagggcatgtctcgctttacaggctgtgttttatgtatcttggacatagatctattttaaaagagtacaaagatcagaggtatatcctttacatactttgtttttaattcatgaaacaaaacatttattataaggaaacaaatagtatagaatttaaacatccttttagggtgtgtttgacagtcgttataagtttaccaccatgagggagttcgctggtactggctgaacaatttcatttgrtaagatttgacttttttagtgttctggttttaagctgctttccactttgcttcttcatcctgtcctcttgttttgagagcagtgctatcagtagcatccttctgataactaataaaattttattgtcttaatgggacaga

SEQ ID NO: 437481 - DNA, 596 bp, Homo sapiens
taaggggagagaagatataaaaatctatattgagcagagtactctaaaagggctgtattttatatgttaatatatagatagtgtttgtaaagtgacttttagattcagagcatatgaaagatgataataatttgtcttactttagacaacctggaaattttttctgatctttgataaaaatgcagtctcccaatctgagctatctccaggactctatctaagtacgagcaatttataaataaaattcccatttaaattgcagaacaaacgctcaacaccttactaagagaatgtggagggcaaggagtcaatcaatcaaatctagaaaatagtttctgggaatttaaaacttaaataatcaattagcaagaaaaagatataaggacaaattctatgcttgctgctttatttmaatcattatataataagggttatttattgattggtatctagtctcttttttcctttatattttcactagagtcttgagtgattgagtgtcacttctaggggcatggaattagttggggcattacttacatggggatgtgatgagattgaggaatgcagggatcaggtaggtcagggaagaagag

SEQ ID NO: 437482 - DNA, 596 bp, Homo sapiens
taaggggagagaagatataaaaatctatattgagcagagtactctaaaagggctgtattttatatgttaatatatagatagtgtttgtaaagtgacttttagattcagagcatatgaaagatgataataatttgtcttactttagacaacctggaaattttttctgatctttgataaaaatgcagtctcccaatctgagctatctccaggactctatctaagtacgagcaatttataaataaaattcccatttaaattgcagaacaaacgctcaacaccttactaagagaatgtggagggcaaggagtcaatcaatcaaatctagaaaatagtttctgggaatttaaaacttaaataatcaattagcaagaaaaagatataaggacaaattctatgcttgctgctttatttaaatcattatataataagggttatttattgattggtatctagtctcttttttcctttatattttcactagagtcttgrgtgattgagtgtcacttctaggggcatggaattagttggggcattacttacatggggatgtgatgagattgaggaatgcagggatcaggtaggtcagggaagaagag

SEQ ID NO: 437483 - DNA, 588 bp, Homo sapiens
tttctttttatgtagacagttctaacttctttggattatatttctggtgtccctggtgtttgatactccccccaaggtaggatcatcttaaaattttatgagtatgttttgagatctgcatcttccctcaacacattaataaaaatgttgaattagaaagaacctcacacatatcccttatgataacctcacttactacatctcaacaattcaacacagattttacaaaaattcactcaattcatttttacagacatttatgagagctttcctgctatagcagtagctggaggtgaagaggtggataagcccatattccctgttttcaaatagttcacacgtgaattacccatgagaaaccatttctcatctgagagctatcctgtaacttcttggtcagtgcaaaggtgagggaaaatatctcacttgttttgatycagcacagtttaaaaagctaaagagttactattaatttgttaaatatgagtattattgggtaaatgctatgtgtttgtatcattgtgtattattcgcagactcattcatagttgaagaagcaaatagttttggggttgaaagacactgggg

SEQ ID NO: 437484 - DNA, 573 bp, Homo sapiens
attgatcaggtaccatcttgaaacaaaggctaggtgctctattttagttgacaactgtgacacataaaaaacaagcaagagagggggaaggctagggccttgaacatcacaggctttaaaaaacgtttgaagaaaccattatgacaagcaggtctagggaagctgctgcaaaaatgtattcagaagagtcattaaaaaatgatgctttgtttgccttgtgaatatgaggtttctagcttgctgcagtgcttgctcctacagaggaaatgaggaggtctgcatactgcagttaccttgctttctttcttgrggacagggtagggggatagtagaaggggtggacggggttatagaggaagggtccaacattttttctccttaatcctaaatgtgtttccctcgatcgtgattctccagattttcctcatcaccagtgactctcaagaaagttgactattttgacatttgaattatttatttcttatgaaatagttgaataatgtaaatacctttagagttaactaatattacaacttccttgtacaattttagtacagagagtataagaaagaa

SEQ ID NO: 437485 - DNA, 529 bp, Homo sapiens
tatcccaccactcattgtagtctctttcttccatccaatcattttatttagttctcatattgctgatacttctgcaactttttactgtgctgattatttttgttttattttaattgtcctccctgggacttgtgacatttctcctcattcttacctctgtgtaaattctttcttcttttctctgattggtttctgttcttctgactgccccttaaatttgtttttctccaagatgccatctgcaattcttttatctgtttactctaaaaattatatttagtgatgtcaacagacacttagctttaatcatcaactgcaatatacaattcttgagtttaagtccactgyctggagctttttttctaaattctaatattatatttctaaccagtgtgctggttagaatccagtcgaagaagaagagtgtggcacagaggacaaactcatatactgaccacttcattacaaagtgattagtgccattgtaaaatgaaagcaggctgcaatgggttcttccacttattagcta

SEQ ID NO: 437486 - DNA, 487 bp, Homo sapiens
gtctttgttatcatttggagggtccagataaatagataatgcctatagattgtccagacatttaaactggggggtaatttttagcacctacttgcatttgttgtattaaaactctgctgtgttaatagcagtccctgaagttctgagaactatccaactacactggctaatttaaacaacatcctccccctacatcccaccatactgctttttttcattgaaagtatttattcaaactactctatgagcttctggctatgttttggattctatcttctcttgaccactttatttgcacttcttgaccctttctattctaaaagtcccagtctaccagtcctctcttttcttgaccctcccagaactcagagatctagactttctgtaaactcgmgtattttttaatctccatctcatttaattttatatgatcataacttttcttaaactagattaaaagcttctatagggcaaaaacctgtatgta

SEQ ID NO: 437487 - DNA, 651 bp, Homo sapiens
taattattatatattgaatgtttatttattaggaaacccttgttgatgtaggacaacatcatttagtcattatgttttgttttgtccttaaagaatctgcagaaaacaacagatgaaaacaagatttttaaaaaaaattctccacaactcttttattcattaggtacataaggaataactcctgagaatggagtaagtagtacattagttgtataaacaaaattctattcttaaattgatttcaaaatagcccaggaaaactgacccaatgctcttggatagtcttagctcagaggaaaycttctacatgagatgtagaatctcacagggcttccctaccaccctttcttattatcagattacttcagtgcttcatactcttttcttcagtgtagacaaagccttgggaaattggcatttcaccatcaccttttgtcttgtggaagtaaaaaaggtataaataaaataaattggcttcatttgattaattttcatattggcacaaatatcttcctctgagcagctgaaaacatttccctctgcagtttgaaaatgtgctttataaaaattcaccttcccttttggataaggttccaaaatgtttaagagcaaaaacaacagtggcagcagcattctcaccaccatgttaac

SEQ ID NO: 437488 - DNA, 516 bp, Homo sapiens
tatattgagaccattcattttcctctggctataaagtccatcatgcaagtcctgtggatagaatttagtcctgatgccacttcccagcctttccttcttgctttgtcactccaaatgtcaaatctagcaataggcacctctactgtaaatattcaaatattcttttcaattgaacaaggggattgaactgytcataagtttcgataaatgtgtcaaacttatgaagattttatattcttatcacacacatcactgatccccagacttcaagcattcatatcatttagtgattgtctcttaatggatttgtatgacatatttttgtttccaaaattagactgagctatagttaattccaatttagaaatttagttttcagaacttcatattgcttgaaataattgaaagcactatgggatgttagatgggaaaaacccacaggtatttgctgacaggatctgtgtaaatctgttaggattatccatattctcactcagagaggcagaaaacttagag

SEQ ID NO: 437489 - DNA, 609 bp, Homo sapiens
tctttatctcacaacatatgcaaaaatcaactcaaaatggattaagctcttaaatattagacctgaaactgtaaaatcactggaagaaaacacaggggtaaatctctacaatgtacacatataccttatatgtacacagtttttatttttcaattatacctaaataaagctggagaaataaaagaaaatatgcagcaccatttatgcagttttcttgcccccaaattaaaccaaatctaatccatcccctaaatctaaaaccaattatcacacaaattctggggctagagcagcaaccttgtgaagatgcaattaggcaaattctgaatgtgggtaattacacaaagcaaataacccagctatttctacaaatttatagcatgaaaaaaatggagataaggggaattataatagtttaaaagaaagttaagtgacaataccaaacaaatgcaaaccttgttaggattcaaatttaasaaagtaactatagaaaggcatctttgagaaatttgaacataaactgaacattaatttttttaaacttttgttaggtataacaataatattgaggctgtatttaaaaaagaatatcttttggacttgcacatt

SEQ ID NO: 437490 - DNA, 564 bp, Homo sapiens
ttctagaaaatcaatatttttatctgagatcactgttcattgatatgcttaaagtataacacaaggtttgaatctgagaactacattcatagttcttatttttaattaccattttataaaattcctttcccttgattatttctcaccaatgatttctcgttggtcctttctcttgtgtaactgttctctagctactaaagacatttattaaaagaagaagcagtagagatcattagaaggacaggtattttaactttttgcctaagtcttagatgtcatttggttatttccttctcagccaggcttcacattataagttgacctatttttctggaatgtccttgtaaaggacaccattcatttcccaaagtacagagggccactacyttctgagaaacagttttactaggtgctagagtcacctaattggatgaaatcacagggagctaagacctaagtgccatctttcatgcacactgttcatgccaagggcagaaaacaagaataagagaatggaaggaaagagaagcaccatacctaaaatataggccgagaatttgggga

SEQ ID NO: 437491 - DNA, 587 bp, Homo sapiens
aagagttattagcttaaataagcatgttttcgtcttgtaataaaaattggaataatggaaaaaagaaaaaaaawgttagggacttgatccagcaaacaatcctggaggaggtagaagtgtgggacaatctaatgcaggcttaagttttataaactgggcctactcgaaaggaataagaagacattagaggataacatatatttcagttctattgtttcaggaaaacagaggttgaggtaaaataacttcttttgctattgtaatagaaaatgttcttaagccctggaaaattcaaaagatctggaaggactaagactgggagaagacaatgtagaataggtcatatatttccaagaggttcctgagtgtccaagctcagaaagctacaacacagactcacacaatatagtcagccattctactggagttggagagatctagagagaagtctaagtttggggtagtagaaaatgtaaggctatacatttgacttcaagaattgttcactagaaatacagtcctttctctcaagagagagcaatagaatctcagagaatatgaaagaacaccatgcccctaggattgac

SEQ ID NO: 437492 - DNA, 565 bp, Homo sapiens
gaaaactaattccagaggatgtgtcatatctcaggcaacacaggccaggatgagggcaatgattagagaaatgagtgcaggaagaggtggggggaacatagtgtcattatataatttgtcacycaactatatttctcccttttccactcagttcctgtccttgaatgtgtattctctaacaagctaatttattgattttattacagtaagtaagagagcaaagttgcctttttaaacacatcattttaaataaaggatataagactaccttttttattaatggaacatcttggtgttgtataaagagcactgatctggaagcagaagagagcgttgtcttatctcgtccttctgagtctcagactggcgagatcgaagttctctgttctattgccttccatggaaatagaaaggcagaccaaagacctggaggtgctagctggcatctatgatccatgcttcatggtgtcctaaaaacagcatgctcattaattgatgctaagttgaaatgcctttcttgaatattttaaaattcatatctgatgtcttttcaaaagtataacca

SEQ ID NO: 437493 - DNA, 541 bp, Homo sapiens
tgagagcttagataagtatttaaaaaagttctttgcatattttaagtagccttcgcatccttttgcaatctttgttgatcaataccttccacctcctaatctacccctgtccttacccatgcaaatcaaattaaccactgttttagcctatcctaaatagcagagagtgaggcaagactacattgccaatcctttatagggaaatgacatttctaggcaaaggtgarggaaaaggaaatgaatcacagagggatggaagcaaatgcaaggtgatgtgttatggtgctggccagacaatgcttcacgaggtttccagacaggatgcgtggaaaagccaccactcacaacagtcctctacaaggaatttatctagtgtattattctaggcctgtctcccattggtctgtttgcctcatgagctgtctacttccctgagttttattgttgtatcacttggccccctttggaagtggtgtggggctttgtctagtccaaaattgcttggaagagccaaagcctgtggaccaagcttgcagtaaac

SEQ ID NO: 437494 - DNA, 513 bp, Homo sapiens
ttgactggaagtaattctcttttggagaacatcattgatttaatgaagacacacttgyaagtgttctgcagcacagttgaaatttcactcactttttagctctaggccattggttgaagtccaagttgacaatttcagcttgttacgtccctggtggacagacatccacaacataaacctattgtacataatcttgtaattttggcagtctgtgcattggagaagcctgaaaatgcaactgacacagaatacattactcttaacaaaagacaaaggaatgagtgaagaggatgtaaaactccatgagagcaacacaaaaaacatgaagaactggttgctctttcccacaattgcaatagtttccttttaatattgacatctttttaattcagaaaaaaaagaaaactaatacttatttttcaccaccaatagcaactgagaaatgggtatgagagaacagctacacagaaagaactgaaaacatacatttattataaatccactgatggaaaa

SEQ ID NO: 437495 - DNA, 513 bp, Homo sapiens
ttgactggaagtaattctcttttggagaacatcattgatttaatgaagacacacttgtaagtgttctgcagcacagttgaaatttcactcactttttagctctaggccattggtkgaagtccaagttgacaatttcagcttgttacgtccctggtggacagacatccacaacataaacctattgtacataatcttgtaattttggcagtctgtgcattggagaagcctgaaaatgcaactgacacagaatacattactcttaacaaaagacaaaggaatgagtgaagaggatgtaaaactccatgagagcaacacaaaaaacatgaagaactggttgctctttcccacaattgcaatagtttccttttaatattgacatctttttaattcagaaaaaaaagaaaactaatacttatttttcaccaccaatagcaactgagaaatgggtatgagagaacagctacacagaaagaactgaaaacatacatttattataaatccactgatggaaaa

SEQ ID NO: 437496 - DNA, 513 bp, Homo sapiens
ttgactggaagtaattctcttttggagaacatcattgatttaatgaagacacacttgtaagtgttctgcagcacagttgaaatttcactcactttttagctctaggccattggttgaagtccaagttgacaatttcagcttgttamgtccctggtggacagacatccacaacataaacctattgtacataatcttgtaattttggcagtctgtgcattggagaagcctgaaaatgcaactgacacagaatacattactcttaacaaaagacaaaggaatgagtgaagaggatgtaaaactccatgagagcaacacaaaaaacatgaagaactggttgctctttcccacaattgcaatagtttccttttaatattgacatctttttaattcagaaaaaaaagaaaactaatacttatttttcaccaccaatagcaactgagaaatgggtatgagagaacagctacacagaaagaactgaaaacatacatttattataaatccactgatggaaaa

SEQ ID NO: 437497 - DNA, 589 bp, Homo sapiens
tcaataatggaagaccatgctctcttatcatcttgcaggtctaagagactaagaatcaagtgcaatctttccaacgattgtaggttttattccttatatcagtatttttccatccacttattattctctttgataaaggagatacggcaagaaatagaggccagataacaatttactggtctctttttcagatgtacctttcccagggttcattgttgtaaggtataggatcctcccatttaagcctggatcactattctccatttggcaaaggtcyctctaaaaacatagctcagacctcactttctgggtcaattcttcctaggcatcaccaatagagtgagccgttctgagcccatctctggcagacccttccaaacttctagcccccatgagtaccttatcattcattttgatacccccaaacctgtaaaggctcggtatcaagtagtaatctcaaaaacaattcaaatgtatactagtcaccatctttctttaccttgggggatgcatttgaagacccccagtggatgcctgaagccacagatagttcagaaccttatacatactatgtttctacgcatacata

SEQ ID NO: 437498 - DNA, 484 bp, Homo sapiens
agaaagctgacatttctgagtccttcctggcagtaacctaggatattttttctctttcagagttacagaagatgtaccattttccatgtttttccttctttaccttcatgtccaggctagagaagcactggwtatgtataacaatgggagagaattccaggtcagaaagccagcaagctcttgactaatggaagctatgtgtccctggcaggagaggtacttccaggggctccattagatgatcactgcctgtccacagccgccagccccttcatgacagcataccatcaagagttttctaaataggagctttccaaaaacaacaccacaaagtgcatccctcttctcttagtgattgtccgtggagtggccaagggtagacttgggtagcaagagtataataactttttatttttggaaacaaaaagcaagtctacttattggcagctaaaatgctggcataggccagagagaaaagttcaga

SEQ ID NO: 437499 - DNA, 566 bp, Homo sapiens
catgttctgtgccagttgtgatctgcactagctctcccttttccatctcaaggcaattctgcctgggtttcctgcctaaagtcacatagtcgggagctaatagagttggcccccaaacaaagcktctcaactcctagttctctactgctttccaccaacacatgctcccctcttttaagtcattcagtttccgatatgtggattttgtgcctgaaagcaaactttgaattttggggtgccaagtgtagtcctaaacataggtaggatagaattatgtggtgtaataaaagccccaaaattccattgatccaaaatatttttttcatgtgtgaaactaaatgcctgaaaatttgccttaggaaacaactcattcctttgggtgaaaattcttggtttcatagagttctttatgttaaggatacataggagaatcactggacaagtaataagggtcatggagtctcctctggcccattatgtgcaatcgagcaagtagtttaaactcttcgggtctgttttgtcatctgtcaaaacttgtaactacttcttagttatcagcctgtaag

SEQ ID NO: 437500 - DNA, 566 bp, Homo sapiens
catgttctgtgccagttgtgatctgcactagctctcccttttccatctcaaggcaattctgcctgggtttcctgcctaaagtcacatagtcgggagctaatagagttggcccccaaacaaagcttctcaactcctagttctctactsctttccaccaacacatgctcccctcttttaagtcattcagtttccgatatgtggattttgtgcctgaaagcaaactttgaattttggggtgccaagtgtagtcctaaacataggtaggatagaattatgtggtgtaataaaagccccaaaattccattgatccaaaatatttttttcatgtgtgaaactaaatgcctgaaaatttgccttaggaaacaactcattcctttgggtgaaaattcttggtttcatagagttctttatgttaaggatacataggagaatcactggacaagtaataagggtcatggagtctcctctggcccattatgtgcaatcgagcaagtagtttaaactcttcgggtctgttttgtcatctgtcaaaacttgtaactacttcttagttatcagcctgtaag

SEQ ID NO: 437501 - DNA, 566 bp, Homo sapiens
catgttctgtgccagttgtgatctgcactagctctcccttttccatctcaaggcaattctgcctgggtttcctgcctaaagtcacatagtcgggagctaatagagttggcccccaaacaaagcttctcaactcctagttctctactgctttccaccaacacatgctcccctcttttaagtcattcagtttccgatatgtggattttgtgcctgaaagcaaactttgaattttggggtgccaagtgtagtcctaaacataggtaggatagaattatgtggtgtaataaaagccccaaaattccattgatccaaaatatttttttyatgtgtgaaactaaatgcctgaaaatttgccttaggaaacaactcattcctttgggtgaaaattcttggtttcatagagttctttatgttaaggatacataggagaatcactggacaagtaataagggtcatggagtctcctctggcccattatgtgcaatcgagcaagtagtttaaactcttcgggtctgttttgtcatctgtcaaaacttgtaactacttcttagttatcagcctgtaag

SEQ ID NO: 437502 - DNA, 578 bp, Homo sapiens
ttccttttcctcccaggtctctccatcccaccccatctctctctctcatctcctcacatctaaagcctattaatctttcaagactcagctcaagagcacaaagcctttctcagttcctctagcttgaggctctctctccttsctctgagctgccatgatatgggcacctgttccgaccatctcacagagaaaaaatgggtcagagtcactgtgttgtgtgttaagagcccatgctttagagttcagagcctggctctgtcacacactaaccatgtgaccttgagcaagtaagttaatctctctgaccttaagcctccctgtctgcaaaacgtgtgacacgcttgatgaaacatgtgtgatgtgcttggcaaggtggctgttaatgatcagcaataatgctcctgagctgcatggcacagggggaggggctgatatatgacagctattattattacatacttactaaccaaaaataacatattttaggttattgtatttgtgttcatgccttgccttaagccttatgttgggcattccttcaaggcatagctcttggacgactcatccttgtgtcttct

SEQ ID NO: 437503 - DNA, 578 bp, Homo sapiens
ttccttttcctcccaggtctctccatcccaccccatctctctctctcatctcctcacatctaaagcctattaatctttcaagactcagctcaagagcacaaagcctttctcagttcctctagcttgaggctctctctccttgctctgagctgccatgatatgggcacctgttcygaccatctcacagagaaaaaatgggtcagagtcactgtgttgtgtgttaagagcccatgctttagagttcagagcctggctctgtcacacactaaccatgtgaccttgagcaagtaagttaatctctctgaccttaagcctccctgtctgcaaaacgtgtgacacgcttgatgaaacatgtgtgatgtgcttggcaaggtggctgttaatgatcagcaataatgctcctgagctgcatggcacagggggaggggctgatatatgacagctattattattacatacttactaaccaaaaataacatattttaggttattgtatttgtgttcatgccttgccttaagccttatgttgggcattccttcaaggcatagctcttggacgactcatccttgtgtcttct

SEQ ID NO: 437504 - DNA, 641 bp, Homo sapiens
agaattgtcttcaatttctgtatacgggagatcattaagaaaatatgtaatcttaatgggtcatttcttttttccaaaaactgactttagagttcaaaaacagagatgacacgataaatagggaaagaggccgtgagtctgatgttaaaattcttgaaacctggcttcatcccataataattatataaccctggccaagttatgaacattgatgattctgtttcttcatctctcaaagacgtaaaataagatataacttgccttcttcaaatggtgggcctaaggatgagrgtagctaatacaaatgaaagggttttaaaaataatttatgtggttagcaaaaatgctatacaagaaaagaaaaataaaggatttcatagtcaaatagtttaggaaatcttagattattgtgcacatgaggcagagagagaaataatgacagatttctcagacacttcagtaaagagagaatagattctgcctgttacctcgtttgaccttggaaccctccctggctccatttcctgtcacacatctggagaacactggtggagaaaggtgattccagagcgcacggaggccatgatggtttttcacgtagggtgttaaagagcgaggtacagaagactcaatggagcaaa

SEQ ID NO: 437505 - DNA, 540 bp, Homo sapiens
caagttatgaacattgatgattctgtttcttcatctctcaaagacgtaaaataagatataacttgccttcttcaaatggtgggcctaaggatgagggtagctaatacaaatgaaagggttttaaaaataatttatgtggttagcaaaaatgctatacaagaaaagaaaaataaaggatttcatagtcaaatagtttaggaaatcttagattattgtgcacatgaggcagagagagaaataatgacagatttctcagacacttcagtaaagagagaatagattctgcctgttacctcgtttgaccttggaaccctccctggctccatttcctrtcacacatctggagaacactggtggagaaaggtgattccagagcgcacggaggccatgatggtttttcacgtagggtgttaaagagcgaggtacagaagactcaatggagcaaagctaccacagaattgatggcactaataacttcttgagggtgattctagctgagtgtttcctgcttgtttcttataaatgtatttggtacaggat

SEQ ID NO: 437506 - DNA, 626 bp, Homo sapiens
ttgggtagagaaaatcagtattaagctgcaactggacaggtgacaggaggatcaaatggacttctctgtgtctgcaatgaaagaagtctgagctaagattttatttagaacttattaaatgctcataaaaggatcagatgaataatttaaatgagcaagtaaccaatgacattcattcaaaactgcrtaaacttatgcaagaatgcatgttttctgatatttctgctttgtggaagctcgcagtgtgatccataatcatgtcacatgctattttcacctttgatactgtgagatccttgaaggtggagtcttcatgttatccacctttgtatcctgaacactcagcagggtgcctggtgcattgtagatgtgcaatatatgttgttctgaattgacttacacccaccaaccactatattaaaaatagaaaataaaagaaaaaaaaacaagttgtgtgacttcctctagacacagttgtaatttactatctaggacagtctcaccaatcaagtatttatctccagaccttgagaagataatttaccttcaacaattattattaataccttttaccaacttgggactatggcaaaattgaacttatgaaaaatgcctgtcttttttca

SEQ ID NO: 437507 - DNA, 632 bp, Homo sapiens
attattttaacattacattctagcaatgcatgtttgaatttgctgaataaagaaataggtttatatatttccactgttaacagaaaagcaataaaatactgcaagggaatttttcatttgttcttgaaatctgcttctaatgttcatttcactcccactaaaggcaggttattaccttggatttcctaaaatcagtgtatgctttaaaagtgaatattgagaattgtgggtactactaaatttaaaatacagaatgaccaatgccagatgaccctgactaaaataaactagaaaattgaagtgattataaagatcatttgcaggtcaaaaaataatttccccctcttagcctcttawgtccttcattttcctatctcctgattctgtctttcctatctcaactctccttattttcttaattctttgcacatagaaagattttgcttttcctgtcacctctgttagatgcatatacgggtactccaaacaccttgcttgataatttcagcttggcatcatcattacaggatgttaggctctatagcctgggtcaaatctcagggctaccactcactagctgaatgagctttagcaagttatctcaatgctctaagcctccattttctcataaa

SEQ ID NO: 437508 - DNA, 600 bp, Homo sapiens
tgcaggtcaaaaaataatttccccctcttagcctcttaagtccttcattttcctatctcctgattctgtctttcctatctcaactctccttattttcttaattctttgcacatagaaagattttgcttttcctgtcacctctgttagatgcatatacgggtactccaaacaccttgcttgataatttcagcttggcatcatcattacaggatgttaggctctatagcctgggtcaaatctcagggctaccactcactagctgaatgagctttagcaagttatctcaatgctctaagcctccattttctcataaataaagtatgagttgtagcattgttttgaaggttgagtaagatgatgcatataccatgcttaccaaacttaaaataagcataaactgttgttgttatcatgattaaccaatgcctcttccttctggtttagtgtaaaaagtgtggcacactgaactgacactggaccaaagatcagatcacttaccctgaggccctggctctrtgaccctgggcaagtcatttattccagaactctggttgtctcatctgtaagctgggaggcatagacaacactacattaaagagc

SEQ ID NO: 437509 - DNA, 611 bp, Homo sapiens
tatttggaatcgtgatgtttcctaataagaggaccaagccctgtaagtctgagcctcgatttttactcagaatcctagagaaaaatgcttagtcagaggctaacaaggtcttagcctccttgacccacagagaagaaatacaggaagggttaatacatcccagttggccaaacctgcagaagcagtcaccccctcccagtgtaccttgtagtttgaccatggcayttcacacacttcgcacgttctatctcctgtttgacttttttgagggtgttttctgtccacactagactgaatctctgagactggaatggtatcttcaccatttttctggtgtcgcatcactcagcatgctgccctgttcccagtcacctcaggaaaaaaggtataggccaggataacaggaagcacatggagtttggagtcccaaacactctgtatcatgaacttccttcccaatcctcccaaccaagcccttcttggtgccccttatctcagagaacagtgccatctgcctctaagttgctcaagtattaaaggcggatgcatccaggtgccctcttcccttcctacacaaatccagccaatcacttccagtcaatcatgtttcc

SEQ ID NO: 437510 - DNA, 586 bp, Homo sapiens
ttaaataccactgagcagacatgctgcaggttttaccatrtaaatatctcaaattactctataccttttccacagctttcattcaagcttttgttaattttcacatgaacagtaaccacctttctctctgcctccagccttgccttctcctaaaatcgaaaaaagcctaaaactaatcttcatattttatcaaatgtagatccccaagcccaaaacatttaattcagtgcagggtgtggagagaatttgtctttaacaactgcactcctggggcagcaatacaggtcagaccaggagaactgacctaatctgttctctaccataagaggataactcttctgatacgcaaatctgattaaccatgccacttccctgcttttaactcttcagtgactgctatttccatttaggataaagtccaaagtccttgacatagacattcgccacctgtcctctgcctccctttagagacttgtcttctgccacacccccacccatacatgctattgtgagtgcatgttgcctgcacaggaacaagaggggtagagagaaaagaggcaagggagggatccagtactgactaaga

SEQ ID NO: 437511 - DNA, 586 bp, Homo sapiens
ttaaataccactgagcagacatgctgcaggttttaccatgtaaatatctcaaattactctataccttttcsacagctttcattcaagcttttgttaattttcacatgaacagtaaccacctttctctctgcctccagccttgccttctcctaaaatcgaaaaaagcctaaaactaatcttcatattttatcaaatgtagatccccaagcccaaaacatttaattcagtgcagggtgtggagagaatttgtctttaacaactgcactcctggggcagcaatacaggtcagaccaggagaactgacctaatctgttctctaccataagaggataactcttctgatacgcaaatctgattaaccatgccacttccctgcttttaactcttcagtgactgctatttccatttaggataaagtccaaagtccttgacatagacattcgccacctgtcctctgcctccctttagagacttgtcttctgccacacccccacccatacatgctattgtgagtgcatgttgcctgcacaggaacaagaggggtagagagaaaagaggcaagggagggatccagtactgactaaga

SEQ ID NO: 437512 - DNA, 586 bp, Homo sapiens
ttaaataccactgagcagacatgctgcaggttttaccatgtaaatatctcaaattactctataccttttccacagctttcattcaagcttttgttaattttcacatgaacagtaaccacctttctctctgcctccagccttgccttctcctaaaatcgaaaaaagcctaaaactaatcttcatattttatcaaatgtagatccccaagcscaaaacatttaattcagtgcagggtgtggagagaatttgtctttaacaactgcactcctggggcagcaatacaggtcagaccaggagaactgacctaatctgttctctaccataagaggataactcttctgatacgcaaatctgattaaccatgccacttccctgcttttaactcttcagtgactgctatttccatttaggataaagtccaaagtccttgacatagacattcgccacctgtcctctgcctccctttagagacttgtcttctgccacacccccacccatacatgctattgtgagtgcatgttgcctgcacaggaacaagaggggtagagagaaaagaggcaagggagggatccagtactgactaaga

SEQ ID NO: 437513 - DNA, 536 bp, Homo sapiens
ggtgtggagagaatttgtctttaacaactgcactcctggggcagcaatacaggtcagaccaggagaactgacctaatctgttctctaccataagaggataactcttctgatacgcaaatctgattaaccatgccacttccctgcttttaactcttcagtgactsctatttccatttaggataaagtccaaagtccttgacatagacattcgccacctgtcctctgcctccctttagagacttgtcttctgccacacccccacccatacatgctattgtgagtgcatgttgcctgcacaggaacaagaggggtagagagaaaagaggcaagggagggatccagtactgactaagaacacactccacattcactcatttgatcctcacaggtgctaccatctccattcgaaggatgaggaaagaagcccaaagaagtagggtagcatgcctgggcttcagaggcagtgacagaatcgagactaaagccaagatgatccaacatcaaaacacctttggcttttccatatctctgccata

SEQ ID NO: 437514 - DNA, 536 bp, Homo sapiens
ggtgtggagagaatttgtctttaacaactgcactcctggggcagcaatacaggtcagaccaggagaactgacctaatctgttctctaccataagaggataactcttctgatacgcaaatctgattaaccatgccacttccctgcttttaactcttcagtgactgctatttccatttaggataaagtccaaagtccttgacatagacattcgccacctgtcctctgcctccctttagagacttgtcttctgccacacccccacccatacatgctattgtgagtgcatgttgcctgcacaggaacaagaggggtagagagaaaagaggcaagggagggatccagtactgactaagaacacactccacattcactcatttgatcctcacaggtgctaccatctccattcgaaggatgaggaaagaagcccaaagaagtagggtagcatgcctgggcttcagaggcagtgacagaatcgagactaaasccaagatgatccaacatcaaaacacctttggcttttccatatctctgccata

SEQ ID NO: 437515 - DNA, 519 bp, Homo sapiens
tagatatagatacatatagatacagatatagagatagatataaatataatatagatatagacatagatatatagatactgcaaatgccaaacatgtgatccaacaggtacacctatagagtgagaacaattgtgatgttgcagtgtctacccaaccacacccacaccccaaatgtgatagtactgttggacacacctcattgacaaagaattcagtatcttttctgttgctgcaaagtcttctatgaatactttgtgaggctgctcaaatcatatttgcyccaggacaaatcagtacagggctcagtgtcataccaactaatttgaataaaacaataagtgtgcctatttatattcagacccatgcccaggagctcccagaggtgtggtaagtgttgctttggaacagacataaaatatacatagttctcatttaagctactgcatatttttctggtgcctctcacagctatattgatagccatggttctaagtaattagatgagtgctggagaaagga

SEQ ID NO: 437516 - DNA, 562 bp, Homo sapiens
ttgtgttttattttttgcagctttttgtgtgcaggtgtgtgtgtgtgtgygcgctaagaatattttacatgagatctacccacttaataaattttaagtgcacattaccatactgttaattataggcgatatattgtacagcagctcttaagaacttactcattatgcaaaactgaaactttaaacccattgaagaacaactccccaatttcttcttaccatagaccttggcaaccgccattcattctattctctgcttctatgagtttgactatttcaggatacctcctataagtggaatgatgcaatcagtatttgtccttctatgcctggcttatttcacttagcataatgtcttcaaggtttatgacaaggtttatttttatgacaggatttcctactttctaatgctgaataatattccattgactgtatatactacatctctttatctatccatcagtccatggacatttgggttgttatcttggctaatgtgactactgctataatacacatgagaatgcagatacctctttgcaatcttgttttatcaattctt

SEQ ID NO: 437517 - DNA, 222 bp, Homo sapiens
aactctaaacagaacaccaacaagtaacaagactgacacagtaataaaaaacctctcaacaaagagaagttcatgaccagatggcctcattggtgaattctactaaacatttaaggaagaattaatgccagtccttctcaaamccttttaaaaaattggaagagaaaggaatctttctaaactcattttatgagcccagcattaccctgataccaaagccaa

SEQ ID NO: 437518 - DNA, 583 bp, Homo sapiens
attcaattttagaagagcccaattccccaacccccatgtgaaactttttaagaaaagacagactgccttagtgtctggaaatttaaggtttgtgaatctcagctcctagactgactaaaacatttatttcttttgtgacttcaccttgtcagtgaaatttaaaagctgagaatttgaagaaaaagstgataagtaattttaattatatttgggtaaaaattgcattattagaatacataacacagagagatctactccaagctattaatctggaaaaatcatttaaagacattaggattattattcattaccttagataaacaaaataaataaataccagtggcaataggaagaatgataatcaggttaatattttttttcattctaagggtatgtttaactacttgggcaactataaaaaatgtcatagactgggtagcttaaacaacagacatttatttctcacagttctggaggctggcaaattcaagattaaggtgccagctgacttaattcctggtgagggctcttcctgacttgcaaatggccaccctgctgtgtcctcacatgaggaagagagagc

SEQ ID NO: 437519 - DNA, 583 bp, Homo sapiens
attcaattttagaagagcccaattccccaacccccatgtgaaactttttaagaaaagacagactgccttagtgtctggaaatttaaggtttgtgaatctcagctcctagactgactaaaacatttatttcttttgtgacttcaccttgtcagtgaaatttaaaagctgagaatttgaagaaaaagctgataagtaattttaattatatttgggtaaaaattgcattattagaatacataacacagagagatctactccaagctattaatctggaaaaatcatttaaagacattaggattattattcattaccttagataaacaaaataaataaatmccagtggcaataggaagaatgataatcaggttaatattttttttcattctaagggtatgtttaactacttgggcaactataaaaaatgtcatagactgggtagcttaaacaacagacatttatttctcacagttctggaggctggcaaattcaagattaaggtgccagctgacttaattcctggtgagggctcttcctgacttgcaaatggccaccctgctgtgtcctcacatgaggaagagagagc

SEQ ID NO: 437520 - DNA, 475 bp, Homo sapiens
tgctaactttattcataaatgaaacaaaatgtaagctatatgtgttagtccattttcatactgctatgaaaaaatacccaagactgggtaatttataaagaaaaaggtttaatggactcacagttccacatggctgggaaggcttcataatcatggcagaaggcaaaggaggagcaaaggcatgtcttacatrgtggcaggcaagagaatgtgtgcaggggaactgccctttataaaaccatcagatctcgtgagacttactgtcatgagaacagcatgggaaaaccggcccctgtgatttaattacctcccaccggatccctcccatgacatgtggggattatgggagctacatttcaagatgagatttgggtggagagacagccaaaccatatcattatcatttctattagcatgagacagtgaaatgaaatcaatcagctatagacaagtcatcttaaacagctctccttgc

SEQ ID NO: 437521 - DNA, 475 bp, Homo sapiens
tgctaactttattcataaatgaaacaaaatgtaagctatatgtgttagtccattttcatactgctatgaaaaaatacccaagactgggtaatttataaagaaaaaggtttaatggactcacagttccacatggctgggaaggcttcataatcatggcagaaggcaaaggaggagcaaaggcatgtcttacatagtgscaggcaagagaatgtgtgcaggggaactgccctttataaaaccatcagatctcgtgagacttactgtcatgagaacagcatgggaaaaccggcccctgtgatttaattacctcccaccggatccctcccatgacatgtggggattatgggagctacatttcaagatgagatttgggtggagagacagccaaaccatatcattatcatttctattagcatgagacagtgaaatgaaatcaatcagctatagacaagtcatcttaaacagctctccttgc

SEQ ID NO: 437522 - DNA, 475 bp, Homo sapiens
tgctaactttattcataaatgaaacaaaatgtaagctatatgtgttagtccattttcatactgctatgaaaaaatacccaagactgggtaatttataaagaaaaaggtttaatggactcacagttccacatggctgggaaggcttcataatcatggcagaaggcaaaggaggagcaaaggcatgtcttacatagtggcaggcaagagaatgtgtgcaggggaactgccctttataaaaccatcagatctcrtgagacttactgtcatgagaacagcatgggaaaaccggcccctgtgatttaattacctcccaccggatccctcccatgacatgtggggattatgggagctacatttcaagatgagatttgggtggagagacagccaaaccatatcattatcatttctattagcatgagacagtgaaatgaaatcaatcagctatagacaagtcatcttaaacagctctccttgc

SEQ ID NO: 437523 - DNA, 475 bp, Homo sapiens
tgctaactttattcataaatgaaacaaaatgtaagctatatgtgttagtccattttcatactgctatgaaaaaatacccaagactgggtaatttataaagaaaaaggtttaatggactcacagttccacatggctgggaaggcttcataatcatggcagaaggcaaaggaggagcaaaggcatgtcttacatagtggcaggcaagagaatgtgtgcaggggaactgccctttataaaaccatcagatctcgtgagacttactgtcatgagaacagcatgggaaaaccggcccctgtgatttaattacctcccaccggatccctcccatgacatgtggggattatgggagctacatttcaagatgagatttgggtggrgagacagccaaaccatatcattatcatttctattagcatgagacagtgaaatgaaatcaatcagctatagacaagtcatcttaaacagctctccttgc

SEQ ID NO: 437524 - DNA, 599 bp, Homo sapiens
ttttggaaactactgtgtgccatgttttgtgttgggcactttgcaggcttttctcatttaatcctctatgaagtctcatttgacttcattttatggagcaggaaaattagatactcagattgttcygcctgcatctaaagtcaggtccagtctgactgcgtttcaaactcttggaacctctgacatttactcaatattttaaagtgtgtattataaataactgtctccctgaggtgtgttaggtttggctttgcccaaagttagtaattaggttggatgaccagtcctgcaactccagcctgttggccaactttcctatttgatctgagactcgttacagggcagttttggcatgggtaagaaaggagatgagaaatagatgaaaccacactgcaggattaaacctgaaatgttatttggtggaaaaagtattcccaggctaaactctagttctttcattcactactctgcacacgtcataaatcagccagaagagagctatttccatattttaaattgctgcaaaaatctctccaacttcctcattttgcagataaagcttcaacattatatgaagcagtgtatgttgaattttaatg

SEQ ID NO: 437525 - DNA, 575 bp, Homo sapiens
agatagattcccaggccccatctgcttgctgagccaatgccaacctggtctctgagctggtaaatatactttggtttaacataagctattctaatatcatagctaaatcatcttatattccttggctttctccagcaaggaagaaagttatgcaaaagcacataatgaaaaacataagtcactttaacaaaacagagcttgaagatacctggcccaatgagtttctggggctcactgaagttgcattgttcagtgggatkcagagaggaggttgggaggggagagtgattcgtggcctcagtgtcttcatcagaggccaacctgaacccagctgggcaggggctggccaaggcaggcccatgttctcacattgcatttgcaatgcctggctttagggtcaggccatgggagacagagcctgcccctacatcttaccaagcctcaggaagctcctgccatagctgggggcatctggaacactggttggtcttcccatctcctgagtaaaggctccagctgcagtgtcctcttgccaccccagaagccagcttaccaagaagaaggttcattgtgag

SEQ ID NO: 437526 - DNA, 534 bp, Homo sapiens
ctccttccggactgttctttgctggctcatttgtgcaaacttgaatattgtttgtttttaaggttccaccatctctctgagttcttttcttgcaggcattcatccttgtcaaatcaaacggtcaaagttcacattcatgccacaggacttgtcagggctccaaacaggcactttctcaaagtatttttgcccaaggaaccatctcgtgtatcacctcttgttgatctatttcacaagtttgagaacgctgaagtcacttctgcaaagaacaaagtaaatgcccaccaaataatagatgctatattgctattgtcatcatgattatcagtatgtagcaagaataaaagcataaaataaaaatatttaggtcacgaactcttacagacatcattgcattttagagaagccgtttggtactgaggatcctctgtgtgcctttggggccaaggaaatcaaccgtattccttcaaatawcaaggaaatacacgctttgtagaataatagttcatagtagcctcacgaagagtttgccat

SEQ ID NO: 437527 - DNA, 558 bp, Homo sapiens
tcgtagggtgaagaaaggcttttttgaggaagagactattggcctgagatcctcataatgagaaggaaaagttaaggcaaatatgggaacaaggaaaggtcctgtagccagggggtcaatggcacatttcagaaactgcccaaaagccagtgtattagttagctattgctgcatgacaatattaccataaacttactgacttataacaactcayatttattattccaccgtctctgtgggtctgctgtccaggcactcttcaaggcagcattcaagatgtcaacttgggctggggtctcatctgaaggcttgattgggaaaggactcacttctaagttaacatagttgttagcagcattcagtttcttgcatgttcttggacaaaaggcctcagttgctggctgttgacgagagtctgtcctcagtttttgtgatacggccttcttcataagcaactcacagtgtggcaacttgctttttcaaagccaataagagagagactcttagcctgacaaacattgcaatcttatgtgacacaatcatggaagtaacatttca

SEQ ID NO: 437528 - DNA, 454 bp, Homo sapiens
atgtgaggtgtggtcaggacacctacaaggacaggcagctgggattttgttgatcttaaacatcaagttttagagcctagtgtctgcttactaataagtgtctgcatatggcacagggtttggtctgagaagtgcttttattataacctggtagcaaagttgcaggagagtagctaattatcaacctcctccaactactgatggacatgaaygtcagtaactaccacgaagaactaaatatgtgcacatggtgagattggcttatgttagtttacactccctggcaaaagtactaccttttgcacaaatgggagggattttgttttccactttatgtaagatccgtttaagtaacaacctggacaaccaaatccctagcaaattacatcttacttagtgaagaggcacaactttcatctttaatataagcctcgattccccatgaaatctgaag

SEQ ID NO: 437529 - DNA, 607 bp, Homo sapiens
tcttaagtgtcaaaactttataatcaatgtacaggctttcctgaaaatctatatgatttcttggtttcaatgctttgtaaatcatacatttccttccccgctgggcatacaaccaattctaatatcacatttgaactcaaacaggctcatacccaatacaaagtatcttgcattcctcatcagtttccatcagagcaaaagagaaagaatctgcatttcaaatcgttgagtttgttgtcatgacaacacatagccttggtctgctctgagcagtggtatgcaaagttctgagttgaaagcattttgtatatgtattcaggaggtggrtttattcacacacactgctatccccctaccccccaccacacacaaagacaagatgtttcttagctgccttaatgcaatgtagaaaacataaagaatgcacaaaggcatagaattccaggaggagctctcccagcaggatggtgaacatttgctcttcttccacactcatctttacaatgatgtgacagaatgccaggtgttagatagcattccttcttaaggaatttattgagtgttctttaagtggacctttcttactcttttacaatacatacatgtc

SEQ ID NO: 437530 - DNA, 613 bp, Homo sapiens
agacccagtgttatgctggcttcaggtctaacccagcacagtcccggtggtggtgggcacagaggtgtttatatcaccccacctccagctccagacagctcagaacagagagactccatttgtttgagagaacataatggaaaagaacaagagtctgcctggtaatccagagaattcctgtgaatcttatccaagactaccaaggcagtacctctgtgaggctgcaagaagcacatcactattgggcttggggtgccccctaatgcagatatgacttagaccacaacactcaagtcattttgaaaacctggaaagcctttccaagaaggatgggtacaaacaagcccagatagagaagactacaataaatacctaactcttcaatacccagacamaaacaaacataagcatccagaccatccaagaaaacatgaactcaacaaatgaactaaataagacaccaggaacctatttgaagaaacagagatatgtgacctttccaagaattcaaaagtgctgtgttgaagaaacttaaagaaattcaagataacacaaagaagaaaatcagaattctatcagataaatttaacaaagaggttgaaataattgaaaa

SEQ ID NO: 437531 - DNA, 601 bp, Homo sapiens
caaggaaacctgactgatttatttattctacccagcaagtgcctgatgcatggtctcataaaattttttgaaagaatgaatgcatagtgcctatcacatattaacatagacttytgataagccagagagctcacatgaaaacaaattaattagaaacttctgcaacctaatgcagaagttctcaagctttgcgatgcattggaatcacctgggagcttttaaaaactgccactgtcgccaggtatggtagctcgcacctgtaatcccaacacattgggaggtaaaggtgtgagaattgcttgatcccaggagttttgagactagcctggacaacatggtgagaccctgtctctacaaaaaaaattagaacttagatgggcatgttcccagctactcaggaggctgaggtgggaggatcacttgagcccaggagtttaaagctacagtgacccatgatcattccactgcactccagcctgggtgacagagaccttgtcttaaaaaaaaaaaaaaaaaaaaaatcccactgcccagaccacaccagaccaactaaataagaaaataagaaacttcagggaaagggacagatgtcaggtcagac

SEQ ID NO: 437532 - DNA, 601 bp, Homo sapiens
caaggaaacctgactgatttatttattctacccagcaagtgcctgatgcatggtctcataaaattttttgaaagaatgaatgcatagtgcctatcacatattaacatagacttctgataagccagagagctcacatgaaaacaaattaattagaaacttytgcaacctaatgcagaagttctcaagctttgcgatgcattggaatcacctgggagcttttaaaaactgccactgtcgccaggtatggtagctcgcacctgtaatcccaacacattgggaggtaaaggtgtgagaattgcttgatcccaggagttttgagactagcctggacaacatggtgagaccctgtctctacaaaaaaaattagaacttagatgggcatgttcccagctactcaggaggctgaggtgggaggatcacttgagcccaggagtttaaagctacagtgacccatgatcattccactgcactccagcctgggtgacagagaccttgtcttaaaaaaaaaaaaaaaaaaaaaatcccactgcccagaccacaccagaccaactaaataagaaaataagaaacttcagggaaagggacagatgtcaggtcagac

SEQ ID NO: 437533 - DNA, 563 bp, Homo sapiens
tttgtaaacctgagctctgaggctgatggacgagttttgggctggcctgccctcctcaatacagcagaaacgcttggtaataaaagtggactcaataatttacctatagtatgtaacaaagaatgcattgtctgaattatactaggtagtatattccatcaatcagtcaacaagtgtttattaaacacctctgggcttccctggcttttgctatttggtgagaaacccaactcagtaacctaatacctgcctttgtgtgtgtgtacaaaaataaatgatgcaaaattgtaagtttcaaagacttgaataactttattggctaatattaatttagcawtgttaaccatcagattaattttaggcttggggcagttttagtgattgggggagaacaagagatggacttttgagttttaggtatctgtatgtatgtactttcttgacctctgttatatttctccagataagtactgtttaaataacatataaagatgtcagatgagcaatagatagataagaatggtgcaaaaaaaaatcaaaatatgaagctactgagagcaatt

SEQ ID NO: 437534 - DNA, 493 bp, Homo sapiens
tcattggggttagacctccctgcaattgtggaagccagtggggaaatctctgcaggctgttggctctgcacctatgttgagcctgaaacatgtggtctttggatctgccagactggcaaatggagatgaaagctggaaataattgagagcaagagcaaataggagtctacattgatgaattgaagccccataaattcaactggatcccacaagacaaatgggagcctgcatctttctctagccacctccagcctmcatgctgtgggccacttgctggagatgctggtacctttcagcacagagctgcacgtacacccactccaggccttggagaggtgtaaggagcagatctttggggaattggaggagcggtcagttgaaatgctgagccacacctaccaggtgagctggtcgattagcctcatcatgcacaatccaccacagtgcctgggacctgcattaacactcaggatgcaggaaagatggctgctgg

SEQ ID NO: 437535 - DNA, 591 bp, Homo sapiens
gggcaggtgcttgatctttttttatcctgacttgggaaatgtaatctatgagttaacatagtctttgtgccttatttgaacattttatgacaaatggaaactttaagtaagaccttcagggatagttactagatttatacagtgtaataactgtttcagagtaggtgatataactatttcaagtaatgttttctaaatttggccatgcagctacagcattggagagcttctaaagatacagaacactgggatccatacccagacctactgaccagatgcctccataagtccccgaaggaatatcatttggcagccactgatatagggtaaataacatgaaggtctgtcttcccagttagctaaattctacctagcccgtaatgctctctgctatgacattttttggttgttcttgcagctaacacttccatatcttaaaaagtctcttctgctaataaccggtacacatggtttagtatttaatygtaaattctgcatggctatctgtctcctagttagtttataaaatccctaagaacaagaactgagtgttacatttccatgtgtcttgcagggagtatggcacaatat

SEQ ID NO: 437536 - DNA, 585 bp, Homo sapiens
taactaaatgattagaaaaatggctttttagggccgggcacagtggctcacrcttgtaatcccagcactttgggaggctgaggtgggcagatcacgagatcagtagttcaagaccagcctcaccaacatggtgacaccccatctctactaaaaatacaaaaattagcctggcatggtggtgcatgcctataatcccagctacacaggaggctgagccaggagaatcacttggacctggcaggaggaggttgcagtgagctgagattgcgccattggactccagcctgggcaacagagcaagactctgtcaaaaaacaaacaaacaaaaaaacaaaaaaaaagaggcccaaaagtatttttacatacactgcattggttttatcagaaaaataaaatgggaagagtcacatctccctcagctaagaagatagattacttgtctggtccccctttcaaaagacttgaaggtactaagatttcctaggtccttcaccttatgactgtgtgccaatttgcaggcactagttgggacctctgttcatgagtcagcttcatggggatggttttctagcttgttccttcacc

SEQ ID NO: 437537 - DNA, 585 bp, Homo sapiens
taactaaatgattagaaaaatggctttttagggccgggcacagtggctcacgcttgtaatcccagcactttgggaggctgaggtgggcagatcacgagatcagtagttcaagaccagcctcaccaacatggtgacaccccatctctactaaaaatacaaaaattagcctggcatggtggtgcatgcctataatcccagctacacaggaggctgagccaggagaatcacttggacctggcaggaggaggttgcagtgagctgagattgcrccattggactccagcctgggcaacagagcaagactctgtcaaaaaacaaacaaacaaaaaaacaaaaaaaaagaggcccaaaagtatttttacatacactgcattggttttatcagaaaaataaaatgggaagagtcacatctccctcagctaagaagatagattacttgtctggtccccctttcaaaagacttgaaggtactaagatttcctaggtccttcaccttatgactgtgtgccaatttgcaggcactagttgggacctctgttcatgagtcagcttcatggggatggttttctagcttgttccttcacc

SEQ ID NO: 437538 - DNA, 585 bp, Homo sapiens
taactaaatgattagaaaaatggctttttagggccgggcacagtggctcacgcttgtaatcccagcactttgggaggctgaggtgggcagatcacgagatcagtagttcaagaccagcctcaccaacatggtgacaccccatctctactaaaaatacaaaaattagcctggcatggtggtgcatgcctataatcccagctacacaggaggctgagccaggagaatcacttggacctggcaggaggaggttgcagtgagctgagattgcgmcattggactccagcctgggcaacagagcaagactctgtcaaaaaacaaacaaacaaaaaaacaaaaaaaaagaggcccaaaagtatttttacatacactgcattggttttatcagaaaaataaaatgggaagagtcacatctccctcagctaagaagatagattacttgtctggtccccctttcaaaagacttgaaggtactaagatttcctaggtccttcaccttatgactgtgtgccaatttgcaggcactagttgggacctctgttcatgagtcagcttcatggggatggttttctagcttgttccttcacc

SEQ ID NO: 437539 - DNA, 585 bp, Homo sapiens
taactaaatgattagaaaaatggctttttagggccgggcacagtggctcacgcttgtaatcccagcactttgggaggctgaggtgggcagatcacgagatcagtagttcaagaccagcctcaccaacatggtgacaccccatctctactaaaaatacaaaaattagcctggcatggtggtgcatgcctataatcccagctacacaggaggctgagccaggagaatcacttggacctggcaggaggaggttgcagtgagctgagattgcgccattggactccagcctgggcaacagagcaagactctgtcaaaaaacaaacaaacaaaaaaacaaaaaaaaagaggcccaaaagtatttttacatacactgcattggttttatcagaaaaataaaatgggaagagtcacatctccctcagctaagaagatagattacttstctggtccccctttcaaaagacttgaaggtactaagatttcctaggtccttcaccttatgactgtgtgccaatttgcaggcactagttgggacctctgttcatgagtcagcttcatggggatggttttctagcttgttccttcacc

SEQ ID NO: 437540 - DNA, 525 bp, Homo sapiens
agtacatggcaaaaatatgaaaaatagaggtgtgcaactatattccttgcagcattatgactaatagaaagggtgcaagaacaatgttttccaatatttcaataaactatgctatgtcctcacaacagagtactatagagctgtacaaataaaagatgaatacttctagaagcttcaatgtgtagaatatttaactaagaagagtatgtgtgtatatatacatatatatctacagaaaacatgttttattttaataacttaaaaaatttgtacctacagagggttaaatacatacaagagaaaggaatagaagcaagtcttccctgagtatacattgttttgtacatttgacaaataactcatgtaaatgcttaacattatattaaataaaattaaaattacaaaggccattcttaaaatcaaaagcaaatmaaaaataatgaacctgtttatcaggttagtagcatattcacaaaaagacaaaaatttcaagtaactttaaagaatattgatttactatacccc

SEQ ID NO: 437541 - DNA, 603 bp, Homo sapiens
atgcaatcctgccagcagctgcatgagtgagcctggaagtagatctccccaagcctgaccttgaaatgactgcttctccttctccttctgccatgattgtaagtttcctgaatgacatcttgcttgcaaccttgggagagatctggaaccagagaccctagcaaagccactcccacaatcttgacccatagaaagtatgagatactacctgcttcttcaagcagttaagtgttggaataagttgttacacagcaatagataaccagtacatctcacttcatcatctacttaacatctggaagaagrggcatcatactggtcttttgaacagaacaattatttttagataacataattggtaaaagtatttttttccctgaatatttcactaaatcattttctagaaaaaaagtgcttgcagaagttcccaaagtcttctaattatctgtggctcctggttttcaaaatgcatgtgagcaacttcaaaagtttagatgtagggatgcctatctgctgaccacagcaagttatgagaaataagaggtttggctttattctggtgatttcgctgccactgcttaatgatatccagcagagttgtta

SEQ ID NO: 437542 - DNA, 591 bp, Homo sapiens
ctacctgcttcttcaagcagttaagtgttggaataagttgttacacagcaatagataaccagtacatctcacttcatcatctacttaacatctggaagaaggggcatcatactggtcttttgaacagaacaattatttttagataacataattggtaaaagtatttttttccctgaatatttcactaaatcattttctagaaaaaaagtgcttgcagaagttcccaaagtcttctaattatctgtggctcctggttttcaaaatgcatgtgagcaacttcaaaagtttagatgtagggatgcctatctgctgaccacagcaagytatgagaaataagaggtttggctttattctggtgatttcgctgccactgcttaatgatatccagcagagttgttaaaactctggtactgctgccaaggaaggttgagttatccttggctgaatgtctctatctacagcttggacctctttctagaatacaagatccatattttcaacaacctttagatagtttcactcagtacctctcaatacttcaacatcattttccaaagggaaatcattcatttgaggtattttcctctttct

SEQ ID NO: 437543 - DNA, 591 bp, Homo sapiens
ctacctgcttcttcaagcagttaagtgttggaataagttgttacacagcaatagataaccagtacatctcacttcatcatctacttaacatctggaagaaggggcatcatactggtcttttgaacagaacaattatttttagataacataattggtaaaagtatttttttccctgaatatttcactaaatcattttctagaaaaaaagtgcttgcagaagttcccaaagtcttctaattatctgtggctcctggttttcaaaatgcatgtgagcaacttcaaaagtttagatgtagggatgcctatctgctgaccacagcaagttatgagaaataagaggtttggctttattctggtgatttcgctgccactgcttaatgatatccagcagagttgttaaaactctggtactgctgccaaggaaggttgagttatccttggctgaaygtctctatctacagcttggacctctttctagaatacaagatccatattttcaacaacctttagatagtttcactcagtacctctcaatacttcaacatcattttccaaagggaaatcattcatttgaggtattttcctctttct

SEQ ID NO: 437544 - DNA, 498 bp, Homo sapiens
gaggctaaggagggcatgtcacctgaggtcaggattttgagaccagcctagccaacatggagaaactctgtgtgatggttaatactgagtgtcaacttgattggaatgaaggatacaaagcattgatactgggtgtgtctgtaaggatgttgccaaaggggattaacatttggtcagtaagctgggaaaggcagacctacccttaagctgaatgggcacaatctaatcagctgccaatgcagctagaatataagcaggcagaaaaacatgaaaagagagactgacttagcctcccagcctacatctttctccagttctgaatgcttctggacctcaaacattggactccaagttcttcagttttggaacttggactggttctctttgctcctcrgcctgcagacagcttattatggggccttgtgatcatgtgagttaatactttaaaatctcccctatacatatatatatatatatatatatatatatatatatata

SEQ ID NO: 437545 - DNA, 602 bp, Homo sapiens
tggatatggtcattggagaaatattagagctaagtaggcaagtgtctgtgctgtgctgtgctgcactaagctgtccatgtccttaagatttcggatcaaaatccattttgtaaattgttgcttattttatagtaataatactaaacagaagaataaaaaagtataacctttgttcttatccaacaaakaaaataacaacaacaaatatctttcctctgagtatgagagatatctttattttttatttttatttatttattttttttgatatttaatttcctttttattggaccaaatgttatggtaaatcactccaggaaaacggctgagcaaatgtgaggctaacaccacaaccagccccagaagtaaacaaaagcacaacaccggcaaaagcattcactttgaaaattctaaccctggcacagcagtcttgaggttcatgtttccccactgcgatgtgcttaacttgaacagtgtggctgagctttcccattctaactagggtttcttgaaccagaaacaaaggcaagtcagttctgaggctgagattcaaataatcagatcacgggacagctgcaaactggaaagcaaatgagacagct

SEQ ID NO: 437546 - DNA, 602 bp, Homo sapiens
tggatatggtcattggagaaatattagagctaagtaggcaagtgtctgtgctgtgctgtgctgcactaagctgtccatgtccttaagatttcggatcaaaatccattttgtaaattgttgcttattttatagtaataatactaaacagaagaataaaaaagtataacctttgttcttatccaacaaagaaaataacaacaacaaatatctttcctctgagtatgagagatatctttattttttatttttatttatttattttttttgatatttaatttcctttttattggaccaaatgttatggtaaatcactccaggaaaacggctgagcaaatgtgaggctaacaccacaaccagccccagaagtaaacaaaagcacaacacyggcaaaagcattcactttgaaaattctaaccctggcacagcagtcttgaggttcatgtttccccactgcgatgtgcttaacttgaacagtgtggctgagctttcccattctaactagggtttcttgaaccagaaacaaaggcaagtcagttctgaggctgagattcaaataatcagatcacgggacagctgcaaactggaaagcaaatgagacagct

SEQ ID NO: 437547 - DNA, 602 bp, Homo sapiens
tggatatggtcattggagaaatattagagctaagtaggcaagtgtctgtgctgtgctgtgctgcactaagctgtccatgtccttaagatttcggatcaaaatccattttgtaaattgttgcttattttatagtaataatactaaacagaagaataaaaaagtataacctttgttcttatccaacaaagaaaataacaacaacaaatatctttcctctgagtatgagagatatctttattttttatttttatttatttattttttttgatatttaatttcctttttattggaccaaatgttatggtaaatcactccaggaaaacggctgagcaaatgtgaggctaacaccacaaccagccccagaagtaaacaaaagcacaacaccggcaaaagcattcactttgaaaattctaaccctggcacagcagtcttgaggttcatgtttccccactgcgatgkgcttaacttgaacagtgtggctgagctttcccattctaactagggtttcttgaaccagaaacaaaggcaagtcagttctgaggctgagattcaaataatcagatcacgggacagctgcaaactggaaagcaaatgagacagct

SEQ ID NO: 437548 - DNA, 602 bp, Homo sapiens
tggatatggtcattggagaaatattagagctaagtaggcaagtgtctgtgctgtgctgtgctgcactaagctgtccatgtccttaagatttcggatcaaaatccattttgtaaattgttgcttattttatagtaataatactaaacagaagaataaaaaagtataacctttgttcttatccaacaaagaaaataacaacaacaaatatctttcctctgagtatgagagatatctttattttttatttttatttatttattttttttgatatttaatttcctttttattggaccaaatgttatggtaaatcactccaggaaaacggctgagcaaatgtgaggctaacaccacaaccagccccagaagtaaacaaaagcacaacaccggcaaaagcattcactttgaaaattctaaccctggcacagcagtcttgaggttcatgtttccccactgcgatgtgyttaacttgaacagtgtggctgagctttcccattctaactagggtttcttgaaccagaaacaaaggcaagtcagttctgaggctgagattcaaataatcagatcacgggacagctgcaaactggaaagcaaatgagacagct

SEQ ID NO: 437549 - DNA, 532 bp, Homo sapiens
gttgtaggaaatgctattgagaagaattaatatgttttttcacattatgtgggttttagtgttatactaggaatagatattggttcagatggttttattcttagtattatatttttatactcagttttatattctwtaactatttctgggagaaagatatcaactaccttctttccataagacctgtaaaattttatcagtaaccgtataaattatgtcagaattttccaaatccttcaccatgggacattagttctgttaaagaactctgtggccaaatacttacattaaattaattaaaaatcctacctgtaataattatttgcttttttaaagcaaataactacttgctctttcaattttattaactcaatacatgttagatagtaatcaaaacagccttaatattcccctgagattgactaaattttagaatttttcctcattacaggtccctgacctccctttttaaaagagcattcatttttagaaaagttgaattgtaaatttgtctttgttccattgacatata

SEQ ID NO: 437550 - DNA, 532 bp, Homo sapiens
gttgtaggaaatgctattgagaagaattaatatgttttttcacattatgtgggttttagtgttatactaggaatagatattggttcagatggttttattcttagtattatatttttatactcagttttatattctataactatttctgrgagaaagatatcaactaccttctttccataagacctgtaaaattttatcagtaaccgtataaattatgtcagaattttccaaatccttcaccatgggacattagttctgttaaagaactctgtggccaaatacttacattaaattaattaaaaatcctacctgtaataattatttgcttttttaaagcaaataactacttgctctttcaattttattaactcaatacatgttagatagtaatcaaaacagccttaatattcccctgagattgactaaattttagaatttttcctcattacaggtccctgacctccctttttaaaagagcattcatttttagaaaagttgaattgtaaatttgtctttgttccattgacatata

SEQ ID NO: 437551 - DNA, 532 bp, Homo sapiens
gttgtaggaaatgctattgagaagaattaatatgttttttcacattatgtgggttttagtgttatactaggaatagatattggttcagatggttttattcttagtattatatttttatactcagttttatattctataactatttctgggagaaagatatcaactaccttctttccataagacctgtaaaattttatcagtaaccrtataaattatgtcagaattttccaaatccttcaccatgggacattagttctgttaaagaactctgtggccaaatacttacattaaattaattaaaaatcctacctgtaataattatttgcttttttaaagcaaataactacttgctctttcaattttattaactcaatacatgttagatagtaatcaaaacagccttaatattcccctgagattgactaaattttagaatttttcctcattacaggtccctgacctccctttttaaaagagcattcatttttagaaaagttgaattgtaaatttgtctttgttccattgacatata

SEQ ID NO: 437552 - DNA, 532 bp, Homo sapiens
gttgtaggaaatgctattgagaagaattaatatgttttttcacattatgtgggttttagtgttatactaggaatagatattggttcagatggttttattcttagtattatatttttatactcagttttatattctataactatttctgggagaaagatatcaactaccttctttccataagacctgtaaaattttatcagtaaccgtataaattatgtcagaattttccaaatccttcaccatgggacattagttctgttaaagaactctgtggccaaatacttacattaaattaattaaaaatcctacctgtaataattatttgcttttttaaagcaaataactacttgctctttcaattttattaactcaatacatgttagatagtaatcaaaacagccttaatattcccctgagattgactaaattttagaatttttcctcattacaggtccctgacctccctttttaaaagagcattcatttttagaaaagttgaattgtamatttgtctttgttccattgacatata

SEQ ID NO: 437553 - DNA, 598 bp, Homo sapiens
attgggattagccatttgatactcacagatggacatcagaaaagaggaggagagaaaaatcaaagtattgatttatctggctttcttctaaaataagcattaaataattatgtgctaatgaatgaagcaaataaaaatataaacaaattataaaattatctaaaattagggatattttctacaagtttcttggttagaaaatacggaatatatacttataaaaaccaaataaataatcaacaatttatgatttattatttattttcctgttttataatgttaaaacccatcatcartccaccaaaataatgtgtatactatgaaataaggtgtaatgacttatcattgacttgcttttggaaacagatgataataggaaacaaattctaataaaattaattactcataaatccttcttattatttcttgtgcctgatgcatattaagtttaacaatagtttagaaatgccttaatcccttgccccaataaggaaaaatattaataatgatttagtttgcctttttttattattttccagataaattttcctgtcttttttgtaagaaaaatagagatgagaaagtgacagaaagacac

SEQ ID NO: 437554 - DNA, 593 bp, Homo sapiens
aaattagctgaacatacccctgtaatcccagcaactcgggaggccgagtcaggagaatcacttggacctgggaggtggrggttgcagtgagccgagctggcgccactctacttcagcctggacgacagagcgagaacccctctcaaaaaaaaaaaaaaaaaaaaaaaaaaagaaaattgctgaaaatagagggaaggaaaaatggagattaacacaatgtatatggaattttgggggtgtgatacaaaaattgaaatgagagatagtgattgcaagaaattatgaatttaccacttaaaatgtattgactaaaagtcaaatacatcactcacgtacttgtaattttctgctgtcttcctatcttatgtcaagctatactctttccagtgacctacaactttatcttctattttacttcctgttattcattttactacaaccaaagtggtcaagtttgacaggagagttttgccagagcaattggaagggttggtgtgtcaacaacttagaccgggcaatgacgatgtcagtttcatgaattataaggattcagttactcatctgttaaatttcagaagttattaaaactccaa

SEQ ID NO: 437555 - DNA, 485 bp, Homo sapiens
aggtgataaacaacattactgaataaggcttgtcaacttaagatatatttaagtgattgaagtagggacaaatcttctttagtaaagatttatcaatgccactgtatacacctctgatccttttccaatagaagcttttgtcatktgccagggcaactgtgtactttattgattacatttaggataatgactgagttgacactggaaccaagtttcctaaagtgctaaaataatattctggattgacaaacataatactaaataataatggttttgacttaagttgatcccatagggtatcaaatgtgtccatgggcactcttatattttccagtctgtgggtatctatttgggatggatatacttagcatgtggaagtatgttcacatactggtttctgcattggacctttgtgctaaaaagttgtaaaagaaagaccctgaaactaccaatccttgctagtattaccaaaagcaaaacctcat

SEQ ID NO: 437556 - DNA, 660 bp, Homo sapiens
  misc_feature (1)...(660): n = A,T,C or G
tcccttcctttttaaggctgaacaatatttcattgagtatacatatcacattttctctatccattcatctgggcatatcacttccatataatattttaataaagttcctagccaaagcaaaataaaattacaaagaaatataaaaattataagaataaggataagcaaactaaaaatccttacttgcagatgacaaaattgtatataaattaaatacaaaataatcaacaaatacactattaaagtgtgaacttataaaaattattttatacaagataaacaaagaacagcacaatatatttctttaaccaacaatatggaaacaaaaaagtaacctttaattaaatgtgcaatttacaatagcaatcaatgaacacattgaaatcaattaagaggatagaagtgttaaggcctctaccctaaatgtgcaaancattatagagaaaactaaaactaaatctaaataaatgatgagatatgccatgtytttttttggaagattcaatattttaagtcatcagatttatccacaaattaatgcaatccaaatcaaaattccatcaggcattttttgaaatgtatatgttgtttctgaaaggtatgtaggaatacgaaagaccgagagtagaaaaggcagtctgtaagaaaacaattatgatg

SEQ ID NO: 437557 - DNA, 660 bp, Homo sapiens
  misc_feature (1)...(660): n = A,T,C or G
tcccttcctttttaaggctgaacaatatttcattgagtatacatatcacattttctctatccattcatctgggcatatcacttccatataatattttaataaagttcctagccaaagcaaaataaaattacaaagaaatataaaaattataagaataaggataagcaaactaaaaatccttacttgcagatgacaaaattgtatataaattaaatacaaaataatcaacaaatacactattaaagtgtgaacttataaaaattattttatacaagataaacaaagaacagcacaatatatttctttaaccaacaatatggaaacaaaaaagtaacctttaattaaatgtgcaatttacaatagcaatcaatgaacacattgaaatcaattaagaggatagaagtgttaaggcctctaccctaaatgtgcaaancattatagagaaaactaaaactaaatctaaataaatgatgagatatgccatgtctttttttggaagattcaatattttaagtcatcagatttatccacaaattaatgcaatccaaatcaaaattccatcaggcattttttgaaatgtayatgttgtttctgaaaggtatgtaggaatacgaaagaccgagagtagaaaaggcagtctgtaagaaaacaattatgatg

SEQ ID NO: 437558 - DNA, 660 bp, Homo sapiens
  misc_feature (1)...(660): n = A,T,C or G
tcccttcctttttaaggctgaacaatatttcattgagtatacatatcacattttctctatccattcatctgggcatatcacttccatataatattttaataaagttcctagccaaagcaaaataaaattacaaagaaatataaaaattataagaataaggataagcaaactaaaaatccttacttgcagatgacaaaattgtatataaattaaatacaaaataatcaacaaatacactattaaagtgtgaacttataaaaattattttatacaagataaacaaagaacagcacaatatatttctttaaccaacaatatggaaacaaaaaagtaacctttaattaaatgtgcaatttacaatagcaatcaatgaacacattgaaatcaattaagaggatagaagtgttaaggcctctaccctaaatgtgcaaancattatagagaaaactaaaactaaatctaaataaatgatgagatatgccatgtctttttttggaagattcaatattttaagtcatcagatttatccacaaattaatgcaatccaaatcaaaattccatcaggcattttttgaaatgtatatgttgtttctgaaaggtatgtargaatacgaaagaccgagagtagaaaaggcagtctgtaagaaaacaattatgatg

SEQ ID NO: 437559 - DNA, 605 bp, Homo sapiens
  misc_feature (1)...(605): n = A,T,C or G
aattgcataaagacacttaataattattaaataaaaatgaatcaagatggtggggtttttgttttgttttgttttgagacagggtctcactctgtcagagagactggaatgcagtggcatgaccgtggctcactgcatgcttgacctcccaggttcaagtgattctcccacctctgcctcccaagtagataggaccacacgtgcacgccaacacacctggctaattttttaaaaaaattattttttgattttggttaaaatatctactattttttaaagatgtgtaatttctgactaccatatgttttattatttgtagaacttaaagatattgtcacatttcaaatacatattttttgtactattcatgtaatcagaaattttattttaaatttaacattcaaaaataaataaaaaacatcatttaataatgttaaactacacaggcaatcagataaaacanacagtataaatcagtacattagagatctgattacatatttttgtttgttaaacatatgactccagggatctaagcatcaccattatttgacacattrgtcatctggagacgtcatgagtcagcaaaccaaaaattcccagag

SEQ ID NO: 437560 - DNA, 407 bp, Homo sapiens
ataatacagtaaaatagtcagtaaaataatacagtaaaatgactattttactgtattataatataaaaatattcaggtttagatgtacccatttattttagagtttataatataatacaatattattatacaagtcgaagatgttattgatgaaaattcatgtcatacgcctatggtatgcyaaaataaagaggcaatactttcagttaatatctctctgtatcttactatctctttctgcttctcctttccacactgtcggttttataattttagcaaggcatgtagttgaggtgaattttttatatttaagtaaactcttgcatttgtttggtggaaaaatctgataagcagataggaaaggagggtaaattttataaaggtatgatcaaaccaataagaatgat

SEQ ID NO: 437561 - DNA, 608 bp, Homo sapiens
caattatgatactgggaaatcagtattagcaaaggaaaatgtgcatggtatgtgtgtgtgtttatgtttgtgtgtgtgtatgtgtgtgtatacttaacagtatagtatgtgtccttttatatatatgttctaattatacaataggcctgaaagttctgatgtctgctttgaatggtattgaagccctaaagtgaggtctgatacgtagtaaaaaccaaagagcttgtagatgagaagcaataacaacaaatgaaaagagacatactgatgttcattaactcagaaaactgtgygacctaagatattggtcaatagaaatgttcacggcaagttttgcaacagatggactctccgtctaaccgtgattgtcatcattccacaaccacacacatgtacataatttagaaagaccatctgaggagattatggacagctttctacgtggtggttataaccacagctgttgttatttgtgaaattcttagcatgtagctactaccctatcatcaataacattatgtcacctatctcagggaaaacattcagagcttgtctttgttgtgcacagaacatctgagaaataagtaaaaataacaatatcacaaata

SEQ ID NO: 437562 - DNA, 576 bp, Homo sapiens
ggaacaagcactggggcctactggagggtgaaggataggaggagggagaggataaggaaaaataattaatgggtactgggcttaatatctgggtgacaaaacaatctgtacaacaaatcctctgacatgaatttacctatataacaaacctgcacctgtacccttaaacataaaagttttttgaaaatcttaaataaaakaagaaagctagaaaactcatactttctgatttgaaaacttgctacaaagcaacaataattaaaacagtgtattactggcatcagggaaggcatatatagtccaacagaatgaatttagagcccagaaataagtcctcatatatatgatcaaattatttttcaatttgtaaaagatggtctttccagcaaatgataatgggaaaactggatatccacctataaaagaaagaagttgaacctttacctaatcttatatacaaaaattaattcaaaatacaagactaaaatgtaagacttcaatatataaaactcttagaagtaagcgtaacacaaatgctttatgatattagatttggaagtgatttcttggatatga

SEQ ID NO: 437563 - DNA, 608 bp, Homo sapiens
cacttacaagtaggagctaaatgatgaggacacatagacatacagaggggaacaagcactggggcctactggagggtgaaggataggaggagggagaggataaggaaaaataattaatgggtactgggcttaatatctgggtgacaaaacaatctgtacaacaaatcctctgacatgaatttacctatataacaaacctgcacctgtacccttaaacataaaagttttttgaaaatcttaaataaaataagaaagctagaaaactcatactttctgatttgaaaacttgctacaaagcaacaataattaaaacagtgtattactggcatcagggaaggcatatatagtccaacagaatgaatttagagcccagaaataagtcctcatatatatgatcaaattattttwcaatttgtaaaagatggtctttccagcaaatgataatgggaaaactggatatccacctataaaagaaagaagttgaacctttacctaatcttatatacaaaaattaattcaaaatacaagactaaaatgtaagacttcaatatataaaactcttagaagtaagcgtaacacaaatgctttatgatattagatttggaagt

SEQ ID NO: 437564 - DNA, 608 bp, Homo sapiens
cacttacaagtaggagctaaatgatgaggacacatagacatacagaggggaacaagcactggggcctactggagggtgaaggataggaggagggagaggataaggaaaaataattaatgggtactgggcttaatatctgggtgacaaaacaatctgtacaacaaatcctctgacatgaatttacctatataacaaacctgcacctgtacccttaaacataaaagttttttgaaaatcttaaataaaataagaaagctagaaaactcatactttctgatttgaaaacttgctacaaagcaacaataattaaaacagtgtattactggcatcagggaaggcatatatagtccaacagaatgaatttagagcccagaaataagtcctcatatatatgatcaaattatttttcaatttgtaaaagatggtctttccagcaaatgataatgggaaaactggatatccacctataaaagaaagaagttgaacctttacctaatcttatatacaaaaattaattcaaaatacaagactaaaatgtaagacttcaatatataaaactcttagaagtaagcrtaacacaaatgctttatgatattagatttggaagt

SEQ ID NO: 437565 - DNA, 591 bp, Homo sapiens
ttttgctaaaattggtaagtatatctttatataactatatccttacaacttgtctcmaccttcgtcagattaatcctaacaaaactgtaaaatgtctcagtaaaaatctaaatgaatttttcataacaagtgctggcaatagattttaaatatgttctgatcattatttgtctcttgttggcatggagaaaatcctttttttttttttcagcctggggaatcccaaactatatctctagtaacaaggaaaccattttaccggaatttttattaacatggaaaagttctgtcaattaatcagacttcactgtccatatcactttcaaccttttgggaaggtagaaagatggaattctgaaactaaagttggtaaagttcacagagatcgtcaaacttgcatggtctaaggtatttcttctttctgtggttcatgagttagtaacagctaaaccaagtgtctaggaatattagctctgattctagaaatctacacttatttaactaaatgctgtaaggactcaggaaatccattctttcaacaaaagttactgaagactttccccattagtatcctaaacaatgtctgcaaaa

SEQ ID NO: 437566 - DNA, 400 bp, Homo sapiens
accactgttgacgaacatagactcaaaaattctcaacaaagtactagcaaactgaatccatcagcagcatatcaaaaaattaatctactatgacaatacaggctttattcctgggatgcatggctggttcaacatatgcaaatcaataaatgtgattcaccagataaacagaattaaatcaaaaaccatatgatcatctcaayggatgccggaaaagctttcaattaaatccagtgtcccttcatgaaaaaacaaaacaaaaaaaaaccctcaacagttgaggcttcaaataagcatacttcaaaataaaaaagagctatctacaacaaacccacagccaatataatactcaatgggcaaaagctgaaagcattctcctttagaaatgaaacaagccaag

SEQ ID NO: 437567 - DNA, 598 bp, Homo sapiens
actacaacaagcaaaatctctgagtaatcataaaatgaagaactatttcctgttgggattcactgtgacgaatttgattttaaattcttgatgttggcattttatttttaaaacttagctttcttgcctattctgaaattgtcaaaaattcagaaaaayaatcatgatcatttgcttgctgaccagtggagacctactgatttttaggctgtgagactacagtaataaataaataaaaaagttcatacttccttctatcgagggaaattgagcatttttctcatagtcctaaatcaccagatcaagggatatatgtaatacttgagtgttgacattttattaatttttatatttaactagagctgtaaagttgaaacaaatgggtcaatgcagtagcccataaaatattttaaaaacacataaaagaaatatcactaaaatttaaacataaaaaaaatacaaaaaaaccctgagctataggaagggaagtatcctctaaatgcccaagttgaaggtagtcctcttagaaaggcacagtaagaagcagtgtttgatgggaacgtgatttttcaagtatttgaattttcaaactcaccac

SEQ ID NO: 437568 - DNA, 526 bp, Homo sapiens
cattattaacataaaatataaagtttactaacaccaagcccaaacaatacaaagtcttarggctctttaattgcaattatttaaaaatatttgctacaaattgttcattattttatattcatgttgtttttcttattcccacaaatcacatattgttggtgtgtttgttaaataaaattgtgactgcttatatatgttttttcacatcctttcttcttctaatattttggaatttacatccagttaattatcctttattctatggtacatactgtaaaagttactattcttggtagtaaactctcagtttttggattgtctgaagatgtctctattttgatctgctcttgaattctaaatctaattgacataaaattctagatttgccattatcatttattagcacttcaaagatattccacaattttctgactttcaatatttttgttggtaaaaatggtgattgttaattggcttgcatattctgttttggatattccactgtttccttataatttgtttattt

SEQ ID NO: 437569 - DNA, 628 bp, Homo sapiens
aaaattaatagtaacatgaaatattgtctatgaacatggacccaaaggcagccaactaatgaatcaaaagtctaygtgagactgagtgagatctgttgtagccataaagcctgtcttgctattttatgcaattaggtcttgacttccccagagaaatatattcaggtacagcatgtagttattagcaatggcacagacattcttgttcaaccagtagataattgagagttatctcatcctgtcctgttgtgttatctacggctactcagcaagatactttaatgagcactgctgggcagcaatagcctttgcagtgaagcctgcaacgaaacccaaggtggcaaataaattagggatgttgccatagttacccactgggtggactaaaggatcccttaggtcatgtaaagatgtgggtttgacacgacagatccaaaacttcattcagttacggaagctactgaatgtgaaattctaaccacagcgttattctgccaagtgaaaaatgtaggcataagcaagaaaaaaaaaaaaataagaaggataagagtccagttttgttacaatgtcttgggaaaagctttccacactgtgatgtcatcaacttcttactctggtttgtagtttg

SEQ ID NO: 437570 - DNA, 549 bp, Homo sapiens
aattaggtcttgacttccccagagaaatatattcaggtacagcatgtagttattagcaatggcacagacattcttgttcaaccagtagataattgagagttatctcatcctgtcctgttgtgttatctacggctactcagcaagatactttaatgagcactgctgggcrgcaatagcctttgcagtgaagcctgcaacgaaacccaaggtggcaaataaattagggatgttgccatagttacccactgggtggactaaaggatcccttaggtcatgtaaagatgtgggtttgacacgacagatccaaaacttcattcagttacggaagctactgaatgtgaaattctaaccacagcgttattctgccaagtgaaaaatgtaggcataagcaagaaaaaaaaaaaaataagaaggataagagtccagttttgttacaatgtcttgggaaaagctttccacactgtgatgtcatcaacttcttactctggtttgtagtttgaatgttcctgggtatagcatggggcattttagtcaattctctttgtagcc

SEQ ID NO: 437571 - DNA, 556 bp, Homo sapiens
cacatgcactgatcactctcatcactgctttggtaaagcatgtaggatgcagttcagtttcaatttggagctgttacctccccaggcaaagctgccacacagatgatccaggcttggtgtttttccygagagccacctgccacacattttcataaggtgaccatgactatgcacatccaggctacttcctgactaggccctgttcaggaagcatcctgaggtgtccattcctcgtggagccaaatagttcccttggttgactcctgagtccccttggcaagccaagcagaattcaagcatttctactgctagccttgtgtgggagcatgagcgaatgtaaagggagcaaggctcttcactccataaaccacagcctacttcggggtggtgctggaccagccctattcttgggtactgaatttctttttctcatttgttgggattttaaattttctatttattttcttaaatggcaggtatcctactgcatcttcaataaaataaaatatatacatatatatgttgtacactggagaaaacaaataggggaacagtt

SEQ ID NO: 437572 - DNA, 554 bp, Homo sapiens
agtggtctctcctttcacatctctgtgcagtcatgatatcaagaccccttgtggacatctctattccattcctcagtcagtgacaccacagagctctgtttgataccgggagacttaatgcagtaaaagtgacagaaagtgcaactgatagtaggatgaaaattataatcttcaaggattaktgagccatgagatctgcaatgctatcgtagggtttctgatcctgatgtgggtctctgtccaggatccttgaagaaattatggcacccacatccaaccctaacatagcttccacttatgaaacaaggaggttgtaatcaactcttggtatgtaataaactggaagttcaaaaatgtaatttaaaacaatctaaaagaatgtagtgttggtctccattgcacagactgctaggggaatatatcaacttgatttggggaggctgtagaggtatatagaggagtatatgggttaaaccttaatgggtcatcagtttcagagaagaagcaattttttattgtagctgatggcaaatgcttttcgaaaagaatgaaag

SEQ ID NO: 437573 - DNA, 554 bp, Homo sapiens
agtggtctctcctttcacatctctgtgcagtcatgatatcaagaccccttgtggacatctctattccattcctcagtcagtgacaccacagagctctgtttgataccgggagacttaatgcagtaaaagtgacagaaagtgcaactgatagtaggatgaaaattataatcttcaaggattagtgagccatgagatctgcaatgctatcrtagggtttctgatcctgatgtgggtctctgtccaggatccttgaagaaattatggcacccacatccaaccctaacatagcttccacttatgaaacaaggaggttgtaatcaactcttggtatgtaataaactggaagttcaaaaatgtaatttaaaacaatctaaaagaatgtagtgttggtctccattgcacagactgctaggggaatatatcaacttgatttggggaggctgtagaggtatatagaggagtatatgggttaaaccttaatgggtcatcagtttcagagaagaagcaattttttattgtagctgatggcaaatgcttttcgaaaagaatgaaag

SEQ ID NO: 437574 - DNA, 554 bp, Homo sapiens
agtggtctctcctttcacatctctgtgcagtcatgatatcaagaccccttgtggacatctctattccattcctcagtcagtgacaccacagagctctgtttgataccgggagacttaatgcagtaaaagtgacagaaagtgcaactgatagtaggatgaaaattataatcttcaaggattagtgagccatgagatctgcaatgctatcgtagggtttctgatcctgatgtgggtctctgtccaggatccttgaagaaattatggcacccacatccaaccctaacatagcttccacttatgaaacaaggaggttgtaatcaactcttggtatgtaataaactggaagttcaaaaatgtaatttaaaacaatctaaaagaatgtagtgttggtctccattgcacagactgctaggggaatatatcaacttgatttggggaggctgtagaggtatatagaggagtatatgggttaaaccttratgggtcatcagtttcagagaagaagcaattttttattgtagctgatggcaaatgcttttcgaaaagaatgaaag

SEQ ID NO: 437575 - DNA, 554 bp, Homo sapiens
agtggtctctcctttcacatctctgtgcagtcatgatatcaagaccccttgtggacatctctattccattcctcagtcagtgacaccacagagctctgtttgataccgggagacttaatgcagtaaaagtgacagaaagtgcaactgatagtaggatgaaaattataatcttcaaggattagtgagccatgagatctgcaatgctatcgtagggtttctgatcctgatgtgggtctctgtccaggatccttgaagaaattatggcacccacatccaaccctaacatagcttccacttatgaaacaaggaggttgtaatcaactcttggtatgtaataaactggaagttcaaaaatgtaatttaaaacaatctaaaagaatgtagtgttggtctccattgcacagactgctaggggaatatatcaacttgatttggggaggctgtagaggtatatagaggagtatatgggttaaaccttaatggrtcatcagtttcagagaagaagcaattttttattgtagctgatggcaaatgcttttcgaaaagaatgaaag

SEQ ID NO: 437576 - DNA, 616 bp, Homo sapiens
gaacatacacgtgcatgtgtctttatggtagaatgatttgtatttcttttggtatatactcaatagtaggattgatgagttgaatggcacttctgctttgagttctttgagaaatkgccacactgctttccacaatggctgaactaccttacattcccaccatcactgtataatcattcccttttctccacaacctcactagcatctcttattttttgagtttttaataatagccattctcattggtgtgagatggtatctcattgtggttttgatttgcatttctctaatgattagtgatgttgagcattttgtcatatgctttctggccacatgtatgccctcctttgaaagtgtccgttcatgtactttgtgtacgtttaaatgggattgtttgtttttcacttgttgatttttttaagttcaccagatgcactgtgctggggttctgtgatagtccctaattgctgtgcaccctcccaagcctgagagcagcaggagggagggttgcgagacagcaaaaaggtggactgcctctctctttgggagctgcatgccggagaagtgtagagctgctcccagctggagaactcaggaggactagggtggcctcact

SEQ ID NO: 437577 - DNA, 616 bp, Homo sapiens
gaacatacacgtgcatgtgtctttatggtagaatgatttgtatttcttttggtatatactcaatagtaggattgatgagttgaatggcacttctgctttgagttctttgagaaatggccacactgctttccacaatggctgaactaccttacattcccaccatcactgtataatcattcccttttctccacaacctcactagcatctcttattttttgagtttttaataatagccattctcattggtgtgagatggtatctcattgtgrttttgatttgcatttctctaatgattagtgatgttgagcattttgtcatatgctttctggccacatgtatgccctcctttgaaagtgtccgttcatgtactttgtgtacgtttaaatgggattgtttgtttttcacttgttgatttttttaagttcaccagatgcactgtgctggggttctgtgatagtccctaattgctgtgcaccctcccaagcctgagagcagcaggagggagggttgcgagacagcaaaaaggtggactgcctctctctttgggagctgcatgccggagaagtgtagagctgctcccagctggagaactcaggaggactagggtggcctcact

SEQ ID NO: 437578 - DNA, 616 bp, Homo sapiens
gaacatacacgtgcatgtgtctttatggtagaatgatttgtatttcttttggtatatactcaatagtaggattgatgagttgaatggcacttctgctttgagttctttgagaaatggccacactgctttccacaatggctgaactaccttacattcccaccatcactgtataatcattcccttttctccacaacctcactagcatctcttattttttgagtttttaataatagccattctcattggtgtgagatggtatctcattgtggttttgatttgcatttctctaatgattagtgatgttgagcattttgtcatatgctttctggccacatgtatgccctcctttgaaagtgtccrttcatgtactttgtgtacgtttaaatgggattgtttgtttttcacttgttgatttttttaagttcaccagatgcactgtgctggggttctgtgatagtccctaattgctgtgcaccctcccaagcctgagagcagcaggagggagggttgcgagacagcaaaaaggtggactgcctctctctttgggagctgcatgccggagaagtgtagagctgctcccagctggagaactcaggaggactagggtggcctcact

SEQ ID NO: 437579 - DNA, 616 bp, Homo sapiens
gaacatacacgtgcatgtgtctttatggtagaatgatttgtatttcttttggtatatactcaatagtaggattgatgagttgaatggcacttctgctttgagttctttgagaaatggccacactgctttccacaatggctgaactaccttacattcccaccatcactgtataatcattcccttttctccacaacctcactagcatctcttattttttgagtttttaataatagccattctcattggtgtgagatggtatctcattgtggttttgatttgcatttctctaatgattagtgatgttgagcattttgtcatatgctttctggccacatgtatgccctcctttgaaagtgtccgttcatgtactttgtgtacgtttaaatgggattgtttgtttttcacttgttgatttttttaagttcaccaratgcactgtgctggggttctgtgatagtccctaattgctgtgcaccctcccaagcctgagagcagcaggagggagggttgcgagacagcaaaaaggtggactgcctctctctttgggagctgcatgccggagaagtgtagagctgctcccagctggagaactcaggaggactagggtggcctcact

SEQ ID NO: 437580 - DNA, 606 bp, Homo sapiens
ggctctctgttttggtctggagaccccagctggggtatctcctgagcccagggattcaaaggttcgtggcagaaatatgcatcccacgggactctcactcactcaccattttcttgtagggggattcccctgggtctgtgccactcctgggtgaatggttgatctgtctcactcttctccgtgatccgaaggtcacactatgtcactgatgaatccttatgtgtccacctggatgttccggttgaagagctagtgtctcaccactcttyctgctatttgtgagagtggcacacactagctgcttctagtcaaccatcttggccccacctcactcacttttctcaagtaatcaaagacctagtaaaagagagcataaagcataagaaattaccttgataaacaaaaaatcttggtttattaggccagttatctaaaaggtagagaaaacatttcactattttctattaagagcaggtcaatactcaaagaaaagcttgttgtttcagcacaggggacaaatttcaagttttccattcctgtacttttgataataatgctcaagttttcagaatatttataaataatttccttttaactttagccaac

SEQ ID NO: 437581 - DNA, 606 bp, Homo sapiens
ggctctctgttttggtctggagaccccagctggggtatctcctgagcccagggattcaaaggttcgtggcagaaatatgcatcccacgggactctcactcactcaccattttcttgtagggggattcccctgggtctgtgccactcctgggtgaatggttgatctgtctcactcttctccgtgatccgaaggtcacactatgtcactgatgaatccttatgtgtccacctggatgttccggttgaagagctagtgtctcaccactctttctgctatttgtgagagtggcacacactagctgcttctagtcaaccatcttggccccacctcactcacttttctcaagtaatcaaagacctagtaaaagagagcataaagcataagaaattaccttgataaacaaaaaatcttggtttattaggccagttatctaaaaggtagagaaaacatttcactattktctattaagagcaggtcaatactcaaagaaaagcttgttgtttcagcacaggggacaaatttcaagttttccattcctgtacttttgataataatgctcaagttttcagaatatttataaataatttccttttaactttagccaac

SEQ ID NO: 437582 - DNA, 534 bp, Homo sapiens
ccagttatctaaaaggtagagaaaacatttcactattttctattaagagcaggtcaatactcaaagaaaagcttgttgtttcagcacaggggacaaatttcaagttttccattcctgtacttttgataataatgctcaagttttcagaatatttataaataatttccttttaactttagccaacttggtcacacataaaattcttttcacaagattaatcttccacaaactttctataaatttgtcatccagttatcttattcagtttttgtctatattttttctctttttctttttggaacagtaagacattctacttttagacaaaaaatactctctttttcccttaacaaaaacacaacctcttacttataactttctktatgtgttttccttccctcacgtacagatttgtttcccttcattatttctagtttaaattactctaatattaattttaattaactcttagtaaccttaatttctagtgaaaattagtaagcattttgaagtgcatcatgttagtattttgca

SEQ ID NO: 437583 - DNA, 534 bp, Homo sapiens
ccagttatctaaaaggtagagaaaacatttcactattttctattaagagcaggtcaatactcaaagaaaagcttgttgtttcagcacaggggacaaatttcaagttttccattcctgtacttttgataataatgctcaagttttcagaatatttataaataatttccttttaactttagccaacttggtcacacataaaattcttttcacaagattaatcttccacaaactttctataaatttgtcatccagttatcttattcagtttttgtctatattttttctctttttctttttggaacagtaagacattctacttttagacaaaaaatactctctttttcccttaacaaaaacacaacctcttacttataactttctgtatgtgttttccttccctcrcgtacagatttgtttcccttcattatttctagtttaaattactctaatattaattttaattaactcttagtaaccttaatttctagtgaaaattagtaagcattttgaagtgcatcatgttagtattttgca

SEQ ID NO: 437584 - DNA, 622 bp, Homo sapiens
ttagtattttgcagatgaacaccatctcataaaataatttttatgcctttaattaacaggcccaaatatgtttagcttttccataacatgtgaaaccaagatgccaaattacgtatattttaaacttctgttaagcaattgatatttcagtattttccttagaaatgactcaaatattaaatcagtaaagtgttacttaatttaatataacatgattttaagatttcaagtcacactaaattatttttgaaattctgacaactttattatcaaccttttgtcaatktatattcacctaattcacttgttcttaacaattgtgcttcagttcctccttaaacacaacgatgagtggatttatagctttaagacattcattatacatctcagtaatagcaagcttgtttcaccagtaactttaggtttaaaaactgtatctgtacattgtaattaatgctgacaattctgaaaatatttgtttttattttgccaacaaattttaaaactagctttgtctgccaaagattatttcatcacataagccaaaaggcaattgagtttctgtttttctgagagaattcttagtttaaacacttatgttttctctgtaagccaattaagt

SEQ ID NO: 437585 - DNA, 622 bp, Homo sapiens
ttagtattttgcagatgaacaccatctcataaaataatttttatgcctttaattaacaggcccaaatatgtttagcttttccataacatgtgaaaccaagatgccaaattacgtatattttaaacttctgttaagcaattgatatttcagtattttccttagaaatgactcaaatattaaatcagtaaagtgttacttaatttaatataacatgattttaagatttcaagtcacactaaattatttttgaaattctgacaactttattatcaaccttttgtcaatgtatattcacctaattcacttgttcttaacaattgtgcttcagttcctccttaaacacaasgatgagtggatttatagctttaagacattcattatacatctcagtaatagcaagcttgtttcaccagtaactttaggtttaaaaactgtatctgtacattgtaattaatgctgacaattctgaaaatatttgtttttattttgccaacaaattttaaaactagctttgtctgccaaagattatttcatcacataagccaaaaggcaattgagtttctgtttttctgagagaattcttagtttaaacacttatgttttctctgtaagccaattaagt

SEQ ID NO: 437586 - DNA, 586 bp, Homo sapiens
gaatgtagaaaatttaaatctcaaaggtacagaacttaaacaccactatttgttgagatgaaaaaaagcatatataggaagccttcaaaatgaaatggtcaagggtgagtttacacagatagatagatttaggtctcttccttttgctttgtgaaagcatctagtgttttaggtgtcagagagggagatatccttacaaagcagagattatcattacaggtttacatttcttacaaagagtttcaaaataaacaggtaaatgccaaaaacatatattttggwgacggattaattcactagttggtctattcaacttaacttgtttcctaatgagattaaattcatgcacaaataaccaaaccaaaaattaaaccaaaagaatactcaccagaaaggatgtcctttacaagagcagatcccccaaaatgtaagagttcactgaaaaggtgggagctcaaaccaagagaggacttatctcgcagcataaagacaacttgtacaagtgaagatcacaataggctcaggtgagtatcatacacaatttcaagtatcgccagatacttgaaagccttccaaaggctttctt

SEQ ID NO: 437587 - DNA, 536 bp, Homo sapiens
gttaggaatacaggcataagccaccacgcctggtcaaaatatctactgtttaagctacctaatttatggtattctgttttagcagctgaagcagactaagataccatcctataagctacagaccagcactatccaatagaactttatatgacgagsaaatgttttatatctgtgctatcccttatgttagccactagccacatgtatccatcaagtatttgaaatatggctagtgcaactaaagaacttaatttttaattttctttttttttttgagatggagtctcgctctgtcccccaggctggagtgcagtggcgccatctcggctcactgcaaactctgcctcccaggttcacgccattctcctgcctcagcctcctgagtagctgggactgcaggcgcccgccaccacgcccggctaattttttgtatttttaatagagatgggggttcaccgtcttagtaaggatggtctcgatctcctgacctaatgatctgcccgcctcggcctcccaaagtgctgggattaccggcg

SEQ ID NO: 437588 - DNA, 536 bp, Homo sapiens
gttaggaatacaggcataagccaccacgcctggtcaaaatatctactgtttaagctacctaatttatggtattctgttttagcagctgaagcagactaagataccatcctataagctacagaccagcactatccaatagaactttatatgacgagcaaatgttttatatctgtgctatcccttatgttagccactagccacatgtatccatcaagtatttgaaatatggctagtgcaactaaagaacttaatttttaattttctttttttttttgagatggagtctcgctctgtcccccaggctgsagtgcagtggcgccatctcggctcactgcaaactctgcctcccaggttcacgccattctcctgcctcagcctcctgagtagctgggactgcaggcgcccgccaccacgcccggctaattttttgtatttttaatagagatgggggttcaccgtcttagtaaggatggtctcgatctcctgacctaatgatctgcccgcctcggcctcccaaagtgctgggattaccggcg

SEQ ID NO: 437589 - DNA, 500 bp, Homo sapiens
aactctaagctcacttaaacctttgacattttatgagtctattaaatcgagtacaaaaaatgctgagtccaaacygggcaaacaaatcccatctccctatgcccagcctccttggattcagaaagccacactgcctggagagtaagcagagagagaattgtcattaacccaaagaccatctttgaaaacagactggctgcggctgagtgcggtggcacacgcctgtaaccccagccctttggaaggccgaggcaggaggatcacttgagcccaggagttcgagaccagtctgggcaacatggcaagaccctgtctctatctttctaagtaaaacaaaataaaaagctcagactggcagcacatggttctttccagctgttcccatgagcaggcttcaggacaagcccaggcaaaggcagggagaaatggggtggggacccccaggctcacccccttgtctgctgcgtaggtggagttggtcacaaaggtcacaggctggg

SEQ ID NO: 437590 - DNA, 500 bp, Homo sapiens
aactctaagctcacttaaacctttgacattttatgagtctattaaatcgagtacaaaaaatgctgagtccaaaccgggcaaacaaatcccatctccctatgcccagcctccttggattcagaaagccacactgcctggagagtaagcagagagagaattgtcattaacccaaagaccatctttgaaaacagactggctgcggctgagtgcggtggcacacgcctgtaaccccagccctttggaaggccgaggcaggaggatcacttgagcccaggagttcgagaccagyctgggcaacatggcaagaccctgtctctatctttctaagtaaaacaaaataaaaagctcagactggcagcacatggttctttccagctgttcccatgagcaggcttcaggacaagcccaggcaaaggcagggagaaatggggtggggacccccaggctcacccccttgtctgctgcgtaggtggagttggtcacaaaggtcacaggctggg

SEQ ID NO: 437591 - DNA, 583 bp, Homo sapiens
tttgcaacaatgcatgtgacaaagatctaatgtccaacactgataaggaacttaaacaaatttacaagaaaaaaaaaaatctcattagaaagtgggcacaggacataaacagacacttcaaaagaagacacacatgcggccaacaagcatatgagaaaaagctcaatatcactgatcattagagaaatgcaaatcaaaaccacaatggcataccatctcacaccagtcagtatggttattattaagaagtcaacgccgggcatggtggctcacgcctataatcccagcacttcaggaggccaaggcaggcagatcgcatgaggtcaggagttccagaccagcctggacaacctggcgaaaccccgtctctactaaaaatacaaaaattagcccagcgtggtggcgggtgcctgtaatcccagctactcaggatgctgaggcaggagaatcgcctgaacccgggaggcagaggttstagtgagccgagatcataccactgcactctccagcttaggtgacagagcgagactctgtctcaaaaaaaaaaaaaaatatttgaattttgtttaaatcgctaacacat

SEQ ID NO: 437592 - DNA, 583 bp, Homo sapiens
tttgcaacaatgcatgtgacaaagatctaatgtccaacactgataaggaacttaaacaaatttacaagaaaaaaaaaaatctcattagaaagtgggcacaggacataaacagacacttcaaaagaagacacacatgcggccaacaagcatatgagaaaaagctcaatatcactgatcattagagaaatgcaaatcaaaaccacaatggcataccatctcacaccagtcagtatggttattattaagaagtcaacgccgggcatggtggctcacgcctataatcccagcacttcaggaggccaaggcaggcagatcgcatgaggtcaggagttccagaccagcctggacaacctggcgaaaccccgtctctactaaaaatacaaaaattagcccagcgtggtggcgggtgcctgtaatcccagctactcaggatgctgaggcaggagaatcgcctgaacccgggaggcagaggttgtastgagccgagatcataccactgcactctccagcttaggtgacagagcgagactctgtctcaaaaaaaaaaaaaaatatttgaattttgtttaaatcgctaacacat

SEQ ID NO: 437593 - DNA, 571 bp, Homo sapiens
actagctaaagcagggatggggtggaagcagttttccataargcacacttaccagtgtgctatggcaacacccaggagtaaccgctcctttccatggcaatgacccaatgacccaaaagttacctctttcttagaagtttctgcatagaccatcccttaatctacatgtaattaaaagtaagtgtaaatatgactgcaaaactgccctgagccaccatactcagcctatgaggtagtcctgctccataggagccctcaaagagctgtaacattgccgaagctgtaacattgctgcttcagtaaagctgttttcttctaccctaccattgactgcccttgaattatttccttggtgaagccaagaatcctcacaggctaagtccactttggggcttgcctgccctgcatcaaaactactctatataatactaaaacagtggatacattatatatttgtccaaacccatggaatgtacaacaccaagggcaaatgctaatatatactatggactctgggtgataatggtgtgtcaatgtaggttgatcaactgtaccaaatgtaccactgtaa

SEQ ID NO: 437594 - DNA, 604 bp, Homo sapiens
gggaaacattggttacatattctgccctctataaaattcatatcaaaaagaaaaatgcagtaataattggagagtgagcactgtcctccgcttttagagagtcttctggcaactcttctacccttgatgtcagagaagcattacccagcctgggcatatattccccattccatctggtagtgatagactccaaatgcctcccacttgtgaagaggaaagagccaataaaagttttaatgagtaattgatttaatagagcatcttgaaaagtagccacatgttctattagaaaaattattatgatacatttgcacaaaagtaacattttgggtgaatatataaagcttaaaatcaatgaaacaatcatcgcatacagtactaccaaagaataaactttctttaaaaatacctagacataaggtcaaattttatataataatgcttttgggargtagagttattggtgtatgttcgtgtttagatttttaaaaccaaacttttgggcagcttatagtcagaatgtagactttcaaggaaggaaaattccttatgccagttacaatatcagcattttgttaaataaaagtgatattaaataaacaca

SEQ ID NO: 437595 - DNA, 622 bp, Homo sapiens
actaacctttctgaagtgcttacacacattcaggactatctaagtctcatacatcttgttaattcttcacatcaaaatagtaacaaccccattttatgaatgagaaaactgaaatttaaaatatttacatgacttaccaaattaactagaattataaatacttagtaatttgaagctgtatcatcttattctagaatctttgctattaactgttgccttccagcaaaatgaggagaataatcaacttggagtggctgcgaatgtgaaaatgtgcartgttactgtcaaacacatctaatggttaatttcagactcactgagcctccagaaacaaacctaacttagcctccacaaacaacattttagggtaataaaagttgtgaaaatcttctccctacttctctttggaatccctactaaatttgaatttgaagaaaagatagttcatgataacctaagaagaacttccaactatattacacactaggatagaggcgaagctgtgctctctcattaccaatactagaacaaccataaagaagagttttagaagacaagggttgtcacactcctgatcagtgaccaggttttttcttaaaacaaaaacaaaaacagggataat

SEQ ID NO: 437596 - DNA, 613 bp, Homo sapiens
ctgtcaaatatcctggtttcctggttgctaacagcttcctcttcataattgtcagtatgactttctcaagaggctaaagagagtgcaaagaaaaatactgtatatgggaactctagattctcttttataaatggtttctagtggctattaatatagtcacatccttccaatcacacagcacctagttcagttctcagcatacatggacactctcaacatgtctttggtgaccaactcttaggaagataaaagccaggacaacttgttcacattcagttttgcctcaaaataaagtctttgattgagttcattgggaaaaatgtgtttagtaggcagtgcagccaaagataaaactaacttattacctgggaagattgaacatgggtgttttgttttgttttgttttktttcactgctttaacatgaatcactgtgctcgactttgaactggtaagtcccttgagactagtggctttcttagaacgatcacttaggtatcaaaggtcttcctttgttaactcgggtaggtgactatgtctcctcggagacactaaagctcaatgatgaagagaatgcatcttctgggctttaggggtttgacatctgctgtgcc

SEQ ID NO: 437597 - DNA, 613 bp, Homo sapiens
ctgtcaaatatcctggtttcctggttgctaacagcttcctcttcataattgtcagtatgactttctcaagaggctaaagagagtgcaaagaaaaatactgtatatgggaactctagattctcttttataaatggtttctagtggctattaatatagtcacatccttccaatcacacagcacctagttcagttctcagcatacatggacactctcaacatgtctttggtgaccaactcttaggaagataaaagccaggacaacttgttcacattcagttttgcctcaaaataaagtctttgattgagttcattgggaaaaatgtgtttagtaggcagtgcagccaaagataaaactaacttattacctgggaagattgaacatgggtgttttgttttgttttgttttgtttcactgctttaacatgaatcactgtgctcgactttgaactggtaagtcccttgagactagtggctttcttagaaygatcacttaggtatcaaaggtcttcctttgttaactcgggtaggtgactatgtctcctcggagacactaaagctcaatgatgaagagaatgcatcttctgggctttaggggtttgacatctgctgtgcc

SEQ ID NO: 437598 - DNA, 593 bp, Homo sapiens
ttcagtttttgttgcatcggaatccatgagagtccttcaaaaaaatcatctacatagcctgtgaaccctatcagcaataccatataatgatttctgcttgtcctggaaaggagattaaataaaattcagattcttgtaacccttccccaaagatagagactacgtaatgtcatcaaattccctgttaaatctttttatttgtttgaggcttgtgtagttgattgcttgcttatttgttgcttgcaacaaatcatactctgacattgcccaaaagtaattgccccagaaataaaaggtgtaatttttaaatctgtgtattaatttttatataaatgctaactttgtggtcacaattccaacagactgatgacattgaatatgattctgtccttacacctcgaaatcacaatctgtggaacttgaactctttcaaggggacaagcataaggaatatttctatgtgtaggggacattggtcatgttttcygacttgtcagttgcttttgagtgttcttgctttgtttgagtaattccaggctctaacagtgccagagcaccaagataaaggcaggaaaaatagaatggtcccactt

SEQ ID NO: 437599 - DNA, 445 bp, Homo sapiens
tgagtgtaagtgtgagcattgagacaggagaaggaggtawttaaaagagataaataaagcttataaaagccgcttcttaccctaaccaccgtcatcaaaaaagaaatctgtaattcatgaataaaatataatctgagttttacaacagcattataaagattctttttgagtataagttttaaaagtgttattgtgttataaaatttaatgggaaatttttctttcccttaaaaataaacccaaataccacagacatttcccaaaaattccagctgtctgcttgctctccttgagttattctattttcctccattagtagtttaaaggtgtactctttgatatgtaatatcattttaaggagttcaacagaattaagattgttccagtatactcagccgtttattttcacaaaattgaggtacacattgcaaaattagagtgtttt

SEQ ID NO: 437600 - DNA, 565 bp, Homo sapiens
atcctcagttcttgtgtacagtgctactgttcttccaacgtcaaaggctcagcctcatccatctcaatagccatggtgaatggccttatgttctttatgttttagtacataatgtgactgctataaataattatcaaayttaattaccataggtttctctgtgtggtagtcatcagtgtatctgtctcaactttcatacaagattgtacatgttccctgggagtgggtttgttacatacatgttctaatccatcaagctgtcttgcacttctttatacttaataggtcttcaatatttactgagtggctgaacaaatgaaataaaagggaaatcttatttaatttcatgatgtatgagatatcttaacagtcaacattacattctactacatgaagtgacttttctacccaaattagcttattcatgcttatcgtcaatactgtgatctaatgggggagtcattcccataggaacttacaaataagagaaataaatttgcctcattatggcgcaatacataatgatctgttttggtccctctcttttgattgcaaaaagagctcc

SEQ ID NO: 437601 - DNA, 541 bp, Homo sapiens
ctgtaatcttttattgcctgcagtacaggcctacagcattaagttagtataaaattacatatagtttaatatatctgtacaacacctttaaacaagcttctctaggcaagaaggttatccgtcttataaatctattattccattgtacatcttgatagcctagcattgctcctagccatgtttaagcattaaatagtgcattattatttcacataaatcaaccagagatgtgtgaattcataaattttgcatttgcacagacagtattttaaacgttttactgcttcgtgggaactcagagcaccagcctgtacacaaatcaggacytgagaaatttcgataaaatttaatatcacaattacatcttctcaaagtcaaagcaggcatgttttggaagtattttaactgagtccaaaaatgaaagtaaatgtgaagagtggcttttttgttggcatttagtcagctattgttataacaagctaataagcactttacttttaaaattctttatagccaaatggtatagagaaaaggttttatc

SEQ ID NO: 437602 - DNA, 468 bp, Homo sapiens
gaaactaatatcagaggctggaaaaatgaaaccccaagttaagcagaggcaaaatgttcagtaacaatgaagcccacgatacctttggaggcaggccactaacttccctagcctgtgtctgtagcaaaagatattgtaaaatagaattatgtgagcatgcattagatgttactagctttatttggcaagatattagaaggagaaatgaccacaagaaagaattatccaaagtacacataaaaatgaaagggaataagaaagcatccagaaattttaagcctcaaaagttgggaatgcttacctcaaacattaayacgtaatttttgagattaaataatgaacagtcttaagatataattatgtgacaaaattccaattgaaccaggccttcaacccaagcctatggccttggggtagatgtcattgagttgaaaaaaaaataaatggtgatgagaagaaaaacagata

SEQ ID NO: 437603 - DNA, 593 bp, Homo sapiens
gtgctaccaaacactagatgttattccttctatctaactgtattttgtaactttatccccttacccccactacccttcctagcctctggcagccaccattctattcactacctccacgagatcactttgttttagctcctacatataagtragaacatgcaacatttttcttcctgtgcctagaagagacgacagtcttattaattttaaagaaaattatattacaaaaacaaccatgagctaggacgtaaaagcttttggctgagccttgaagcaactcttaggccacccaactcatacaggcaggaggcaggcagcaaaacctctagagccctcaactgccattgcagccacggcagataatagacaagcaaagcttcccagatggcagaagcaggggccccacagaacaatggacgggaaaattcctccctgagaacagaatcaagttctgaccatggcacttctctcactgacaagactacataacagctgtccacaggatttcatcattaccatggaccagtgactactgcatacattgcaattttctgttttctgcctaaggtatttattccagttatccagtcctg

SEQ ID NO: 437604 - DNA, 593 bp, Homo sapiens
gtgctaccaaacactagatgttattccttctatctaactgtattttgtaactttatccccttacccccactacccttcctagcctctggcagccaccattctattcactacctccacgagatcactttgttttagctcctacatataagtgagaacatgcaacatttktcttcctgtgcctagaagagacgacagtcttattaattttaaagaaaattatattacaaaaacaaccatgagctaggacgtaaaagcttttggctgagccttgaagcaactcttaggccacccaactcatacaggcaggaggcaggcagcaaaacctctagagccctcaactgccattgcagccacggcagataatagacaagcaaagcttcccagatggcagaagcaggggccccacagaacaatggacgggaaaattcctccctgagaacagaatcaagttctgaccatggcacttctctcactgacaagactacataacagctgtccacaggatttcatcattaccatggaccagtgactactgcatacattgcaattttctgttttctgcctaaggtatttattccagttatccagtcctg

SEQ ID NO: 437605 - DNA, 515 bp, Homo sapiens
gatccatggccatagtccctgcctgtttggtcttccttcatttacttcaactaaattctcagattttctgaccaaggatacccaaagcctctattttactattaggtcgagtcatatgaaactgtaatcagctagaaagagtagaatattgtcagtttaataacattcagttttgtttagctttagtgtcctgacctgttgatgttcaagtcttatggggaaaagaagaagaacatgattccaagaagacctggttctaatgcactgtgccatttagcaattgcttcaagagaaacacttaaaytctctgggtaacaattccttatctgaaaatgaggacaatatgattcacaattgtgtcacaagattgtggggaaatattccacatgataatatcacctgcgaaagtgcttcaaaaattgttaaagcactatacacatttaggttgctgttattatagtcagcaaagatgccttcaccagcaaaagcagcattaatttttttttaagagcagt

SEQ ID NO: 437606 - DNA, 631 bp, Homo sapiens
gtttcaaacgtgtgtacaaataatttttactttatctttttttacaattcatttctgtcttgagcctccattctattcagtagtcaaatttagggttaatcagtcagtgcagtatttcctcagtctgtgactagcttgacgatrttctctactcactcattatccaagggctgtcaccttagtttcaaggagtctatgtggtgccactgaggtgccatcctcagtgagaatgggaggatatcatcttctctccccatgatcagatgataaggcattcaaatttttcctgtttctggccgttggtatctaaccatatcgccatgtgcccactctcattgggtcttagatcattgcttcatggaagtcactttgcatcttttaagactctgctatgaggccccttcatgtccactatctctgtctctcctctatttatgtgcctctgtaaggaggaggtggaggggaagaataaaatatacaatgcaatatgttggtagatagagtttagaaaggacttcttccctatttagaggataaacctaatggttctctctgcttttctcatactggtcatcccaagctttacccacttgagtataggctttggattcagagagtgcattcaatccca

SEQ ID NO: 437607 - DNA, 631 bp, Homo sapiens
gtttcaaacgtgtgtacaaataatttttactttatctttttttacaattcatttctgtcttgagcctccattctattcagtagtcaaatttagggttaatcagtcagtgcagtatttcctcagtctgtgactagcttgacgatgttctctactcactcattatccaagggctgtcaccttagtttcaaggagtctatgtggtgccactgaggtgccatcctcagtgagaatgggaggatrtcatcttctctccccatgatcagatgataaggcattcaaatttttcctgtttctggccgttggtatctaaccatatcgccatgtgcccactctcattgggtcttagatcattgcttcatggaagtcactttgcatcttttaagactctgctatgaggccccttcatgtccactatctctgtctctcctctatttatgtgcctctgtaaggaggaggtggaggggaagaataaaatatacaatgcaatatgttggtagatagagtttagaaaggacttcttccctatttagaggataaacctaatggttctctctgcttttctcatactggtcatcccaagctttacccacttgagtataggctttggattcagagagtgcattcaatccca

SEQ ID NO: 437608 - DNA, 631 bp, Homo sapiens
gtttcaaacgtgtgtacaaataatttttactttatctttttttacaattcatttctgtcttgagcctccattctattcagtagtcaaatttagggttaatcagtcagtgcagtatttcctcagtctgtgactagcttgacgatgttctctactcactcattatccaagggctgtcaccttagtttcaaggagtctatgtggtgccactgaggtgccatcctcagtgagaatgggaggatatcatcttctctccccatgatcagatgataaggcattcaaatttttcctgtttctggccgttggtatctaaccatatcgccatgtgcccactctcattgggtcttagatcattgcttcatggaagtcactttgcatcttttaagactctgctatgaggmcccttcatgtccactatctctgtctctcctctatttatgtgcctctgtaaggaggaggtggaggggaagaataaaatatacaatgcaatatgttggtagatagagtttagaaaggacttcttccctatttagaggataaacctaatggttctctctgcttttctcatactggtcatcccaagctttacccacttgagtataggctttggattcagagagtgcattcaatccca

SEQ ID NO: 437609 - DNA, 562 bp, Homo sapiens
tttcttccagtctgtaatttgtcattttgtccttgtaacagggcattttgcagtacagaagtttttaattttgatgaaagtccaatttgtcaattttttttctatttttggatgatgattttagtgtaaaatctcagaactctttacttagccttagatactgaagattttctcctactgttttctcaaagtgttacagttttactttttacaattaagtccatgagccaatctattttgagtttataggatatgagacttgggtttgggttctctctgtctctctctctcttcctctccctctcttttgcttctgaatatccagttgctccagcatcatttgtcaaaaatgctacctttcctctattgaattgcttttgcctctttgtcaaaaattaattkggcatattcgtgtgggtctatttctgggatctctgttctattccactggtttttgtgtctatgttttgccagtaccacatcatctaaattattgaagctataagtcttaacatctagtagatcaatttttaattcaaaatgattttagctttcttgattc

SEQ ID NO: 437610 - DNA, 542 bp, Homo sapiens
atttcctccatctgaaagtactaccaagtccagagtaaaaactaacccagttgtagttctgaggtgcaggattcagtctcrcatctgcaaagctcagagtggtgccttcttagatcactagctgacccctttagggaaagcctgtgccagaataatcctctaagcattgttctgacctcctgctggcttcctgtggttttcctctattttgtgtctccaaagtctcatagatgaacttacttaaattatatggtatatagacttaattaatggtaaggaaagtagaattcactagtttaaagggaaagcaataggaatgaatttagtacatattttcagcaagaagcatggtggtgttaagtcagagacatcagtttgaacatattaaaggccattcttttgctctgtcaatctcatggctgttgactctaactttaatgcatagtatcttgaaaatatgtgactataatcaaaatggaaagaaatgaatctacatacatcaacatagatccttatttcctgaaatattcggaacctacata

SEQ ID NO: 437611 - DNA, 416 bp, Homo sapiens
atttttaagctttgaaaatgccatatatattatttatttatttatttatttatttatttatttttgaggcagggtctcactgtctggctcaggttggagtacagtggtgtgaccatggttcactgcagctttgacctctcaggctcaagctgttctcctgccgcagcctcctgagtagctgggactacaggctcatgccaccacacactgctaatttttgtatttttggtagagacgggatttccctatgttgcccagggtggtcttgaactcctaggctcaagtgatccaccacctcagtctccccaagtgctggrattacaggcgtgaaccactgtgcccagccaaaaatgctattctgttaatagcttcttagagtttttgttttttgttatgtggccttaaagcagagcaga

SEQ ID NO: 437612 - DNA, 413 bp, Homo sapiens
agcaagaagtttcctgtttgtcctacgatcccacttcagggagcttctcctccatccagtgggctgcagccatgccctctccaacaggactgaatctcagcatggaggcaggggccgcttccagattcagtccttcccgtcggtacttggacttagccatggcatcagtgactgcattctctcctgttcctgtattcctagaagttctctttaccgcttagtaattaawccctaactactaattaataatgctctataagaaacattaattattcagattactgtgtgttttctgtctcctagctggaccctgaatgataatagtggttaaaaggaagtgtttcccacacactgcagctagattagtctgaattttctacaatactatttgtgcagaaaggaggcaagagctc

SEQ ID NO: 437613 - DNA, 609 bp, Homo sapiens
gatgcatttgggctactccacctttcaggtcgtagaaaatgaatacaggaattttggtcagggaggtgacataaaataaaagcagtattttaaaaatatgttaattactgtgatgcctagcatgaactggaaggaggtgagatggtatcagatagatcagttgaaaraggattatcatattccatatttgaagtcgttggatcctaaataagaaaaacatgaaataaaatagaagaagaaagttcaacaaaagttgataaatatttgattgtaaatatgcaagggagaggaaagagaaagcaaacaagaaaaccaaaaagttgaagaaatgggaaaattatataactatttgctccatttaatttgcttagcatagaaaaaataatttttcaatatgagcctcacatgttcctagaataaaaaaggctgagaaagtaaaagcactatcattatttaaaaatacagttaaaaagtaaatagctcaacaaaggtgggtcagttgcatgtattaatttaatgtatgtagaaaagtacactttgtcaatcatcatagcacaaaatatagcaactctgaaaaacctcatttctttcattttgccgaaatgattt

SEQ ID NO: 437614 - DNA, 585 bp, Homo sapiens
ttaattatagccacactgggatggtgtctcagtcagtccagaatgctgtaacagaacaccacagactgggtggcttcaacacggaaatttatttcccacagtactggaggctgggaggtctgagttcagggtgccagcatgattgaggagttctggtaacccttcctgggttcatggctagctgtcttcttactgtgccctcacatggcagagaaagggagrccatctttcgtgtctttttaaaggacactaatcccattcatgaggcctccactctcaaaatctaaggcccggcctccaaataccatcacgttggaaatttagtcttcaacataagaatttaggggggatgtgggaacgcaagcattctatccatagaagatggagtagggagactttgtaggctggcagggttcaaggttacatgcaagctgttaacatcggccctctcacttcccttacctgaccattcttcctgtagttcccccaggtgccaccttagaggaagggctatgctgttttccgctgcctcagtctgccctatctattcctctagaaaacttgctttccttccctgctgtttag

SEQ ID NO: 437615 - DNA, 449 bp, Homo sapiens
gggatggagagtaaagaatggacttcactttgagatgagacctagtccaggacatcaaggaagtctccttggagaggttccatttgagatgggtccaaaagttgacaggaattcagcagaraagggaaagaaagagcattcaaggcagaactgttgggctctttacaggaaagctgactagagagtagagagctaggaagttttgctccaaatagactggtagagtaggcaggagcctggtcatgaaggaccagactaaaagggtagatttcaagattacagccctgaaaatgaattacatgtgagcaaaaagccaactaaatgagcttgtaggatatgcagacagaactgagattggagggtgcagaagtgagagtgatgaggaggggagggagctgcctacagcctttcaggaaaatcatgttttcttttggcttgccaagagtctc

SEQ ID NO: 437616 - DNA, 449 bp, Homo sapiens
gggatggagagtaaagaatggacttcactttgagatgagacctagtccaggacatcaaggaagtctccttggagaggttccatttgagatgggtccaaaagttgacaggaattcagcagaaaagggaaagaaagagcattcaaggcagaactgttgggctctttacaggaaagctgactagagagtagagagctaggaagttttgctccaaatagactggyagagtaggcaggagcctggtcatgaaggaccagactaaaagggtagatttcaagattacagccctgaaaatgaattacatgtgagcaaaaagccaactaaatgagcttgtaggatatgcagacagaactgagattggagggtgcagaagtgagagtgatgaggaggggagggagctgcctacagcctttcaggaaaatcatgttttcttttggcttgccaagagtctc

SEQ ID NO: 437617 - DNA, 449 bp, Homo sapiens
gggatggagagtaaagaatggacttcactttgagatgagacctagtccaggacatcaaggaagtctccttggagaggttccatttgagatgggtccaaaagttgacaggaattcagcagaaaagggaaagaaagagcattcaaggcagaactgttgggctctttacaggaaagctgactagagagtagagagctaggaagttttgctccaaatagactggtagagtaggcaggagcctggtcatgaaggrccagactaaaagggtagatttcaagattacagccctgaaaatgaattacatgtgagcaaaaagccaactaaatgagcttgtaggatatgcagacagaactgagattggagggtgcagaagtgagagtgatgaggaggggagggagctgcctacagcctttcaggaaaatcatgttttcttttggcttgccaagagtctc

SEQ ID NO: 437618 - DNA, 585 bp, Homo sapiens
ttaattatagccacactgggatggtgtctcagtcagtccagaatgctgtaacagaacaccacagactgggtggcttcaacacggaaatttatttcccacagtactggaggctgggaggtctgagttcagggtgccagcatgattgaggagttctggtaacccttcctgggttcatggctagctgtcttcttactgtgccctcacatggcagagaaagggaggccatctttcgtgtctttttaaaggacactaatcccattcatgaggcctccactctcaaaatctaaggcccggcctccaaataccatcacgttggaaatttagtcttcaacataagaatttaggggggatgtgggaacgcaagcattctatccatagaagatggagtagggagactttgtaggctggcagggttcarggttacatgcaagctgttaacatcggccctctcacttcccttacctgaccattcttcctgtagttcccccaggtgccaccttagaggaagggctatgctgttttccgctgcctcagtctgccctatctattcctctagaaaacttgctttccttccctgctgtttag

SEQ ID NO: 437619 - DNA, 623 bp, Homo sapiens
ttaataacaatgtattgtttacttccaattgctgggagtagattttaagtgtacacacacacacagatacatatgtgagggaatgcaaatattaatcagcttcatttagccattccacaatgcatacatatgtgaaaacatcatgttgtatacactaattatawacatttttatttgtcagtttaaaagaataataatgaaagaaattacacagctaaatcaaaggatgcacgtgtcagagtaactggaaagacagcacatgaatgccacacaagagtcctgttacgtacaaccccactcacaatcacctcttttttcattctgtacacaccaggctcactgcccagctaatagccccattaagcaaacccaggttctcctatatttcaacctctgtttagatacattgcctcacactattaataagtatcatcagccttcctagctttgccaatgcctcaattccctttccgcctttgtgcacatcactccaacaatcactggtcgactttattgaacctgcctcatgggcaggatccatatggggcaaatttgtgaagagctgcattcctctgctaagcagtttgtaaggcattctagcttaaatagggaagcagataatt

SEQ ID NO: 437620 - DNA, 601 bp, Homo sapiens
ccaggaaacttcttgcttgatgctttggtctgttttgtttttaatgttttaaacaaagaatattccggcctttacttcagagtttcttccaaagatacatatgcatttctaggaagaggaaagaaagagttgtaagacatctatcatcataaaaaattaatcacttgactcatcccctgtcctgcttgtttcagttagyattttcagcttcccaagaccatattgttctacatctgtatgtaagagctctgatgtatctagaatttgtaagctgtccagcaaaaatgaaaaagggtctctccattcacttttcaatgattaaaaaaaagagagaaaagcatcaattttatataactctctcttttactcaaatcttattctctgccttgtgttaaattccagcaaggccctaaacaattgaaaaatgaacaagttggttgatctttagcaagtgaatacattgttccctaaatggtttcaattacacaggttagctctgtgggaggttgcactcactgtgatgttctaaggagactacatggtttctgagaagataaaatattctgtagcactgaaacaggtcgaatataatcctaggtaa

SEQ ID NO: 437621 - DNA, 601 bp, Homo sapiens
ccaggaaacttcttgcttgatgctttggtctgttttgtttttaatgttttaaacaaagaatattccggcctttacttcagagtttcttccaaagatacatatgcatttctaggaagaggaaagaaagagttgtaagacatctatcatcataaaaaattaatcacttgactcatcccctgtcctgcttgtttcagttagcattttcagcttcccaagaccatattgttctacatctgtatgtaagagctctgatgtatctagaatttgtaagctgtccagcaaaaatgaaaaagggtctctccattcacttttcaatgattaaaaaaaagagagaaaagcatcaattttatataactctctcttttactcwaatcttattctctgccttgtgttaaattccagcaaggccctaaacaattgaaaaatgaacaagttggttgatctttagcaagtgaatacattgttccctaaatggtttcaattacacaggttagctctgtgggaggttgcactcactgtgatgttctaaggagactacatggtttctgagaagataaaatattctgtagcactgaaacaggtcgaatataatcctaggtaa

SEQ ID NO: 437622 - DNA, 557 bp, Homo sapiens
ccagctcagcctcaagagttccagattgttcgaacccctctctatttcacgccctcttttctcccaacttcctgccccgtggacttaaagcttcagcaccagatagtgaaggaacagccccacactgactgcttcatgtgtctcagtccaccttcacgygtctcagtccgcttaggctgctataaaaaataacaaagactgggtggcttaaacaacacttactggatcacagttctggaggttgaaatgtccacgatcagagttcctgcatggtctggttctcgtgacgactcttcctggcttgcagattggggccttgctgtatcctcacgtggcataaagagagctcttgtctcttcattcccttgtaaaggctccaattccatcatgagttccacccccatgacctcatccaagcccagttacctcccaaaggccccacctccaaataccatcacactggagattagggtttcaacatattgattttgtggactgcaaacattcagtgtatagcaaccagctcccacttgtagtggacctgcttttctgaccca

SEQ ID NO: 437623 - DNA, 557 bp, Homo sapiens
ccagctcagcctcaagagttccagattgttcgaacccctctctatttcacgccctcttttctcccaacttcctgccccgtggacttaaagcttcagcaccagatagtgaaggaacagccccacactgactgcttcatgtgtctcagtccaccttcacgtgtctcagtccgcttaggctgctataaaaaataacaaagactgggtggcttaaacaacacttactggatcacagttctggaggttgaaatgtccacgatcagagttcctrcatggtctggttctcgtgacgactcttcctggcttgcagattggggccttgctgtatcctcacgtggcataaagagagctcttgtctcttcattcccttgtaaaggctccaattccatcatgagttccacccccatgacctcatccaagcccagttacctcccaaaggccccacctccaaataccatcacactggagattagggtttcaacatattgattttgtggactgcaaacattcagtgtatagcaaccagctcccacttgtagtggacctgcttttctgaccca

SEQ ID NO: 437624 - DNA, 610 bp, Homo sapiens
tacttcagcgaacacatgaatgataagaaagttaaacaagcttattgctgatatggggaaagcctgagaggtgtaratagatcaaaccagctacaacattcccttaaggcaagcctaatccagaggcccgaactctcttcaattctgtggaggttaagagaggttaggaagtttcagaagaaagatatgaagctagcagaggttggttcacaaggtttaagaaaagaagacgtctccataacataaaagtaaaaggtgaagcagtaagtgttgatgtagaagctacaagttatccagaagatcagctaagatcactggggaaggtgactgcattaaacagcagattttcaatgtagacaaaacagccttatattggaaagagatgccatctaggactttcatagctaaagaggagaagtcaatgcttggcttcaaagctgcaaaggacaggctgactttcttattatgggcgaatgcagctgatcactttaagttgaagccaatgctcactgaccattttgaaaatcttagggaccttaacaatgatgctaaatctactctgcttgtgctctgtagatgaaacaacacagcttggatgacagcacatctg

SEQ ID NO: 437625 - DNA, 561 bp, Homo sapiens
gtggctgccatattgaatagcacagttctagaatctctgagtcctctgagcctccacactcttttaagtactcaaaagctgctcacatggtccctgttctgcaaacacatactctcactgccagtaactgagtgccaaggagcaaatggcagtatcttagcagctttttcagctgtcaaaagaaaaaaaaatttctgctcctgggcagacatctgactgtgcagccgttgcagagagacaatttagttcagaattatgtgccaccctgactctacctggcaggtgccttctgtgctagctcttctatctgcaaacttgagaaagatgacarggttttaaatgattaactcctctgggccacattacttaattatacagtacatccagggataggcacatgggtcttttatggtaaatgatatgacggtcttaaaaactcattaatatgtcattaaccaagcagacatttactaattaaacaattagcccctctgttctattcctttgttcctcccagagatgctcggttacccagatccccaatttagcagaagtccccca

SEQ ID NO: 437626 - DNA, 555 bp, Homo sapiens
cttttatggtaaatgatatgacggtcttaaaaactcattaatatgtcattaaccaagcagacatttactaattaaacaattagcccctctgttctattcctttgttcctcccagagatgctcggttacccagatccccaatttagcagaagtcccccacttcttttcccagagaaaatcactcgtaaagcaaactcagagactaaatgattttaccagatttttttttccaagttggctacgaagacaatcaaagctgatttycatagcataaatgaatgtggatgttggtctagtttaaataaatcatcttgatatgtaaaccaattttagatatatgtgaaatagcatccgccataactggtgtaaatactgaatataacaaaactacatattcccagttaagtaaatacaaacagacaagattaatgacttgagatgtattaatatgattcatcacaaaaagtcaataccaaagaaatgtgtaatgttcttaactttgtatctcagaaggtttttaatatccattatgctttcagctaattttaactaaatc

SEQ ID NO: 437627 - DNA, 555 bp, Homo sapiens
cttttatggtaaatgatatgacggtcttaaaaactcattaatatgtcattaaccaagcagacatttactaattaaacaattagcccctctgttctattcctttgttcctcccagagatgctcggttacccagatccccaatttagcagaagtcccccacttcttttcccagagaaaatcactcgtaaagcaaactcagagactaaatgattttaccagatttttttttccaagttggctacgaagacaatcaaagctgatttccatagcataaatgaatgtggatgttggtctagtttaaataaatcatcttgatatgtaaaccaattttagatatatgtgaaayagcatccgccataactggtgtaaatactgaatataacaaaactacatattcccagttaagtaaatacaaacagacaagattaatgacttgagatgtattaatatgattcatcacaaaaagtcaataccaaagaaatgtgtaatgttcttaactttgtatctcagaaggtttttaatatccattatgctttcagctaattttaactaaatc

SEQ ID NO: 437628 - DNA, 585 bp, Homo sapiens
ctaggactttcatagctaaagaggagaagtcaatgcttggcttcaaagctgcaaaggacaggctgactttcttattatgggcgaatgcagctgatcactttaagttgaagccaatgctcactgaccattttgaaaatcttagggaccttaacaatgatgctaaatctactctgcttgtgctctgtagatgaaacaacacagcttggatgacagcacatctgtttatagcatggtttactraatattttaagcccactctcaagacccactgctcaaaaaaatgccttttaaaatattaatagcagtagctctttgacagtgcacctggtcacctaagagttcagatggagatgtacaaggggattcatgttgttttcgtgcctgctaacacagcatccattctgtgggtgaaatgctatcaaagagcatctcatgctacagagacatttttttgtgaaaggaagagtcagtgtggcaaatttcattgttgtcttattttaagaaattgccacagtaactccaatctttagcaagcgccaccgtgatcagtcagccacgaatgtcaaggcaagaccctccaccagc

SEQ ID NO: 437629 - DNA, 537 bp, Homo sapiens
ctgtcattggcagttagatagaaggtcaacacagagcatcaggagaccacatggccatattaaagcatcttggatgtcatcacaaaccaggatcagggctgtattctgttattgaagctaaatacagaagagagrgtggggagggatggagacagagggtaaagcaactgtaccaaggctcttctgtgacaccatcatcattctcttagctcttgatgttgaatgtctccagggtctttcagataaggcctttctgaaggccccagcatccttcagaagagggcttcagactttttctcctatttattaatgcttagtacctagctatttaggcacttcacattttttctcctatttattaatgcttagtatttcactgactccaatggctttataagatgaagactctcaagtttagaacaccaatccagaccccttcctatgctctaatctcatatgttcaactgcataatcaatatctctacctgatgcttaataggcatcttgaagtcaacattgccagaaataatacagtgg

SEQ ID NO: 437630 - DNA, 601 bp, Homo sapiens
atcagcattttaaatatatctatcttctaattaataaactatggaatatagtcatcacawattccacatacctttcaccttcaattatgattgaagtttgagacacatctttttcttattaaaaaaaaaataaaagaaagaaaaagaaaatgcttctgagttcattctggatactcgaatgtatgctgagcattatggaaacgatattttttatcacccacgctcaaaactttgacaacttttttacctttatgattgacagtatgtatttgaggccttttgaggactacggagattcttctgcattaactatttggttatactcatcatttctttcttaattgagttacccattagcatttagataagcttctcttgaaagtaaactagatgctttggacagatagtgttaagcagctgaaaaatagtattcatttgactatgtcacaacttctagaaagttccacaaactgttctaaaaggtttggcaattatattactttcgtaagtttctgcatatagtattttttaataccctatgatgctgcagctgaatcatagagtaatctttctgaaaatacttcaaaaactccattggggt

SEQ ID NO: 437631 - DNA, 601 bp, Homo sapiens
atcagcattttaaatatatctatcttctaattaataaactatggaatatagtcatcacaaattccacatacctttcaccttcaattatgattgaagtttgagacacatctttttcttattaaaaaaaaaataaaagaaagaaaaagaaaatgcttctgagttcattctggatactcgaatgtatgctgagcattatggaaacgatattttttatcacccaygctcaaaactttgacaacttttttacctttatgattgacagtatgtatttgaggccttttgaggactacggagattcttctgcattaactatttggttatactcatcatttctttcttaattgagttacccattagcatttagataagcttctcttgaaagtaaactagatgctttggacagatagtgttaagcagctgaaaaatagtattcatttgactatgtcacaacttctagaaagttccacaaactgttctaaaaggtttggcaattatattactttcgtaagtttctgcatatagtattttttaataccctatgatgctgcagctgaatcatagagtaatctttctgaaaatacttcaaaaactccattggggt

SEQ ID NO: 437632 - DNA, 601 bp, Homo sapiens
atcagcattttaaatatatctatcttctaattaataaactatggaatatagtcatcacaaattccacatacctttcaccttcaattatgattgaagtttgagacacatctttttcttattaaaaaaaaaataaaagaaagaaaaagaaaatgcttctgagttcattctggatactcgaatgtatgctgagcattatggaaacgatattttttatcacccacgctcaaaactttgacaacttttttacctttatgattgacagtatgtatttgaggccttttgagractacggagattcttctgcattaactatttggttatactcatcatttctttcttaattgagttacccattagcatttagataagcttctcttgaaagtaaactagatgctttggacagatagtgttaagcagctgaaaaatagtattcatttgactatgtcacaacttctagaaagttccacaaactgttctaaaaggtttggcaattatattactttcgtaagtttctgcatatagtattttttaataccctatgatgctgcagctgaatcatagagtaatctttctgaaaatacttcaaaaactccattggggt

SEQ ID NO: 437633 - DNA, 601 bp, Homo sapiens
atcagcattttaaatatatctatcttctaattaataaactatggaatatagtcatcacaaattccacatacctttcaccttcaattatgattgaagtttgagacacatctttttcttattaaaaaaaaaataaaagaaagaaaaagaaaatgcttctgagttcattctggatactcgaatgtatgctgagcattatggaaacgatattttttatcacccacgctcaaaactttgacaacttttttacctttatgattgacagtatgtatttgaggccttttgaggactacrgagattcttctgcattaactatttggttatactcatcatttctttcttaattgagttacccattagcatttagataagcttctcttgaaagtaaactagatgctttggacagatagtgttaagcagctgaaaaatagtattcatttgactatgtcacaacttctagaaagttccacaaactgttctaaaaggtttggcaattatattactttcgtaagtttctgcatatagtattttttaataccctatgatgctgcagctgaatcatagagtaatctttctgaaaatacttcaaaaactccattggggt

SEQ ID NO: 437634 - DNA, 586 bp, Homo sapiens
ctacctactactgtacgattccaactatatgacattttggagaagacaaaactatggagagagtaaaaagatcaatggttgtcaggggtttggggaaagaaaaagagagatgaataggcagaatacagaagatttttagggcagtgaaactattctgtatgatactataacggtagacacatgacattayacatttgtcaaaaaacagagaatgtacaataccaagagaaaaccctaatgtaaactgtgtgctttgagagataatgatgtgccaaagcaggttccctaattgtaacaaattctcactatggctagggatgatgataatggaggaaactgtgcatggcgggggtagggggtaggtgagacatctctgtattttctatttcactttgctgtgaacctcaaactgctctaaaaaataaagtatatttttttaatgtgaaacaaatccctgagaccacttcaggtgcatttcttctcataatttcttctccatcacacagtaatctactaaagtttatttcttgactttcggcccctatcacaacatctttagagttgactgcatgtctgaccattttga

SEQ ID NO: 437635 - DNA, 586 bp, Homo sapiens
ctacctactactgtacgattccaactatatgacattttggagaagacaaaactatggagagagtaaaaagatcaatggttgtcaggggtttggggaaagaaaaagagagatgaataggcagaatacagaagatttttagggcagtgaaactattctgtatgatactataacggtagacacatgacattatacatttgtcaaaaaacagagaatgtacaataccaagagaaaaccctaatgtaaactgtgtgctttgagagataatgatgtgccaaagcaggttccctaattgtaacaaattctcactatggctagggatgatgataatggaggaaactgtgcatggcgggggtagggggtaggtgagacatctctgtattttctatttcactttgctgtgaacctcaaactgctctraaaaataaagtatatttttttaatgtgaaacaaatccctgagaccacttcaggtgcatttcttctcataatttcttctccatcacacagtaatctactaaagtttatttcttgactttcggcccctatcacaacatctttagagttgactgcatgtctgaccattttga

SEQ ID NO: 437636 - DNA, 614 bp, Homo sapiens
tcattagaaacataccatttcctcattccccagcccctgacaaccacattccactctttgattctaggaacttgactattttagatactttctataagtaaaatcatgcagtatttgtcttttcatgactggtgtattttacttaacataagaggatgaacctcaagattcatccatgttgtcacatataacaaaatttccttcctttttaaggctgtataatattcatttgtgtgtatataccatatcttctttacccactcatgggtcaatgagcatttaagttgtttctacatcttgaatattgtgaatagtgctacattgaacataggagtgtggattatattacgytgatgctgattacgtttttgttttttggataaatacccagagtaagattgctggatcatatagtaattctacttttaattttttgaggactctccatactgttttccatagcaattgcaccactttgcatttccactaaatgttgtacaagggttccaatgtattcacatcctcaccaacactagtcatgttttctgtttcttcagtaatagccaacctgacaggtgtgaagtgatatctcactgtggttttgatttgcattt

SEQ ID NO: 437637 - DNA, 630 bp, Homo sapiens
aagtgctcatcctcagaggactggatggtattttcctcaccagctaaagcctcctcattcacctcctcatctctgagcaatgccttgggatttatttcttgaattaattcagatgtggggtgtaaatgtatacatctatatgacatttttctgtatcatraaatctaaatttattaataaacaggaaaagctttgtattttgtattatacggatataagttaaatactagagaaaataaataattttccacattttaatttttaagattgcatattgtcttcagaatgaggactatcacaattctggtattactagtcccacatcaattctatttgccttatcaaattggggtagtctaaaactgaataaatgacatgaataagttatgcctcatgtctgactgtttaatagaaacatatgttctttgtactttttcagttctctctcttgtttgcccataattttaataagcgcactcactttattgtcaagattaataatgtgatataatcactgggaaattgcaagactgccctccctgcaacacaatccccagcaatgaaacttctacatgttacatgtcaaacgtcaccacttgtccaaaaagtggagccgatcaggtcagaaag

SEQ ID NO: 437638 - DNA, 542 bp, Homo sapiens
taaaaaaactaatagaattgtttaaaaaatcacaaaaaaatcattgtttggatagtttatttgtctcagaaacagaaaaaaatytattaaaaaataagaggatttgcagaacaaaatcataaacctgataatatatgatttctctgtgataaaaatgtataatttatatttaaatattctgaattaatcattaaaatatgcgttagtatcaagcccatatggaacatttataaaatatttgacccacatagtgggtcttaaattaaaacataaatttttttaaaaaaccagtatcacaaaggtcatattctcagaaaaagaaacacaaaatagaattcaacaataaataaggttcgtcatttacttggaaatttagacagggatgtttaaataactcattagcttaaaaaaacacaataaaaattataaaacacacttgaaataaataaaaccaaacaatgaaagtaacatgaaaatgataaaagtaacatatttaaaactgtagaatgtagcaaaagtaatacctagtattaaatttgtgg

SEQ ID NO: 437639 - DNA, 542 bp, Homo sapiens
taaaaaaactaatagaattgtttaaaaaatcacaaaaaaatcattgtttggatagtttatttgtctcagaaacagaaaaaaatttattaaaaaataagaggatttgcagaacaaaatcataaacctgataatatatgatttctctgtgataaaaatgtataatttatatttaaatattctgaattaatcattaaaatatgcgttagtatcaagcccatatggaacatttataaaatatttgacccacatagtgggtcttaaattaaaacataaatttttttaaaaaaccagtatcacaaaggtcatattctcagaaaaagaaacacaaaatagaattcaacaataaataargttcgtcatttacttggaaatttagacagggatgtttaaataactcattagcttaaaaaaacacaataaaaattataaaacacacttgaaataaataaaaccaaacaatgaaagtaacatgaaaatgataaaagtaacatatttaaaactgtagaatgtagcaaaagtaatacctagtattaaatttgtgg

SEQ ID NO: 437640 - DNA, 527 bp, Homo sapiens
ctctgggcccccaagccccgcccgcagcaagtctatgtcagagtaaaatggattggtgtgtgtgtgtgtttgtgtgtgtgtgtgtgtgtgtgtgtgtgtacgtgtgtaggtaaagatgaaaaggtacactttaattactctactgcaataagtacaagaaagcttcaaagaaatactgaaacatgctggcagacagccaaaaawatttaatggttagcagggtgactggagtcttgctgccttattcttaataatagtttaaagaactctgctctcctccctgtcactgaaacctctacccatttgcacatcattcctctttccatccatagaacaccagccagccctcacccgatcccaggccctgccctgatggaggggaactaaggaaatgcaacttcagctgaggggttcctttttaattggtcacggtcacgctattcaaataggaagaaatctgcaacccattagaccttttcctcctgcattaatagtcagggaaaaaattatattttgtagccacttct

SEQ ID NO: 437641 - DNA, 527 bp, Homo sapiens
ctctgggcccccaagccccgcccgcagcaagtctatgtcagagtaaaatggattggtgtgtgtgtgtgtttgtgtgtgtgtgtgtgtgtgtgtgtgtgtacgtgtgtaggtaaagatgaaaaggtacactttaattactctactgcaataagtacaagaaagcttcaaagaaatactgaaacatgctggcagacagccaaaaatatttaatggttagcagggtgactggagtcttgctgccttattcttaataatagtttaaagaactctgctctcctccctgtcactgaaacctctacccatttgcacatcattcctctttccatmcatagaacaccagccagccctcacccgatcccaggccctgccctgatggaggggaactaaggaaatgcaacttcagctgaggggttcctttttaattggtcacggtcacgctattcaaataggaagaaatctgcaacccattagaccttttcctcctgcattaatagtcagggaaaaaattatattttgtagccacttct

SEQ ID NO: 437642 - DNA, 527 bp, Homo sapiens
ctctgggcccccaagccccgcccgcagcaagtctatgtcagagtaaaatggattggtgtgtgtgtgtgtttgtgtgtgtgtgtgtgtgtgtgtgtgtgtacgtgtgtaggtaaagatgaaaaggtacactttaattactctactgcaataagtacaagaaagcttcaaagaaatactgaaacatgctggcagacagccaaaaatatttaatggttagcagggtgactggagtcttgctgccttattcttaataatagtttaaagaactctgctctcctccctgtcactgaaacctctacccatttgcacatcattcctctttccatccatagaacaccagccagccctcacccgakcccaggccctgccctgatggaggggaactaaggaaatgcaacttcagctgaggggttcctttttaattggtcacggtcacgctattcaaataggaagaaatctgcaacccattagaccttttcctcctgcattaatagtcagggaaaaaattatattttgtagccacttct

SEQ ID NO: 437643 - DNA, 527 bp, Homo sapiens
ctctgggcccccaagccccgcccgcagcaagtctatgtcagagtaaaatggattggtgtgtgtgtgtgtttgtgtgtgtgtgtgtgtgtgtgtgtgtgtacgtgtgtaggtaaagatgaaaaggtacactttaattactctactgcaataagtacaagaaagcttcaaagaaatactgaaacatgctggcagacagccaaaaatatttaatggttagcagggtgactggagtcttgctgccttattcttaataatagtttaaagaactctgctctcctccctgtcactgaaacctctacccatttgcacatcattcctctttccatccatagaacaccagccagccctcacccgatcccaggccctgccctgatggaggggarctaaggaaatgcaacttcagctgaggggttcctttttaattggtcacggtcacgctattcaaataggaagaaatctgcaacccattagaccttttcctcctgcattaatagtcagggaaaaaattatattttgtagccacttct

SEQ ID NO: 437644 - DNA, 627 bp, Homo sapiens
aattttttgtttctgctaagaattactaagcttggagtatgtgaattaagagcagccatgttgctagtttatcaggagagcctgcctgaaaagatgaaaccacacagaagccagtgtaaccgagagatcactacygatacttttactattacccacgtctttggatctagtaaagcctgaattcagagtagtccctgacaattcagtgacaggtgccagtgagtccccccactaccttcccaccctggtttcacttgttttttgcttcaaccagcgtaagttgggttttattcccttgcagctaaaagacttctaactcatatcaaagaacagaggctcaaactagaaaatggcaggagtccttaactttgtcccttgagctaatttcatccatttaactagaagtagcaaatgaagatttaagcaaccaggacttcaaattctgaacttaacgttttcttaatctaaacactgccatcgttcatagcctactttgggctcacttcctgggatggtgttcgagttcttgagaatcccagacaatccttaaaaatatacatgaacagaaactgaacaatattttcaattcctcttcttccttattagcagattggctggcccaagcag

SEQ ID NO: 437645 - DNA, 443 bp, Homo sapiens
tctctcggtttacccagacatgtgccaagcattccttttgcatgtctagtagtaacgaaatatagcacagcttgtgccatttaggtatatcttggtttattagatcctgcaaggcacttgtttgttgtggcacaagaaaaaatggaattttaatcatttctccaagggtaataattgtcttcattaatatcaactttataccctaagctatgtktttattcttttggtatctgtaacagctttgcattttaccactaactcatgatgtaattgtattgaagacatttaaaactgcaattaaactcaatacacatagttcctatgctacaaacaacttactataagaagccagtaccacattcacacatgtacagacaaaaacagtgagctatgatcactgaatgcctgaaagacattgtattatgatgctgactgtaatatgc

SEQ ID NO: 437646 - DNA, 574 bp, Homo sapiens
aacattaagaatgatatcataattattttatgaataaactttgattatagaagactataggttataatctaagagtctaataaccaccatgtgactttcttagatatattagtaataattccctgctgattttctaatgttacatatttagtatyattaactctactccgttttatagtaaggatatacattttaacatgaaccaaagataatcaagtgggtgtacatatttggaaaaattgatatatcatttatattttgaataaatgattaaaatatctgattatgcctcctacattcacagaacaaaaatgctgtagccttcagttgaaaattaccctcaccattgcactttcaaaagttttccttcccctatgtcagtatcatgtgcttgcatacacttacattatgaagcttcaaatatttattttataaaagtgaataattaaaataccgtcttcttttatcatttctaaatcaattatatgagaacaaagtatatatggtagtacctttggatactgcttgacaggaatcagtactctttctgagagctttatgtttttgttgctga

SEQ ID NO: 437647 - DNA, 598 bp, Homo sapiens
caacacaattattctgaactaataaagatatttttagggtatgaaattattaatgttgtatcattaaaaatgacaaatgtgttttctgtaaatagacttaatgaagtattatgtggatttataatcatggcttctcacatttctcaaaatatgcttcagctgagaaaagtacccccaagaaatagttcattaaatgtatttcacccattacagaaatacgattttcatgacaaattaacttatgactattttcctttgctttcaaraaagataagtgatttagtgaattctgaattcttatggcacatgtaaatgaatattagtgtccacaaaaataattctaacaaaacacttaaatgtgtgcaggcaaaactgaaacatctaacaataaaatggcaccataaaattatctgcacaatagtaaatttccaagaaatcacattttaaatattactctattagaattctaaaggagtgctatttagcacctactcattctgatattaagaactgattatatttgagatattaagaatattaggatgcttaagaaatatttacattatttatttgagacacaaaacatggtgaagctagc

SEQ ID NO: 437648 - DNA, 444 bp, Homo sapiens
ggatttcctttgggaattagcaaaatatgtgatctgctaatagttaagaggagtggctgaagggcttctgaagactggtgatgactgagaatttgctatggagaatctgaaagggtgctaagtggaaacaaacaaaagaattaccaacgtacatcaacaattcaactggatgtttgaaagagtttggaaattatgtataattgtgtctggcaattccatttgccaattttcagtgaygcttgatagatatatataagggtaaagaagcatgaaatttagcttaaaatataatgggactttgacaggaattgttttgaaaaaggaaaagaagactagggaaatgacagcactactgagtacttcaaagtgattgattaatcccaggattctgtctgaatagcaaatgactcaaaggctgaaaaaacaggaaggggtagaaagact

SEQ ID NO: 437649 - DNA, 593 bp, Homo sapiens
ttgcttcttttctcttgtggctttcagaatcctatctttgtcttcgacctttgagagatcaattatgatatgtcttggggaacactcatttgagtttaatctaagcggcttttggccttcctgtgtctggattttgtatatttctctgggtttgagaagttgtctgttacaattttttgaatattctttctacccctttgacattctcaaatcccacttaaacccagaaaacatgaaaagttgctattttgatgctacccaatagttcctgtaggctttcttcattcctttayattattttttcccctccatgtatttcaaatagtctgtctttgggctcactatttttttcttctaattgatgtagtctgctgttgatgctctctattatattttttatttagttcattgtgtttttcacctacaggatttctgttggatttttaaaaaaattattttaaactctttgttcaggtttttctgacaaattattcaattgtttctctacatattcttaaggttcattgagtttccttgaacagctattttaaattatccgtttctaagaaattacatcttcattactttagggt

SEQ ID NO: 437650 - DNA, 604 bp, Homo sapiens
taatactttatacttaaatagactatagtgtagcrtaaacctaacttttatatgcactgggaaaccagataatttgtgtgactttagtacaatattcattttattgtggtggtctgtaaccaagcccataacatctctgaggtatgcctatacttgcagactaaagaaagagatgaaagctattgtattacagctatagatttttacaaaaaatagcaaattgatgagaataaacattcaacactcagagcagtcctccaatagttttacaggcagaaaatctatctctagtatctgcaggagcatgaattttaaactcttttttacagcaagacaagcattatagctcattcataatgtggccttgagtttaaaatgttcaggcagttgttttttatttataatatgaagagaataaaacacgcaaggtatgaaaatctaggcttgcacaatcaaaatctccaagtttatacctatgataaacttgtcctaaaatctttttttttcctacctagatgctatggtcaatctcaggttatattacaagatatcaacatccacagttttgcagcagtggatgctgcaaactcaaaggagttgactg

SEQ ID NO: 437651 - DNA, 604 bp, Homo sapiens
taatactttatacttaaatagactatagtgtagcataaacctaacttttatatgcactgggaaaccagataatttgtgtgactttagtacaatattcattttattgtggtggtctgtaaccaagcccataacatctctgaggtatgyctatacttgcagactaaagaaagagatgaaagctattgtattacagctatagatttttacaaaaaatagcaaattgatgagaataaacattcaacactcagagcagtcctccaatagttttacaggcagaaaatctatctctagtatctgcaggagcatgaattttaaactcttttttacagcaagacaagcattatagctcattcataatgtggccttgagtttaaaatgttcaggcagttgttttttatttataatatgaagagaataaaacacgcaaggtatgaaaatctaggcttgcacaatcaaaatctccaagtttatacctatgataaacttgtcctaaaatctttttttttcctacctagatgctatggtcaatctcaggttatattacaagatatcaacatccacagttttgcagcagtggatgctgcaaactcaaaggagttgactg

SEQ ID NO: 437652 - DNA, 604 bp, Homo sapiens
taatactttatacttaaatagactatagtgtagcataaacctaacttttatatgcactgggaaaccagataatttgtgtgactttagtacaatattcattttattgtggtggtctgtaaccaagcccataacatctctgaggtatgcctatacttgcagactaaagaaagagatgaaagctattgtattacagctatagatttttacaaaaaatagcaaattgatgagaataaacattcaacactcagagcagtcctccaatagttttacaggcagaaaatctatctctagtatctgcargagcatgaattttaaactcttttttacagcaagacaagcattatagctcattcataatgtggccttgagtttaaaatgttcaggcagttgttttttatttataatatgaagagaataaaacacgcaaggtatgaaaatctaggcttgcacaatcaaaatctccaagtttatacctatgataaacttgtcctaaaatctttttttttcctacctagatgctatggtcaatctcaggttatattacaagatatcaacatccacagttttgcagcagtggatgctgcaaactcaaaggagttgactg

SEQ ID NO: 437653 - DNA, 623 bp, Homo sapiens
gccgtgtatgtatgtgataatagtgacagcagtatctttttctctttacacgaaagtttctttgctcttctctatacctggcacggttgcctgagaagatcagatagcctatgattaagtaattcatttcagcactaaaacgtttgcatatgcaaggataacacaaagctcttagaagttttatccattttggaactaggaataaataaacatagatacattccacaggatgtagaaaaaatgttaaatattctgaagcaagcaagctgaaaaaataaatattattcatggcaaatgtgttaagagatatttttacgttaacatttacagagcagactgacttcgtgacttgactttggaaattaatacaaagttggtgtaactggattattytggtgatatttttaaattgattagagcaaaaggacaaaacaaaaatcttggtgtcctctttttaaacaaagtctattctctgaccatagaccaaacctcgagttcttagtactcataaataaaaataacaaggcccataatacaggcataaattagctaaactatctaaacacttgttaacttcactttatgagctggacactctattcaacagtaagaatactatgaat

SEQ ID NO: 437654 - DNA, 548 bp, Homo sapiens
taagacctggtttttatctattgaaaaaaagtagggttctgatttataagccrtctcaatctctgctcattttctctgtatgaaagaagattacttcttaaaatttccttagtttctcctattcatcttagagttgagacataaaggaaaaaataaaaaagggaatgaatgattcatggataaaggagttaaaaaatcaagggagcaaaaatgataaaacaatgagtatgtcacaaatgatattgaggagaatgccagctgaaggaacaccatattcaaaatactaccacgtagctttatcttatttagtttctggttacacaatgacaccaaaagcttttagttttgaaaattactcatgccacaattaaaccaaaacaggtaagtgactaatggcacaattcaagggaagaagggaccatgcaagtcatacaaaaattgtcatgaagactgaattcaggcagtggagaaatactgaagggtcttccaccagaaaatgatattattttaaaatcctcactaagacttttgtgaaaaataaatcagaa

SEQ ID NO: 437655 - DNA, 548 bp, Homo sapiens
taagacctggtttttatctattgaaaaaaagtagggttctgatttataagccatctcaatctctgctcattttctctgtatgaaagaagattacttcttaaaatttccttagtttctcctattcatcttagagttragacataaaggaaaaaataaaaaagggaatgaatgattcatggataaaggagttaaaaaatcaagggagcaaaaatgataaaacaatgagtatgtcacaaatgatattgaggagaatgccagctgaaggaacaccatattcaaaatactaccacgtagctttatcttatttagtttctggttacacaatgacaccaaaagcttttagttttgaaaattactcatgccacaattaaaccaaaacaggtaagtgactaatggcacaattcaagggaagaagggaccatgcaagtcatacaaaaattgtcatgaagactgaattcaggcagtggagaaatactgaagggtcttccaccagaaaatgatattattttaaaatcctcactaagacttttgtgaaaaataaatcagaa

SEQ ID NO: 437656 - DNA, 681 bp, Homo sapiens
atttactactccttaagtggaagtgaatcatcataaaagtcttcatcctcattgtcttcatatcaagtaggctgaggaaaaggttgaagaggtggagttgatcttgcagtcttaggggtggcagaggtgaaagaaaatccatgcaaaagtgggcccagtagttccaacttctattgttcaactgtcatttgtattctatatcctttcataaagtatttattgagcacctactatgtgctagacattgttctaagtgagtgggatacacgagtaatcaagaaagatgaacttgccattttgcaactttacattctgacatgaggagaccataatataacaaacaaacaagacattttgcaactttacattctgacatgaagagaccataataaaacaaacaagcaaattacaaactacattaaaagataatatatgctatgggaaaaaagaaaaactagtaaaaggtaaggggattgtgagtacttgagtagcgatggatgaaggctgctatattaaataggttgyctaagttagaccttgttaagaaagtgttatccaaagagtggctttacatgaggtaggtcattttgtaaatatatgagggccaagtgttaggaatgctagccagccagggttgctgcacaaaatgaataaacaaggcaacttagagatggtaatggg

SEQ ID NO: 437657 - DNA, 566 bp, Homo sapiens
gttttccttttgcatgataaagccagcctagttgctgttcctgtacatttgtttttgcgcctaatgtataacaaatattaattgagatccacatttcgttgttattcaggaatgtaggaatgattggtacrtcttagtctatagttagagaagaatcaccattagtgttacccatcagaggagtgtgtcccactagatgcttatttaagagttctacacattcttaaatcttaaatacacaagaccactcaatatgatttaatgtaaccatttctcttggtttacattttaagatgcttttacattttaagataggttttaccttttatgatacattgtacattgtaagatatatttgagatttcatctactgaatcagagctcatcatcaaaacttaatctgggagaaaaagtaagagggagttaatggaaatcagtcataagaggtaaatcctccagttttaagaagaatgacaaacataattgttcaaaacaacatttttaaaaacatctaaactgtactaccattcttttaaaaatatgtccctatttccattctggaataa

SEQ ID NO: 437658 - DNA, 566 bp, Homo sapiens
gttttccttttgcatgataaagccagcctagttgctgttcctgtacatttgtttttgcgcctaatgtataacaaatattaattgagatccacatttcgttgttattcaggaatgtaggaatgattggtacatcttagtctatagttagagaagaatcaccattartgttacccatcagaggagtgtgtcccactagatgcttatttaagagttctacacattcttaaatcttaaatacacaagaccactcaatatgatttaatgtaaccatttctcttggtttacattttaagatgcttttacattttaagataggttttaccttttatgatacattgtacattgtaagatatatttgagatttcatctactgaatcagagctcatcatcaaaacttaatctgggagaaaaagtaagagggagttaatggaaatcagtcataagaggtaaatcctccagttttaagaagaatgacaaacataattgttcaaaacaacatttttaaaaacatctaaactgtactaccattcttttaaaaatatgtccctatttccattctggaataa

SEQ ID NO: 437659 - DNA, 566 bp, Homo sapiens
gttttccttttgcatgataaagccagcctagttgctgttcctgtacatttgtttttgcgcctaatgtataacaaatattaattgagatccacatttcgttgttattcaggaatgtaggaatgattggtacatcttagtctatagttagagaagaatcaccattagtgttacccatcagaggagtgtgtcccactagatgcttatttaagagttctacacattcttaaatcttaaatacrcaagaccactcaatatgatttaatgtaaccatttctcttggtttacattttaagatgcttttacattttaagataggttttaccttttatgatacattgtacattgtaagatatatttgagatttcatctactgaatcagagctcatcatcaaaacttaatctgggagaaaaagtaagagggagttaatggaaatcagtcataagaggtaaatcctccagttttaagaagaatgacaaacataattgttcaaaacaacatttttaaaaacatctaaactgtactaccattcttttaaaaatatgtccctatttccattctggaataa

SEQ ID NO: 437660 - DNA, 528 bp, Homo sapiens
gatgtcagtaatgtctaaatacttcatgagtcttgctatatttaataattgaaaatgccatagtggatattttgacacagatgtacagaatctcagaaaaggctagacttgggcaggactggggtatgggcctagaaattggacaggtgtggtgtgaaattgcaacccttgtacacactggccacaggacctcagggaagatgtcttatctgtgtaataagaatattacttaccttatggatattgtaatgataaagtcaatgaatatatgacaagtccttggaatataataaatactaaataaatgattatgacttttgtccctatgactatgccatttctaattgtaaacatctacttcaatgactattagagaccaggctcttatctcccagcccagtgctctgttgaactcttgttcaacaagcttgtcatatacctaatattaggtattgtaaaggatatcaaagaagacaataagatcaacactgatatttgcatcrcttcctgctctacctgttgtcacat

SEQ ID NO: 437661 - DNA, 410 bp, Homo sapiens
tatgggaaactttcagctaacctttagcctctgtgactatatattgcctagctcagacttgtgagaagtattytaatttataagttttattttcatgtaattagaaaaacaacaaaaaccagttattgtctcaaatgtttgggcccttgttattccatttagaagcagtatattggtaatgaagctttttgctgtgtccccaaatactgcatttcaaaacttcaattctggtcctttaccatgtaggaagatgattggagagtacacaatgaactgatgatcaagtcttgcattaaggtaataaatgaaaagactgtcacaaaatctattcatgtcccccctgagtttttttttttttttttttttttttttgccaaaatgttcttgctgtgacctacttctacagataa

SEQ ID NO: 437662 - DNA, 568 bp, Homo sapiens
  misc_feature (1)...(568): n = A,T,C or G
ccgtctttaacggaactaaggaaaagccctgcaacaattttggcgcgcaacgtggggacttgagaagcggtgagtgaaatggagactcaaaactctctcactgkggtttctaaaccttttcatccttggacttctgagggtgggggaaaccatgcgcctaccccctgtcactccaaagccttttcctggccttttccttcctttttcaagtcagatctgcgagcaacggctcccctctacccccccatccttaccatggctgggacttatggcccaagggtcccacacagctggctggctggcgttttccaccacatctctggagacttccccttccccagccaacgggttttactccatcagacagtaattaagcttttctcctggtaaagaaaacagttgtgtaagaataagaagttcttctctaggcatttttaaacctttttttttccctgttctctaccccgtcagcagttaagcttgttttttccttttagaagccattttactaggccaggctccgcaactatcactgtntgtactctctgcaaagttttggttgtcctag

SEQ ID NO: 437663 - DNA, 568 bp, Homo sapiens
  misc_feature (1)...(568): n = A,T,C or G
ccgtctttaacggaactaaggaaaagccctgcaacaattttggcgcgcaacgtggggacttgagaagcggtgagtgaaatggagactcaaaactctctcactgtggtttctaaaccttttcatccttggacttctgagggtggggraaaccatgcgcctaccccctgtcactccaaagccttttcctggccttttccttcctttttcaagtcagatctgcgagcaacggctcccctctacccccccatccttaccatggctgggacttatggcccaagggtcccacacagctggctggctggcgttttccaccacatctctggagacttccccttccccagccaacgggttttactccatcagacagtaattaagcttttctcctggtaaagaaaacagttgtgtaagaataagaagttcttctctaggcatttttaaacctttttttttccctgttctctaccccgtcagcagttaagcttgttttttccttttagaagccattttactaggccaggctccgcaactatcactgtntgtactctctgcaaagttttggttgtcctag

SEQ ID NO: 437664 - DNA, 568 bp, Homo sapiens
  misc_feature (1)...(568): n = A,T,C or G
ccgtctttaacggaactaaggaaaagccctgcaacaattttggcgcgcaacgtggggacttgagaagcggtgagtgaaatggagactcaaaactctctcactgtggtttctaaaccttttcatccttggacttctgagggtgggggaaaccatgcgcctaccccctgtcactccaaagccttttcctggccttttccttcctttttcaagtcagatctgcgagcaacggctcccctctaccccccmatccttaccatggctgggacttatggcccaagggtcccacacagctggctggctggcgttttccaccacatctctggagacttccccttccccagccaacgggttttactccatcagacagtaattaagcttttctcctggtaaagaaaacagttgtgtaagaataagaagttcttctctaggcatttttaaacctttttttttccctgttctctaccccgtcagcagttaagcttgttttttccttttagaagccattttactaggccaggctccgcaactatcactgtntgtactctctgcaaagttttggttgtcctag

SEQ ID NO: 437665 - DNA, 596 bp, Homo sapiens
attggttgggcatccagatggaaagctgctcaacacctcctccacattaccagtggagcaggagctagacactatgtggatatagaggttacttccgatgcaggctgggaggtgaggagaggggttgacattgtgcaggagtcagtaacagaatttgtagactgagactgagattgtgcctggcatacatgagcttaatcacatttttgaaacagacagtgcttagatttggtctcttctacttttgtctatcaataaagcctttcttaaactggcctgtcctttatcrtccttctacttcttctaatctagtgaatcatttttgccactaacctaactaaaaatgaataaggtattagataatggtttaagctgcaacacttttcagaatgtcagtaaggcatgcttggagatcttccttcaaagatttctatactgaaataaatgaatgtcgaaagtctaatgactgctagtagcaattggtacatttgaccagtgtccgctagtacttgtggcagaggctcaggtgttattatgatctatccctgtcaataaaatctgttcttaatttccttgagtggcttttcatatgaaca

SEQ ID NO: 437666 - DNA, 578 bp, Homo sapiens
aattttaaataacacacacatgaataaagaaaaacctataccaagtaaaattacagaaatgatgtggaatataaatttgagagaggtaaaaataatatgagaagagattatatatatatacggcaaacggcatcaatrtatatatacaacattaggagtcatgaagaagagatagcaaaaggaaaacaagaaaatgatctaagatgtattggaagaaagattttctgatgtgaagataaatttgcaaagttaaaatggcttgcagtagtcccagaaaaattaaataagcagggctcatacaaatatatatgttaaataataattattataattaatctaatcaattatatgataattatagccaataattgttaattataaaatgttattattgattacatgttacttatataattatgataatttattattagtaattaataattattattattttatttaaaaaacccaacttataagcattgaagagcactgagccccgtggtccctccctctataccacaaaaaacagttttattaaaagaagaaatactagatcatcctcagtcaatttacat

SEQ ID NO: 437667 - DNA, 547 bp, Homo sapiens
gctggcaattgagtggtctctcaacaccatactttatagtgtgtggataaaattgcttaagttagtatccaaaggtgtttcctatttagtcttgacatacactatctaaaacttggctacattgttaatcagagtttggtctggaaaattaaaaccattctaagtattttacccagaaaagttttgaataccaagtgtcagaggctcacaaagcaattggaagagctgttggatgttgaagagtaaaagtcaggacagcctctgctagctttcagttagctgaaagcacaggaattgcagggaaccaccactgctgaatcatgtgtggacatccccaaactattgtcaagaccacacgattgctgctttctagagcccatgtgcctgctgaccactgctggggaaataattgcttcttctctccaaccttctaaacatcatgtgagaacctctcattgattcctacataaaccagaaatctgcwagcaaggaagcataggaaaagtagtttccaggcttctagcctctgaaatatgagagagaatgt

SEQ ID NO: 437668 - DNA, 641 bp, Homo sapiens
gctccctgatttcccaaggcttacactctaagaaggaaaggcctgcaaggctaattgtaatccgtttacaacaattatgggaaagaatgacacaacataatttggaatctttgaaccatgttgcttgtgcttcactgttgcttttcagtgctgttgggagtgatttcgtttgcctgagccattctgtctgccgtttctttgaaactagcccttgtactcattctattccttttatacttttttttttattactgtgagagaatagtaataggttttatataaaggctgatgggtctacttaattgctgattgtactattccccttatttcacatctacagagcttggcaagcaaacagatgycattatcagagctatttctttgttattcaaggtctattgttgccatcattctaaaagtaatattcaagagcagagccttgggttcttctaattactgaagtcaacacagttttcaactttttcaaattacttttggactcattcttcctattactttctctcttttccttccttcttctatcccttttaccacctctcactctcacacacgcttattaagccctgggcagcatgccaaatgctggagaaacagagataagaaagctttgttatggccag

SEQ ID NO: 437669 - DNA, 534 bp, Homo sapiens
ggacttgaccagctgtggcactgccagtctgaagatgagtagggtgatggggggaggtgggcagtacctgaagctgaactggtgagagaggcaggctggcctgggggctcagctggggcctgggatggttggtacagtcccctcaggggggtaggggagtgagtgttagactgcttaagcctcagaggccgctcttgcccacctatgctttgaggagatcctcttcatttgttcaaagggaagactctgatctagagatgggcacttggaccagcaaacagcagctacaggtagccagggcacccgaggagcacttgctcatgagccggtttccctggtttttatgggggctgtygctgagcgtctgccagggtttgtgtcctagcacttgctggtctttgctgggctctcagctctcaggtgtttctctaccagcacgtttccccctccctcatatgcacacatgtggacacaagcaggctgcccaggacagagtgtactttgaggcttgggaaaggactctctctcgccctt

SEQ ID NO: 437670 - DNA, 566 bp, Homo sapiens
taacatttattgaacatctattagctcaataagaacatgcgataagtatgtatatgtattatttcacttacatctgaaaggaaggcataattatccccactccttagagaaggaaattggagctggctacatttaaagtagtcctgacaccagagagatattgccaggagtacttggctggctgagtgcccagatggcccataggagtagtgggccctccacagtccaaggtctggttctaggtrgagagagaaggatgtgctcgtagtcagcaccgcagctccagaaaatctgctggggctccaaaactgattagaggggcagctgactcagtaataaaactcccaggagacttacttacatactggaatgcaaagttgcagctttactgggaagattagaactgttattgagtagcttagaaatctctggctgaattcactgcaagggaagccgcaggataagctaactgctggtgagtcagcagtcagagcagggaagtgaatttaacattagatgggtcagtctctcgtggctgatgaattcatccccacaatactgtacac

SEQ ID NO: 437671 - DNA, 437 bp, Homo sapiens
gaagcccccagtttcatttgcagattttctaatrgaattggtctgccgtgagacctggcaatgaatatttgtaaaaggtttcccaaatgattctaacgtgtagccagagttgataacgattgttccagaaaacatgtcaggcttcccatttctcaatacttgcttgatacttctgaacctctgcacaatagtctgaatcattgtatctagcatgtccttttactactagcttcagttttcttcatcaaattgtaaacatcttttcttgttttgttcaccgacatgacatgtcctgaataagtttttagtggctgaacttctttcacttattgtacatattcttgagttgaaaactattcatgtctttggatttgataaatcctaaatgaggttaggcttgtgtggttttctattctgtctttaaaacatcactattg

SEQ ID NO: 437672 - DNA, 616 bp, Homo sapiens
tttcctgtctgtgggcagtcccaggattaaagtgttgaatgggatccaggtggtaaatcaaagaattctggaaagaacgttaaagactatttggtcaaagtctctcatttgacaggtgaagaaactgaggatgcaaatcyttaaatgatttgccttctgaaaccagttaaggaaacagagtgactttcacaaggcacccttttccatcagtataggcatttttcacatgcatcccactgccgactatgaagagatagaaaataaacggagggatcaaagagtttattttcttgtgctagttcaatacatgactgagtggagctacatctaggcaaaatgagaagacagtcataatagtaatagctcttctcattgatttcccatggcctccacattccacagcagccagggccatccactttgagaacagtgcccatggggtggagcatcgcagcctgagaggtcatcagctgcctactatgtgctagccaatgtattgtgtactttcccaacatcatctcaattacaatatctagaaacctacaattcaaacattatttcatgcatttcagagaggaaaactagctttcagagtgtcgatgattttacacaaaaa

SEQ ID NO: 437673 - DNA, 616 bp, Homo sapiens
tttcctgtctgtgggcagtcccaggattaaagtgttgaatgggatccaggtggtaaatcaaagaattctggaaagaacgttaaagactatttggtcaaagtctctcatttgacaggtgaagaaactgaggatgcaaatccttaaatgatttgccttctgaaaccagttaaggaaacagagtgactttcacaaggcaccyttttccatcagtataggcatttttcacatgcatcccactgccgactatgaagagatagaaaataaacggagggatcaaagagtttattttcttgtgctagttcaatacatgactgagtggagctacatctaggcaaaatgagaagacagtcataatagtaatagctcttctcattgatttcccatggcctccacattccacagcagccagggccatccactttgagaacagtgcccatggggtggagcatcgcagcctgagaggtcatcagctgcctactatgtgctagccaatgtattgtgtactttcccaacatcatctcaattacaatatctagaaacctacaattcaaacattatttcatgcatttcagagaggaaaactagctttcagagtgtcgatgattttacacaaaaa

SEQ ID NO: 437674 - DNA, 616 bp, Homo sapiens
tttcctgtctgtgggcagtcccaggattaaagtgttgaatgggatccaggtggtaaatcaaagaattctggaaagaacgttaaagactatttggtcaaagtctctcatttgacaggtgaagaaactgaggatgcaaatccttaaatgatttgccttctgaaaccagttaaggaaacagagtgactttcacaaggcacccttttccatcagtataggcatttttcacatgcatcccactgccgactatgaagagatagaaaataaacggagggatcaaagagtttattttcttgtgctagttcaatacatgactgagtggagctacatctaggcaaaatgagaagacagtcataatagtaatagctcttctcattgatttcccatggcctccacattccacagcagccagggccatccactttgagaacagtgcccatggggtggagcatcgcagcctgagaggtcatcagctgcytactatgtgctagccaatgtattgtgtactttcccaacatcatctcaattacaatatctagaaacctacaattcaaacattatttcatgcatttcagagaggaaaactagctttcagagtgtcgatgattttacacaaaaa

SEQ ID NO: 437675 - DNA, 548 bp, Homo sapiens
aaaaaaaggaagagaaaggaatcaaagactctcactacagaaaatcaccaaacagcaaaggtagacaacaggacaggaagaaaggaaaaaaagatctccctacggtaaccagaaagcaaaaaattacagcagatgcagaggttgagtaatttgcttcaagccacacaggtaattkctaatggagttccatatttagacttggacttacagattcagaaggtgttgccttcccaagaaaatatttttttcttaatatcttttttccaaaactggctaaaaatacttcttccaatcctctgaggtcctattactgagcctgttcagtaccatcttgcagcctgttactcctaggttatcctctgcacagcagtccatctgatggatatctcatcttcatggataggctctatggaatgttcaacaaacctcaactgataacctgatatgtgcttaaaccaggtcatcaaagcagccacataggtcccaactctttctctgcaggaagcacccattttgagaatatcctggtcatgttgatatgaagctgc

SEQ ID NO: 437676 - DNA, 568 bp, Homo sapiens
ttattcagtcccagtgaaaaagtctgggaaccgggagagctgatgatgtaaacacaagttcaagggcagcagaagatgagatgaaatgtcccagctcaagcagtgaggcaggaaaatggggagaatttctcttctyccaccttttgttttaatcaggccttcagcagattaaccaatacccaaccacattggagagggcaatctgctttactgagtccaccaattcaaatgctaatcttatctggaagtacactcagagacacaccccaaaacaatgtttagtctgggcatcccatatcccactgaagttgacacatacaattaaccatcatagccatattcttccagtatcttcacatggtcttctttctgtatctgtattctcttctgtttcctcttcttgtaatgatgtcagtcatactggattagggcccacgcatatgacttcgtttcaccttacttaggtaaggacatatctccaaacacagttgcattctgagctattgggggctaagacatcaacatatgaattttgggaggaaacaattcagcccgtaacaccaaataa

SEQ ID NO: 437677 - DNA, 586 bp, Homo sapiens
acttcaccaatcaatgagaccttgcagctctcaattctcctagaatcctttttgtttttagcttccctttctggcagaaattatgaggaaatctctagaataagaaagtaggaaggcactttacragtttattttgaaagtcgggatacaaattcatagtagtgttagaacactctttcagatggccccccacaattccactatatgtatcaccacagctctgaagttacactgactttcgcagtggtaacaatatttctagcatttatcaggtgctatcatatgcaaccacctcatctcatttgatactaagagtgctgtgaggaaaaatgttattatttccattttaccaacaaagcaggcagaggctcagagaagtcagttgcctgctaatcaggagcccagccaggttacgaactcagggccctgagctctgaaggcccatgcccttcacactacatttcagagaaatctagagttccttccttatatgacatttatcagctatgatttacattaaatgcaagagcaagacaggcaaagtgaaggataaaacattgataactttgctatatgaataactgta

SEQ ID NO: 437678 - DNA, 535 bp, Homo sapiens
gtaaattattctctttgtgtgcagtctgtaaaaatataaacttacatttaagtacttccttgctagtttgagaatcatctttttctaatgggaatgacaggcatatattttgatattcacagaaagaacaaatccaacagtagtaataacttgttttaaaaataagtattcaattatttcattttaacttatagaattgtatttctttccactaaaaaataagcatgttaggctttttgtggattgtgttgccttactcaaacttttctggagccagtgaatgaacatattttatactcagttgagagatttctatcagtatacttaaaggcaagcagggtgcataattaggtatgcctgccatctgcatagccctccaggtgcaaaaggcattagctttatttaatattatcacaacattaattttactccattaatttatgtcatttatcctttatttcaaactcagatttccaaaactaaagcactgggygcgatgacccaattctgattttagtgaaagtcttataaacaa

SEQ ID NO: 437679 - DNA, 621 bp, Homo sapiens
tggaattagttcatttttttctgttatttgcaataagaggagtcctaaaagaaacaataagctacaaatctgcatgtataatatgcccaaactcaactagaatactacaaaaacaactatatacacatcaacaaacaatttattgatatcagaaaagcaggatgaggctgggcgtggtggctcagacctgtaatcccagcactttgggaggctgaggcaggtggatcacctgaggtcaggagttcaagaccagcctggccaacatggcgaaaccccatctctaattaaagtacaaaagttagccgggcatggtggtgcacacctgtaatcccagctactygggaggctgatgcaggagaatcgcttgaacccgggaggtggaggatgcagtgagccaagatcacaccactgcattccagcctgggcaacagagtgagactcagtctcaaaaataaataaataaataaataaataaataaaaataaataaatgaaaagaaaaacaggatgacacataagaaaggataacagcatatgaatgtgcaattttttatctaactgctcaactttccaacttacttttaccagagtgcatatagtccttagcaagaagagatctgag

SEQ ID NO: 437680 - DNA, 626 bp, Homo sapiens
gtgcaaacttgaaaggtctttggggcctcaattcagaatgggcatgccatcacttccatcatatgctttggcctaagggcctaaggaagtcataagtccagcctagatttaagaggtagagaaacagacttcatctttgaatgggaagagctgcaaagttagactacaaatagcttggatacagggagaactcatacccttgcttttgccatgagaacaaacattggctaagctgctggaggatgagagatcacgtggagcagagtcaggtcatgcatctcaggccatcctaaatcagcatgcctccagctaacctatcagttggatgcaaatacatttgttgggttcttgggttgtagttgttacctgcctcatagctactgcttacttgaakgtgcctgacaaacccaaaatgcacaggttagagatgacacttttgaacttcaacaggaagtatgctcaagtatgtcagagtatggcattgtcttttacatggaaatatgtgtgttatcttttactttctgttaatcctgtctttaaagttgatgcccacaagtccccaatatctagacccacaaaacaacataagaacaaagagaagtcgatctcctacagctaactttatc

SEQ ID NO: 437681 - DNA, 626 bp, Homo sapiens
gtgcaaacttgaaaggtctttggggcctcaattcagaatgggcatgccatcacttccatcatatgctttggcctaagggcctaaggaagtcataagtccagcctagatttaagaggtagagaaacagacttcatctttgaatgggaagagctgcaaagttagactacaaatagcttggatacagggagaactcatacccttgcttttgccatgagaacaaacattggctaagctgctggaggatgagagatcacgtggagcagagtcaggtcatgcatctcaggccatcctaaatcagcatgcctccagctaacctatcagttggatgcaaatacatttgttgggttcttgggttgtagttgttacctgcctcatagctactgcttacttgaatgtgcctgacaaacccaaaatgcacaggttagagatgacacttttgaacttcaacaggaagtatgctcaagtatgtcagagtatggcattgtcttttacatggaaatatgtgtgttatcttttactttctgttaatcctgtctttaaagttgatgcccacaagtccccaatatctagacccacaaaacaacataagaacaaagagaagtsgatctcctacagctaactttatc

SEQ ID NO: 437682 - DNA, 552 bp, Homo sapiens
tgttctatacattttgagaattttttaatgtgaaggtttgatagacagccatacttttatcactggacatagtgatcattactcatagacctgcctagcatcttacaaaggatatttcctttcaattttgatctctgttttttatacatacactatacactagtttcatttgagtaggagagaagttataatgtactgatcatgcacttatgggttttgtcactgaaattttaaaatawtcttagttcaaatgaactgtatttggcttcagggcccagtattaatgccatctatatcataatgtcttagaattcactagaagtaattgcatgtttgttcttttgtcatagctctttgtcaacttacccctctaataaagaattacttttttaggttaattgagtgctgtttttctaacctcattgattctaaactccttgagaacagaacatatcttttatttaatgctgccaaaaactctacattagcttcccatagctttgtagtaacagattaccacaaagttagtggcttaaaccaacagaaatttaa

SEQ ID NO: 437683 - DNA, 571 bp, Homo sapiens
actccccttttcccacactcactagtccctggcatatactattctctctccttctacaagtttgttcattttagatatctcatataagtggaatcacgcagcatttgtccttctgtgactggtttagttcacttagcatagtgttctccaggtttatccatgttgttgcatattgcaagatttccttcctttttgagactgaaaaatattccactgtgtgctcatgtcacattttctttatccattcgtctgtcaataaatgcttaggttatttcatatcttggctattgctaataatgctgcaatgaacatgggagttcaaatatctcttcaatgttctgatctcatttttttggttaaatacccagaagtgaaatttctggatcgtatggtagttctatttttaaatttttgaggaacctccatattgttatccatagcagctgcactactttacactcctaccaacaatgcacaatggttccaacttctccacatttttaccaacatttatstttatatatacatacttataaatacataaaatgggcatagaaacagatgtgaggta

SEQ ID NO: 437684 - DNA, 606 bp, Homo sapiens
ttgggcttcaaatttcaattcccagataacaattgatgttgagcttcttttcatgaacttggccatttagggatcttcctttagaaaagtatctgtcttttgctcatttaaaaattaggctatttttcttcttttaaattgatttttaggagttttttatgtcatttttaggagagataaatcgtttgtcggatacatgtattgcaaatactttgtctcccaatctgtgacttcacttttcatttcctctttttttttttctttctgagatggagtctcactgtgttgcccaggctggagtgcagtggcacaatctcggctcactacaacctccaccacccaggttcaagccattctcctgcctcagcctgccaagtagctgggattacaggtgkcgatcactgcaacctggctaatattttgtatttttagtagagatggggttttaccatgttggccaggcaggtctcaaactcctgaccttaagtgatccaccccctgggtctctcaaagtgctgggattacaggtgtaagccaccatgcccggaccacttttcattttctacagtctttcaatcaatggaagtttaattcaggtaaagtcaa

SEQ ID NO: 437685 - DNA, 545 bp, Homo sapiens
cattaacatactgcatagttaaaaggctgcacttgctacattttccccagatttttgtttcatttataatattatgtacaaaaaaagtcatgttcaagatactgcttatcctcaacacccctgaagtgttttgacagctatatgacttttttttaagtaacagagccatgtatacatgcatttgttcctccttaataattttttatcatttaccaatattttctttcacttttccttatggttagctcttatgttgyacattttttctttgtggtaaccaaccttccaatggatgccactgaccagaagctacctttcttacctctggctattttacatgtgacaccttcctgacccacagtaaaatttctttcattaaaaaagaggaaaaggaaaggaagaaaaagtaactcacagatatttttgctccaatttctcattttcttcagttccatgatgtgcaattctcaagaatctaatgttccttgggctgatcactattctccttcagtaaaaccacaggatgtagctgttgggcacagaag

SEQ ID NO: 437686 - DNA, 546 bp, Homo sapiens
ttggacagtaataactagtatattttcacactgcagttaatgattgtaatastataaggtaagagggtaaatacttattaacacaaaaaagtacagtataaccaaccctacaatgaatagaaaaaattatttcagcagttgatgaaaacatggatacatttgacagaattgcttaggggaagaaaatcgcttgcaggcctcctgaaggcaaattaactgggtgtgtacctatttaatcctttcaagactgtaagtctaattgttgaaaactgccacccttcttgtctcctacccaagtctgaataggcacccgctggttctaccttaccttttggtagctaatctgagtttctcttcccaagatgcaccacagtgtctgcacgataaaggaggctaataataccttcctaggaaattctagattctgtttcctggggttaatagttgatcaaataatggacaatcagagaagtatagccatttggatgaagagggaaggagggagcagctatggataaaacaggaaaaaaaagatacgttcagcag

SEQ ID NO: 437687 - DNA, 546 bp, Homo sapiens
ttggacagtaataactagtatattttcacactgcagttaatgattgtaatagtataaggtaagagggtaaatacttattaacacaaaaaastacagtataaccaaccctacaatgaatagaaaaaattatttcagcagttgatgaaaacatggatacatttgacagaattgcttaggggaagaaaatcgcttgcaggcctcctgaaggcaaattaactgggtgtgtacctatttaatcctttcaagactgtaagtctaattgttgaaaactgccacccttcttgtctcctacccaagtctgaataggcacccgctggttctaccttaccttttggtagctaatctgagtttctcttcccaagatgcaccacagtgtctgcacgataaaggaggctaataataccttcctaggaaattctagattctgtttcctggggttaatagttgatcaaataatggacaatcagagaagtatagccatttggatgaagagggaaggagggagcagctatggataaaacaggaaaaaaaagatacgttcagcag

SEQ ID NO: 437688 - DNA, 546 bp, Homo sapiens
ttggacagtaataactagtatattttcacactgcagttaatgattgtaatagtataaggtaagagggtaaatacttattaacacaaaaaagtacagtataaccaaccctacaatgaatagaaaaaattatttcagyagttgatgaaaacatggatacatttgacagaattgcttaggggaagaaaatcgcttgcaggcctcctgaaggcaaattaactgggtgtgtacctatttaatcctttcaagactgtaagtctaattgttgaaaactgccacccttcttgtctcctacccaagtctgaataggcacccgctggttctaccttaccttttggtagctaatctgagtttctcttcccaagatgcaccacagtgtctgcacgataaaggaggctaataataccttcctaggaaattctagattctgtttcctggggttaatagttgatcaaataatggacaatcagagaagtatagccatttggatgaagagggaaggagggagcagctatggataaaacaggaaaaaaaagatacgttcagcag

SEQ ID NO: 437689 - DNA, 541 bp, Homo sapiens
acaaagtttctgccagcccaaccggagctgcaaacggaagactgctgatgggagctgtcttccaaaaatggccaggccctagaattggctgggaatatgggttcagccattggctggagacttccgagaaagtggccttgggacttcccagggtgggacaatgtacaatgggaagaaatttatgaagaacacacaaccacggtgaatctacactgattgaactgctccatctttttgcccaatgtatgttctgggtgttttcaggatccttcttgtgtggattctccctcagtcctgttgataagtcacaagtgagtgagtcgccaagccacattttgtctcctcttggaggcagcccccaacccattcactagatagcgttctagrtcctttagtaggttgtattttgagcccctcctgaagctatgcaggaggtccttgcccaagtccttcccttggtgggactttgctgggttactcaaatgaaacatcagtaggatggcagaacatcaaatgaatcagtggcatccatggttgggtc

SEQ ID NO: 437690 - DNA, 498 bp, Homo sapiens
ttggaggactttgagtaaagcagattgcccttcataatggggatagccctcattcagtcagttgaaggcctgaatataacaaaaagctgaccwttcccaagcaaggatttctccagcaaattgtattcagactcgaactgcattaactttcctctgagtctccaacctcccagcccacagggcagatttggacttgccaggcttcatagttgtgtgagccaatcctttaaataaacctctctacatagacacacacacatcctattggctccatttctctggagaatctcacacacactgcatctcatgccaccacccagtaagcaaactgtattgtccagatccaccattctttcattcttatgcatggtcagaacaaggaatccaagaactccctgggttctgctttacttcttatggacccgtcttttgatggttctgtttctgagaaggactttctctagaaactgaaatcatcagagattgtgaacgtgggtc

SEQ ID NO: 437691 - DNA, 498 bp, Homo sapiens
ttggaggactttgagtaaagcagattgcccttcataatggggatagccctcattcagtcagttgaaggcctgaatataacaaaaagctgacctttcccaagcaaggatttctccagcaaattgtattcaractcgaactgcattaactttcctctgagtctccaacctcccagcccacagggcagatttggacttgccaggcttcatagttgtgtgagccaatcctttaaataaacctctctacatagacacacacacatcctattggctccatttctctggagaatctcacacacactgcatctcatgccaccacccagtaagcaaactgtattgtccagatccaccattctttcattcttatgcatggtcagaacaaggaatccaagaactccctgggttctgctttacttcttatggacccgtcttttgatggttctgtttctgagaaggactttctctagaaactgaaatcatcagagattgtgaacgtgggtc

SEQ ID NO: 437692 - DNA, 498 bp, Homo sapiens
ttggaggactttgagtaaagcagattgcccttcataatggggatagccctcattcagtcagttgaaggcctgaatataacaaaaagctgacctttcccaagcaaggatttctccagcaaattgtattcagactcgaactgcattaactttcctctgagtctccaacctcccagcccacagggcagatttggacttgccaggcttcatagttgtgtgagccaatcctttaaataaacctctctacatagacacacacacatcctattggctccatttctctggagaatctcacacacactgcatctcatgccaccacccagtaagcaaactgtattgtccagatccaccattctttcattcttatgcatggtcagaacaaggaatccaagaactccctgggttctgctttacttcttatggacccgtcttttgatggktctgtttctgagaaggactttctctagaaactgaaatcatcagagattgtgaacgtgggtc

SEQ ID NO: 437693 - DNA, 593 bp, Homo sapiens
gaaataagtgtttaaaattgagcaaaaatctgtctcctaccctgaattaattttgtattagcaacgtttaggcctttgttttgggtgatactgattatttgatggtgtggttcttaatagtttattttcttatatgaaaatatcttctatattttattaatagaaaagcaaatatacttttaaatatgtttcttttaataaaattagtttaaaaaggttccagtaaagctttaatttcatgagacaagttattacatcaagagaagagaaatacagatgtagagtatagagggcccttgtccggtttaaaaccttgattcgcattgttattttaggtaatatggctcttacctttttttctacaaagaaaattggtattatgtttagaatatttgtacttctgctttctttttctttctcccattacatgttcagtcagatttatctgtattcctaaatcctccaggtcaaaatcgtagaacctctgtgtttctctcttcttcattctttakacaatatatagttaataaagttatcagccttttttcagaatcttttagtatcttctgtttcctggatcagatccttattat

SEQ ID NO: 437694 - DNA, 524 bp, Homo sapiens
tattttaagtacaatggaaataaaaacaaagtaattttaatcatttgcaacatggtattgcacttctcccatttgatagaagtggaagtttttaatagygtgaacctatcaaggtcatataattctttgcctactattcttaaatggttttttcatttaattttttatgacaaaataattaccaatgactatattatagtttcagaaagatgtcaaattctaaaagtgattttaaaggagttttgcctttcactactagtgataacagaaggcataattataaaacttgttaactagaaaagattgatattaattgattttatgataatatatacctgctaaataatgaatttattttaggtttgcattgcaagttttgaatttgttaatatccgtgttgttcatagattgttactagagatttagagggatcattttttaatttttcatctttggtagtcacatttccagttttctggcagtggtttctactaatgttaattgaattgaagagtgccatagca

SEQ ID NO: 437695 - DNA, 543 bp, Homo sapiens
atttatatagataaatccagcccctatgaaggcagatttgacccaataacctccaactgcctccccttttccataaaattcttcctrgtagccaacacatttctcctcttagacttagaaatcgctctaatactacccctgccatgagctattcaaacaaattacctaacaacaataatcaccacagcccttatactagttatcattttaatcctaggcttaatttacaaaagaactcaaaaagggttagattgaattgaattggtaaatagtttaagtcaaaagaaatgatttcgattcattagattataataaaccatatttaccaaatgccctctatttacatcaacattatattaccatataccatatcactactggtaaaattaatctatcaaacccacctaatatcatccctatgtgcctagaaggcataatactgtcaatatttatcataattacccttataactttaaatatacattttactctagcatctataatacccattatcctcctagtatttgctgcctgtgaagccgc

SEQ ID NO: 437696 - DNA, 498 bp, Homo sapiens
tttagaaagcattacaaagatgacttgcaaataactgggaaaaaacccacaacattaaatagtacatttctaaaaagaagtttattctgatgaatttacagaagcaaatgacaggtaaaattgaagcagcattagttatgcatttaggaaatatatttaatctatttaagtcaaatcaataacctgggaaatattaacctagaatcaatactgcaaaaccattttgtataaaagtgaatgacaccaactaaagccatatataagaacattcacagctatcagatcagaactctcaggcagaactcatcatattttctccaaaaagcagccmccatccctaatgtacctaatcataataatgacaccacacttatattagtcatcagagctccgaaaccctaagtaaaaacttttgactcatttttattacttgcactttctttccattctctttcaatgcttcatcagtctcttcttttacactcccccataattttg

SEQ ID NO: 437697 - DNA, 541 bp, Homo sapiens
tagtgagaaccaaagctagaaggattctatgaggtttgtcatgacaagctaaagtcataaaggaacataaacacacggaaaagattcacagagagagaggaaggcagaagatttttgtttttgtttttgttttgtttttttaagaggtaatatgatttcttaggctttacaaagtctttctaggtccacttctataccttgtttgtttttataataactactatccccttttatcttgaggttatttaggtgaatctatattctttgcagttagaggcctattagagcactctttaataactttttatttaattaaaaagttgcttgtttaaaagaataagatagaactctatccagactaatcaggaacaaaaaagatggaaatgaacaaaatacagcagaaaaaaagaaataagtaaatacagccaagttttaaaataaatattatgaatgcttayacatttaaaaataaagattaaatggatgaattcctagaaaaatacaagatgccttaactggtacacaatgacacagaaaacct

SEQ ID NO: 437698 - DNA, 598 bp, Homo sapiens
agattttaaagtatactgaaggatgtgcacaggttatatgcaaatactatgcctttgtatatcaggaacatgagtatttgcagattttggtatgtgtgggaggttctggaactagtactgcatagataccaaaggatgattgtgtattcacagattacatgatcttgcatattaaaaatcctaaggaattaataaaaaaactattagaactaataaatgagctcaggtcagttgcagaatagamgatcaatatataaaaatcagttgtatttctatacagagacaaagaacaatccaaaaatgaaattaaaaaaatttcattaacaatagcataacaaatttttaggaataaacttaaagaagtgtaaaatgtatacactgagaaatataaaacatcattgaaagaaattaaggaaacacctaaataaatggaaagatatctcatagaggacttcatatttttaagatggcaatactccttaattgatctgtatgttcaatgcaattcctactgaattcctaaatgtctttattgcagaaattgacaggttaatcataaatttatataaaaagcaaagggacttagcatagctaaaac

SEQ ID NO: 437699 - DNA, 631 bp, Homo sapiens
gaccatacatttctattgttacatgtgtcctaggaaaaaacaggctgcttcctataaatgttgatatgttgtattttcatttttattcagttcagaatattttctattttcccttgtgactttagaagtgtrtcatttaatttctaaatatttaggtatttcctggatttctttgttttgttgatttctaatgtaattcctatatggtcagaattatactttgtatagtttcagtgtgtttaatttgttagattaaaaaaaaaatcccgtattatattctgtcctggggaatgtttcatcagtgcttgaaaataatgtgcattatgaatttattaggtggaatgttccctatatgtcagattgaattggttgatagtattaagtcttccttattctttctcattttctttctagttctattagttattgagagtagagtatgagatctacagtactgtcgaattttacattttcactttcagttctgttggtttttgcctcgtgttttgagactatgttatcttgcgtgtgtttatagttgttacatctgcctgggtgttttgacacttctctcattatgaaatgtccctctttgtctctataaatgtttttgttttaaagtctattttgt

SEQ ID NO: 437700 - DNA, 631 bp, Homo sapiens
gaccatacatttctattgttacatgtgtcctaggaaaaaacaggctgcttcctataaatgttgatatgttgtattttcatttttattcagttcagaatattttctattttcccttgtgactttagaagtgtatcatttaatttctaaatatttaggtatttcctggatttctttgttttgttgatttctaatgtaattcctrtatggtcagaattatactttgtatagtttcagtgtgtttaatttgttagattaaaaaaaaaatcccgtattatattctgtcctggggaatgtttcatcagtgcttgaaaataatgtgcattatgaatttattaggtggaatgttccctatatgtcagattgaattggttgatagtattaagtcttccttattctttctcattttctttctagttctattagttattgagagtagagtatgagatctacagtactgtcgaattttacattttcactttcagttctgttggtttttgcctcgtgttttgagactatgttatcttgcgtgtgtttatagttgttacatctgcctgggtgttttgacacttctctcattatgaaatgtccctctttgtctctataaatgtttttgttttaaagtctattttgt

SEQ ID NO: 437701 - DNA, 365 bp, Homo sapiens
gctcattaaagctcatgcatatggactgcatatcatttatgtacttaaaattttgggataraggcaacaagcaagtgcacaagggccaaataactaagcaaccaacctattaatcaaaaggcagatgttggctaaagattaggcagccttgggaagaaaagaaaaaaaaacacatataaaaagacccaaagtataccaaactaatgctgatctcatcttgcagaggtcagcccactctcccctctctcagagtgctactgtgcttaataaacttttgctgcttgctttgctatttgtgtgtgccacatcaaattatctgttcaggacaccaagagcctgtaactgcacagcaccatccggtaaca

SEQ ID NO: 437702 - DNA, 556 bp, Homo sapiens
ccctcaagacctctgtctttgacccatgtgttacttacaagttgtttaatttcaaaatatttggagattttcctggatatcattcccttgttggttactagtttaattctaaaatgataagaaagatactttgtaggattttgattgtttttaaatcactgaggtttgttttatgacctaggatatgatcttgatggatgtctaatgcttaaagttaatacttcaattaaaaaaaaaatacacaacactaactggaaaatcctttaaaagcatctaccttttgttcaatcaatcaataaaacaatgtcaatacacatataatgtttaaataagtattttgatactaagtggaacttacttgtaacagagatcttgaaagaacacatggtgactgttcactaaattcacagaaaaaatcctaacagatatataaagaaaaagcaatgtcattaatasattaaataaaagctaaaaacacttcatcagactgtaatttttactagaccttctggaaatgacatagtaccagagttaaaatatgacaaataaaggtcat

SEQ ID NO: 437703 - DNA, 511 bp, Homo sapiens
cgtccgtcctctccagcttcttgactgtggtctgataggtgtacctgttccgtaatgactgcagactgagcaacacttcagatgcttgcggtggatagtatgaaatcttgaaggcaaaatgaaattttattcttgactttggtgagtctattaagtcattaaattcatatttcatctttatataaggaatgtggtcatgatggcaggatttcatggtcaaaaaacagtttccagctttttaatgatcattttgcaaggtcttttattcctcccttctaagtgggggcatgtatttgtgcaaatattattgctatagactaagatccttggagatatacctactttcatgccccagtaaaagtgatcttaatttgggggaatagaggagtgtktttttcttactcctaagagcttttcttctttgtttgtatgctagatttatttgtcaaataagtaacagttatctgctaattgaacaaaaccagaaaaaattataaatagatattaatga

SEQ ID NO: 437704 - DNA, 511 bp, Homo sapiens
cgtccgtcctctccagcttcttgactgtggtctgataggtgtacctgttccgtaatgactgcagactgagcaacacttcagatgcttgcggtggatagtatgaaatcttgaaggcaaaatgaaattttattcttgactttggtgagtctattaagtcattaaattcatatttcatctttatataaggaatgtggtcatgatggcaggatttcatggtcaaaaaacagtttccagctttttaatgatcattttgcaaggtcttttattcctcccttctaagtgggggcatgtatttgtgcaaatattattgctatagactaagatccttggagatatacctactttcatgccccagtaaaagtgatcttaatttgggggaatagaggagtgtttttttctwactcctaagagcttttcttctttgtttgtatgctagatttatttgtcaaataagtaacagttatctgctaattgaacaaaaccagaaaaaattataaatagatattaatga

SEQ ID NO: 437705 - DNA, 595 bp, Homo sapiens
tgaactgcggcaccattcttagtgtgtttctctctccttttatttttaatttaatttaattwatttatttatttatttttgagacagagtctcactctgtcgccaggctggagtccagtggctgatctcggctcactacaacctccacctcctgggttcaagcgattctcctgcctcagcctccggagtagctgggactacaggcgtgcactaccacgcccagctaatttttgtatttttagtagagatggggttttgccatgatggccaggatggtctctatctcttgacctcgtgatccacccacctcggcctcccaaagtgctgggattacaggtgtgagccactgcacctggccttctctctccttttaaggattgtactcaggattacaagatactgcacatcaaaaaatgaatcccaatatgtggtcaattgaggaacttgaaaatgtcatgccaataataaaagcttgcgcacaataactgaagttagaaggaggtaaatattgctaaaatattgcggatttaaaaagataatctaaccctttattattttatgtgagtctcatgttcccaaaagataaaagaattta

SEQ ID NO: 437706 - DNA, 609 bp, Homo sapiens
aaaccatggatatattgcttagatccacttataccatcaagccagcccaagacaaaattactactctagttgtctagcataaccaactactccaaatttagtgacataaaatagcctttatagtaggcttacagattctgtggattgagaatttggaaaagacagagtagagatggcttgtctctgttctgtggtgtctggggcctcagctgggaagactggaacaactgaggctggaggatttactttgaagatggtgtcttctctcgcatgcctagctgggctgctccaagccggacttactgggactgttgaccaaaccacttacaagtatggggcctctccacgtggcttgggcttctcatagcacggctgataggttccaagaggaaacattctaagagcaagtatttcaagcacaagagtccaagagactagaagagatagaagcggtgtcactttctctgacctagcagcggaagttatatagtcactttcytcatacttattgtctgaagcagttgtaagcccatacagaatgaaggggagaagtcaatgaggggagagtaatatgtggccattaaaaaaaaaaaaaacaaccccactatc

SEQ ID NO: 437707 - DNA, 589 bp, Homo sapiens
agccagggtgacatggcaaaaccctgtctctacaaaaatacaaaaattaacctgctgtggtggtgcatgcctctagtcccagctgtytgggaggctgagatgggaagatggcttgaacctggaaagtggagattgcagtgagccaagattgcactctggcctgggtgacagagctagactctgtctcaaaataactaaccacataaataaataaacaaaaaatcttatatgtcatctacaagcaaaatttaacagatgtccaatggtacttattcaatgcagacacctaattgcctcttgacagctgatttaaagaaaaattttaaatacttacatgccaatcagtttagaaaagcatcatcaactgaacactaaagcctaaatatcataagaataatttttaaagtatttttgtagaaacaggacaaaaacccctaaactctaaagaagaaaacaaaagcaaacctgttatctgcaggactcataggtactgtcagttatatatcttaaagcagtccttgaagacgcatatttaaaagtctacaacctacagctgcgaggaataaagctgagagccaagcaccttttg

SEQ ID NO: 437708 - DNA, 552 bp, Homo sapiens
cttttttagcagatgtgagctccctctagagactcctagaaaaagtgtgtcagtgaattttaaaagatcaggacgagcatttctctggaataccatccatcagagccaaagagatcctgtttatatgattggcctaggggaatgctgaatatactgagctaagtccatgtgaagactgtgtccatcttccctactttcataaaggatgacttattcttagggtgactatattctttatcacatggactgggatactcttgagaacaaaggggagtactcttgataattatattggaccaacaagtaagccttagctgatcaggacctatagtcactctacttatatgtcaataccatagattgtaataatttttttatattttaatgtattgattcccaggcatggggtaccttyatcggactcatcaaaattctagagagctgttacaagtacagcttccatggaccttatctatagaattaaaatctccaggaatatttgtggcagagtgcattaacatcaaagcattcaatgttcctccataccaatca

SEQ ID NO: 437709 - DNA, 544 bp, Homo sapiens
acaatttgaaaatcatttagatgtaccacaaacactctttgctataaaattgcraagtagtttatttaatctgtagtactttggttgccatttagcatctcttcacataaagaaaacatacatcctaaattataggatgtaaaaatatttttaatggtcaaggcattatctgcatgtcatataactaggaaagagaaagaattttaaaagttttatctttttctcttgctttaaagcaatatgaaaagtagaaggagttgaggaaacaacaaaatcagaaataaaatttatttaactccgattaacgttagatataaaaacagatgagactgtcagtgtccttcatgtatatgaatacactatttatataacagctacatgaaaacaagctgtattgtaagagctcactttgaggccaggtgcagtggctcacacctgtaatcatggcactttgggaagccgaggcaggtggatcactcgagtccaggagtttaagaccagcctgggtaacatagagaaaccctgtctgtagtaaaaatacaat

SEQ ID NO: 437710 - DNA, 544 bp, Homo sapiens
acaatttgaaaatcatttagatgtaccacaaacactctttgctataaaattgcaaagtagtttatttaatctgtagtactttggttgccatttagcatctcttcacataaagaaaacatacatcctaaattataggatgtaaaaatatttttaatggtcaaggcattatctgcatgtcatataactaggaaagagaaagaattttaaaagttttatctttttctcttgctttaaagcaatatgaaaagtagaaggagttgaggaaacaacaaaatcagaaataaaatttatttaactccgattaacgttagatataaaaacagatgagactgtcagtgtccttcatgtatatgaatacactatttatataacagctacatgaaaacaagctgtattgtaagagctcactttgaggccaggtgcagtggctcacacctgtaatcatggcactttgggaagccgaggcaggtggatcactcgagtccaggagtttaagaccagcctgggtaacatagmgaaaccctgtctgtagtaaaaatacaat

SEQ ID NO: 437711 - DNA, 528 bp, Homo sapiens
agcttcatttatagtagattcactattcactatttatattcactatttatcaataacctgcactcaatagttttggtgcattcttctaattctgtttatttgtttcctgataatagaagtatcacatgcattctatagataatttgaaagtataaatgagtattaaaaagaaagcaaccacatatcatcccccaaactgagattatcattattaacattttagtttattttcaagcatttcctaagtatattttagttatttaatsatattatacagtattcaatatatcttttatttttatagaagtattttctgtattataaaacatgctacaaaatgttttgatggatatacagcatttcaatatatcaaagtcataattgccctaatcctttctgatatcatttgcatctgtgtccccagcaaatcttacactcaattgtaatcccccatgttggagggggacctggtaggaggggattggatcatgggggcagagttctagtgaatgacttagcaccatccct

SEQ ID NO: 437712 - DNA, 405 bp, Homo sapiens
acctgccctcataattcagttatctctcactgggtccctcccacaacatgtgggaattatgggagctacaagatgagatttgggtggggacacagagccaaaccttatcagaaggggagaagagaagaaggagctgaatgtcagagagaagcagcttracttcagaggggcagcttcatggcaggactttgtagaagagtccagatggagatggccagacttcaggggaagaataccttcctgctccatccccttttcagctccccttcccactcagagccacttccatcagcaataaagtcccccacatttactatcctactatttgttcatgtgacctgatttttcctggatgctggataagagctcaggatacagaggccatcacactgaccctctgtcctt

SEQ ID NO: 437713 - DNA, 509 bp, Homo sapiens
agagaagtgaatgtattacagtccctatcatactgtatctttcatagctggtggatattatgaaaattaaacatgtttaaaagtttgaatatcagaagttttataaaattgaaacattttaaggtcttccttttggaatagtgtgggcttttttttttttaagggaagtacataaattttgcctttaatccacattagaatttaaagaaagaggccgggcacagtggcttacgccttgtaatccctgaactttgggaggccaaggcaggtggatcacctgaggtcaggagttcaagatcagcctggtcaacaggatgaaaccctgtctctactaaaaatacaaaaaaatagctgggtgtggtggcgggcacctgtaatcccagctacttgggaggctgaggcagtagaatcacttgaacccaggaggcagaggttgcagtgagctgasatcgtgccactgtgctccagcctgggcaacaagagcaaaattcttgtctcaaaaaaaataa

SEQ ID NO: 437714 - DNA, 596 bp, Homo sapiens
ttactgttaggaagatgccatggaaggattggagatttatttgatgctttagtaaaaaaattctttcgaagagacttcattgatttttttttaataggatactcrgtctattggaatagatagatttggccaaaccaaggtgatgtcttaagttggagactatctgtaaaattttggtaggaattaagtaatttatttcttttaagatacatggcatgcattgcttaatgacagcatacactctaagaaatgcgtggttagatgattttgtcattgtagaaacatcataagttgtactttcacaaatggtatatagcctattggtcctaggctacaaaccggtacatcatgttactgtactgaatactgtaggcaattgtaacacaatggtaaatttttgtgtatctaaacatagaaaagataaagcaaaaatacaataatataatcttataggaccctcatcatatatgcagtctatcattgatcaaaatgtccctctgtgatgcataactgtacataaagtcaaatatctaagctcaagactatgcagtcacatttttataatacaatggattagaatgaacaaagcaatgaat

SEQ ID NO: 437715 - DNA, 405 bp, Homo sapiens
acctgccctcataattcagttatctctcactgggtccctcccacaacatgtgggaattatgggagctacaagatgagatttgggtggggacacagagccaaaccttatcagaaggggagaagagaagaaggagctgaatgtcagagagaagcagcttgacttcagaggggcagcttcatggcaggactttgtagaagagtccagatggagatggccagacttcaggggaagaataccttcctgctccatccccttytcagctccccttcccactcagagccacttccatcagcaataaagtcccccacatttactatcctactatttgttcatgtgacctgatttttcctggatgctggataagagctcaggatacagaggccatcacactgaccctctgtcctt

SEQ ID NO: 437716 - DNA, 554 bp, Homo sapiens
gcatatgcgtatgacttgtgatttgttttaagtggttactctgggaaatttcaaatatgagttggtggtacttaaataaggaactgaaaacgtatgcaccattccaaccatgaaacacacagtcatacacacaaggagattagaggtttggacagagtcagtttggagccatttgagaaaagaggctgggcagtagccatggaaatagttactataaatgctcactttctaggaagacatacccagatttgatttgctgaaatgattctgaatacctttcaagcagaaagagtctttctttggacaaagccattgtaagtttattgtttcaaaattttagactgtratgtttctatccaggacaaaattacttgaagaaaatggtcataaagtcctttcagttctctcatttactaatgcagtttagccatcaaatctactgaactgtagcttacagacaaaaaccattttagagcttctatcatataaaacaatagatatgaaaatcctgcctgtggagctcttgatactattgtatttcatttttgtgttgg

SEQ ID NO: 437717 - DNA, 554 bp, Homo sapiens
gcatatgcgtatgacttgtgatttgttttaagtggttactctgggaaatttcaaatatgagttggtggtacttaaataaggaactgaaaacgtatgcaccattccaaccatgaaacacacagtcatacacacaaggagattagaggtttggacagagtcagtttggagccatttgagaaaagaggctgggcagtagccatggaaatagttactataaatgctcactttctaggaagacatacccagatttgatttgctgaaatgattctgaatacctttcaagcagaaagagtctttctttggacaaagccattgtaagtttattgtttcaaaattttagactgtgatgtttctatccaggacaraattacttgaagaaaatggtcataaagtcctttcagttctctcatttactaatgcagtttagccatcaaatctactgaactgtagcttacagacaaaaaccattttagagcttctatcatataaaacaatagatatgaaaatcctgcctgtggagctcttgatactattgtatttcatttttgtgttgg

SEQ ID NO: 437718 - DNA, 554 bp, Homo sapiens
gcatatgcgtatgacttgtgatttgttttaagtggttactctgggaaatttcaaatatgagttggtggtacttaaataaggaactgaaaacgtatgcaccattccaaccatgaaacacacagtcatacacacaaggagattagaggtttggacagagtcagtttggagccatttgagaaaagaggctgggcagtagccatggaaatagttactataaatgctcactttctaggaagacatacccagatttgatttgctgaaatgattctgaatacctttcaagcagaaagagtctttctttggacaaagccattgtaagtttattgtttcaaaattttagactgtgatgtttctatccaggacaaaattacttgaagaaaatggtcataaagtcctttcagttctctcatttactaatgcagtttagccatcaaatctactgaactgtagsttacagacaaaaaccattttagagcttctatcatataaaacaatagatatgaaaatcctgcctgtggagctcttgatactattgtatttcatttttgtgttgg

SEQ ID NO: 437719 - DNA, 463 bp, Homo sapiens
acttcttgttacatcttaaatcaagttcaaagcacttaccaacacgtacaaggttctcaatggtttttgttgcctctgtctgtccagtctcgattccctacsactttctcccttgcttcacaccctactcacattgtcttctttctattcctccatagtttaagcttgtttctgctttagggcctgtgatcttgtggttccctttgcttggaatgttctactggagctttttagagttggcttcttgacagttaagcctgagctcaatagcctgtcttcagaaaaggccttccctttctattcaatttaaatatcctgttacttccgtctatcgttctgccattacattatctgtctgcttgtctcatagaccttagagctatttgacattctttttctgttcatgttcatttgtttacttatttattttctctctctcaatggaaagtaggccccttgagac

SEQ ID NO: 437720 - DNA, 463 bp, Homo sapiens
acttcttgttacatcttaaatcaagttcaaagcacttaccaacacgtacaaggttctcaatggtttttgttgcctctgtctgtccagtctcgattccctaccactttctcccttgcttcacaccctactcacattgtcttctttctattcctccatagtttaagcttgtttctgctttagggcctrtgatcttgtggttccctttgcttggaatgttctactggagctttttagagttggcttcttgacagttaagcctgagctcaatagcctgtcttcagaaaaggccttccctttctattcaatttaaatatcctgttacttccgtctatcgttctgccattacattatctgtctgcttgtctcatagaccttagagctatttgacattctttttctgttcatgttcatttgtttacttatttattttctctctctcaatggaaagtaggccccttgagac

SEQ ID NO: 437721 - DNA, 513 bp, Homo sapiens
tttttttttcataccccagtggcrcctggaacaccagcgagacagaaccgttcacacccttggaaagggcgctgaatccagggagcccagtggtctagctcagcagatcccacctccgtggagcccagcaaactaagattcactggcttaaaattcttgctgccagcacagcagtctgaagtcaatctgggacgcttgagcctggtagggtgaggggcgtctgccattactgaggtttcagtaggcaattttcccctcacagtgtaaacaaagctgctgagaagttcggactgggcagagcccaccatagagccacaaacccactgtagccagactgcctctctagattcctcctctctgggcagggcatctctgaaagaaaggcagcacctccattcagggacttacagataaaactcccatctccctgggacagagcacctggtagaaggggcagctgtgggcacagcttcagcagacgtaaatgttcatgcctgccagctctgaagagag

SEQ ID NO: 437722 - DNA, 513 bp, Homo sapiens
tttttttttcataccccagtggcgcctggaacaccagcgagacagaaccgttcacacccttggaaagggcgctgaatccagggagcccagtggtctagctcagcagatcccacctccgtggagcccagcaaactaagattcactggcttaaaattcttgctgccagcacagcagtctgaagtcwatctgggacgcttgagcctggtagggtgaggggcgtctgccattactgaggtttcagtaggcaattttcccctcacagtgtaaacaaagctgctgagaagttcggactgggcagagcccaccatagagccacaaacccactgtagccagactgcctctctagattcctcctctctgggcagggcatctctgaaagaaaggcagcacctccattcagggacttacagataaaactcccatctccctgggacagagcacctggtagaaggggcagctgtgggcacagcttcagcagacgtaaatgttcatgcctgccagctctgaagagag

SEQ ID NO: 437723 - DNA, 574 bp, Homo sapiens
atgaggcatgggaagcgaccattggaattaggatgagaaaatcattgtggtagagtgatggaaggcagaagtataactggagtagttttaagagaaagagggaggagatgaattggagacagtgagcatgaataactcaaggaaattactggttaatttctaattataatacatgaatactaagtacaaaatgttaataaaaattgtcagtagtattttaacatactgcaatattcatcttcaaattcatattataacctacaaagcaatcatgttggggagctttactccctttccaagagtgcttccatggaccaaaatgattgcaaaaaagttatttttttwaaaaaaaattcctagaacacaaggatttttgaaacagaaaggacttgagagatcatctctacaaactcattcagttaagtttttccctctagtttctgattcttatttacatggcatcatagttattgatggagaagtcaggaactcaggtagtttttcaaaataaatatcttaatacatagcagtgaatacaaggggttttgagtgacttatcttccgattacattct

SEQ ID NO: 437724 - DNA, 574 bp, Homo sapiens
atgaggcatgggaagcgaccattggaattaggatgagaaaatcattgtggtagagtgatggaaggcagaagtataactggagtagttttaagagaaagagggaggagatgaattggagacagtgagcatgaataactcaaggaaattactggttaatttctaattataatacatgaatactaagtacaaaatgttaataaaaattgtcagtagtattttaacatactgcaatattcatcttcaaattcatattataacctacaaagcaatcatgttggggagctttactccctttccaagagtgcttccatggaccaaaatgattgcaaaaaagttattttttttaaaaaaaattcctagaacacaaggatttttgaaacagaaaggacytgagagatcatctctacaaactcattcagttaagtttttccctctagtttctgattcttatttacatggcatcatagttattgatggagaagtcaggaactcaggtagtttttcaaaataaatatcttaatacatagcagtgaatacaaggggttttgagtgacttatcttccgattacattct

SEQ ID NO: 437725 - DNA, 516 bp, Homo sapiens
agcacagctcctgcctgatcagttggtggtggctctgtgtttctctgggatggaggtcccagaaacaactgacaggcctctgccattgctgccaccacagtacctgcccttgcttcccccaggctagggagggaacaaagggcctgattactttgtcagcattctacagagaggaggccagactgtcttccgggytgagttgcctgacctccctgctcttcaggcagggcccccagcttgggcccagcagcacagctgccccaaccctaagctgaggagggaacaaaaagcctgagcttgcactggggctgcagtgtggcagcttggaagtgccaaggcgagatctgtagcaggcactagagcaggagaggagcccacactctcagagtactgagagtgctgagttacatgaacctgtgggctaccacagcagtgggcatgcctccctatgcagggccagctgtctggaaaagggatggcctatctccctacctcagcctctgcctgagggagtgc

SEQ ID NO: 437726 - DNA, 419 bp, Homo sapiens
gttaaaggaagtttattactgttctgtagctaagatttctaatacacttgacctttttattatttcagtttcagtaacataatatcagatatgaaagttgccagatctgctacagctagagttcgttcaagaccagagcttcggattcagtttgatgaaggctatgacaattatcctggccaggagaagayggatgatcttaaaaaaaggtatcaggctttgtaatctgctgggttttgtttgtgtagtttgtttttaccttaactgtagatttaccttattgtgtgtgtgtgtattattgctgttggatatctgaacattatgaatacatttacatctgtgttcttactctctgtataccacttcctagagagggaaccatgtgctggatttagccagtcctgtagttttccatacct

SEQ ID NO: 437727 - DNA, 609 bp, Homo sapiens
accacacctggtatgagccaccgtgcctggcccacaatgacttttacacatgttgttaaatcatcttacagattttataatttgggggaagaaaagttttactaaatggtcttttaatggaaactctacaagaaccagaatctttgctttgttcacttatgtatccattcctaggcctagaaaaatgtctgacacatagcggcaattattcattgaataaatggacccagcgatagtacattagctatgctatatgcatacattaaagatgtagattatcgactttcaaaagataattaatgtaasttcttactgcttctgaacatgtttgtgagttatattgctgagggacctttatcttctcattctttcatcttaacccagtgttataaaattgaaatcaccaatattattccatatctaaaattaatatctaccttgtaaaaaatatcactctgctgcatttgagaatagactttttaggtaataatgatgcaatccatagggttttttgggggcacagagggattcatgctaacagaacattttattttctattttcccagagctgtaaaacatgaaattacggtagtataaggcatattttta

SEQ ID NO: 437728 - DNA, 548 bp, Homo sapiens
atctttgctttgttcacttatgtatccattcctaggcctagaaaaatgtctgacacatagcggcaattattcattgaataaatggacccagcgatagtacattagctatgctatatgcatacattaaagatgtagattatcgactttcaaaagataattaatgtaacttcttactgcttctgaacatgtttgtgagttatattgctgagggacctttatcttctcattctttcatcttaacccagtgttataaaattgaaatcaycaatattattccatatctaaaattaatatctaccttgtaaaaaatatcactctgctgcatttgagaatagactttttaggtaataatgatgcaatccatagggttttttgggggcacagagggattcatgctaacagaacattttattttctattttcccagagctgtaaaacatgaaattacggtagtataaggcatatttttactctttttataattttttctaaaaaaaattagtgtttgttccctatataacttttaactttataggtaaatatttgtt

SEQ ID NO: 437729 - DNA, 609 bp, Homo sapiens
accacacctggtatgagccaccgtgcctggcccacaatgacttttacacatgttgttaaatcatcttacagattttataatttgggggaagaaaagttttactaaatggtcttttaatggaaactctacaagaaccagaatctttgctttgttcacttatgtatccattcctaggcctagaaaaatgtctgacacatagcggcaattattcattgaataaatggacccagcgatagtacattagctatgctatatgcatacattaaagatgtagattatcgactttcaaaagataattaatgtaacttcttactgcttctgaacatgtttgtgagttatattgctgagggacctttatcttctcattctttcatcttaacccagtgttataaaattgaaatcaccaatattattccatatctaaaattaatatctaccttgtaaaaaatatcactctgctgcatttgasaatagactttttaggtaataatgatgcaatccatagggttttttgggggcacagagggattcatgctaacagaacattttattttctattttcccagagctgtaaaacatgaaattacggtagtataaggcatattttta

SEQ ID NO: 437730 - DNA, 408 bp, Homo sapiens
aatcacataccaaaattctactgctatatatatagctctactctttttatgttattgatgtgacaaattatatctttattcattgtataccagctaacagatttacaattacattttatgcatttgccttttaaattatgtagaaaataaaaagcagagttacaaaccaaaattacaataggactgtttttatgtttgtttatgtatttacctttaccagagagctttgtatattcatacagcttgcttatttacttayatagttattgcctagagttcatttatttcaacctgaaggacttaacacttcctgaatgtcaaattcagggataaatggatttttttcagttttaaaaaaaaatccggaaatgtcttaatttctccttcatttttgaaggataagttttc

SEQ ID NO: 437731 - DNA, 640 bp, Homo sapiens
aaattatatctttattcattgtataccagctaacagatttacaattacattttatgcatttgccttttaaattatgtagaaaataaaaagcagagttacaaaccaaaattacaataggactgtttttatgtttgtttatgtatttacctttaccagagagctttgtatattcatacagcttgcttatttacttacatagttattgcctagagttcatttatttcaacctgaaggacttaacacttcctgaatgkcaaattcagggataaatggatttttttcagttttaaaaaaaaatccggaaatgtcttaatttctccttcatttttgaaggataagttttccagctatatatttctcaattgacaggtttcttcattattttaaatatataatccactgcctactggccttcaaggtttctgccgagaaatcagctgctaatgttatctggatccctatctgtgaaaaaagctcttctctctgagttttcaacattctcccattatcttttttttgtttgtttttgagacaaataattgtacatattcatgggatacagagtgatattttgatacatgtatacaatgcccaatggtcaaataaggataattagcataacaatcacctcaaatatttg

SEQ ID NO: 437732 - DNA, 565 bp, Homo sapiens
cttcctttggttctcagtaggcagggtaggggccaggcatggtggctcatacctgtaatccttgcactgtggggggccaaggtgagaggattgcttgaggccaggagctcaagaccagcctggacaacatagcaagacctgggtggcatacacctgtggtccctactacttggtaggatgaggtgggaggattgatcacttgatcccaggagtttcaggctgcagtgagccatgatcacaccactgcacttcagcctgggtgacagagccagaccatgtcacaaaaagttagaaaaaaaaaagagagagggagagagactatacacaggcaccaccacatttggctaatttttaaatattctgtagagacaaggtcttgctaggttgcccaggctagtctaaaactmctggcatcaggctgggcatggtggctcatgcttgtaatcgcagcactttgggaagctaaggcaggcaaatcacctgaagtctggagttcgagaccagcctggccaacacggtgaaactctgactctatcaaaaatacaaaaatcagctgggcagtagt

SEQ ID NO: 437733 - DNA, 565 bp, Homo sapiens
cttcctttggttctcagtaggcagggtaggggccaggcatggtggctcatacctgtaatccttgcactgtggggggccaaggtgagaggattgcttgaggccaggagctcaagaccagcctggacaacatagcaagacctgggtggcatacacctgtggtccctactacttggtaggatgaggtgggaggattgatcacttgatcccaggagtttcaggctgcagtgagccatgatcacaccactgcacttcagcctgggtgacagagccagaccatgtcacaaaaagttagaaaaaaaaaagagagagggagagagactatacacaggcaccaccacatttggctaatttttaaatattctgtagagacaaggtcttgctaggttgcccaggctagtctaaaactcctggcatcaggctgggcatggtggctcatgcttgtaatcgcagcactttgggaagctaaggcaggcaaatcacctgaagtctggagttcragaccagcctggccaacacggtgaaactctgactctatcaaaaatacaaaaatcagctgggcagtagt

SEQ ID NO: 437734 - DNA, 582 bp, Homo sapiens
gtagaatatctgaagccaaggcaaataacagaacagatcattataaacaacaagcagaaaacatcaccgtattccgactctgagtctgttatcactggcgtcacgctctcacccggctgagccttgtcttcgccctccaaggagttcccagttttccttaggccttttcatgttctatttctcatttgcctccttccgatttgtttgtccctttagccatccrggcctgcaccgtcaggcaccatcactgtaagtagcgcagcactgcagtgcttccccgcttttcctcccttaactttgtatgagtttcctactgctttgtaacaaatagctccaacactgagcagcttaaaacagaataacacatatttgttatctcatggttcctgtgggccagggatccagtgaagctcatctgggtgcctccggcctgaggcctctcctgaggctctggttcagctgttggcaccttgttccctcctcgcaggtgcctcaccacgtggccattgcctcctgccagggcaagtgatcctccagagagtggaaggaaatcgccctagagaggagtggggtattttgtga

SEQ ID NO: 437735 - DNA, 578 bp, Homo sapiens
gaactttctgctgggtgtttagctaatggctttactttttttcctagaaaccacaacatggaagaagaaactgtctctgcaatattctcctggggatgagaggaccccgtcccacatcagccccctccttcctatcccttcaccttcgcwctccccacacatccatccttgtcttcctgcggtggaccactctccaccccagggacctagagcccagtctccaacccagacagagggagggggacgggaaaaggggagtaagacaccaaggatcgagagagggaagtgggtcaaaggaacaagacgagaagagtgaggagagacatcacaccagaaggcggatgcccccccaaaaatccaaacaattacaccctgatggaggcagacagtaggaggaagaacaagtgctgatgaacaagacaaatggggacgtgaaccagcaacgggagcaggagctgcagggaagagagaggagacgacaggacaagaccctcactcacctgtgggtgggtccctgcaggggaacaaactcagcagagtcacctgcggaggagttcctagcgtcagagccatgcact

SEQ ID NO: 437736 - DNA, 578 bp, Homo sapiens
gaactttctgctgggtgtttagctaatggctttactttttttcctagaaaccacaacatggaagaagaaactgtctctgcaatattctcctggggatgagaggaccccgtcccacatcagccccctccttcctatcccttcaccttcgctctccccacacatccatccttgtcttcctgcggtggaccactctccaccccagggacctagagcccagtctccaacccagacagagggagggggacrggaaaaggggagtaagacaccaaggatcgagagagggaagtgggtcaaaggaacaagacgagaagagtgaggagagacatcacaccagaaggcggatgcccccccaaaaatccaaacaattacaccctgatggaggcagacagtaggaggaagaacaagtgctgatgaacaagacaaatggggacgtgaaccagcaacgggagcaggagctgcagggaagagagaggagacgacaggacaagaccctcactcacctgtgggtgggtccctgcaggggaacaaactcagcagagtcacctgcggaggagttcctagcgtcagagccatgcact

SEQ ID NO: 437737 - DNA, 578 bp, Homo sapiens
gaactttctgctgggtgtttagctaatggctttactttttttcctagaaaccacaacatggaagaagaaactgtctctgcaatattctcctggggatgagaggaccccgtcccacatcagccccctccttcctatcccttcaccttcgctctccccacacatccatccttgtcttcctgcggtggaccactctccaccccagggacctagagcccagtctccaacccagacagagggagggggacgggaaaaggggagtaagacaccaaggatcgagagagggaagtgggtcaaaggaacaagacgagaagagtgaggagagacatcacaccagaaggcggatgcccccccaaaaatccaaacaattacaccctgatggaggcagacagtaggaggaagaacaagtgctgatgaacaagacaaatggggacgtgaaccagcaacgggagcaggagctgcagggaagagagaggrgacgacaggacaagaccctcactcacctgtgggtgggtccctgcaggggaacaaactcagcagagtcacctgcggaggagttcctagcgtcagagccatgcact

SEQ ID NO: 437738 - DNA, 569 bp, Homo sapiens
agaggcaactgggtgtcaggagacatgatggagaggaaagcatcatcatggtcattctctgtctcactgtccagcagggactcccctgaggggcccagggctcctcctccatggtgggaggtgagcttttaccaggttccaccacccccaaagtgtgtggggttgcgggccctgggctttcagggcaggtggctccagggggccgcccagggtcaacactccctgtcccacctggtggacgctcatgagcaacrgctgccaacttggcaggttgttttctctggttggaggccactgagtgactggcaggttgctgggcctcgtgtggctgcagggaggggtcaggaaggggatggagtaccaggagaacacggccgcagagtgaccttccacattcctccacacgaacatgctgacgccacgggaggcctcactgaacgcaggcctgggggccgagcacttggtcggggcagggggttcctggcaggggctcacacctcctcgccccctcctcagccaaggtggcttgggcccagagaaggggaggttggagaggagcagaaggccag

SEQ ID NO: 437739 - DNA, 569 bp, Homo sapiens
agaggcaactgggtgtcaggagacatgatggagaggaaagcatcatcatggtcattctctgtctcactgtccagcagggactcccctgaggggcccagggctcctcctccatggtgggaggtgagcttttaccaggttccaccacccccaaagtgtgtggggttgcgggccctgggctttcagggcaggtggctccagggggccgcccagggtcaacactccctgtcccacctggtggacgctcatgagcaacggctgccaacttggcaggttgttttctctggttggaggccactgagtgactggcaggttgctgggcctcgtgtggctgcagggaggggtcaggaaggggatggagtaccaggagaacacggccgcagagtgaccttccacattcctccacacgaacatgctgacgccacgggaggcctcactgaaygcaggcctgggggccgagcacttggtcggggcagggggttcctggcaggggctcacacctcctcgccccctcctcagccaaggtggcttgggcccagagaaggggaggttggagaggagcagaaggccag

SEQ ID NO: 437740 - DNA, 569 bp, Homo sapiens
agaggcaactgggtgtcaggagacatgatggagaggaaagcatcatcatggtcattctctgtctcactgtccagcagggactcccctgaggggcccagggctcctcctccatggtgggaggtgagcttttaccaggttccaccacccccaaagtgtgtggggttgcgggccctgggctttcagggcaggtggctccagggggccgcccagggtcaacactccctgtcccacctggtggacgctcatgagcaacggctgccaacttggcaggttgttttctctggttggaggccactgagtgactggcaggttgctgggcctcgtgtggctgcagggaggggtcaggaaggggatggagtaccaggagaacacggccgcagagtgaccttccacattcctccacacgaacatgctgacgccacgggaggcctcactgaacgcaggcctgggggccgagcacttggtcsgggcagggggttcctggcaggggctcacacctcctcgccccctcctcagccaaggtggcttgggcccagagaaggggaggttggagaggagcagaaggccag

SEQ ID NO: 437741 - DNA, 569 bp, Homo sapiens
agaggcaactgggtgtcaggagacatgatggagaggaaagcatcatcatggtcattctctgtctcactgtccagcagggactcccctgaggggcccagggctcctcctccatggtgggaggtgagcttttaccaggttccaccacccccaaagtgtgtggggttgcgggccctgggctttcagggcaggtggctccagggggccgcccagggtcaacactccctgtcccacctggtggacgctcatgagcaacggctgccaacttggcaggttgttttctctggttggaggccactgagtgactggcaggttgctgggcctcgtgtggctgcagggaggggtcaggaaggggatggagtaccaggagaacacggccgcagagtgaccttccacattcctccacacgaacatgctgacgccacgggaggcctcactgaacgcaggcctgggggccgagcacttggtcggggcagggggttcctggcaggggctcacamctcctcgccccctcctcagccaaggtggcttgggcccagagaaggggaggttggagaggagcagaaggccag

SEQ ID NO: 437742 - DNA, 307 bp, Homo sapiens
ctttaacttttgactatttgattatattgtgacttggtgagtatctatttggtttgaacctctttaggaatctttaagcttcatggatttagatgtctaaatctttcccatgatttaggcagttgtcagccattctttaaataagctttattctcctttctctactttccttctcaaactcccataacctgacaatggtttgcttaatggtgtcttrttggctttcttttctctgtctcttttttttttctttttgagacagagtcatgctctgtcacccaggctggagtgtaatgtgtggtctcgg

SEQ ID NO: 437743 - DNA, 579 bp, Homo sapiens
tcaagaccgggatggattcgctcgggagaggccaggagcctgccagcacgttcgggcactagcgctcccggggctcctcggactcgtggaccccgaaacgcctgccccacaggaagatcaccccactgtagaagtcgggtcacggggaccagtggcgagctacctgacggcttaactacagataccctcccgacgaaagccgtggactcccagggtgcgtgcgtctgcttgtgtgtgggggtgttggcaggcggtccccataatcatcgaagmgacaggtggatgaacctcaggcctcgcactcgggggctctcagagtctgggcgttacagccgctcccgtacactcacgggtcacctggctgaatcaggtgggatctgggtgaggtgccgggaggtctcccaggctggcgctcctgtccagctgctgggggaggcgtgggtgcgaggcttgggacaagggagagctatgccgggtggggaggacccttggggcgggtccgttcacctgaaatgttcactgctggaagagccgaaagccagccacggcacccaggggagtccagcgtggagaggcaga

SEQ ID NO: 437744 - DNA, 606 bp, Homo sapiens
ggcaggtgggggctcacgcctgtaatcccaacactttgggagggcgaggcaggcaaatcgcctgagcccaggagtttgagaccacyctgggcaacatggtgaaaccctgtctctactaaaacacaaaaaattagctaggcgtggtggctgcgcacctgtagtaccagctactcgggagactgaggcaccagaatcccttgagcccgggaggcagaggttgcagtgagccgagactgcgccactgcactccagcttgggcaagagtgagactgtcgccaaaaaaaaaaaaaaaaaaaaaaaaaaaagcaaagtttaagagggtggaagagatccttggagatggctcactttacctggacagtgtatttgcacacacccagggtattccatagcttgatggttttatctcgagatccagagacaatctgccggttgtcagaggagaaggccacactcagcacatccttggtatggcccacaaatcgcctcgtggtggtgcccctgagagggaggagtttgtcattctcagacttagcaaacactctcattcaacggtcagactcatttcctgggctttgtctctgtctcattgcatcactcatacaa

SEQ ID NO: 437745 - DNA, 438 bp, Homo sapiens
ggcactaactcagggaaggcttccctaactgcctcccttctccaaccaaattaggaacaattatatggccacatagtatcgaatcaagtttataattttaaaataattgggagattttgttgtttaacacttgttttcactataagactgtaattacatgcaagtaagaaccatgcctgtttgttcactcctgccacagtcagaatagtgcctggaatatgcagtaagggctgaacaarcactaaataaatgaacaagtgaataaatggatattgtctcatttttagaacagagtactgaatggatcatgaacactatctggtatgtcacgtaggtaatttacaagggctacactttcagctcagatttaccttttcctggatacaggtcttgataggtctcttgatgtcatttcacttcagattcttctttagaaaa

SEQ ID NO: 437746 - DNA, 438 bp, Homo sapiens
ggcactaactcagggaaggcttccctaactgcctcccttctccaaccaaattaggaacaattatatggccacatagtatcgaatcaagtttataattttaaaataattgggagattttgttgtttaacacttgttttcactataagactgtaattacatgcaagtaagaaccatgcctgtttgttcactcctgccacagtcagaatagtgcctggaatatgcagtaagggctgaacaagcactaaataaatgaacaagtgaataaatggatattgtctcrtttttagaacagagtactgaatggatcatgaacactatctggtatgtcacgtaggtaatttacaagggctacactttcagctcagatttaccttttcctggatacaggtcttgataggtctcttgatgtcatttcacttcagattcttctttagaaaa

SEQ ID NO: 437747 - DNA, 317 bp, Homo sapiens
atagcatttgctgtcttgtccaaattgttactargaatcaagagagatatctgacatgaaatgacattggaaaacattaaacaccattgaaataatgctagccaatatggttattattagaaaccaattacattttcaacttaaaaatagtaatacttattgcagactcaaatgtgcttattctaaaacaagtaaatgtttgcctatggtctgagattctaatccacggagttcattctaatccacattcaacactatcatgtaccagtgggcctcataacccacctagccctgtgatttttcaggttcacttttct

SEQ ID NO: 437748 - DNA, 317 bp, Homo sapiens
atagcatttgctgtcttgtccaaattgttactaagaatcaagagagatatctgacrtgaaatgacattggaaaacattaaacaccattgaaataatgctagccaatatggttattattagaaaccaattacattttcaacttaaaaatagtaatacttattgcagactcaaatgtgcttattctaaaacaagtaaatgtttgcctatggtctgagattctaatccacggagttcattctaatccacattcaacactatcatgtaccagtgggcctcataacccacctagccctgtgatttttcaggttcacttttct

SEQ ID NO: 437749 - DNA, 513 bp, Homo sapiens
tgtcatttcacttcagattcttctttagaaaacttggacaatagcatttgctgtcttgtccaaattgttactaagaatcaagagagatatctgacatgaaatgacattggaaaacattaaacaccattgaaataatgctagccaatatggttattattagaaaccaattacattttcaacttaaaaatagtaatacttattgcagactcaaatgtgcttattctaaaacaagtaaatgtttgcctatggtctgagattctaatccacggagttcattctaatccacattcaacactatcatgtaccagtgggcctcataacccacctagccctgtgatttttcaggttcacttttctaaacttgtgaattaaatatttattttcttagttcagaagaggaaaaaaactcwtgtaattgttgcccatttcaggagaaatcttgcatatgaaaacaagagataaatatacacaactgagggctgtggtttaaacaaaatcttgagaatgtttttt

SEQ ID NO: 437750 - DNA, 581 bp, Homo sapiens
tgacattggaaaacattaaacaccattgaaataatgctagccaatatggttattattagaaaccaattacattttcaacttaaaaatagtaatacttattgcagactcaaatgtgcttattctaaaacaagtaaatgtttgcctatggtctgagattctaatccacggagttcattctaatccacattcaacactatcatgtaccagtgggcctcataacccacctagccctgtgatttttcaggttcacttttctaaacttgtgaattaaatatttattttcttagttcagaagaggaaaaaaactcttgwaattgttgcccatttcaggagaaatcttgcatatgaaaacaagagataaatatacacaactgagggctgtggtttaaacaaaatcttgagaatgttttttgaccttatacatttgtgctttagtataacaaaatgatatagacaaaggtaacttttaatagaaccagtcactaaattaaaaaaatgacaaattcttctgcttagctaagcaacagagaaggtaaaatactaattcaattcatcaatttaagcaatactcattaagagcc

SEQ ID NO: 437751 - DNA, 522 bp, Homo sapiens
aacactatcatgtaccagtgggcctcataacccacctagccctgtgatttttcaggttcacttttctaaacttgtgaattaaatatttattttcttagttcagaagaggaaaaaaactcttgtaattgttgcccatttcaggagaaatcttgcatatgaaaacaagagataaatatacacaactgagggctgtggtttaaacaaaatcttgagaatgttttttgaccttatacatttgtgctttagtataacaaaatgatatagacaaaggtaacttttaatagaaccagtcactamattaaaaaaatgacaaattcttctgcttagctaagcaacagagaaggtaaaatactaattcaattcatcaatttaagcaatactcattaagagccaagtatgtgcttactgaataagctgctaaggtttggtggttacagagtgtgcggtgaaatgatgtctacatcacagtccaacattcacagagtttaaaagcctaccaagaatcaagacagacacaaatac

SEQ ID NO: 437752 - DNA, 522 bp, Homo sapiens
aacactatcatgtaccagtgggcctcataacccacctagccctgtgatttttcaggttcacttttctaaacttgtgaattaaatatttattttcttagttcagaagaggaaaaaaactcttgtaattgttgcccatttcaggagaaatcttgcatatgaaaacaagagataaatatacacaactgagggctgtggtttaaacaaaatcttgagaatgttttttgaccttatacatttgtgctttagtataacaaaatgatatagacaaaggtaacttttaatagaaccagtcactaaattaaaaaaatgacaaattcttctgcttagctaagcaacagagaaggtaaaatactaattcaattcatcaatttaagcaatactcattaagagccaagtatgtgctyactgaataagctgctaaggtttggtggttacagagtgtgcggtgaaatgatgtctacatcacagtccaacattcacagagtttaaaagcctaccaagaatcaagacagacacaaatac

SEQ ID NO: 437753 - DNA, 522 bp, Homo sapiens
aacactatcatgtaccagtgggcctcataacccacctagccctgtgatttttcaggttcacttttctaaacttgtgaattaaatatttattttcttagttcagaagaggaaaaaaactcttgtaattgttgcccatttcaggagaaatcttgcatatgaaaacaagagataaatatacacaactgagggctgtggtttaaacaaaatcttgagaatgttttttgaccttatacatttgtgctttagtataacaaaatgatatagacaaaggtaacttttaatagaaccagtcactaaattaaaaaaatgacaaattcttctgcttagctaagcaacagagaaggtaaaatactaattcaattcatcaatttaagcaatactcattaagagccaagtatgtgcttactgaataagctgctaaggtttggtgrttacagagtgtgcggtgaaatgatgtctacatcacagtccaacattcacagagtttaaaagcctaccaagaatcaagacagacacaaatac

SEQ ID NO: 437754 - DNA, 529 bp, Homo sapiens
taaaatactaattcaattcatcaatttaagcaatactcattaagagccaagtatgtgcttactgaataagctgctaaggtttggtggttacagagtgtgcggtgaaatgatgtctacatcacagtccaacattcacagagtttaaaagcctaccaagaatcaagacagacacaaatacctaacatagacgtctgtatatgataagagagccagagtacaatttargagaagaaattgtatggaaggaaggttcatttccattagaccagaaaagacagcacatttgaaggcctgaataagaaatattctggataagatattgtggctgctaccagaatggctcttgatgatctctacctcttggtatttatacccttatataatctctttcctatagtgtaagctggtcccaggtacttgtttctattgaatagaatagaacaaaagaaatgagatgccacttctgagattagattataagatactgtgaatttcttcttgtgccctctccctctctctctttctcttg

SEQ ID NO: 437755 - DNA, 529 bp, Homo sapiens
taaaatactaattcaattcatcaatttaagcaatactcattaagagccaagtatgtgcttactgaataagctgctaaggtttggtggttacagagtgtgcggtgaaatgatgtctacatcacagtccaacattcacagagtttaaaagcctaccaagaatcaagacagacacaaatacctaacatagacgtctgtatatgataagagagccagagtacaatttaggagaagaaattgtatggaaggaaggttcatttccattagaccagaaaagacagcacatttgaaggcctgaataagaaatattctggataagataytgtggctgctaccagaatggctcttgatgatctctacctcttggtatttatacccttatataatctctttcctatagtgtaagctggtcccaggtacttgtttctattgaatagaatagaacaaaagaaatgagatgccacttctgagattagattataagatactgtgaatttcttcttgtgccctctccctctctctctttctcttg

SEQ ID NO: 437756 - DNA, 538 bp, Homo sapiens
gaaaagacagcacatttgaaggcctgaataagaaatattctggataagatattgtggctgctaccagaatggctcttgatgatctctacctcttggtatttatacccttatataatctctttcctatagtgtaagctggtcccaggtacttgtttctattgaatagaatagaacaaaagaaatgagatgccacttctgagattagattataagatactgtgaatttcwtcttgtgccctctccctctctctctttctcttgccctctcatttgaatgaagccaaccggcatgctgtcagtggcccagtgtaagtcctgttacaagaaattgatgattacctgtagccaaccctaagtgaagaactgaggtcctcagtcctacaaatggagagaaactgaatctagctaagaaccatgtgagtgagctgggaagaagatccaccctcagttgaaatttaagatgacatattgagcagacatactgagacacactgaaagtaagagagcaggaggaaacaaaaccagggtcatacaaaga

SEQ ID NO: 437757 - DNA, 538 bp, Homo sapiens
gaaaagacagcacatttgaaggcctgaataagaaatattctggataagatattgtggctgctaccagaatggctcttgatgatctctacctcttggtatttatacccttatataatctctttcctatagtgtaagctggtcccaggtacttgtttctattgaatagaatagaacaaaagaaatgagatgccacttctgagattagattataagatactgtgaatttcttcttgtgccctctccctctctctctttctcttgccctctcatttgaatgaagccaacyggcatgctgtcagtggcccagtgtaagtcctgttacaagaaattgatgattacctgtagccaaccctaagtgaagaactgaggtcctcagtcctacaaatggagagaaactgaatctagctaagaaccatgtgagtgagctgggaagaagatccaccctcagttgaaatttaagatgacatattgagcagacatactgagacacactgaaagtaagagagcaggaggaaacaaaaccagggtcatacaaaga

SEQ ID NO: 437758 - DNA, 251 bp, Homo sapiens
catgtgagtgagctgggaagaagatccaccctcagttgaaatttaagatgacatattgagcagacatactgagacacactgaaagtaagagagcaggaggaaacaaaaccagggtcatacaaagaacacaactgattttgagattctcacataagtattacaccttcagtgagcacrtgtactagaaatttaaaaaataaataaaataaaccttcaaagtgagctagcaaataaatttccctatggtctca

SEQ ID NO: 437759 - DNA, 251 bp, Homo sapiens
catgtgagtgagctgggaagaagatccaccctcagttgaaatttaagatgacatattgagcagacatactgagacacactgaaagtaagagagcaggaggaaacaaaaccagggtcatacaaagaacacaactgattttgagattctcacataagtattacaccttcagtgagcacgtgtactagaaatttaaaaaataaatamaataaaccttcaaagtgagctagcaaataaatttccctatggtctca

SEQ ID NO: 437760 - DNA, 251 bp, Homo sapiens
catgtgagtgagctgggaagaagatccaccctcagttgaaatttaagatgacatattgagcagacatactgagacacactgaaagtaagagagcaggaggaaacaaaaccagggtcatacaaagaacacaactgattttgagattctcacataagtattacaccttcagtgagcacgtgtactagaaatttaaaaaataaataaaataaaccttcaaagwgagctagcaaataaatttccctatggtctca

SEQ ID NO: 437761 - DNA, 462 bp, Homo sapiens
atagccagaatccagctctcaaacaggtttcagcctgaactcacacaatctgtgtggcttccaaatttgcaagctgagaatttaattcaaagtggtctcaggttgayagcagtccaaaatgctaggtaggaaaaaaaatcctctctggacaaataaatcatcaaagcaagctcataagagcaggtttcaaaggtcatgagcttctaacacacacacaaaaatcacacacacaaaatgggggtagcagcaacatgggtagcgtattcaaacttgaaaagactttaaatatttgtattattagatgtagattatgaaacacatattttaatgtggttaatttttttaaggaatcaaaactatgagtaaagaccaagaaaattgtgctggatggccacttccaccatggctcccctcctatttaagtctgggtactgtgtcacccgaagtcttcaggcacattgt

SEQ ID NO: 437762 - DNA, 536 bp, Homo sapiens
ttccctgtggagtttatagccagaatccagctctcaaacaggtttcagcctgaactcacacaatctgtgtggcttccaaatttgcaagctgagaatttaattcaaagtggtctcaggttgacagcagtccaaaatgctaggtaggaaaaaaaatcctctctggacaaataaatcatcaaagcaagctcataagagcaggtttcaaaggtcatgagcttctaacacacacacaaaaatcacacacacaaaatgsgggtagcagcaacatgggtagcgtattcaaacttgaaaagactttaaatatttgtattattagatgtagattatgaaacacatattttaatgtggttaatttttttaaggaatcaaaactatgagtaaagaccaagaaaattgtgctggatggccacttccaccatggctcccctcctatttaagtctgggtactgtgtcacccgaagtcttcaggcacattgttccaggtttgggtttgcctatgaaagaaactcatgagagctggaaatgaggagtgaaga

SEQ ID NO: 437763 - DNA, 635 bp, Homo sapiens
attttaatgtggttaatttttttaaggaatcaaaactatgagtaaagaccaagaaaattgtgctggatggccacttccaccatggctcccctcctatttaagtctgggtactgtgtcacccgaagtcttcaggcacattgttccaggtttgggtttgcctatgaaagaaactcatgagagctggaartgaggagtgaagaggaggtcttcacataaagcaggcttaaggattagacatagcaggtttgacagatgtgatggcttgcagaatcctttatgagctcccactgtccatctggataagatttacagacctttcagaaattcctataagcttgggttctgtgcccacactctagactgtcaggctaagatctctgatataaaacagacctcttctgatttttgtctagctgcttttctaatatctattcaccaagctcttccaataatagcataaggccctaattaatattaaacttttatcattataatacataggatgtcttctgttttcctgatcaaattctgactactattaaaatataaagaattgtccagaaatatataaaaaaagaatcacacattgatcttctttaaatgaaaatataacaattgtatggactaggatgatt

SEQ ID NO: 437764 - DNA, 635 bp, Homo sapiens
attttaatgtggttaatttttttaaggaatcaaaactatgagtaaagaccaagaaaattgtgctggatggccacttccaccatggctcccctcctatttaagtctgggtactgtgtcacccgaagtcttcaggcacattgttccaggtttgggtttgcctatgaaagaaactcatgagagctggaaatgaggagtgaagaggaggtcttcamataaagcaggcttaaggattagacatagcaggtttgacagatgtgatggcttgcagaatcctttatgagctcccactgtccatctggataagatttacagacctttcagaaattcctataagcttgggttctgtgcccacactctagactgtcaggctaagatctctgatataaaacagacctcttctgatttttgtctagctgcttttctaatatctattcaccaagctcttccaataatagcataaggccctaattaatattaaacttttatcattataatacataggatgtcttctgttttcctgatcaaattctgactactattaaaatataaagaattgtccagaaatatataaaaaaagaatcacacattgatcttctttaaatgaaaatataacaattgtatggactaggatgatt

SEQ ID NO: 437765 - DNA, 635 bp, Homo sapiens
attttaatgtggttaatttttttaaggaatcaaaactatgagtaaagaccaagaaaattgtgctggatggccacttccaccatggctcccctcctatttaagtctgggtactgtgtcacccgaagtcttcaggcacattgttccaggtttgggtttgcctatgaaagaaactcatgagagctggaaatgaggagtgaagaggaggtcttcacataaagcaggcttaaggattagacatagcaggtttgacagatgtgatggcttgcagaatyctttatgagctcccactgtccatctggataagatttacagacctttcagaaattcctataagcttgggttctgtgcccacactctagactgtcaggctaagatctctgatataaaacagacctcttctgatttttgtctagctgcttttctaatatctattcaccaagctcttccaataatagcataaggccctaattaatattaaacttttatcattataatacataggatgtcttctgttttcctgatcaaattctgactactattaaaatataaagaattgtccagaaatatataaaaaaagaatcacacattgatcttctttaaatgaaaatataacaattgtatggactaggatgatt

SEQ ID NO: 437766 - DNA, 635 bp, Homo sapiens
attttaatgtggttaatttttttaaggaatcaaaactatgagtaaagaccaagaaaattgtgctggatggccacttccaccatggctcccctcctatttaagtctgggtactgtgtcacccgaagtcttcaggcacattgttccaggtttgggtttgcctatgaaagaaactcatgagagctggaaatgaggagtgaagaggaggtcttcacataaagcaggcttaaggattagacatagcaggtttgacagatgtgatggcttgcagaatcctttatgagctcccactgtccatctggataagatttacagacctttcagaaattcctataagcttgggttctgtgcccacactctagactstcaggctaagatctctgatataaaacagacctcttctgatttttgtctagctgcttttctaatatctattcaccaagctcttccaataatagcataaggccctaattaatattaaacttttatcattataatacataggatgtcttctgttttcctgatcaaattctgactactattaaaatataaagaattgtccagaaatatataaaaaaagaatcacacattgatcttctttaaatgaaaatataacaattgtatggactaggatgatt

SEQ ID NO: 437767 - DNA, 491 bp, Homo sapiens
taggatgtcttctgttttcctgatcaaattctgactactattaaaatataaagaattgtccagaaatatataaaaaaagaatcacacattgatcttctttaaatgaaaatataacaattgtatggactaggatgattacagttgttcagttctgactgttatttgaagaaaaaagcagtaagaagcctcagcaacttaacagaaggagctgccatttactaggagaaaagattgtggatgagagtgtagcaaaggtcagaattctgtgaagcttgagatgtttattataatgaattatcttttatactcactacaatttcctaacaattttggggtttatatttttgaaagagatatacctttaattttctttctttgtactattgttaggtaactttratgtgcagattatactacagtgaaagttgccaatgacaaggcaaagtcacttacatcagacccaaagcaaagtggagccgggtcatgaaaaa

SEQ ID NO: 437768 - DNA, 567 bp, Homo sapiens
atagcacaaatatctcagattataatmcttgtttatttccaaataaatttatttctttggagatccactttttctgttattatacattgacattgttattatgaaattggttgggtgatgtgtcttattttcttgtctccagaagaatttctgtaacagtgcaattaaacgttctttgcatgtttgctagaactcacctgtaaaattgtctgagcaaccaaagcctggtttttgtgtttagtttttcttttgtgattggggaggggggtttatcgtactgattcaaggtgtgaaggtaacatcattttgattttatacatcttcttcagtccatttaagcatgttacatagcgttgtttgttcttttcatgatattctttacagtagtctcctaaatgttccctctgcttctgccatgagcccctacaatctatttcaactcagaagctatagagtttgtttaaaacatgtaacatattatgccacctttcttactgtaaaacatcccatggtttctcgtagtatttatagtaaaagtgaaatttttatgatggcttgagaaacttt

SEQ ID NO: 437769 - DNA, 567 bp, Homo sapiens
atagcacaaatatctcagattataatccttgtttatttccaaataaatttatttcttyggagatccactttttctgttattatacattgacattgttattatgaaattggttgggtgatgtgtcttattttcttgtctccagaagaatttctgtaacagtgcaattaaacgttctttgcatgtttgctagaactcacctgtaaaattgtctgagcaaccaaagcctggtttttgtgtttagtttttcttttgtgattggggaggggggtttatcgtactgattcaaggtgtgaaggtaacatcattttgattttatacatcttcttcagtccatttaagcatgttacatagcgttgtttgttcttttcatgatattctttacagtagtctcctaaatgttccctctgcttctgccatgagcccctacaatctatttcaactcagaagctatagagtttgtttaaaacatgtaacatattatgccacctttcttactgtaaaacatcccatggtttctcgtagtatttatagtaaaagtgaaatttttatgatggcttgagaaacttt

SEQ ID NO: 437770 - DNA, 567 bp, Homo sapiens
atagcacaaatatctcagattataatccttgtttatttccaaataaatttatttctttggagatccactttttctgttattatacattgacattgttattatgaaattggttgggtgatgtgtcktattttcttgtctccagaagaatttctgtaacagtgcaattaaacgttctttgcatgtttgctagaactcacctgtaaaattgtctgagcaaccaaagcctggtttttgtgtttagtttttcttttgtgattggggaggggggtttatcgtactgattcaaggtgtgaaggtaacatcattttgattttatacatcttcttcagtccatttaagcatgttacatagcgttgtttgttcttttcatgatattctttacagtagtctcctaaatgttccctctgcttctgccatgagcccctacaatctatttcaactcagaagctatagagtttgtttaaaacatgtaacatattatgccacctttcttactgtaaaacatcccatggtttctcgtagtatttatagtaaaagtgaaatttttatgatggcttgagaaacttt

SEQ ID NO: 437771 - DNA, 562 bp, Homo sapiens
ataatccttgtttatttccaaataaatttatttctttggagatccactttttctgttattatacattgacattgttattatgaaattggttgggtgatgtgtcttattttcttgtctccagaagaatttctgtaacagtgcaattaaacgttctttgcatrtttgctagaactcacctgtaaaattgtctgagcaaccaaagcctggtttttgtgtttagtttttcttttgtgattggggaggggggtttatcgtactgattcaaggtgtgaaggtaacatcattttgattttatacatcttcttcagtccatttaagcatgttacatagcgttgtttgttcttttcatgatattctttacagtagtctcctaaatgttccctctgcttctgccatgagcccctacaatctatttcaactcagaagctatagagtttgtttaaaacatgtaacatattatgccacctttcttactgtaaaacatcccatggtttctcgtagtatttatagtaaaagtgaaatttttatgatggcttgagaaactttttcccattagatgccc

SEQ ID NO: 437772 - DNA, 567 bp, Homo sapiens
atagcacaaatatctcagattataatccttgtttatttccaaataaatttatttctttggagatccactttttctgttattatacattgacattgttattatgaaattggttgggtgatgtgtcttattttcttgtctccagaagaatttctgtaacagtgcaattaaacgttctttgcatgtttgctagaactcacctgtaaaattgtctgagcaaccaaagcctggtttttgtgtttagtttttcttttgtgattggggaggggggtttatcrtactgattcaaggtgtgaaggtaacatcattttgattttatacatcttcttcagtccatttaagcatgttacatagcgttgtttgttcttttcatgatattctttacagtagtctcctaaatgttccctctgcttctgccatgagcccctacaatctatttcaactcagaagctatagagtttgtttaaaacatgtaacatattatgccacctttcttactgtaaaacatcccatggtttctcgtagtatttatagtaaaagtgaaatttttatgatggcttgagaaacttt

SEQ ID NO: 437773 - DNA, 513 bp, Homo sapiens
ccattgttactgcatctgcctggaaccttttctcccatataaacatagagattgctcttgcctgtccttcaagtctattcttaaatgtcccattctctgtgaagctttcctgcccaccctatttaaattacagacttcactcccaattccccatctactttaagagtcttcmtttatcattccttgacaaactgtaaatatacatgttcacttttttatcgtctgtctccaaatactggaatgttaagttctgtaatgtcagatatttctgtttggttcactggtgtattcttaaagcatgttacatactaggtatactcaatgaatatttgttgaataaatatcacattgggcttattccagaaattcaagcttgtttcaatagttagagcaatctacaaatgtaattcattacattaactaattaaaggagctaaatcacatcaccaccacaataatgcagaaaaccacatttgatacaactcaatattcatgtctgcctaacaaacatct

SEQ ID NO: 437774 - DNA, 515 bp, Homo sapiens
cattgactcttttaatatagttccactttaccccttwaacccactttcctctcccaccttcgtcatccaactttatttgattttgttatttttaatttttctaataatgacctttatcttttaaaataatatttaatcacccataacataatttgttgattctctcccactgtgaaagttgaatggaccagaatatatttctactatctttctcttcttatttttgttatgaatataattagtctttatacagttatggtttgtaacatttgcattctgttctttaaccgcaaaccccagaacattttgatattaggcttcagaatgctcacttgtatcatgttatctctattcatttttagtggatagttttcttttttaagtttttctgatagagatggggtcttgctatgttgcccaggctggtcttatcttgaactcctgggctcaagtgattctcctgccttggcctttcaaagtgttgggactgtaggtgttagcccctgcgcctggcc

SEQ ID NO: 437775 - DNA, 515 bp, Homo sapiens
cattgactcttttaatatagttccactttaccccttaaacccactttcctctcccaccktcgtcatccaactttatttgattttgttatttttaatttttctaataatgacctttatcttttaaaataatatttaatcacccataacataatttgttgattctctcccactgtgaaagttgaatggaccagaatatatttctactatctttctcttcttatttttgttatgaatataattagtctttatacagttatggtttgtaacatttgcattctgttctttaaccgcaaaccccagaacattttgatattaggcttcagaatgctcacttgtatcatgttatctctattcatttttagtggatagttttcttttttaagtttttctgatagagatggggtcttgctatgttgcccaggctggtcttatcttgaactcctgggctcaagtgattctcctgccttggcctttcaaagtgttgggactgtaggtgttagcccctgcgcctggcc

SEQ ID NO: 437776 - DNA, 515 bp, Homo sapiens
cattgactcttttaatatagttccactttaccccttaaacccactttcctctcccaccttcgtcatycaactttatttgattttgttatttttaatttttctaataatgacctttatcttttaaaataatatttaatcacccataacataatttgttgattctctcccactgtgaaagttgaatggaccagaatatatttctactatctttctcttcttatttttgttatgaatataattagtctttatacagttatggtttgtaacatttgcattctgttctttaaccgcaaaccccagaacattttgatattaggcttcagaatgctcacttgtatcatgttatctctattcatttttagtggatagttttcttttttaagtttttctgatagagatggggtcttgctatgttgcccaggctggtcttatcttgaactcctgggctcaagtgattctcctgccttggcctttcaaagtgttgggactgtaggtgttagcccctgcgcctggcc

SEQ ID NO: 437777 - DNA, 475 bp, Homo sapiens
tgcgcctggcctctaatagttgtcttcattaaagcctcatggggactctatttttttttttttttgtgggttgtttattttgtgtttgtgaagtccggtaaattcagttgcatctgccttgatgtggtcatactataacayattttttctggataaagataagccctttaaccattagattcaatgttttcttcatttcagaaaagttttcttttatctttgaattttttaaccagatattgtgagctctttcacactaatttctcatttgttggacctgactttaatgttacatttcaccttcttgtgttttctatttcgttttgctcaggatatatttaagcctgtcatttatattcttatctgtgtttttagcagcattattctctccacttcccactttttttcctgcttttattgatcttcatttctttcatggttgtctttactcattacatcctgaattttgccagat

SEQ ID NO: 437778 - DNA, 613 bp, Homo sapiens
aagtaaagatcacaggttttgatcctcagtcctcagtatacacacctcttttagggatttctgggcttcttgactagctcaagctttcagaggcatgcactttatcttggtgtcagtctgactgggttaaacttttgatgtccagaaagttttcttcatgtgttgttgtgtggaatgtaaatatttctagcttttgtaaggttgtggctcatatttatatttctcctggtttgaaagaagagagagaaagaagtatgtcaaattgagactcttagattggaaatctgaatttatttacacgattgagattgatctagagttttattttttctgctgtaactgaaatttggattcaagattatatgtgttttgtgaatatgtttggtaacattgtgacttttctataatttagggaagtttgatgtaggagaaagagaaaaaatttttgagagaatcctaaattcatatatggcctaaccttttaatatctatgtaattttagataataaataatttgtttgagattatgtggctctaacaacacctgcttcacagtgtaattatgaggatttcatagaatttgtatagtgagcrttagttttgatgttacttt

SEQ ID NO: 437779 - DNA, 557 bp, Homo sapiens
caaaaattacatctctaggccaggcgcggtggctcacgcctgcaatcccagcactttgggaggccgaggcaggcagatcacctgaggtcaggagttcgagaccagcctggccaacatggtgaaacccccatctctactaaaaatacaaaaatcagctgggcttggtggtatatgcctttaatcccggcgactcggaaagctgaggtaggagaattgcttgaacccaggaggcggagtttgcagtgagccctgatcgcgccactgcactccagcctgggtgacagagccagactttgtctaaaaaaataarataaaataaaatctctaagtaatcaatgtattcaagaagaaatcacaaaataaattaaaaagcaaaatattttaactaatgacaatgcaaatatgacaacagaacttttaggacatgtctaatgtcttttgtgtatgagtggaaggggctcgggtacagtgtcggtatggtcaatatgtggctgtatggcatcgtggccatggctgggcttttagtgtccacatcaactgaatagtatatattgtcc

SEQ ID NO: 437780 - DNA, 594 bp, Homo sapiens
ttctttggcagacatttttacttgtcttggaagagtaggtgaagagctgtttttaggactctttgaaagggtacagtatgggtgwcagtcttggctaatggtaacatccagggagctggggtcagcgtgagctggaatcagttcaaattagcaaagcactggcactcagtagcaggaatacaagtgactgcaaagtgttaaacacatctggaaagggatactgacatcatcctcagaatctgtggggagttcacatagccagttaagacccattcttctttgaccctgtaaagattctttaaagaataaatacccttagtggttttctagccagcttgcctgctcatttatctttgaggacgacatgccttgtggagctccacaggccccagaggggtatggattctgcatttaaaagtgctgaagctgagagactgggtcttggtggaccccgagaggtctgtttctcctctactcattgttcctttttttcccaacagctggcattgctgtttaaatgggttgttctttgctgttttaagttgtttcatagtggtgtgtcaggatttgggttttcttaatactttccaagct

SEQ ID NO: 437781 - DNA, 594 bp, Homo sapiens
ttctttggcagacatttttacttgtcttggaagagtaggtgaagagctgtttttaggactctttgaaagggtacagtatgggtgacagtcttggctaatggtaacatccagggagctggggtcagcgtgagctggaatcagttcaaattagcaaagcactggcactcagtrgcaggaatacaagtgactgcaaagtgttaaacacatctggaaagggatactgacatcatcctcagaatctgtggggagttcacatagccagttaagacccattcttctttgaccctgtaaagattctttaaagaataaatacccttagtggttttctagccagcttgcctgctcatttatctttgaggacgacatgccttgtggagctccacaggccccagaggggtatggattctgcatttaaaagtgctgaagctgagagactgggtcttggtggaccccgagaggtctgtttctcctctactcattgttcctttttttcccaacagctggcattgctgtttaaatgggttgttctttgctgttttaagttgtttcatagtggtgtgtcaggatttgggttttcttaatactttccaagct

SEQ ID NO: 437782 - DNA, 594 bp, Homo sapiens
ttctttggcagacatttttacttgtcttggaagagtaggtgaagagctgtttttaggactctttgaaagggtacagtatgggtgacagtcttggctaatggtaacatccagggagctggggtcagcgtgagctggaatcagttcaaattagcaaagcactggcactcagtagcaggaatacaagtgactgcaaagtgttaaacacatctggaaagggatactgacatcatcctcagaatctgtggggagttcacatagccagttargacccattcttctttgaccctgtaaagattctttaaagaataaatacccttagtggttttctagccagcttgcctgctcatttatctttgaggacgacatgccttgtggagctccacaggccccagaggggtatggattctgcatttaaaagtgctgaagctgagagactgggtcttggtggaccccgagaggtctgtttctcctctactcattgttcctttttttcccaacagctggcattgctgtttaaatgggttgttctttgctgttttaagttgtttcatagtggtgtgtcaggatttgggttttcttaatactttccaagct

SEQ ID NO: 437783 - DNA, 594 bp, Homo sapiens
ttctttggcagacatttttacttgtcttggaagagtaggtgaagagctgtttttaggactctttgaaagggtacagtatgggtgacagtcttggctaatggtaacatccagggagctggggtcagcgtgagctggaatcagttcaaattagcaaagcactggcactcagtagcaggaatacaagtgactgcaaagtgttaaacacatctggaaagggatactgacatcatcctcagaatctgtggggagttcacatagccagttaagacccattcttctttgaccctrtaaagattctttaaagaataaatacccttagtggttttctagccagcttgcctgctcatttatctttgaggacgacatgccttgtggagctccacaggccccagaggggtatggattctgcatttaaaagtgctgaagctgagagactgggtcttggtggaccccgagaggtctgtttctcctctactcattgttcctttttttcccaacagctggcattgctgtttaaatgggttgttctttgctgttttaagttgtttcatagtggtgtgtcaggatttgggttttcttaatactttccaagct

SEQ ID NO: 437784 - DNA, 484 bp, Homo sapiens
cttcccacctccgtgaggctggagaagaggccccctggatgagaaggaagaggccggcaggtccggcgggcgcaggcacaggtagacttctggtgggaaaagcgtgactcagcctcctccagcggctgcaggacgtccccccgctagaaagggccgggctccctttgctgacccagagtcaacccagcgattcctcccggggaggcggggggccccggccccggcccagagcgcatgcctatgccgggagctgggcgaggacggggcacagccacagctgggtgcccaacgggaaaggcggccgttccccctcaagctgcacctgaagggtccccagggwcgaggccacttctcctttcggctcagggttgaccttcagtgaccactgtggcctgcgggcatcccctgggagggacggagggggatggaggaaaactccaaagggaaaggccgaatcctgcagggtctggtcgtcggaaagcca

SEQ ID NO: 437785 - DNA, 484 bp, Homo sapiens
cttcccacctccgtgaggctggagaagaggccccctggatgagaaggaagaggccggcaggtccggcgggcgcaggcacaggtagacttctggtgggaaaagcgtgactcagcctcctccagcggctgcaggacgtccccccgctagaaagggccgggctccctttgctgacccagagtcaacccagcgattcctcccggggaggcggggggccccggccccggcccagagcgcatgcctatgccgggagctgggcgaggacggggcacagccacagctgggtgcccaacgggaaaggcggccgttccccctcaagctgcacctgaagggtccccagggtmgaggccacttctcctttcggctcagggttgaccttcagtgaccactgtggcctgcgggcatcccctgggagggacggagggggatggaggaaaactccaaagggaaaggccgaatcctgcagggtctggtcgtcggaaagcca

SEQ ID NO: 437786 - DNA, 651 bp, Homo sapiens
tctgcctcactcttacaaagattcatctcttgagagttttgtgctctacccccagatgtggtctttctggttctgaagcttttgcttcagtcaccctgaattttgccagccctatgcatgctataccttggattgccaacttgccctcactgaagccagtttctctggttagaatagttgcccaaacccatgccyaatactctagtaaacaaggttctacctgggcttaggttaacttttgctcctttgggccctgtgttctaccagcattccatttatctgaaactctccctcaccttaagaacttatctgttctttaatgatttactgctgcttcctgggctcaaaagaacccagttcaggagtttctgttttagtttgagatcttataggcctgtctcatcaggttggtgtcagcccagctaggattaggcagaattgggtgggggctgtagtgcatttttggcacagcatgtacctgtctgactaattctctgtcttttctttcctgttgcaattcatgggtcttagcatcttctgaatggtgtttagtaggtcatcctgttgatttcctgctagggagtagcatactctggctctgtaccattggccaagggacttaaggatagatgaagggctgcagttttgtta

SEQ ID NO: 437787 - DNA, 651 bp, Homo sapiens
tctgcctcactcttacaaagattcatctcttgagagttttgtgctctacccccagatgtggtctttctggttctgaagcttttgcttcagtcaccctgaattttgccagccctatgcatgctataccttggattgccaacttgccctcactgaagccagtttctctggttagaatagttgcccaaacccatgcctartactctagtaaacaaggttctacctgggcttaggttaacttttgctcctttgggccctgtgttctaccagcattccatttatctgaaactctccctcaccttaagaacttatctgttctttaatgatttactgctgcttcctgggctcaaaagaacccagttcaggagtttctgttttagtttgagatcttataggcctgtctcatcaggttggtgtcagcccagctaggattaggcagaattgggtgggggctgtagtgcatttttggcacagcatgtacctgtctgactaattctctgtcttttctttcctgttgcaattcatgggtcttagcatcttctgaatggtgtttagtaggtcatcctgttgatttcctgctagggagtagcatactctggctctgtaccattggccaagggacttaaggatagatgaagggctgcagttttgtta

SEQ ID NO: 437788 - DNA, 651 bp, Homo sapiens
tctgcctcactcttacaaagattcatctcttgagagttttgtgctctacccccagatgtggtctttctggttctgaagcttttgcttcagtcaccctgaattttgccagccctatgcatgctataccttggattgccaacttgccctcactgaagccagtttctctggttagaatagttgcccaaacccatgcctaatactctagtaaacaaggttctacctgggcttaggttaacttttgctcctttgggccctgtgttctaccagcattccatttatctgaaactctccctcaycttaagaacttatctgttctttaatgatttactgctgcttcctgggctcaaaagaacccagttcaggagtttctgttttagtttgagatcttataggcctgtctcatcaggttggtgtcagcccagctaggattaggcagaattgggtgggggctgtagtgcatttttggcacagcatgtacctgtctgactaattctctgtcttttctttcctgttgcaattcatgggtcttagcatcttctgaatggtgtttagtaggtcatcctgttgatttcctgctagggagtagcatactctggctctgtaccattggccaagggacttaaggatagatgaagggctgcagttttgtta

SEQ ID NO: 437789 - DNA, 430 bp, Homo sapiens
catttgaatggttggtccttggctcctttgttgatataggcagatccttgatgggaatttggaatgatcccaaatattgtagatcactggtacatcaagtcatcctcaaggttgtctgtgtaacagtcttgaatgatattttgtcagtctttggagattctctgtatagggtttaatcatttagttatttcagttgagactgtttagtttctttgcaaggagataagaaatgtgaaagagatgcagacattagggaaaaaaagtcaggagccttgtttscccatcctctacttgggttctggaactagactcataggtgagtagtgaggagctgggcccaagcacattaatcctagatctagctctgctttgccctcgctccagttcttgtatcaaattcacttcaagccacccagagtagtatgtaaag

SEQ ID NO: 437790 - DNA, 455 bp, Homo sapiens
gtcagggtcttagggagtgattcattctagcagaactccctggattttaaggcagatgttccatttattaattgacaaaggaggcatatttctcccctggtaacccaaagatttaggtcattttcccagagactccatttccactgtgagggttcttggaaaactaagcagaggatgaggaaaagtctgtgaacaagcttgctggtctctccctgtcctacaaaagagcatacctcttctgtaaccagaaggcccttttgattagtcaaggctggacagagtgagattgggkgtgtgtgtgtgtgtgtgtgtgtgtgtttgtgtgtgtcttgagacagggtctcactctgtcaccaaggctagagtgcagtggtgagatcagagctcactgcagcttccacttcctgggctcaagcgatcctcctatttcagcctccagagtagctgggactata

SEQ ID NO: 437791 - DNA, 455 bp, Homo sapiens
gtcagggtcttagggagtgattcattctagcagaactccctggattttaaggcagatgttccatttattaattgacaaaggaggcatatttctcccctggtaacccaaagatttaggtcattttcccagagactccatttccactgtgagggttcttggaaaactaagcagaggatgaggaaaagtctgtgaacaagcttgctggtctctccctgtcctacaaaagagcatacctcttctgtaaccagaaggcccttttgattagtcaaggctggacagagtgagattgggggtgtgtgtgtgtgtgtgtgtgtgtgtttgtgtgtgtcttgagacagggtctcactctgtcaccmaggctagagtgcagtggtgagatcagagctcactgcagcttccacttcctgggctcaagcgatcctcctatttcagcctccagagtagctgggactata

SEQ ID NO: 437792 - DNA, 455 bp, Homo sapiens
gtcagggtcttagggagtgattcattctagcagaactccctggattttaaggcagatgttccatttattaattgacaaaggaggcatatttctcccctggtaacccaaagatttaggtcattttcccagagactccatttccactgtgagggttcttggaaaactaagcagaggatgaggaaaagtctgtgaacaagcttgctggtctctccctgtcctacaaaagagcatacctcttctgtaaccagaaggcccttttgattagtcaaggctggacagagtgagattgggggtgtgtgtgtgtgtgtgtgtgtgtgtttgtgtgtgtcttgagacagggtctcactctgtcaccaaggctrgagtgcagtggtgagatcagagctcactgcagcttccacttcctgggctcaagcgatcctcctatttcagcctccagagtagctgggactata

SEQ ID NO: 437793 - DNA, 581 bp, Homo sapiens
gctcgccaacaaggaaaacttttaagtagagcagaacctgaatagacaagacatttctttcttttggtagaaaatgatttaccatcactgtgtagttaattgtagactaggtaattttaactttgtgatttattgccrgagacattttcttctgtgctgtaaagtgtgtgtcaaaaaaaaaaatagcgattttggaggattaggggactttgataaattgcctgcaattctggcagtatgaactgcatattaatttctgtctttcaagaacatttttatttattaattccttacaaaaactccctaaactttggaacagctctcaattgcctggattcttttttttcttattatggtactcttctagagatttggcttgcatctgtgaataagccaggacatcttcagaaattggctgattaaaaacaccaccaatggagtttcattaaatttgtattgctctgactagtgaaacacacacatctatgttgctgaggatattttactgcagttcgagttgtaataatagctctgtttaagatccgtcagtcacttgaatcttctctaaggctttgtatgtt

SEQ ID NO: 437794 - DNA, 572 bp, Homo sapiens
tgaattttatgtcttagcgtagatggtttaytactttctggtttttctttagtaagaatcctataaaaacactagtatttttctctgagtttaaaattcaatacatgcctactgatatggttaggctttgtatccccacctgaatctcatcttgaattgtaatccccatagcccccataatccccacaggtcaagggagagaccaggtggaggtaattgaatcatgggggcagtttcccctgtgctgttcttgtgatagtgagttctcacgagatttgatggttttataagggattctttcccctttgctcggcacttcttcatgctaccttgcgaagaagctggcttgcttcctctttgtcttccgccatgattgtagatttcctgaggcctcccaagctgtgctgaactgtgagccaattaaactactttcctttataaattacccagtcttgggcagttctttatagcagtatgaaaacagaaaaatacacctactatgtaaaacttaaaatacaaaaaaacaaaacattatcttactaacataggagctaatattttggtgtactttg

SEQ ID NO: 437795 - DNA, 572 bp, Homo sapiens
tgaattttatgtcttagcgtagatggtttactactttctggtttttctttagtaagaatcctataaaaacactagtatttttctctgagtttaaaattcaatacatgcctactgatatggttaggctttgtatccccacctgaatctcrtcttgaattgtaatccccatagcccccataatccccacaggtcaagggagagaccaggtggaggtaattgaatcatgggggcagtttcccctgtgctgttcttgtgatagtgagttctcacgagatttgatggttttataagggattctttcccctttgctcggcacttcttcatgctaccttgcgaagaagctggcttgcttcctctttgtcttccgccatgattgtagatttcctgaggcctcccaagctgtgctgaactgtgagccaattaaactactttcctttataaattacccagtcttgggcagttctttatagcagtatgaaaacagaaaaatacacctactatgtaaaacttaaaatacaaaaaaacaaaacattatcttactaacataggagctaatattttggtgtactttg

SEQ ID NO: 437796 - DNA, 572 bp, Homo sapiens
tgaattttatgtcttagcgtagatggtttactactttctggtttttctttagtaagaatcctataaaaacactagtatttttctctgagtttaaaattcaatacatgcctactgatatggttaggctttgtatccccacctgaatctcatcttgaattgtaatccccatagcccccataatccccacaggtcaagggagagaccaggtggaggtaattgaatcatgggggcagtttcccctgtgctgttcttgtgatagtgagttctcacgagatttgatggttttataagggattctttcccctttgctcggcacttcttcatgctrccttgcgaagaagctggcttgcttcctctttgtcttccgccatgattgtagatttcctgaggcctcccaagctgtgctgaactgtgagccaattaaactactttcctttataaattacccagtcttgggcagttctttatagcagtatgaaaacagaaaaatacacctactatgtaaaacttaaaatacaaaaaaacaaaacattatcttactaacataggagctaatattttggtgtactttg

SEQ ID NO: 437797 - DNA, 533 bp, Homo sapiens
gggcagttctttatagcagtatgaaaacagaaaaatacacctactatgtaaaacttaaaatacaaaaaaacaaaacattatcttactaacataggagctaatattttggtgtactttgtttagtattttatattaaaaatatgtacatatatatttatatataattaagaacatgtatgtacaatcgtgcatacatcatgtayatacatctacttaagaaaatagctatgtaatataccattactcaactagattataattttttctccatttctttattgtaatttatcattttctacttttttgttttctcatttttattgcataatatttaattatgcaaaaaatacattaaatacattgaaaatatatagtgtagctataagaataaagaacgatggtaaaacaaatgctaatacccactacctgacttaaagaatatgatattatttttttccaattgaaattccctcaactactcagaattactgctatccctcttatcctttcattaattttcttctagttttctc

SEQ ID NO: 437798 - DNA, 551 bp, Homo sapiens
ctttgtttagtattttatattaaaaatatgtacatatatatttatatataattaagaacatgtatgtacaatcgtgcatacatcatgtacatacatctacttaagaaaatagctatgtaatatamcattactcaactagattataattttttctccatttctttattgtaatttatcattttctacttttttgttttctcatttttattgcataatatttaattatgcaaaaaatacattaaatacattgaaaatatatagtgtagctataagaataaagaacgatggtaaaacaaatgctaatacccactacctgacttaaagaatatgatattatttttttccaattgaaattccctcaactactcagaattactgctatccctcttatcctttcattaattttcttctagttttctcacatgtgaatctatttctaaatacatttctttattttgcaagtttttggacttcatataaatgtaaccatattgtatatattcttcttcagcttcttagtttttcactaaacaatatgttttgctgatact

SEQ ID NO: 437799 - DNA, 545 bp, Homo sapiens
gtttagtattttatattaaaaatatgtacatatatatttatatataattaagaacatgtatgtacaatcgtgcatacatcatgtacatacatctacttaagaaaatagctatgtaatataccattactcaactagattataattttttctccatttctttattgtaatttatcattttctacttttttgttttctcatttttattgcataatatttaattatgcaaaaaatacattaaatacattgaaaatatatagtgtagctataagaataaagaacgatggtaaaacaaatgctaatacccactacctgacttaaagaatatgataytatttttttccaattgaaattccctcaactactcagaattactgctatccctcttatcctttcattaattttcttctagttttctcacatgtgaatctatttctaaatacatttctttattttgcaagtttttggacttcatataaatgtaaccatattgtatatattcttcttcagcttcttagtttttcactaaacaatatgttttgctgata

SEQ ID NO: 437800 - DNA, 545 bp, Homo sapiens
gtttagtattttatattaaaaatatgtacatatatatttatatataattaagaacatgtatgtacaatcgtgcatacatcatgtacatacatctacttaagaaaatagctatgtaatataccattactcaactagattataattttttctccatttctttattgtaatttatcattttctacttttttgttttctcatttttattgcataatatttaattatgcaaaaaatacattaaatacattgaaaatatatagtgtagctataagaataaagaacgatggtaaaacaaatgctaatacccactacctgacttaaagaatatgatattatttttttccaattgaaatyccctcaactactcagaattactgctatccctcttatcctttcattaattttcttctagttttctcacatgtgaatctatttctaaatacatttctttattttgcaagtttttggacttcatataaatgtaaccatattgtatatattcttcttcagcttcttagtttttcactaaacaatatgttttgctgata

SEQ ID NO: 437801 - DNA, 545 bp, Homo sapiens
gtttagtattttatattaaaaatatgtacatatatatttatatataattaagaacatgtatgtacaatcgtgcatacatcatgtacatacatctacttaagaaaatagctatgtaatataccattactcaactagattataattttttctccatttctttattgtaatttatcattttctacttttttgttttctcatttttattgcataatatttaattatgcaaaaaatacattaaatacattgaaaatatatagtgtagctataagaataaagaacgatggtaaaacaaatgctaatacccactacctgacttaaagaatatgatattatttttttccaattgaaattccctcaactactcagaattactgctatccctyttatcctttcattaattttcttctagttttctcacatgtgaatctatttctaaatacatttctttattttgcaagtttttggacttcatataaatgtaaccatattgtatatattcttcttcagcttcttagtttttcactaaacaatatgttttgctgata

SEQ ID NO: 437802 - DNA, 494 bp, Homo sapiens
cctttcattaattttcttctagttttctcacatgtgaatctatttctaaatacatttctttattttgcaagtttttggacttcatataaaygtaaccatattgtatatattcttcttcagcttcttagtttttcactaaacaatatgttttgctgatacttacattcatatgtacagtaatggttgatttattttaatggctatatattattccattgttagaatacaccaggatttatttttacttattttttttgctggaaaattgggtgtcttttttattttttgatataacaaacaatgttgtaatcattttgtatttacttcctagtccactcctgtaagtttctcttgagtacatactagcaatgaatatgctgagtcactgcatatacatactcacaactttattctataatgtaatattctataaagtagctgtatcagtttatactttaaccagtaatggacaagattttctgttacttcccatc

SEQ ID NO: 437803 - DNA, 561 bp, Homo sapiens
tccctcaactactcagaattactgctatccctcttatcctttcattaattttcttctagttttctcacatgtgaatctatttctaaatacatttctttattttgcaagtttttggacttcatataaatgtaaccatattgtatatattcttcttcagcttcttastttttcactaaacaatatgttttgctgatacttacattcatatgtacagtaatggttgatttattttaatggctatatattattccattgttagaatacaccaggatttatttttacttattttttttgctggaaaattgggtgtcttttttattttttgatataacaaacaatgttgtaatcattttgtatttacttcctagtccactcctgtaagtttctcttgagtacatactagcaatgaatatgctgagtcactgcatatacatactcacaactttattctataatgtaatattctataaagtagctgtatcagtttatactttaaccagtaatggacaagattttctgttacttcccatctttgttaattattacttttagactctaact

SEQ ID NO: 437804 - DNA, 494 bp, Homo sapiens
cctttcattaattttcttctagttttctcacatgtgaatctatttctaaatacatttctttattttgcaagtttttggacttcatataaatgtaaccatattgtatatattcttcttcagcttcttagtttttcactaaacaatatgttttgctgatacttacattcatatgtacagtaatggttgatttattttaatkgctatatattattccattgttagaatacaccaggatttatttttacttattttttttgctggaaaattgggtgtcttttttattttttgatataacaaacaatgttgtaatcattttgtatttacttcctagtccactcctgtaagtttctcttgagtacatactagcaatgaatatgctgagtcactgcatatacatactcacaactttattctataatgtaatattctataaagtagctgtatcagtttatactttaaccagtaatggacaagattttctgttacttcccatc

SEQ ID NO: 437805 - DNA, 626 bp, Homo sapiens
aattccctcaactactcagaattactgctatccctcttatcctttcattaattttcttctagttttctcacatgtgaatctatttctaaatacatttctttattttgcaagtttttggacttcatataaatgtaaccatattgtatatattcttcttcagcttcttagtttttcactaaacaatatgttttgctgatacttacattcatatgtacagtaatggttgatttattttaatggctatatattattccattgttagaatacaccaggatttatttttacttattttttttgctggaaaattgggtgtcttttttattttttgatataacaaacaatgttgtaatcattttgtatttacttcctagtccactcctgtaagtttctcttgagtacatactagcaatgaakatgctgagtcactgcatatacatactcacaactttattctataatgtaatattctataaagtagctgtatcagtttatactttaaccagtaatggacaagattttctgttacttcccatctttgttaattattacttttagactctaacttttatcaggctcatggatgtaaaaagcatctcagggtggttttaatttgcatttatctgctc

SEQ ID NO: 437806 - DNA, 561 bp, Homo sapiens
gtacagtaatggttgatttattttaatggctatatattattccattgttagaatacaccaggatttatttttacttattttttttgctggaaaattgggtgtcttttttattttttgatataacaaacaatgttgtaatcattttgtatttacttcctagtccactcctgtaagtttctcttgagtacatactagcaatgaatatgctgagtcactgcatatacatactcacaactttattctataatgtaatattctataaagtagctgtatcagtttatactttaaccagtaayggacaagattttctgttacttcccatctttgttaattattacttttagactctaacttttatcaggctcatggatgtaaaaagcatctcagggtggttttaatttgcatttatctgctcatctatgaagatgagcttcttttcatataattatgagtcattatttttgttttgccttcttttgtttatgcattttgcttgttctatgtcttatttttcctgttgatttttgggagttcatatatattctaaatgtatatttattc

SEQ ID NO: 437807 - DNA, 430 bp, Homo sapiens
ctgccacaccgtggctcgtctcactctggatggtggtggcaacagagatggcagtgtggctggagttttaggagggcggcctgagccgtaggagggggctggagcagtaacatggcggcctgagcggtaggcgggagctggagcagtaagagggcggcctgagcggtaggaggggggctggagcagtaagagggcggccggggcrgtaggaggggggctggagcagtaagagggcggcctgagcggtaggagggggctggagcagtaagagggcggccggggcggtaggaggggggctggagcagtaagagggcggccggggcggtaggcgggggctggagcagtaagagggcggccggggcggtaggcgggggctggagcagtaagagggcggcctgaccggtaggcgggggctggagcagtaagaggg

SEQ ID NO: 437808 - DNA, 430 bp, Homo sapiens
ctgccacaccgtggctcgtctcactctggatggtggtggcaacagagatggcagtgtggctggagttttaggagggcggcctgagccgtaggagggggctggagcagtaacatggcggcctgagcggtaggcgggagctggagcagtaagagggcggcctgagcggtaggaggggggctggagcagtaagagggcggccggggcagtaggaggggggctggagcagtaagagggcggcctgagcggtaggagggggctggagcagtaagagggcggccggggcggtaggaggggggctggagcagtaagagggcggccggggcggtaggcgggggctggagcagtaagagggcggcckgggcggtaggcgggggctggagcagtaagagggcggcctgaccggtaggcgggggctggagcagtaagaggg

SEQ ID NO: 437809 - DNA, 430 bp, Homo sapiens
ctgccacaccgtggctcgtctcactctggatggtggtggcaacagagatggcagtgtggctggagttttaggagggcggcctgagccgtaggagggggctggagcagtaacatggcggcctgagcggtaggcgggagctggagcagtaagagggcggcctgagcggtaggaggggggctggagcagtaagagggcggccggggcagtaggaggggggctggagcagtaagagggcggcctgagcggtaggagggggctggagcagtaagagggcggccggggcggtaggaggggggctggagcagtaagagggcggccggggcggtaggcgggggctggagcagtaagagggcggccggrgcggtaggcgggggctggagcagtaagagggcggcctgaccggtaggcgggggctggagcagtaagaggg

SEQ ID NO: 437810 - DNA, 430 bp, Homo sapiens
ctgccacaccgtggctcgtctcactctggatggtggtggcaacagagatggcagtgtggctggagttttaggagggcggcctgagccgtaggagggggctggagcagtaacatggcggcctgagcggtaggcgggagctggagcagtaagagggcggcctgagcggtaggaggggggctggagcagtaagagggcggccggggcagtaggaggggggctggagcagtaagagggcggcctgagcggtaggagggggctggagcagtaagagggcggccggggcggtaggaggggggctggagcagtaagagggcggccggggcggtaggcgggggctggagcagtaagagggcggccggggcggtaggcgggggctggagcagtaagagggcggcctgaccggtaggmgggggctggagcagtaagaggg

SEQ ID NO: 437811 - DNA, 514 bp, Homo sapiens
gggcggcctgagcggtaggaggggggctggagcagtaagagggcggcctgagccgtaggagggtgggtggcagctggagatgctcttgaccggctagaggtcwaggagaaggtggggaccgtgtccaacactcgtggctggagccttggccaccgcggttctcctggctgtggttggtggtggcgacggagactgcatctctgttagactggtagaaaggtggcagggtaggtgcgctctctgcggctgcactgcccgcttgcggggtggtaggggagcgggtgtggcgtgcttttggggctgcactgcctgccgcggggggctggtgggtggcgctatcaggcgttgaattgctggcagtggggcaggttcgctgcactatcaggctctacactgcctaagggggcggggggttggaggcaggttgtgggttgtgtgcactgtcgtgcactgccagtggcgggtggcagggggttaggagcattattagctgctgcactggctgatgcagggg

SEQ ID NO: 437812 - DNA, 603 bp, Homo sapiens
ggcccagtaattaaaccctttgggcctgagggtgagaaactttgtctcagttcttccccaagtgatcagcccaggggtaaggaaggagaagccagaaagcaggacccatgagaagggccccctcctggagtttgaggcccactccctcctgcccctkcctctcctctgtccaggactcctccctgctctgccccactcctggggccataaccatggggagctgtggttttctacaggcccctgggcacaaagtgggcaggctcacctggaggcgatcagagtaacatggcaggaagtgagggggaaagccgccctggaactgcgcctctctgccccctgacgtcactggcgtgcactcctccctcccctcattcaggcagtggcatgagttccatgtgagcgctgtcctgctccctctgctgcctcttttttttcttggggctgccataacactttcccttccccagccctgccaacctggtgggacattgggcttccctctcacagggtcctggggacaggcccatcctttatcatacgcacagagagaccgttttttccttcaggacctggggagcagccaggttccatgagttaaatgca

SEQ ID NO: 437813 - DNA, 588 bp, Homo sapiens
tggagtttgaggcccactccctcctgcccctgcctctcctctgtccaggactcctccctgctctgccccactcctggggccataaccatggggagctgtggttttctacaggcccctgggcacaaagtgggcaggctcacctggaggcgatcagagtaacatggcaggaagtgagggggaaagccgccctggaactgcgcctctctgccccctgacgtcactggcgtgcactcctccctcccctcattcaggcagtggcatgagttccatgtgagcgctgtcctgctccctctgctgcctcttttttttcttggggctgccataacactttcccttccccagccctgccaacctggtgggacattgggcttccctctcacagggtcctggggacaggcccatcctttatcatacscacagagagaccgttttttccttcaggacctggggagcagccaggttccatgagttaaatgcagatctgaaccaagctgggattggggtacacactctcctctactgaaaagtagctagggattccaactaggtgagaaggagagtggggcagagccagaccagacaaggact

SEQ ID NO: 437814 - DNA, 603 bp, Homo sapiens
ggcccagtaattaaaccctttgggcctgagggtgagaaactttgtctcagttcttccccaagtgatcagcccaggggtaaggaaggagaagccagaaagcaggacccatgagaagggccccctcctggagtttgaggcccactccctcctgcccctgcctctcctctgtccaggactcctccctgctctgccccactcctggggccataaccatggggagctgtggttttctacaggcccctgggcacaaagtgggcaggctcacctggaggcgatcagagtaacatggcaggaagtgagggggaaagccgccctggaactgcgcctctctgccccctgacgtcactggcgtgcactcctccctcccctcattcaggcagtggcatgagttccatgtgagcgctgtcctgctccctctgctgcctcttttttttcttggggctgccataacactttcccttccccagccctgccaacctggtgggacattgggcttccctctcacagggtcctggggacaggcccatcctttatcatacgcacagagagaccgttttttycttcaggacctggggagcagccaggttccatgagttaaatgca

SEQ ID NO: 437815 - DNA, 588 bp, Homo sapiens
tggagtttgaggcccactccctcctgcccctgcctctcctctgtccaggactcctccctgctctgccccactcctggggccataaccatggggagctgtggttttctacaggcccctgggcacaaagtgggcaggctcacctggaggcgatcagagtaacatggcaggaagtgagggggaaagccgccctggaactgcgcctctctgccccctgacgtcactggcgtgcactcctccctcccctcattcaggcagtggcatgagttccatgtgagcgctgtcctgctccctctgctgcctcttttttttcttggggctgccataacactttcccttccccagccctgccaacctggtgggacattgggcttccctctcacagggtcctggggacaggcccatcctttatcatacgcacagagagaccgttttttccttcagracctggggagcagccaggttccatgagttaaatgcagatctgaaccaagctgggattggggtacacactctcctctactgaaaagtagctagggattccaactaggtgagaaggagagtggggcagagccagaccagacaaggact

SEQ ID NO: 437816 - DNA, 340 bp, Homo sapiens
aagggagccatgggaggccacactcaggatgcttttggagtctcattccatggctggttattcctaccttctagaatgccgaaatcctgtgaacagttgattccttctagaggttgtctcaactgtcttttctccattagcatgattcaccaaatagtaatttctttaggaaacatagaaatcatatagatgtgctattttcagagaggctgccaaacctccatgcacagatagtgctgtgagtgctgcctgtggggcagaggtttggcarctggtctttatacagagaagtggaaagtttggaaacagagagccctagatcaaacttcatgctgggtga

SEQ ID NO: 437817 - DNA, 574 bp, Homo sapiens
tgcattggttttatcagaaaaataaaatgggaagagtcacatctccctcagctaagaagatagattacttstctggtccccctttcaaaagacttgaaggtactaagatttcctaggtccttcaccttatgactgtgtgccaatttgcaggcactagttgggacctctgttcatgagtcagcttcatggggatggttttctagcttgttccttcaccacatttgcaggttggatcccatttccctctcttcagccttgtcttggagacacagttctgtatgactgatgcacatcagaccctgccttcatttctgttttgcttccatcctgctcatatttccaatcccctcttccatcccatccaagtctccatcacttaccatatcttccttcaggacacaggagtcaataggccacacctggaaaccatctgatgctcaggactcatttgtgcttgcccaaaatatactaccctctgttgcatgttgctgcttctgttttattttctccctgaaaccttgctagcttttctaatttggccatctagttacctcagtttgagtctccattcctt

SEQ ID NO: 437818 - DNA, 574 bp, Homo sapiens
tgcattggttttatcagaaaaataaaatgggaagagtcacatctccctcagctaagaagatagattacttgtctggtccccctttcaaaagacttgaaggtactaagatttcctaggtccttcaccttatgactgtgtgccaatttgcaggcactagttgggacctctgttcatgagtcagcttcatggggatggttttctagcttgttccttcaccacatttgcaggttggatcccatttccctctcttcagccttgtcttggagacacagttctgtatgactgatgcacatcagaccctgccttcatttctgttttgcttccatcctgctcatatttccaatcccctcttccatcccatccaagtctccatcacttaccatatcttccttcaggacacaggagtcaataggccacacctggaaaccatctgatgctcaggactcatttgtgcttgcccaaaatatactaccctctrttgcatgttgctgcttctgttttattttctccctgaaaccttgctagcttttctaatttggccatctagttacctcagtttgagtctccattcctt

SEQ ID NO: 437819 - DNA, 521 bp, Homo sapiens
ggcatgaccacctgtgcccagccccctattattattattttaaataatagctttattaaaatattcacataccattcactttatttattgaaatctgcaattcagtaggttttagaatattcacagagctgtgcatcgatcaccacagtcacttttagaacctttcattaccctatagagaaatccataccccttagccactaccttcttactctcccactacctttgccccaggcttaagcaacattgattaattttyttgtcactatagatttgcctaatctggacaaatagaattgtacaatatgtgatcttttgtggctctttttccctcttagcacagtgttttcaaagttcctttatgtcatagtgtgtatcaatatttcattccttctatggcagtattccatggtagagacacactgcattttgtttatctgttcatcagttggtggatatttgggttgtttccctgtattccatgtattggtcattatgaataatgctgctatgaagattgt

SEQ ID NO: 437820 - DNA, 629 bp, Homo sapiens
aattgtacaatatgtgatcttttgtggctytttttccctcttagcacagtgttttcaaagttcctttatgtcatagtgtgtatcaatatttcattccttctatggcagtattccatggtagagacacactgcattttgtttatctgttcatcagttggtggatatttgggttgtttccctgtattccatgtattggtcattatgaataatgctgctatgaagattgttgtacaagtttttgtgtggacatatatttttatttttctgggatatatgcctaggagtgaaattgttgcattataggatgactgtacatttagccttttgagaaactgccagactgttttctaacgtggctataccagttgggtgcaatggctcacacctgtaatcccagctactcaggaggctcagctaggaggatggcttgagcccgtgaattcaagaccagcctgggcaagatagtgaaaccccgtcttgattttttaaaaatccaattaaaatgacaagaaaagaaatacccaaacaaaatggttacacaattttatgttcccaccagtaatgtatgtgggttccaattcctccacatcttcactgacattttttttttctagataggggcttgctct

SEQ ID NO: 437821 - DNA, 629 bp, Homo sapiens
aattgtacaatatgtgatcttttgtggctctttttccctcttascacagtgttttcaaagttcctttatgtcatagtgtgtatcaatatttcattccttctatggcagtattccatggtagagacacactgcattttgtttatctgttcatcagttggtggatatttgggttgtttccctgtattccatgtattggtcattatgaataatgctgctatgaagattgttgtacaagtttttgtgtggacatatatttttatttttctgggatatatgcctaggagtgaaattgttgcattataggatgactgtacatttagccttttgagaaactgccagactgttttctaacgtggctataccagttgggtgcaatggctcacacctgtaatcccagctactcaggaggctcagctaggaggatggcttgagcccgtgaattcaagaccagcctgggcaagatagtgaaaccccgtcttgattttttaaaaatccaattaaaatgacaagaaaagaaatacccaaacaaaatggttacacaattttatgttcccaccagtaatgtatgtgggttccaattcctccacatcttcactgacattttttttttctagataggggcttgctct

SEQ ID NO: 437822 - DNA, 629 bp, Homo sapiens
aattgtacaatatgtgatcttttgtggctctttttccctcttagcacagtgttttcaaagttcctttatgtcatagtgtgtatcaatatttcattccttctatggcagtattccatggtagagacacactgcattttgtttatctgttcatcagttggtggatatttgggttgtttccmtgtattccatgtattggtcattatgaataatgctgctatgaagattgttgtacaagtttttgtgtggacatatatttttatttttctgggatatatgcctaggagtgaaattgttgcattataggatgactgtacatttagccttttgagaaactgccagactgttttctaacgtggctataccagttgggtgcaatggctcacacctgtaatcccagctactcaggaggctcagctaggaggatggcttgagcccgtgaattcaagaccagcctgggcaagatagtgaaaccccgtcttgattttttaaaaatccaattaaaatgacaagaaaagaaatacccaaacaaaatggttacacaattttatgttcccaccagtaatgtatgtgggttccaattcctccacatcttcactgacattttttttttctagataggggcttgctct

SEQ ID NO: 437823 - DNA, 629 bp, Homo sapiens
aattgtacaatatgtgatcttttgtggctctttttccctcttagcacagtgttttcaaagttcctttatgtcatagtgtgtatcaatatttcattccttctatggcagtattccatggtagagacacactgcattttgtttatctgttcatcagttggtggatatttgggttgtttccctgtattccatgtattggtcattatgaataatgctgctatgaagattgttgtacaagtttttgtgtggacatatatttttatttttctgggatatatgcctaggagtgaaattgttgcattataggatgactgtacatttagccttttgagaaactgccagactgttttctaacgtggctataccagttgggtgcaatggctcacacctgtaatcccagctactcaggaggctcagctaggaggatggcttgagcccgtgaattcaagaccagcctgggcaagatagtgaaaccccgtcttgattttttaaaaatccrattaaaatgacaagaaaagaaatacccaaacaaaatggttacacaattttatgttcccaccagtaatgtatgtgggttccaattcctccacatcttcactgacattttttttttctagataggggcttgctct

SEQ ID NO: 437824 - DNA, 509 bp, Homo sapiens
ttaaaaatccaattaaaatgacaagaaaagaaatacccaaacaaaatggttacacaattttatgttcccaccagtaatgtatgtgggttccaattcctccacatcttcactgacattttttttttctagataggggcttgctctgtctctcaggccgcagtgcaatgatgccatcacagttcactgcagccgtgacctcccaggcacaagtgattctctcatctcagcctcctgggtagctgaaaattacaggtgtacgccaccatgcctggctaatttttagatttttctgtagtggtgggattttaccatgttgcccaggctggtctcatactcctggcctcaagtgatctgcccacctcagcctccctaagttctggaattacaggctgccaccatgcccggccttcaccaacatttgycattatctgttttttttttcttcctttataccttaaagcagtataagaacaagtgtcttcaattataggaaacagtataatcccagg

SEQ ID NO: 437825 - DNA, 539 bp, Homo sapiens
tccatacaagcaaattactgtgtctacaaagcattcctgccacacttaattcaccattccctgaacaaaatatgccatcttcrttgttcaggtctgtacagtgctggtttcccttcccgggcagtttgcgctatcccatcccggcccattccccatccctccacctccccccttccctccccactctcatacaactcttcctcatctttcaggacttggcttcaatgtcaccttaactggaagcttctctcactctccagaagagcttcccattgcacctgatgcatgggaaacataatttgatcatttttaagttacagtccaaatctttttgtacctgaataacatgttgcccagtcagtctctcttcctggattcacaagtctttcatggtagatccagctggaagtgacaaaaagacatcttttgacataaagggatgacacagacagacataagttcttaaatgtcttaaatgttatgtgagaattaaacagaattcaaagacttgtggggagcacttaggaagttactgggaa

SEQ ID NO: 437826 - DNA, 539 bp, Homo sapiens
tccatacaagcaaattactgtgtctacaaagcattcctgccacacttaattcaccattccctgaacaaaatatgccatcttcgttgttcaggtctgtacagtgctggtktcccttcccgggcagtttgcgctatcccatcccggcccattccccatccctccacctccccccttccctccccactctcatacaactcttcctcatctttcaggacttggcttcaatgtcaccttaactggaagcttctctcactctccagaagagcttcccattgcacctgatgcatgggaaacataatttgatcatttttaagttacagtccaaatctttttgtacctgaataacatgttgcccagtcagtctctcttcctggattcacaagtctttcatggtagatccagctggaagtgacaaaaagacatcttttgacataaagggatgacacagacagacataagttcttaaatgtcttaaatgttatgtgagaattaaacagaattcaaagacttgtggggagcacttaggaagttactgggaa

SEQ ID NO: 437827 - DNA, 539 bp, Homo sapiens
tccatacaagcaaattactgtgtctacaaagcattcctgccacacttaattcaccattccctgaacaaaatatgccatcttcgttgttcaggtctgtacagtgctggtttcccttcccgggcagtttgcgctatcccatcccggcccattccccatccctccacctccccccttccctccccactctcatacaactcttcctcatctttcaggacttggcttcaatgtcaccttaactggaagcttctctcactctccagaagagcttcccattgcacctgatgcatgggaaacataatttgatcatttttaagttacagtccaaatctttttgtacctgaataacatgttgcccagtcagtctctcttcctggattcacaagtctttcatggtagatccagctggaagtgacaaaaagacatcttttgacataaagggatgacacagacagacataagttcttaaatgtcttaaatgttatgtgaraattaaacagaattcaaagacttgtggggagcacttaggaagttactgggaa

SEQ ID NO: 437828 - DNA, 609 bp, Homo sapiens
tgacaaaaagacatcttttgacataaagggatgacacagacagacataagttcttaaatgtcttaaatgttatgtgagaattaaacagaattcaaagacttgtggggagcacttaggaagttactgggaatgtcatraagggttaatttgtattttattttattttttgagacagtctcattctgtcacctaggctggagtgcagtggtgcaatcaggctcactgcagccttgaccacctgggctcaagtaatctcacttaatttttatttggtttaagaaagtcttggttgagggtggtggcttatgcctgtaatctcagcactttgggaggctgagagaggtatattacttgaggccaggagtttgagatcagactgggcaatatattaagaccctgcctctaccaaaaaacagagtgaatgtgtggaagacaatttttccacagactgggaatgagggaataatttcaggatgattcaagtgcattacatatattgtgcactttatttctattattactacatagtaatatataatgaaatgattctacaactcactataacgtagactcagtgggatctctgagcttgttttcctgcaactagac

SEQ ID NO: 437829 - DNA, 616 bp, Homo sapiens
ggagtttgagatcagactgggcaatatattaagaccctgcctctaccaaaaaacagagtgaatgtgtggaagacaatttttccacagactgggaatgagggaataatttcaggatgattcaagtgcattacatatattgtgcactttatttctattattactacatagtaatatataatgaaatgattctacaactcactataacgtagactcagtgggatctctgagcttgttttcctgcaactagactgtccayctggggtgatgggagacagtaacagaatatcaggcattagattctcataaggagtacacaacctagatccctcgcatgcacacttcacaacagagtttgtgctcctgtgagaatctaatgctgctgctgatctgacaggacatggagctcaggtggtcatgcaagcgatgggaggggctagaaatacagatgaagtttcccttcactcgcctgctgctcacctccagctctgtggccctgtggttggagaccactgctcaagtgcatttgaaaggaaccaacccacgccattcttcagagtcatctttactgctgcagtggtcaacttgtagcacccctaagctcgcaggacatatgctt

SEQ ID NO: 437830 - DNA, 616 bp, Homo sapiens
ggagtttgagatcagactgggcaatatattaagaccctgcctctaccaaaaaacagagtgaatgtgtggaagacaatttttccacagactgggaatgagggaataatttcaggatgattcaagtgcattacatatattgtgcactttatttctattattactacatagtaatatataatgaaatgattctacaactcactataacgtagactcagtgggatctctgagcttgttttcctgcaactagactgtccatctggggtgatgggagacagtaacagaatatcaggcattagattctcataaggagtacacaacctagatccctcgcatgcacacttcacaacagagtttgtgctcctgtgagaatctaatgctgctgctgatctgacaggacatggagctcaggtggtcatgcaagcgatgggaggggctagaaatacagatgaagtttcccttcactcgcctgctgctcacctccagctctgtggccctgtggttggagaccrctgctcaagtgcatttgaaaggaaccaacccacgccattcttcagagtcatctttactgctgcagtggtcaacttgtagcacccctaagctcgcaggacatatgctt

SEQ ID NO: 437831 - DNA, 571 bp, Homo sapiens
ctacaactcactataacgtagactcagtgggatctctgagcttgttttcctgcaactagactgtccatctggggtgatgggagacagtaacagaatatcaggcattagattctcataaggagtacacaacctagatccctcgcatgcacacttcacaacagagtttgtgctcctgtgagaatctaatgctgctgctgatctgacaggacatggagctcaggtggtcatgcaagcgatgggaggggctagaaatacagatgaagtttcccttcactcgcctgctgctcacctccagctctgtggccctgtggttggagaccactgctcaagtgcatttgaaaggaaccaacccacgccattcttcagagtcatctttactgctgcagtggtcaacttgtagcacccctaagctcgcaggacatatgcttcaactggcatttcacaatcaacagtatgtggcagcttgagtcattgtgagcycacttcctggaaatcaccagcatcccatatcccattgcaaggagctcagcactgctccttggataaccaaacctattcccaaatcccatct

SEQ ID NO: 437832 - DNA, 571 bp, Homo sapiens
ctacaactcactataacgtagactcagtgggatctctgagcttgttttcctgcaactagactgtccatctggggtgatgggagacagtaacagaatatcaggcattagattctcataaggagtacacaacctagatccctcgcatgcacacttcacaacagagtttgtgctcctgtgagaatctaatgctgctgctgatctgacaggacatggagctcaggtggtcatgcaagcgatgggaggggctagaaatacagatgaagtttcccttcactcgcctgctgctcacctccagctctgtggccctgtggttggagaccactgctcaagtgcatttgaaaggaaccaacccacgccattcttcagagtcatctttactgctgcagtggtcaacttgtagcacccctaagctcgcaggacatatgcttcaactggcatttcacaatcaacagtatgtggcagcttgagtcattgtgagcccacwtcctggaaatcaccagcatcccatatcccattgcaaggagctcagcactgctccttggataaccaaacctattcccaaatcccatct

SEQ ID NO: 437833 - DNA, 661 bp, Homo sapiens
taattagttctgttctattttccattaaaatatttaaatcttgtatgaatttttgtcagattagaaatttagggcgtttcttaatttctctatactctagcttttgactttttttttctgacctaagaggtatttagagcacattttagattttttattttgactaatcatttaaaatgtatactaatcttcaatttaaataaaaaactggtctatagtgacaaaaattacaaatgagcctaactaataaattatcagctgtgtttatatgtataagcatgcacagattttggtaaatatgtacatartatattggtgagcttatttttatcattcttaactcattgtgtagtctaaacgttggggaaaaaataaaatacaataatcagatggtgtgaataagaaaattgttctaatgtttgtaaaccaagcaactgttttaactgctcccctcttcctgattgacttctaaaagggattgatccatattgggtcctatcatatacgtcacggtataacatctccagctataaaatggaaatttgagattaactttgctgctactcagatacattttatttcaaaaacatacactaaggtgttgctgttggatctttccaaaaacatattcacacagaactttcaatcacactgagccata

SEQ ID NO: 437834 - DNA, 567 bp, Homo sapiens
tagtggcttgggaagaaagcttttaatgttcccctaatttttcttacctttgacatgatccttcacatgtcttattttgcttagtgatttttctttttttttttttttttgagacagggtcttactctaccacccaggcttgagtgcagtggtgcaatcacagctcattgcagccttgacctcccagactcaagctattcttccacctcagcctcccaagtagctggtactacagggcacatgccaccaaacttggctaattttgtattttttgtagagacagagttttgccaaattctcaggctggtctggaatttctgggctcaagtaatcctgccttggcctcccaacatgctgatattacagacataagccacagtacctggccagttttctttttaaaaaaatctattggttattaatttgaagscttccttttcatagctgtgctccttaattgggagcaaacatgaatggaccacaacttagccaattttctatatacgatctttgccatcctaatttaaaggaatattaattctttcttttcctctttcattccacaaa

SEQ ID NO: 437835 - DNA, 362 bp, Homo sapiens
gttcaatatgggaaatataatttgttaaaatataaaagtgcaattgtgttacatgctgtacgaagtacatgttgacatgtgagcatataataaatgggctggaggccagaggattgccaaagagaatgggcctcctgctgagaygaaaagttgagcagggattagtttgcgaaagtggagggacgatcctttctaggcaggaggaagaacatgtacagaatctctgaggtgtgatgcgacaaagtctatataaaaaactgaagaaaggtctaatgtggcttaaatacagaagctagtaggagaggagtcgaaaagaggctggagaagtagaaagtgtctgcattctgcaggaacttatattg

SEQ ID NO: 437836 - DNA, 362 bp, Homo sapiens
gttcaatatgggaaatataatttgttaaaatataaaagtgcaattgtgttacatgctgtacgaagtacatgttgacatgtgagcatataataaatgggctggaggccagaggattgccaaagagaatgggcctcctgctgagatgaaaagttgagcagggattagttkgcgaaagtggagggacgatcctttctaggcaggaggaagaacatgtacagaatctctgaggtgtgatgcgacaaagtctatataaaaaactgaagaaaggtctaatgtggcttaaatacagaagctagtaggagaggagtcgaaaagaggctggagaagtagaaagtgtctgcattctgcaggaacttatattg

SEQ ID NO: 437837 - DNA, 362 bp, Homo sapiens
gttcaatatgggaaatataatttgttaaaatataaaagtgcaattgtgttacatgctgtacgaagtacatgttgacatgtgagcatataataaatgggctggaggccagaggattgccaaagagaatgggcctcctgctgagatgaaaagttgagcagggattagtttgcgaaagtggagggacgatcctttctaggcaggaggaagaacatgtacagaatctctgaggtgtgatgcracaaagtctatataaaaaactgaagaaaggtctaatgtggcttaaatacagaagctagtaggagaggagtcgaaaagaggctggagaagtagaaagtgtctgcattctgcaggaacttatattg

SEQ ID NO: 437838 - DNA, 362 bp, Homo sapiens
gttcaatatgggaaatataatttgttaaaatataaaagtgcaattgtgttacatgctgtacgaagtacatgttgacatgtgagcatataataaatgggctggaggccagaggattgccaaagagaatgggcctcctgctgagatgaaaagttgagcagggattagtttgcgaaagtggagggacgatcctttctaggcaggaggaagaacatgtacagaatctctgaggtgtgatgcgacaaagtctatataaaaaactgaagaaaggtctaatgtggcttaaatacagaagctagtaggagaggagtygaaaagaggctggagaagtagaaagtgtctgcattctgcaggaacttatattg

SEQ ID NO: 437839 - DNA, 549 bp, Homo sapiens
tcaggtacttaaagtgagctccaaaaatttagctatttgtaaattgtcatgcattgttaatgtataagagatgtagatttcatttatctttggtggagcgagatcaagcagtgaatcattgargactgaaagaaagaaaaaggtcttttcccttttctttaagaagcatcattagttaaaaacatgttagttgataccacagaactatatttaaagggacagcaacaagcaaattgattactctggtgattattggagtgacattgccttttagttgtactttcacaaaaattcacaatatttgccaaagtcaagttatccattacactattaatttgtcattcttttgtttatatagtcaatatctctatctcaattggatctatctcaactgcttctaaacaagccaccagtctctcccatttcaacaatctcttccaagtaccacttcatttcttcttttcatatttttgaaaacttttgaaaaactacctattttcctcctccatttcttgttcattccattctagtggacatggaatctgttcc

SEQ ID NO: 437840 - DNA, 570 bp, Homo sapiens
ttatctttggtggagcgagatcaagcagtgaatcattgaagactgaaagaaagaaaaaggtcttttcccttttctttaagaagcatcattagttaaaaacatgttagttgataccacagaactayatttaaagggacagcaacaagcaaattgattactctggtgattattggagtgacattgccttttagttgtactttcacaaaaattcacaatatttgccaaagtcaagttatccattacactattaatttgtcattcttttgtttatatagtcaatatctctatctcaattggatctatctcaactgcttctaaacaagccaccagtctctcccatttcaacaatctcttccaagtaccacttcatttcttcttttcatatttttgaaaacttttgaaaaactacctattttcctcctccatttcttgttcattccattctagtggacatggaatctgttcctcctccaaaacggaatttggtcacccttaaattactaaacccaaaacaatatgttgtctttatctttacctctctgtggcatttaatgataagaccactacttt

SEQ ID NO: 437841 - DNA, 570 bp, Homo sapiens
ttatctttggtggagcgagatcaagcagtgaatcattgaagactgaaagaaagaaaaaggtcttttcccttttctttaagaagcatcattagttaaaaacatgttagttgataccacagaactatatttaaagggacagcaayaagcaaattgattactctggtgattattggagtgacattgccttttagttgtactttcacaaaaattcacaatatttgccaaagtcaagttatccattacactattaatttgtcattcttttgtttatatagtcaatatctctatctcaattggatctatctcaactgcttctaaacaagccaccagtctctcccatttcaacaatctcttccaagtaccacttcatttcttcttttcatatttttgaaaacttttgaaaaactacctattttcctcctccatttcttgttcattccattctagtggacatggaatctgttcctcctccaaaacggaatttggtcacccttaaattactaaacccaaaacaatatgttgtctttatctttacctctctgtggcatttaatgataagaccactacttt

SEQ ID NO: 437842 - DNA, 549 bp, Homo sapiens
tcaggtacttaaagtgagctccaaaaatttagctatttgtaaattgtcatgcattgttaatgtataagagatgtagatttcatttatctttggtggagcgagatcaagcagtgaatcattgaagactgaaagaaagaaaaaggtcttttcccttttctttaagaagcatcattagttaaaaacatgttagttgataccacagaactatatttaaagggacagcaacaagcaaattgattactctggygattattggagtgacattgccttttagttgtactttcacaaaaattcacaatatttgccaaagtcaagttatccattacactattaatttgtcattcttttgtttatatagtcaatatctctatctcaattggatctatctcaactgcttctaaacaagccaccagtctctcccatttcaacaatctcttccaagtaccacttcatttcttcttttcatatttttgaaaacttttgaaaaactacctattttcctcctccatttcttgttcattccattctagtggacatggaatctgttcc

SEQ ID NO: 437843 - DNA, 382 bp, Homo sapiens
gattaatctgcctctcctctcactctatactatctctgttagctaattttatttgtgcacattgcttatactgggcattatatacacatatgcatgtgtgtacatgtgcayacacacactgtatgtggacatgtatatatatatgtgtgtgtgtatatatatagtatatatataaattacaataacataaaggtggcattttaaattagtggaaattaccctgatttgatcactacacattctatacatgtaaagaaaatatcactctgtatcccaagaatatgtacattatggtattgtcaaatgaaaaattcatacattgaaaaattttagataaatatcaaactttctctgaaactgtcctgtaaaatgtaaaaaacag

SEQ ID NO: 437844 - DNA, 610 bp, Homo sapiens
tcatagttttaatcagaccaaaagctaccagttttcctttccaaactgaatttgtctctcccatcccccaccttttaaaatttgatcagtttcctaataagcagcacttggtcattgcatcatatttcagrccctctaactgaaaagcatattatgcatttaatatgagaaaaactattttgaatatgtttcagtagagggaatacatatttcaatatactgtcattctttccaactggatattcattgtatcatgaatatgatttaaaaaaaaaactaatgttagagaagaaaatacaatgtcatctggtcattctgacttttcaggtgtttcttgttacatctcttcactcatttaaatgacctctcatgtgttgcacttaccctatgtcttgtaatgagctcataaaatgcccttgtgaagtattaaaactggaattttagttgaaaaataatagcagcattaattcaaggagcttagaagaaaccaattagcttcctcaaatcaacctattttcaagtggtattccacggattcttgacattgaacacttagcaatattgatccagaaaactcccaatattactttgaatgaatctcattggcttc

SEQ ID NO: 437845 - DNA, 597 bp, Homo sapiens
ctggcgaattatctggaccatgttggcyagctgcaagttgggacgaaagctgcgacgtgtaaagctctttcggcactgggggcaggtgaactgccctggaaggggcaaggaaggaggcgggtggatgtcaggatacagctcttcatcttcgtcctcatcgtatgcttccagtatttcttcttctcggtagacatcaattctcaggtcaggtctcaagcctcctaggtaatagtcctgatcttcctcttcttcttcctcctcgtcccacatatagtctacgttgtcccaattagttataccactgtcaccgagccagagttcatcgtcatcttggtcttggaacaactcttcgtcagcattcccccgatacaacacctctcgaatggagccgtcccatccatccatggcccccaccgcttcctcgtcctcctcctcctcccattcatcttcctcctcgttctggtcctcctcgtcctccttactccacagctgggtcacacaccctcggcagaagttgtgcccacagctgatggacacggggtccttgaagtaatccaagcagatggcacacaccgcttcctcctgaagggtctgcat

SEQ ID NO: 437846 - DNA, 576 bp, Homo sapiens
atttatactttatattatgaatgagattcacaaaaggagcatgataatatattctgttgtcatcgcatacaaaataataacatatagagtatgaatcaataatttttcaaatacaaagctattacaattaggaatacaaagaaatcataattaggaatacttctacaatattaacacacaatagtggtaacacttgcaaaataaaaagtggtggttttttttttttttttttttccccgacagagtcttgctcttgttgcccaggctggagtgcaatggygtgattttggctcactgtaaactccatctcctgggttcaagcgattctcctgcctcagcctccctagtagctggtattacaggtgcctgccaccacacccagctaatttttgtatttttagtagagatgggggtttcaccatgttggccagcctggtcccgaactcctgaccttaggtgatccaccagcatcggcctcccaaagtgctgggattacaggtgtgagccactgtgtccagccagtggtgggtctcatatctcaatgtggacttttactaactcccgatgcctcatttt

SEQ ID NO: 437847 - DNA, 576 bp, Homo sapiens
atttatactttatattatgaatgagattcacaaaaggagcatgataatatattctgttgtcatcgcatacaaaataataacatatagagtatgaatcaataatttttcaaatacaaagctattacaattaggaatacaaagaaatcataattaggaatacttctacaatattaacacacaatagtggtaacacttgcaaaataaaaagtggtggttttttttttttttttttttccccgacagagtcttgctcttgttgcccaggctggagtgcaatggtgtgattttggctcactgtaaactccatctcctgggttcaagcgattctcctgcctcagcctccctagtagctggtattacaggtgcctgccaccacacccagctaatttttgtatttttagtagagatgggggtttcaccatgttggccagcctggtcccgaactcctgaccttaggtgwtccaccagcatcggcctcccaaagtgctgggattacaggtgtgagccactgtgtccagccagtggtgggtctcatatctcaatgtggacttttactaactcccgatgcctcatttt

SEQ ID NO: 437848 - DNA, 480 bp, Homo sapiens
tttttaatggcggcatagtattccatggtgtatatgtacagcctgcatataaactgtgggctaaagaccttcaccagagcagtctgacagaacctctctgaaagacttctcctaggctgtaatcctcagtctcttgttctcagacccctaaataaatctaactttaatttcttaaaagcttaatttttttctttagttgacaccaaaaatctccccagccagatccacaaactttttcggtatttttcctatwttttatatcattccaggcaagcgttttctaactctcccatcagaatatgactttggtgccttttcctcagcctccactgatgattttttctcattatccttaaagccctttccagtagacttcttaagctctttcaagttttcagtctccttaaggaccattcagtgtttactgtcagttcccagaatgcttttacaggttttgctatcattttccttgaagtctgt

SEQ ID NO: 437849 - DNA, 579 bp, Homo sapiens
cagacccctaaataaatctaactttaatttcttaaaagcttaatttttttctttagttgacaccaaaaatctccccagccagatccacaaactttttcggtatttttcctattttttatatcattccaggcaagcgttttctaactctcccatcagaataygactttggtgccttttcctcagcctccactgatgattttttctcattatccttaaagccctttccagtagacttcttaagctctttcaagttttcagtctccttaaggaccattcagtgtttactgtcagttcccagaatgcttttacaggttttgctatcattttccttgaagtctgttcacttttcactaacagtctttgtgaaatccttctggcttctatccattgtctgattccaaagccaatgccacatagtttaagtttatattatattagagtgacatcttattccacgtaccacaaaccacctcaaaacttagcagcttaaaacaacaaacttaaaaaaaattgtggacttgtattagtgcaagcagggcttagctacatgattctgctccatgtggtattaactgtagc

SEQ ID NO: 437850 - DNA, 579 bp, Homo sapiens
cagacccctaaataaatctaactttaatttcttaaaagcttaatttttttctttagttgacaccaaaaatctccccagccagatccacaaactttttcggtatttttcctattttttatatcattccaggcaagcgttttctaactctcccatcagaatatgactttggtgcsttttcctcagcctccactgatgattttttctcattatccttaaagccctttccagtagacttcttaagctctttcaagttttcagtctccttaaggaccattcagtgtttactgtcagttcccagaatgcttttacaggttttgctatcattttccttgaagtctgttcacttttcactaacagtctttgtgaaatccttctggcttctatccattgtctgattccaaagccaatgccacatagtttaagtttatattatattagagtgacatcttattccacgtaccacaaaccacctcaaaacttagcagcttaaaacaacaaacttaaaaaaaattgtggacttgtattagtgcaagcagggcttagctacatgattctgctccatgtggtattaactgtagc

SEQ ID NO: 437851 - DNA, 578 bp, Homo sapiens
cagtctccttaaggaccattcagtgtttactgtcagttcccagaatgcttttacaggttttgctatcattttccttgaagtctgttcacttttcactaacagtctttgtgaaatccttctggcttctatccattgtctgattccaaagccaatgccacatagtttaagtttatattatattagagtgacatcttattccacgtaccacaaaccacctcaaaacttmgcagcttaaaacaacaaacttaaaaaaaattgtggacttgtattagtgcaagcagggcttagctacatgattctgctccatgtggtattaactgtagccatctgtggtattcagctggcagctgggtagtctggagagttgaaggtggcttcagtgatgtgcctgttttattagtggattggatgaaatgttgtggtaaggtgggcctctcttgctctccgtgtagtttgagagcctgtctacatgatctattcagcagcaatatggtttggctgtgtccccacccaaatctcatcttgaattgtagctcccataatttccgtgtcttgtgggagggatccagtgggagata

SEQ ID NO: 437852 - DNA, 566 bp, Homo sapiens
tttgaacttgagggagatgagttagggtatctggcagaagaaatttctaagcagcaaatcattcaagagtgacttgggtgtgttaaaagcactcagttttaacaggaaaacagagcataaacgttcagaaaatttgtagcaygacactgtgatagaaaagaaaaatccattttctgaggagaaatttaagctggctgcagaaatttgcataagtaacaaggagccaaatgttaatcgctaagtcttcaggccatgtcagagatttttgtggcagccccttccatcacacacccagaggcctaggaggaaaaaatggtttcataggctgggcccagggcccctctgctgtttgcctgtgtacagcctagggacttggtgctctgtgtcccagctgctccagccacagctaaaaggggtcaaggtacagctcaggccatggcttcagagggtgcaagcctcaagctttggcagcttccatgtggtgttgagcctgtggattcacagaagtccagaatcgaggtatgggaacctccatctagatttcagagaatgtatggaaatgcctg

SEQ ID NO: 437853 - DNA, 571 bp, Homo sapiens
ctggctgcagaaatttgcataagtaacaaggagccaaatgttaatcgctaagtcttcaggccatgtcagagatttttgtggcagccccttccatcacacacccagaggcctaggaggaaaaaatggtttcataggctgggcccagggcccctctgctgtttgcctgtgtacagcctagggacttggtgctctgtgtcccagctgctccagccacagctaaaaggggtcaaggtacagctcaggccatggcttcagagggtgcaagcctcaagctttggcagcttccatgtggtgttgagcctgtggattcacagaagtccagaatcgaggtatgggarcctccatctagatttcagagaatgtatggaaatgcctggatctccagacagaagtttgctgcaggggtgaggtcttcatggagaacctctgctaaggcagtggggaatggaaatgtggggttgaagcccccaacacagagtccccactagggtactgcctagtggagctatgagaagagggctgctgtcctccagaccccggaatggtagatccaccgacagcttgcactgtg

SEQ ID NO: 437854 - DNA, 513 bp, Homo sapiens
atttttgtggcagccccttccatcacacacccagaggcctaggaggaaaaaatggtttcataggctgggcccagggcccctctgctgtttgcctgtgtacagcctagggacttggtgctctgtgtcccagctgctccagccacagctaaaaggggtcaaggtacagctcaggccatggcttcagagggtgcaagcctcaagctttggcagcttccatgtggtgttgagcctgtggattcacagaagtccagaatcgaggtatgggaacctccayctagatttcagagaatgtatggaaatgcctggatctccagacagaagtttgctgcaggggtgaggtcttcatggagaacctctgctaaggcagtggggaatggaaatgtggggttgaagcccccaacacagagtccccactagggtactgcctagtggagctatgagaagagggctgctgtcctccagaccccggaatggtagatccaccgacagcttgcactgtgtgcctggaaaagc

SEQ ID NO: 437855 - DNA, 513 bp, Homo sapiens
atttttgtggcagccccttccatcacacacccagaggcctaggaggaaaaaatggtttcataggctgggcccagggcccctctgctgtttgcctgtgtacagcctagggacttggtgctctgtgtcccagctgctccagccacagctaaaaggggtcaaggtacagctcaggccatggcttcagagggtgcaagcctcaagctttggcagcttccatgtggtgttgagcctgtggattcacagaagtccagaatcgaggtatgggaacctccatctagatttcagagaatgtatggaaatgcctggatctccagayagaagtttgctgcaggggtgaggtcttcatggagaacctctgctaaggcagtggggaatggaaatgtggggttgaagcccccaacacagagtccccactagggtactgcctagtggagctatgagaagagggctgctgtcctccagaccccggaatggtagatccaccgacagcttgcactgtgtgcctggaaaagc

SEQ ID NO: 437856 - DNA, 572 bp, Homo sapiens
cccttgtgtcaggaacctgggactaagactaaatatcaaaacagaaaatgctyctattacctctgtcacgaagggctttataagagctttggaagctctatgccaggaaccaggggcagagaccaaatgtatatttcttttcttatattggagacagagtctcactctgccactgaggctggagtgcagtgatgtgatcatagctcactgcagccttgacctcctaggctaaagcaatcctcccaccttagcctctccagtagctggaactacaggcatgcatcaccatgtccagctgattttaattttaattttgtaaaggcagggtcttcctattttccccaggctgatctctaactcttggcctcaagcaatccttcctctttggcctcccaaaatgttgggattacagatgggagcccccatacccaccaatcacaaggatctttataagagaaggaggtaggagagtcagaattagagaaagtgatgtggtaatggaagaagaggtcagagagggagatttgaagatgctgcacttctggccttgaatatggagtcacgaggtaagt

SEQ ID NO: 437857 - DNA, 572 bp, Homo sapiens
cccttgtgtcaggaacctgggactaagactaaatatcaaaacagaaaatgctcctattacctctgtcacgaagggctttataagagctttggaagctctatgccaggaaccaggggcagagaccaaatgtatatttcttttcttatattggagacagagtctcactctgccactgaggctggagtgcagtgatgtgatcatagctcactgcagccttgacctcctaggctaaagcaatcctcccaccttagcctctccagtagctggaactacaggcrtgcatcaccatgtccagctgattttaattttaattttgtaaaggcagggtcttcctattttccccaggctgatctctaactcttggcctcaagcaatccttcctctttggcctcccaaaatgttgggattacagatgggagcccccatacccaccaatcacaaggatctttataagagaaggaggtaggagagtcagaattagagaaagtgatgtggtaatggaagaagaggtcagagagggagatttgaagatgctgcacttctggccttgaatatggagtcacgaggtaagt

SEQ ID NO: 437858 - DNA, 544 bp, Homo sapiens
gctggaactacaggcatgcatcaccatgtccagctgattttaattttaattttgtaaaggcagggtcttcctattttccccaggctgatctctaactcttggcctcaagcaatycttcctctttggcctcccaaaatgttgggattacagatgggagcccccatacccaccaatcacaaggatctttataagagaaggaggtaggagagtcagaattagagaaagtgatgtggtaatggaagaagaggtcagagagggagatttgaagatgctgcacttctggccttgaatatggagtcacgaggtaagtcaaggaatgggggtggcttctagaagctggaaaaggcaaaggagcacattctgtctagagcctccccagaaggaatgcagccttctgacaccttgactttagccttaatagacctagttgggcttctggcccccagaactgtaagatggtagatttgtggtgtttgatgccactaaatgtagggtactttgttgtagcaacaacagaaaatgaacatgaagctgggacctcatg

SEQ ID NO: 437859 - DNA, 572 bp, Homo sapiens
cccttgtgtcaggaacctgggactaagactaaatatcaaaacagaaaatgctcctattacctctgtcacgaagggctttataagagctttggaagctctatgccaggaaccaggggcagagaccaaatgtatatttcttttcttatattggagacagagtctcactctgccactgaggctggagtgcagtgatgtgatcatagctcactgcagccttgacctcctaggctaaagcaatcctcccaccttagcctctccagtagctggaactacaggcatgcatcaccatgtccagctgattttaattttaattttgtaaaggcagggtcttcctattttccccaggctgatctctaactcttggcctcaagcaatccttcctctttggcctcccaamatgttgggattacagatgggagcccccatacccaccaatcacaaggatctttataagagaaggaggtaggagagtcagaattagagaaagtgatgtggtaatggaagaagaggtcagagagggagatttgaagatgctgcacttctggccttgaatatggagtcacgaggtaagt

SEQ ID NO: 437860 - DNA, 480 bp, Homo sapiens
tagggtactttgttgtagcaacaacagaaaatgaacatgaagctgggacctcatgttacagttgctcacgcctgtaatcccagaactttaggaggctgaggtgggaggatcgcttaagcccaggagcttaagaccagcctgggcaacataatgagacctcatgtctaaaaaaaawttttttaaaaggccaggcgcagtggctcaagcctgtaatcccagcactttgggaggccgaggagggtggatcacgaggtcagaagttcaagaccagcctagccaagatggtgaaaccccatctctactaaaaatacaaacattagccaggtgtggtggtgggtgcctgtaatcccagctactcgggaggcagagaatcacttgaacccaaaaggcagacattgcagtgagccaagatcgcacccttacacttcagcctgggcgaccgagactccttctcaaaaaaaaaaaaaaaaaaaagccatg

SEQ ID NO: 437861 - DNA, 480 bp, Homo sapiens
tagggtactttgttgtagcaacaacagaaaatgaacatgaagctgggacctcatgttacagttgctcacgcctgtaatcccagaactttaggaggctgaggtgggaggatcgcttaagcccaggagcttaagaccagcctgggcaacataatgagacctcatgtctaaaaaaaatttttttwaaaggccaggcgcagtggctcaagcctgtaatcccagcactttgggaggccgaggagggtggatcacgaggtcagaagttcaagaccagcctagccaagatggtgaaaccccatctctactaaaaatacaaacattagccaggtgtggtggtgggtgcctgtaatcccagctactcgggaggcagagaatcacttgaacccaaaaggcagacattgcagtgagccaagatcgcacccttacacttcagcctgggcgaccgagactccttctcaaaaaaaaaaaaaaaaaaaagccatg

SEQ ID NO: 437862 - DNA, 480 bp, Homo sapiens
tagggtactttgttgtagcaacaacagaaaatgaacatgaagctgggacctcatgttacagttgctcacgcctgtaatcccagaactttaggaggctgaggtgggaggatcgcttaagcccaggagcttaagaccagcctgggcaacataatgagacctcatgtctaaaaaaaatttttttaaaaggccaggcgcagtggctcamgcctgtaatcccagcactttgggaggccgaggagggtggatcacgaggtcagaagttcaagaccagcctagccaagatggtgaaaccccatctctactaaaaatacaaacattagccaggtgtggtggtgggtgcctgtaatcccagctactcgggaggcagagaatcacttgaacccaaaaggcagacattgcagtgagccaagatcgcacccttacacttcagcctgggcgaccgagactccttctcaaaaaaaaaaaaaaaaaaaagccatg

SEQ ID NO: 437863 - DNA, 480 bp, Homo sapiens
tagggtactttgttgtagcaacaacagaaaatgaacatgaagctgggacctcatgttacagttgctcacgcctgtaatcccagaactttaggaggctgaggtgggaggatcgcttaagcccaggagcttaagaccagcctgggcaacataatgagacctcatgtctaaaaaaaatttttttaaaaggccaggcgcagtggctcaagcctgtaatcccagcactttgggaggccgaggagggtggatcacgaggtcagaagttcaagaccagcctagccaagatggtgaaaccccatctctactaaaaatacaaacattagccaggtgtggtggtgggtgcctgtaatcccagctactygggaggcagagaatcacttgaacccaaaaggcagacattgcagtgagccaagatcgcacccttacacttcagcctgggcgaccgagactccttctcaaaaaaaaaaaaaaaaaaaagccatg

SEQ ID NO: 437864 - DNA, 627 bp, Homo sapiens
ataattgaatgatggggtggctcccccatactgttcttatggtcgtgaataagtctcatgagagctsatgactttacaaggggcttcccctttcactcagctctcattgtctcttgtctgctcccatgtaatgcatacttttcaccttctgccatgattgtgaggcctccccatccacatggaactgtgattccatgaaactctttttattcataaattacccggtcttggatatgtctttatcagcagcatgaaaatggactaatgcaagcagaataagcagaattcttcgatactgactcagcacccacacacgttggttccaagatgtagaaatggaagcttcaaggcttttaacatctggacatcaaaactggaagttttactttcactgtattttattggtcaaagcagtcaaagagcccacccaggttcaaggagaaagaatatgtccccacgttttcaacgggatggtgccacaaaatttctagtcatcttaattcaccacagatagaaatatgaagagctcatttgttatgttatttgtgaatgcagactaaagatatttgttggtttatatagtagtgggaaaatgagaacttttaaaatattcaacttttagccctt

SEQ ID NO: 437865 - DNA, 428 bp, Homo sapiens
tgggaaaggcagacctacccttaagctgaatgggcacaatctaatcagctgccaatgcagctagaatatargcaggcagaaaaacatgaaaagagagactgacttagcctcccagcctacatctttctccagttctgaatgcttctggacctcaaacattggactccaagttcttcagttttggaacttggactggttctctttgctcctcagcctgcagacagcttattatggggccttgtgatcatgtgagttaatactttaaaatctcccctatacatatatatatatatatatatatatatatatatatatatatatatatatattagttctgtccctctagagaaccctgactaatacagattttggtaccaggagttgttctagaggaagagaatattaaggatggggttcttttgttggtt

SEQ ID NO: 437866 - DNA, 428 bp, Homo sapiens
tgggaaaggcagacctacccttaagctgaatgggcacaatctaatcagctgccaatgcagctagaatataggcaggcagaaaaacatgaaaagagagactgacttagcctcccagcctacatctttctccagttctgaatgcttctggacctcaaacattggactccaagttcttcagttttggaacttggactggttctctttgctcctcrgcctgcagacagcttattatggggccttgtgatcatgtgagttaatactttaaaatctcccctatacatatatatatatatatatatatatatatatatatatatatatatatatattagttctgtccctctagagaaccctgactaatacagattttggtaccaggagttgttctagaggaagagaatattaaggatggggttcttttgttggtt

SEQ ID NO: 437867 - DNA, 458 bp, Homo sapiens
ggttttgatcaatgtataatgtcaggtatcccccattatagtatcatatagaattgtttcactgccctaaatacaccctctgttttaccatttcaatcctgcctctcttttcccaaatccttggaaaccactggtatttttagtctctatagttttgcyttttccagaatgtcctatagttggaatcacacagtatgcagctttttcagactggtttctttcacttgacttgacatctcgacctcattatattttagcacagacccctactcatagcaagacctcagtaaatattttatgagctgctgttgatgataactcccattaagcaaagcttcatggaggaagtggcatttgagctgatctttgaaagatgagcaggattctacatgacagctaaaacatccagcagaagaaataaacaaagtgacattaacaaagtcacaaaggtaaagttc

SEQ ID NO: 437868 - DNA, 648 bp, Homo sapiens
ctcgcattaccaaaaccttttaggcaataactgctgtactccagccaaaaaccacagaaagaacagtggccccacttccgcytacaccagaaaaggcagagtggggagcctagacttctacccttgtcgtgctgtagcgaggtgttctaagctcctgctgtagggtggtgttagagcaagctaagtagaaaactgggactttattcctattggatgttgatgaagacatccccatactcacagcatcagtgaggagactgagttctatctctacctagcagtaatgatgctatcttcccctacacatagaggtagtgtcaaaggagacctagtagagactgagaaagttcaaccctgcccaccccacccaagtggtgtcagtagagggcaggaacaaggcactcccagctttcccagtcagggtaatatcagcagagacctttcagggagtgggagctcccacctcatgccagcagtaatgagggagaccctcaccccttggggtgttaatagagtcccagtggggaaactggacttctactctgcctagaagtagtgcagcaggactatccttctcctcttctctttccaatatagcgtcagagatgatcacctaaaacagaaggcttataaaaattcaaaatctca

SEQ ID NO: 437869 - DNA, 521 bp, Homo sapiens
cctcaaattttgatttcaaccccagccttataaaccaaaacacgattgctcttctggtcaaaggctatggttttaaaactaggctctctcctgacatcgatcaacccagccattatagttcagcaggccgggcctaaaatgtttaccctgttattttcattaatagaactggagaaatacaccagcaaaattgagaattgtgtttatttaaccaaatcacacaaatgcacagccccttgccttgattataattagtaaatggaaaaatttttgtattttcacaagtatgtttcatttttaaacaccattttataccaaggaaaaagccaccacttttaccaatgagatcaagaaagtaaacaaaaatgtcatttaagcatttgttaattgacagactgtgytggttaacacagtggtcattaattgcctttggtgtaattttagcatgcacaagcataaggtttgctggaccagctgccaaagaggacattggtgaagagaaagaaagctagacccagtaa

SEQ ID NO: 437870 - DNA, 540 bp, Homo sapiens
acagactgtgctggttaacacagtggtcattaattgcctttggtgtaattttagcatgcacaagcataaggtttgctggaccagctgccaaagaggacattggtgaagagaaagaaagctagacccagtaatagtagaggctgataaaactgamaaagctgcaaaggtgcatctgtgggttaagtcaagaagtcctacatgtgatgtcagggagcatggcaaccctttagaggacactttggccatatctgtaaaacttttaaatccatgtaccatttgacccagaatttccatttgtatcagtcaggattgcacttggttgtgtgcacctacaacccgattagagacttaaccaaatagagctttatttttgtcttaagaagggacttggaataaggtatccatttgtgctaagcgtgtgacttttattgcctttcccaggcaaattccagggtaaaggagaaagggcaaagggcaaaagagtcatgtccagctgagcctgtcatgtaaaacaagctccctcagaagggaaaatctgtc

SEQ ID NO: 437871 - DNA, 540 bp, Homo sapiens
acagactgtgctggttaacacagtggtcattaattgcctttggtgtaattttagcatgcacaagcataaggtttgctggaccagctgccaaagaggacattggtgaagagaaagaaagctagacccagtaatagtagaggctgataaaactgacaaagctgcaaaggtgcatctgtgggttaagtcaagaagtcctacatgtgatgtcagggagcatggcaaccctttagaggacactttggccatatctgtaaaacttttaaatccatgtaccatttgacccagaatttccatttgtatcagtcaggattgcacttggytgtgtgcacctacaacccgattagagacttaaccaaatagagctttatttttgtcttaagaagggacttggaataaggtatccatttgtgctaagcgtgtgacttttattgcctttcccaggcaaattccagggtaaaggagaaagggcaaagggcaaaagagtcatgtccagctgagcctgtcatgtaaaacaagctccctcagaagggaaaatctgtc

SEQ ID NO: 437872 - DNA, 539 bp, Homo sapiens
ccaataaacaatcaattcagsgttcccaaatctatggatattagagtaatcagaaaagaatgcagaatagttactatgagttgtttaaagatataaagattataataagaaaatactgggaactaatagatttacaaaatataactcttgatgtaaaaatacatgaatctgtttaacagcagattatgggaagaatttaaccagcatttacttaggagagacaacaagatagaaaatgtgaaagagaggttaagggatgagaattgaatgagaaaatctaatataggaatgactgatgtctccagaggaaaaaacaaacaaaatgttggagagaaagtagtttaaaccagtggtctccaacctttttggcaccaggcaccagtttcatggaagacaattttccacggaaggggggttggagggaatggttttgggatgaaactgttttacctcagattatcaggcattagattctcataaggagtgagcaacctagatcccccacatgcacagttgacaatagggttcatgcttctgtg

SEQ ID NO: 437873 - DNA, 539 bp, Homo sapiens
ccaataaacaatcaattcagggttcccaaatctatggatattagagtaatcagaaaagaatgcagaatagttactatgagttgtttaaagatataaagattataataagaaaatactgggaactaatagatttacwaaatataactcttgatgtaaaaatacatgaatctgtttaacagcagattatgggaagaatttaaccagcatttacttaggagagacaacaagatagaaaatgtgaaagagaggttaagggatgagaattgaatgagaaaatctaatataggaatgactgatgtctccagaggaaaaaacaaacaaaatgttggagagaaagtagtttaaaccagtggtctccaacctttttggcaccaggcaccagtttcatggaagacaattttccacggaaggggggttggagggaatggttttgggatgaaactgttttacctcagattatcaggcattagattctcataaggagtgagcaacctagatcccccacatgcacagttgacaatagggttcatgcttctgtg

SEQ ID NO: 437874 - DNA, 566 bp, Homo sapiens
tgccagacagcaagatgtgatttataaaattagtactgttaacaamgatctgaaaatgtccttaatgcagcagttctcagcacaagtggcacagtagatttcactagcgggggctggggaagctttgaaaagttttcatactctggctacatatgagatcaactaaataagaacccctagttgggggatatctgtacttctgaagctcccctggagattcttatgaggagtcaagattgagaaccacatgcatatcactcttaaggcaccatagcatctgccctccatttttggaattggcagcaaaaatggcatggcatgcaacagtccatggtgtaaaccggctgtttgaggagtatatgttctaacatgagaaccatgaccaaagggacaaagcagctagtgtgcttgggtggtgacaatgcagaaggccttgtggttctgggaattaccacagaattgaagagggggaaaagatccttaggcttccatactccaactggctgatattacaactaagagaaacaaatgaggttacagaaagttgctgacacaggcaggacagg

SEQ ID NO: 437875 - DNA, 566 bp, Homo sapiens
tgccagacagcaagatgtgatttataaaattagtactgttaacaacgatctgaaaatgtccttaatgcagcagttctcagyacaagtggcacagtagatttcactagcgggggctggggaagctttgaaaagttttcatactctggctacatatgagatcaactaaataagaacccctagttgggggatatctgtacttctgaagctcccctggagattcttatgaggagtcaagattgagaaccacatgcatatcactcttaaggcaccatagcatctgccctccatttttggaattggcagcaaaaatggcatggcatgcaacagtccatggtgtaaaccggctgtttgaggagtatatgttctaacatgagaaccatgaccaaagggacaaagcagctagtgtgcttgggtggtgacaatgcagaaggccttgtggttctgggaattaccacagaattgaagagggggaaaagatccttaggcttccatactccaactggctgatattacaactaagagaaacaaatgaggttacagaaagttgctgacacaggcaggacagg

SEQ ID NO: 437876 - DNA, 566 bp, Homo sapiens
tgccagacagcaagatgtgatttataaaattagtactgttaacaacgatctgaaaatgtccttaatgcagcagttctcagcacaagtggcacagtagatttcactagygggggctggggaagctttgaaaagttttcatactctggctacatatgagatcaactaaataagaacccctagttgggggatatctgtacttctgaagctcccctggagattcttatgaggagtcaagattgagaaccacatgcatatcactcttaaggcaccatagcatctgccctccatttttggaattggcagcaaaaatggcatggcatgcaacagtccatggtgtaaaccggctgtttgaggagtatatgttctaacatgagaaccatgaccaaagggacaaagcagctagtgtgcttgggtggtgacaatgcagaaggccttgtggttctgggaattaccacagaattgaagagggggaaaagatccttaggcttccatactccaactggctgatattacaactaagagaaacaaatgaggttacagaaagttgctgacacaggcaggacagg

SEQ ID NO: 437877 - DNA, 570 bp, Homo sapiens
atatcccattttgttcttgtgatcttctatcacagctcagaagtgacttctctttttttgtgatcacttacagaacatacatctctcactcttctgactctcatcatttactctcccatattartatctatttgtccatatggtacatatatttttccctctaataaactgttagtatcacaaaatctcacacaaagttgatactcaatataggcttccagatatgttggctattttaatattcaattcactttatatttccctttccatatttttatcatgctaaagaaaagaaaaaaattacatttgtacaacaaaggaaatttaagctgtaaatctgaattgaaatctaaatgtaaattttaaactctaaaattgagccattcgatggctttctaaacaaactagggtgtttcagcctctttataaaagtgaaagtgctgatggcaggaaggtatttttgtattaagctattgtcagtgatgagatatctctgtcatcctaattgttcatttctcacccaacgtctttccacctgacattttccctgaaaaatatgaccttcatatc

SEQ ID NO: 437878 - DNA, 570 bp, Homo sapiens
atatcccattttgttcttgtgatcttctatcacagctcagaagtgacttctctttttttgtgatcacttacagaacatacatctctcactcttctgactctcatcatttactctcccatattaatatctatttgtccatatggtacatatatttttccctctaataaactgttagtatcacaaaatctcacacaaagttgatactcaatataggcttccagatatgttggctattttaatattcaattcactttatatttccctttccatatttttatcatgctaaagaaaagaaaaaaattacatttgtacaacaaaggaaatttaagctgtaaatctgaattgaaatmtaaatgtaaattttaaactctaaaattgagccattcgatggctttctaaacaaactagggtgtttcagcctctttataaaagtgaaagtgctgatggcaggaaggtatttttgtattaagctattgtcagtgatgagatatctctgtcatcctaattgttcatttctcacccaacgtctttccacctgacattttccctgaaaaatatgaccttcatatc

SEQ ID NO: 437879 - DNA, 551 bp, Homo sapiens
catttttacaatgtccatgctcctatttgtgagcatggaattgtgtttttcctgatatttatatatgtgtatatatatatatacacacactcacatacatatatatacatatagttttgtgtatgtgtgtgtatgtgtgtatatgtgtgtatgtgtgtgtacatatatacacacacacaaatatatatatatatctttttcccacaaattcttgaaaaacaaaaatgagctatcatgtttattmgctgcaggtaatggtgtgctgtgaaaacttaaacaattggctttccaaataaaagccctgattcatggcatctgccaacttctgtggtgtaaatactcctactgtatctggtttcaaattaagggaggagaccacccctcatatgccttatgcccaatttctgcctccaaagaaagaaaaagtaaaaactaaaaggcagaaatgaaatccacaagcagacagcccggcgccacaccctgggcctggtagttaaagatcgacccctgacctaatcggttatgttatctatagattacagacattgtac

SEQ ID NO: 437880 - DNA, 589 bp, Homo sapiens
ctcagggtagcaggttattcctgcatccccagagckccccagaagcccagcaccagagctcattctgagagtatctgcactccctctgggatcggctgaccctgcttctgacccttttagactcttggcgtggtctggacaagcaggcttctttccccagcttcctggcaaccatgatgtcatccagaatgttctctctccagcctgacctcatttccatcttgctgcctctctctaatgctgccactctccttgccatggaatttgctggcgggcccatcagcagggtgcctccttctgcccctcctaagtgtctttggtgccctcgtgcccatgagcaggagtctgttacgaggctgcatttggaccagcccccagtggagtctcactgttttgttcccagctccacagggagggcaatgtgacccatccacacctgcacacagtgcctgccaaggcatgacgtgctgaggaagacgtttgcaaatttgaaggctgatgaggataaggttctcggagagttcctgctgtacatctgtggcctagggcttctccttatggagaataaagtgagtcaaattcaattggc

SEQ ID NO: 437881 - DNA, 589 bp, Homo sapiens
ctcagggtagcaggttattcctgcatccccagagctccccagaagcccagcaccagagctcattctgagagtatctgcactccctctgggatcggctgaccctgcytctgacccttttagactcttggcgtggtctggacaagcaggcttctttccccagcttcctggcaaccatgatgtcatccagaatgttctctctccagcctgacctcatttccatcttgctgcctctctctaatgctgccactctccttgccatggaatttgctggcgggcccatcagcagggtgcctccttctgcccctcctaagtgtctttggtgccctcgtgcccatgagcaggagtctgttacgaggctgcatttggaccagcccccagtggagtctcactgttttgttcccagctccacagggagggcaatgtgacccatccacacctgcacacagtgcctgccaaggcatgacgtgctgaggaagacgtttgcaaatttgaaggctgatgaggataaggttctcggagagttcctgctgtacatctgtggcctagggcttctccttatggagaataaagtgagtcaaattcaattggc

SEQ ID NO: 437882 - DNA, 589 bp, Homo sapiens
ctcagggtagcaggttattcctgcatccccagagctccccagaagcccagcaccagagctcattctgagagtatctgcactccctctgggatcggctgaccctgcttctgacccttttagactcttggcgtggtctggacaagcaggcttctttccccagcttcctggcaaccatgatgtcatccagaatgttctctctccagcctgacctcatttccatcttgctgcctctctctaatgctgccactctccttgccayggaatttgctggcgggcccatcagcagggtgcctccttctgcccctcctaagtgtctttggtgccctcgtgcccatgagcaggagtctgttacgaggctgcatttggaccagcccccagtggagtctcactgttttgttcccagctccacagggagggcaatgtgacccatccacacctgcacacagtgcctgccaaggcatgacgtgctgaggaagacgtttgcaaatttgaaggctgatgaggataaggttctcggagagttcctgctgtacatctgtggcctagggcttctccttatggagaataaagtgagtcaaattcaattggc

SEQ ID NO: 437883 - DNA, 499 bp, Homo sapiens
aacatctagctggcacacacctcactcaataaatatctccagttcaatgattaaatgataggcaccctttaaagccacaaaaagaataataagtataatatataggtctttgaaagtttgtgcatgaagacaattagtcttgagcaatagcaaatggtattagagagtttataatgttggggtgtataagaagttggtaagtaaaggcagaagaattactctaaaatgaaccatgagggaagaattgctagaatctggttattgtrtgatgatgatgatgatgatgatgaggatgaggatgaggatgatgatgatatgcaaaaaatgagacttatggaatgatactgtcattaagaataggacaaatggtcacctatatccctgggtgattcaagcacaatctttagtagaggtctgtttctggctcagtagtcctggggtgattgcagccccacacaggcatcctaggccaatatctaagatactcccttttgtgtat

SEQ ID NO: 437884 - DNA, 614 bp, Homo sapiens
cacctcattttcaagattgtagcaggttacagataacaacgcagcactggatgaacactttgaaggcttcctgttcaaggaaaggttaagaaaaatgaactccgactaggtggttaaaatgacctaccagactaactagtaagaatttttatcaagctatgttgatgatagctgaactaagacaatggcaaacaatggtttgaaacatctctggatgaaacagtaaaggagcaaagtgtcttaaagagcttactccacttaatagttcttcatcaaccaggttccaatcttttaaccctggcctctctgaggagacccatcaaccatacctcctagccattcctcagcccaacccgcttactgtgccttgttgaactgtcggttgctgcctcttcagttgacatttcctttggactatctgtttcattctcaactctggcttcaccctgggatcgtagcttgtgaatgcccttaacgccgtaccctgacactttagcaccagtccacaccccctgcgcttctagtycagcccccagagcgccatgccgtatggaactctgatctcactttcagcaaggaagtacccacaggaagggagccatttttacagcatc

SEQ ID NO: 437885 - DNA, 591 bp, Homo sapiens
tgggcaaggtgtggctcacgcctgtaatcccagcacttccggaggccaagggaggcagatcacccgagattaggagttcgagaccagcctggccaacatggtgaaaccccatctttactaaaaatacaaaaattaactggtcataggggtgcacacctgtaaccccagctactcaggaggctgaggcaggagaactgcttgaacccagaatgtggaggttgctatgagctgagatcacrccactgtactccagcctgggtgacagagcaagactgtgtctcaaaaaaaaaggaaatgaaaacagaatgaattgctgaaggtagcaatgtagataaatataaaagctagcattattgtatttttggtttgtaactcctcttcttactacctatttgatttaaaagataaatatagaaacaagtaattataaaaccatgttaatggccatataatacataaaatgtaatttgtcacaataacaaaatcaaggggaatggagctgtataggagtagaggttatttaaatgcaatttaagctaagttggtgtcaattcaaatgaaattgctgtaaatttgggattttaattgtta

SEQ ID NO: 437886 - DNA, 591 bp, Homo sapiens
tgggcaaggtgtggctcacgcctgtaatcccagcacttccggaggccaagggaggcagatcacccgagattaggagttcgagaccagcctggccaacatggtgaaaccccatctttactaaaaatacaaaaattaactggtcataggggtgcacacctgtaaccccagctactcaggaggctgaggcaggagaactgcttgaacccagaatgtggaggttgctatgagctgagatcacaccactgtactccagcctgggtgacagagcaagactgtgtctcaaaaaaaaaggaaatgaaaacagaawgaattgctgaaggtagcaatgtagataaatataaaagctagcattattgtatttttggtttgtaactcctcttcttactacctatttgatttaaaagataaatatagaaacaagtaattataaaaccatgttaatggccatataatacataaaatgtaatttgtcacaataacaaaatcaaggggaatggagctgtataggagtagaggttatttaaatgcaatttaagctaagttggtgtcaattcaaatgaaattgctgtaaatttgggattttaattgtta

SEQ ID NO: 437887 - DNA, 629 bp, Homo sapiens
agtcatggattgaaggccaggaggatttcctgaatttctctgcctaaggctcatggcccatgggcacttggccaccctaggcaggctcagagcaagcacctcttttcacctgaaaaagtttttggctgttgaacccccagcatgatttcctagcagtgcctctgtatactttgctcactcatatccacaaccagaacttatccatctactctggtatactaggagwgtagcttccttccctagctctgggtttgcctcaagaatggcagagttgaaatagatctatcagaaacactttctagagggctcatgaaagaagggtgcttgttctccccaaccttcagaaagcaaaagcactttgatttcacctgaattaaaaataaattctaatgaaatacctgatacgaatgtaaaagtatcttttggaaaaattcactccatgctttgaaattaattccaaggcacacttacatttatctttgatttagaaaggagaaaattgctttcctttttgttctttaaaatttatgtaactgtaacggagaaaattagagtacatgaagtatagaaattgaatcataatccagtgcaatgcatttccttttccagaaagtcaaatgtcatttgca

SEQ ID NO: 437888 - DNA, 648 bp, Homo sapiens
tcgatgacttttcagcatctcttggttgttaaaagatccaagggtgcagtggctcacgcctgtaatcccagcacttttggaggctgaggcaggtggatcacctgaggtcgggagttcaagacaggcctggccaacatggtgacaccccatctccactaaaatacaaaattagatggcgtggtggtgcatgcctataatcccagctactcaggaggctgaggcaggagaatcgcctgaacctgggaggtggaggttgtggtgagccaagatcgcaccattgcactccagcctgggcaacaagagcaaaactcggtatcaaaaaaaaaaaaaaaaaaaaaaaaaaargattctggagggcggtgcctgagattttgcatttctagcaagctctaggtgaccatgctgcatgtcagggaaccatgcttgagaacaactgctccacagggctttccccatctcacctcctctctttgagggtgctgttggctatcagcccaagggcatcctcatctcaacataaaatacaacaatcccaacccagtaatttccagatgagagagaacaactgtgtgtgggtacaggtgttggatggagagagtgattggcaagagctgacatttaccaacggatcgcccaccccctttactg

SEQ ID NO: 437889 - DNA, 603 bp, Homo sapiens
aggacttcaacatacctttttaggggacataatgcaactcataacaatgtatgacagcaggaaaaagtcagtagaaggtttgaactgtaaagatttcctgggaagaaaatctcccagaaagtggaacaaaagtggaacaaagggcaaagagatgaaaattaggagaaaaaatagaataaatttagaggacaagtccagaccatctaaaatttaaatagtaggagctctgaggagaaaaataaaaaaaaaacaaaacacacacacggaagggaattactaaaagaataattcactgaatgacyaacacacaaaatgaaacatagttgtggactgttacaatataggtgatcaatacataatcctgaagggggtaaaacaggtaatatacaaggattgtcacaaagaatggcataggaattctcagtggtgacactggaatctaaaagacaaaacaaaccttagaattttgaaggaaactgatttcgaaagtactgtactcaaccaatctctcaggtccagtcaggtgctaacatattgtaaagatagctcagacatggtaggcctcaaagtgtctctcccatagaccattttccagcctttcag

SEQ ID NO: 437890 - DNA, 550 bp, Homo sapiens
gacagcaggaaaaagtcagtagaaggtttgaactgtaaagatttcctgggaagaaaatctcccagaaagtggaacaaaagtggaacaaagggcaaagagatgaaaattaggagaaaaaatagaataaatttagaggacaagtccagaccatctaaaatttaaatagtaggagctctgaggagaaaaataaaaaaaaaacaaaacacacacacggaagggaattactaaaagaataattcactgaatgaccaacacacaaaatgaaacatagttgtggactgttacaatataggtgatcaatacataatcctgaagggggtaaaacaggtaatatacaaggattgtcacaaagaatggcataggaattctcagtggtgacactggaatctaaaagacaaaacaaaccttagaattttgaaggaaactgatttcgaaagtactgtactcaaccaatctctcargtccagtcaggtgctaacatattgtaaagatagctcagacatggtaggcctcaaagtgtctctcccatagaccattttccagcctttca

SEQ ID NO: 437891 - DNA, 603 bp, Homo sapiens
aggacttcaacatacctttttaggggacataatgcaactcataacaatgtatgacagcaggaaaaagtcagtagaaggtttgaactgtaaagatttcctgggaagaaaatctcccagaaagtggaacaaaagtggaacaaagggcaaagagatgaaaattaggagaaaaaatagaataaatttagaggacaagtccagaccatctaaaatttaaatagtaggagctctgaggagaaaaataaaaaaaaaacaaaacacacacacggaagggaattactaaaagaataattcactgaatgaccaacacacaaaatgaaacatagttgtggactgttacaatataggtgatcaatacataatcctgaagggggtaaaacaggtaatatacaaggattgtcacaaagaatggcataggaattctcagtggtgacactggaatctaaaagacaaaacaaaccttagaattttgaaggaaactgatttcgaaagtactgtactcaaccaatctctcaggtccagtcaggtgctaacatattgtaaagayagctcagacatggtaggcctcaaagtgtctctcccatagaccattttccagcctttcag

SEQ ID NO: 437892 - DNA, 527 bp, Homo sapiens
ttaaattgctttgtaaactataatttgttttgacacagaagttattcgttatttgttaatagttacacctctgagaattaagaayattcaagtcacagcatgcagaacagtccagcaatgatagatctgaagattgtaaagaatttaaagacctccactgttccaaggattctatcctagctgaggaagaacctgagttcccttctacttctatctctgcagttctgtctgacttagctgacttgagaagctgtgatggccaacctttgccctcccaggacgccgaggttgctttatctctcagttgtggccattccagaggactctttagtcatatgcagaaacatgacattttagataccctgtgtaggaccatctggcaaaggaaaccaagctgcttcttgacattaggtgtggcatgtctacttttaagtccctcacccccaacccccatgctgtttgtacaagttttgcttacttatttttgtgcttcagtttgtccagtgctctctgcttgaatggcaaga

SEQ ID NO: 437893 - DNA, 371 bp, Homo sapiens
ggatccctagggggtagtctgcacaccaagacccaaaggtaaactggagttggctaggtaacagagagagagagagagagaggataatgatatggtttggctctgtgtccccactgaaatctcatctctaattgtaatccccacatgtcaagggagggaggtgattggatcatgggggcagtttcccmcatgctgttctcatgatagtgagggagatctcacaagatttgatggttttataaggggcttttcccccttagcttacacctttctcttgcctgctgccttgtaagacatgcctacttccccttccaccatgattgtaagtttcctgaggcctctacagccatgcagaactgtgagtcaattaa

SEQ ID NO: 437894 - DNA, 576 bp, Homo sapiens
gacaagaaaaattatagcagatatggatataactcaccaaaagatgaatagtaaactcgtaattccagttcagtgcagctttggaagaataaatcacaataaacatgaggcacaaagtggttcttccttggggatttcatgtcttcaagttttgagttgttggccctgaatggaaatatgatggtttagatatacaacaatttatttcttaaacaaaaaaaaagactcgcaagccctgtcttaaaggtcatccatacacaagaacttttgaaaagagacacaaaaggaaggaggagcatgaaggaatcaacttagcattctctgcccagacctttgggtgaagaaatggtcacagtaggggaatgcgggttgataggctgagaatggtgcctgtaaataggacaaaggtagcagatgtttgagtaagaaatacttacacataatttatgaacaaaaagactcagagaacactattmattttcgctacatgcaatatactttggtattttcaattctatcatagagtatctttccacatttttaatttaattctggtagcatcccattaaatggaca

SEQ ID NO: 437895 - DNA, 611 bp, Homo sapiens
aacaggctaatacagaatgagtcaggtatttaggaggcaaagtagtcttttcaggccccaacctcagttggttccctactgaggcagttaatcaaggagacgagacttagtaactgaatagttaawgagcctcccttcgaatctgataaccaaggaagaactcacatactagaaggactagagctggctccatatctttctacgatttcccagtgttggcattgcatcctttttttggtcagttagcaagaattacaatgttttcaaatagtcatgtctggcccttttgtacaggccattggccaatactgtccccatcttcccccacccctgcctctgctgagactatttttaataaattaacattcttatctatgttgacttatttgttgacaacaagattgcaagccaaaagaaatggagatgtaggaaggatgctaccacggggaggcgggtgttctctggatgcagaagatgatatacagtcatcagttacacacaaatgtcagggattcttcactcaaaagaaaggagaaagccaccactttgaaagaaaggaaatagtcaatatatttgacaacctgtatggaatggacctgaccaatgggaac

SEQ ID NO: 437896 - DNA, 543 bp, Homo sapiens
tggttccctactgaggcagttaatcaaggagacgagacttagtaactgaatagttaaagagcctcccttcgaatctgataaccaaggaagaactyacatactagaaggactagagctggctccatatctttctacgatttcccagtgttggcattgcatcctttttttggtcagttagcaagaattacaatgttttcaaatagtcatgtctggcccttttgtacaggccattggccaatactgtccccatcttcccccacccctgcctctgctgagactatttttaataaattaacattcttatctatgttgacttatttgttgacaacaagattgcaagccaaaagaaatggagatgtaggaaggatgctaccacggggaggcgggtgttctctggatgcagaagatgatatacagtcatcagttacacacaaatgtcagggattcttcactcaaaagaaaggagaaagccaccactttgaaagaaaggaaatagtcaatatatttgacaacctgtatggaatggacctgaccaatgggaac

SEQ ID NO: 437897 - DNA, 612 bp, Homo sapiens
tatggaatggacctgaccaatgggaacagtgacacgagctgaaattcacttcagcttttggggttgctgccacacttgggtagagacctaaagatcaacttttctttaacctgcatcattaatcgtataaaccttccagctcacaggtatccatacctgtgaggaagcaagcaaaaactgtttaacttggccaatgtgggggaaaagtctatattcatccagttaaaaatatggagcagcatcccatattcaaggcagtttgtcttcagtaggggccctttaatgctaaattccctaaaagttcatatttcttctaaaattcctggagtaaacggcagacaaagacwgagagacaaagagagaaacagaggcagagaaagaaagaacattatcagatgtcattcccgatctccttctctttttaaattaaaatccaggacactctctactaaaactcaccaaagctgggaaatatgccctagccctcagtattagccttgcggctctgagcaacttcctggtctcctctgactctattttcctgtctgtgaagttagaagacagggagaggaaaataaagcacagcctgacatcatatgccaggaataagtc

SEQ ID NO: 437898 - DNA, 527 bp, Homo sapiens
gtctcagagctcagaggtggctaggagctgagttcgtcagaactccaagagatctaccaatgattctcaaaattttagccaatgatatcctccgacagttggagcaaccatttatgataggattgtgggtaataattgctggtggttattaattggctattaattataattggtgggtaataattgctggtgacaatgactgtaggataggattgtgggtaataattgccagtggttattaattggttattaattataattggtgggtaataattgctagtgaaaatgaatgtaggagtcctgtcttactgggtgctcactatattctaggtctgctgctgagctctctgcaagggttacgccctctaaccctctcaaggagcctctgatactattaaattacccccatttttcagacwtggaaaaggaagcttagaaggatgattaattcactgaggccacacagctgatagacggtagtggcaaaattataaacaaagcagtctattctcctgagaacaaggtgc

SEQ ID NO: 437899 - DNA, 619 bp, Homo sapiens
tatgtgcacaaaattccacatagcatattcattgaagtttttttgttatggtaaagaatggggaaaatgtgtttatactaaaagaaaagataaattatggaatatattcagccatgcacaggtaaatgtttaataatcggctcttttaaaaaaagtaaaaacaaacaagcaaacaaacaaaaccaarcctttatttgtagtgtttgttgattgccatggtcaatttcaagctaccaacaccatgtcactgaatgcagtgttgggaagagatgtacacagtgggctccatctgcgccagcacaatactaaatatatgcacacacccacctattcttgcctgcaccagatataagaatctttggcattagagcaatcttcaaggtctagagcctgcatctctctacctcagacttactactgggcaggtgggctagtcctgctgtcaaaaaagcatttcctgtcacaaaagacttttagaaggtgaacagtagagcttcttgagctgtaaaataggaggcatgtcaactgggggcctgcttctgatgggcagaagcgttctatggctgatttttgttttacctaagccactgatggtgaggtgataaaaggccatcttcca

SEQ ID NO: 437900 - DNA, 537 bp, Homo sapiens
aaggcccctcctgcttagacagatgaacaagattagagtgaagaagggaagccaggacagggttgcttagtcttgttgggctgctaggctgctcctactctcaggagatgtagattatgtttcagtattttccatcctctttatcagtgctgcctcgaatccctgtttatggagaacagctagatataaacaaatgytattgttcacagctattagttggaaaattgagttgttttctccagtgtttgccttgcaaattcacggaacatcaatacttaatggaacatgatttaagaaacaccaactttaaaaggggttctttcccattacaatttgttttatcctggttgtcacatctgcaccaccctattatgtgccaggctctgtgccttcatctgatattttatgtaacctttaccatgcctctgtaaggtgtaaggtagtgcttctcagactttaatgtgcataggactcagatgaggatcctgttaacctacagagtaggtcagcgttggtgtgtgagatgttgcatgtcca

SEQ ID NO: 437901 - DNA, 498 bp, Homo sapiens
tatcctgtttgggctcaccaagtttcttctgtctttaaggtgatttttaaataaccaaatctgaaaaacgttaggccattatttgctcaaatatttttctgtgtttctcctgtccatcagagactctaactgcacatatcttagactgggtgatttttttcccattggtcactaaagcgctattcatttttctgaacatttttctctctgtctcttttaccatcgccagtcagcttttaaaattatccagtgaattttttatttttgatataayactgatagaattttcattgggttcttttatataattcccatttgtctgctgagattatttgtatgttcatctttattccattaaattatgtaacaagtatacaatagagatttaaagtgtttgtctgttaagtctaacattttagtcaccttggggtctgtttctctttctagttattgcttttactaatatctatcaataacaatttcctgttccttcacagg

SEQ ID NO: 437902 - DNA, 577 bp, Homo sapiens
tatcatcttggtttttctccactccccacacaaagtcttgcaaagcaggtaccatcaccaccattttatagaggaaggtctgggatgtcatctaattttgaacaacaaaattgtaattgcataccttctcttctccagaaagcaaagtaccaacttattagctgcattcagtacctcccatgcagggctcctggttgcacagtcccaggggtgttgtaggaaacacgatgtgaatgatgccaatttggaagtcctgcttgtgttttctgagtttaccacctctttggagccttttctccactctttctctgaatctcagcctwacaaaagtagttattgttctctgaacaagacctgcatgctgctgcttctgtgtttttgcttatagcagtggttttctgggttaacagtagaatccatttttcaagcagaatcttgcatggctgtctaatgcaagtcttctcaactcagcactattgacattttgggtcagataattctttgctgggtggaactgttctgtgcattgtaggatatgtagcagcatccccagcctgtacctacaagatgccagtaa

SEQ ID NO: 437903 - DNA, 577 bp, Homo sapiens
tatcatcttggtttttctccactccccacacaaagtcttgcaaagcaggtaccatcaccaccattttatagaggaaggtctgggatgtcatctaattttgaacaacaaaattgtaattgcataccttctcttctccagaaagcaaagtaccaacttattagctgcattcagtacctcccatgcagggctcctggttgcacagtcccaggggtgttgtaggaaacacgatgtgaatgatgccaatttggaagtcctgcttgtgttttctgagtttaccacctctttggagccttttctccactctttctctgaatctcagcctaacaaaagtagttattgttctctgaacaagacctgcatgctgctgcttctgtgtttttgcttatagcagtggttttctgggttaacagtagaatccatttttcaagcagaatcttgcatggctgtctaatgcaagtcttctcaactcagcactattgacattttgggtcagataattctttgctgggtggaactgttctgtgmattgtaggatatgtagcagcatccccagcctgtacctacaagatgccagtaa

SEQ ID NO: 437904 - DNA, 568 bp, Homo sapiens
ttttttgcattttttttcctaagaggctaaatcatgtgctaactaccattttcatcatactatccatccatcattatcaaaaccccacggtcaggactcaggattaagatgggggatgagaggcaggattagcttgcagctgcctggacagagcagtgtagggagactcacatcatgaatttttgctccgagaactactgcaggaacataccaggaaagccaagacaatccatagaccctttgaaggaactggatcacaactgcaggttgcctgagatgctgaaaacctgtgagtctgcttgctttctcaacaaggaggctcrtggtccgggacaagttctcaaccttggtcaccagacgactggaaatggactcagtgctgttgaaggggcaaggtgggaataagcccagcctttaggactgcgggctgcatgggagcagggtgaggcctgtggctgcaggcttttccccacttccttggcaacctgtatgactcagcagaggcagccataatccctcctggagtataactccactggactggaaaccacacccccattccccacaa

SEQ ID NO: 437905 - DNA, 568 bp, Homo sapiens
ttttttgcattttttttcctaagaggctaaatcatgtgctaactaccattttcatcatactatccatccatcattatcaaaaccccacggtcaggactcaggattaagatgggggatgagaggcaggattagcttgcagctgcctggacagagcagtgtagggagactcacatcatgaatttttgctccgagaactactgcaggaacataccaggaaagccaagacaatccatagaccctttgaaggaactggatcacaactgcaggttgcctgagatgctgaaaacctgtgagtctgcttgctttctcaacaaggaggctcgtggtcygggacaagttctcaaccttggtcaccagacgactggaaatggactcagtgctgttgaaggggcaaggtgggaataagcccagcctttaggactgcgggctgcatgggagcagggtgaggcctgtggctgcaggcttttccccacttccttggcaacctgtatgactcagcagaggcagccataatccctcctggagtataactccactggactggaaaccacacccccattccccacaa

SEQ ID NO: 437906 - DNA, 568 bp, Homo sapiens
ttttttgcattttttttcctaagaggctaaatcatgtgctaactaccattttcatcatactatccatccatcattatcaaaaccccacggtcaggactcaggattaagatgggggatgagaggcaggattagcttgcagctgcctggacagagcagtgtagggagactcacatcatgaatttttgctccgagaactactgcaggaacataccaggaaagccaagacaatccatagaccctttgaaggaactggatcacaactgcaggttgcctgagatgctgaaaacctgtgagtctgcttgctttctcaacaaggaggctcgtggtccgggacaagttctcaaccytggtcaccagacgactggaaatggactcagtgctgttgaaggggcaaggtgggaataagcccagcctttaggactgcgggctgcatgggagcagggtgaggcctgtggctgcaggcttttccccacttccttggcaacctgtatgactcagcagaggcagccataatccctcctggagtataactccactggactggaaaccacacccccattccccacaa

SEQ ID NO: 437907 - DNA, 605 bp, Homo sapiens
gactgcgggctgcatgggagcagggtgaggcctgtggctgcaggcttttccccacttccttggcaacctgtatgactcagcagaggcagccataatccctcctggagtataactccactggactggaaaccacacccccattccccacaacagccacagcaagccctgcccaaggagaggctgagctcagacatgcctatccctgctccaacctggtgatctttctctacctgccctggtagccaaagacaaaggtcagaatctcttgagagctctatggccttgcccaccagctgagaaacctgartacttaaccaggtgtccctagggcaggtttgcatcctccctataggaccgtagctgatgcactcttgaaagtgccacctcctggctggaggattgccaacacaaaaccagcacactaaacaaaaacacaaccaaggaccttcacagagtccacttcattcccatgctacctccactggagcaggtgctggtgtccatagctgcaagacctgaagacaaatcacatcaccagactctttgtactcctcagtaccagcccagagcccagtagctctgctgggtggctagatccagaagag

SEQ ID NO: 437908 - DNA, 473 bp, Homo sapiens
aagagcacaaatagacaatctaaggttacaccacacagaattggagaaacaagaacaatccaaayccaaacccagcataagaaaagaaacaacaaatatcagagcacaactaaatgaaacggaataaaaaaatacaaaagacaaatgaaacaaaaatctggttctttgaaaaaataaataaaattgatagattattagtgagattaaccaagaaaagaagacagaagatcccaataagctcaattagaaacaaaatgggagctattacaactgataccacagaaatatgaaagattattcaaggctactttgaacacctttatgtgcataaattagaaaacctagaagagatggataaattcctggaaatatacaaccctcctagattaaaccaggaatatatagaatctcttaacagacaaataacaagtagtgagattgaaatggcaattcaaaaattgccaacaaaaaaa

SEQ ID NO: 437909 - DNA, 562 bp, Homo sapiens
atgaatttgtagctatttttaatattctagtattaggttggtgcaaaagtaattgcagcttttgcaattacttttgatacaaataaacccctctgaatatgcttatgtgaggagacattgctagaggattcttgctcagacagttttcgaacacagaagcaaagatgttaaattggaagtttcaggtcaagaaaaagaggcatgtgtggcagggctcgggtgagtagggttaagatttgggaaagcaggagcctttgcttaccttctcgtttgccatcctgttccctgggaattttcttcttcatgaataaaaagccacctctcattcctgactgactacccacccccactccaggccaccctgccccaccaccactacaattatttgtgaartcatcatgtccgacaggtggggcacttcctggaattggtgaccttgtcttttctggctgaagctttgccttcaggaaattccctctggacagctctgtccactgtggctcagacagtcccctggggacctctacacagatggagcaggcaggggaggtccaattggaag

SEQ ID NO: 437910 - DNA, 562 bp, Homo sapiens
atgaatttgtagctatttttaatattctagtattaggttggtgcaaaagtaattgcagcttttgcaattacttttgatacaaataaacccctctgaatatgcttatgtgaggagacattgctagaggattcttgctcagacagttttcgaacacagaagcaaagatgttaaattggaagtttcaggtcaagaaaaagaggcatgtgtggcagggctcgggtgagtagggttaagatttgggaaagcaggagcctttgcttaccttctcgtttgccatcctgttccctgggaattttcttcttcatgaataaaaagccacctctcattcctgactgactacccacccccactccaggccaccctgccccaccaccactacaattatttgtgaagtcatcatgtccgacaggtggggcacttcctggaattggtgaccttgtcttttcyggctgaagctttgccttcaggaaattccctctggacagctctgtccactgtggctcagacagtcccctggggacctctacacagatggagcaggcaggggaggtccaattggaag

SEQ ID NO: 437911 - DNA, 490 bp, Homo sapiens
acttcatcatctgcctgtactacaccgaaaagcgatgcaggatggctacacatctcttgttgtctttaatttcctgcgaaagctcatctggaaataaacataaatataactcaagatgctctactgttttggagggaatgcagaccattcacatttctgctccagtgatcctcatttgaagggtagctagtttatttccaaaagactgtcgctacctcagagtcacatcakccatgccaatactgacaggaggcactaatgagatcagaatagctacatcttctacctttctttatcctccctctgacaattttagtcaaccaacacctgtagaaagggagtttactctgcaatctcttctggcatgcaatctattttctagattggtaaataaagcatagacacccatcaaacgaaagacaaaaccagaataacatattgcccagaggtacagaggcctcaagcaacaagcagtgtttatcatactgca

SEQ ID NO: 437912 - DNA, 602 bp, Homo sapiens
ttgccattctgactggtgtgagatggtatcttattgtatactagacttcaaactatactacaaaggtacagtaaccaaaacagaatggcactggcaaaataatagagacatagaccaatggaacaggtgagagaactcaataatgaagctgcacacatacaaccatctcatcttcaacaaagccaacaataacaagcaattgtgaaaggactccttttcaataaatggtgctgggatagctggctagccatatgyagaagaatgaaacttgaccttttcctttcactatatgcaaaattccacttaagatagattaaagatttaaatgtaagacccaaaactgtaaaaaccgtagaaaaaaacctaagaaataccaatctggacataggccttggcaaagttttcatgtgaagtctccaaaagcaaatgcataagaaacataaataaaaaaagtgggaccgaattaaactaaagagcttcttcacagcaaaagaaactgtcaacagagtaaacaaacaacctacagaatgagagaaaacattcacaaactatgcatctgacaaaggcctaataccagaatctataagaacttaaatcaaaaa

SEQ ID NO: 437913 - DNA, 638 bp, Homo sapiens
ataaatgttaaatcttagatgtccaagggtgtggactttcagagggaagagtggacaggaagagctttgatatatactgtccgaaggctcctgaaaggtggaaacttacctgggtctagaagcctaggtggaattagtgcagagagaagagagaattttccaggtacaccaatctttaaattttttttaattcccttgtcactcccctttgaggaataatgctaagccttcaggytctcttacatgtgattctttccactgaatatcttggaatgatgctcccttttatcatccccacgttttctcaggatctattctccagatctaattagttcggcacttcaaagccaaagaggcttctctctgtgctttttcaatatattaacatcaacaagaaaagttatctttcacatatcatcttttcatcatacccctcattttattttttctttttctctttagattttcattttctattaatgcattcatagagtttgatgctgtgtttattataaaaggcaggtggtaccaaattataaaacaacaggggctatacaggaagaaataaaaatcttttaatattcttttcagaacttgagagtcttttcatttttctctttttatagcacataattaaa

SEQ ID NO: 437914 - DNA, 638 bp, Homo sapiens
ataaatgttaaatcttagatgtccaagggtgtggactttcagagggaagagtggacaggaagagctttgatatatactgtccgaaggctcctgaaaggtggaaacttacctgggtctagaagcctaggtggaattagtgcagagagaagagagaattttccaggtacaccaatctttaaattttttttaattcccttgtcactcccctttgaggaataatgctaagccttcaggctctcttacatgtgattctttccactgaatatcttggaatgatgctcccttttatcatccccacrttttctcaggatctattctccagatctaattagttcggcacttcaaagccaaagaggcttctctctgtgctttttcaatatattaacatcaacaagaaaagttatctttcacatatcatcttttcatcatacccctcattttattttttctttttctctttagattttcattttctattaatgcattcatagagtttgatgctgtgtttattataaaaggcaggtggtaccaaattataaaacaacaggggctatacaggaagaaataaaaatcttttaatattcttttcagaacttgagagtcttttcatttttctctttttatagcacataattaaa

SEQ ID NO: 437915 - DNA, 638 bp, Homo sapiens
ataaatgttaaatcttagatgtccaagggtgtggactttcagagggaagagtggacaggaagagctttgatatatactgtccgaaggctcctgaaaggtggaaacttacctgggtctagaagcctaggtggaattagtgcagagagaagagagaattttccaggtacaccaatctttaaattttttttaattcccttgtcactcccctttgaggaataatgctaagccttcaggctctcttacatgtgattctttccactgaatatcttggaatgatgctcccttttatcatccccacgttttctcaggatctattctccagatctaattagttcggcacttcaaagccaaagaggcttctctctgtgctttttcaatatattaacatcaacaagaaaagttatctttcacatatcatcttttcatcatacccctcattttattttttctttttctctttagattttcattttctattaatgcattcatagagtttgatgctgtgtttattataaaaggcaggtggtaccaaattataaaacaacaggggctatacaggaagaaataaaaatcttttaatattcttttcwgaacttgagagtcttttcatttttctctttttatagcacataattaaa

SEQ ID NO: 437916 - DNA, 600 bp, Homo sapiens
gaggatcagaatgagagatatgacatcataaaaaagactccaccagccattgctggctttgaagatggaggaagggagtgatgagccaagaactgtgatcagcctctaaagctggaaagtcaagaaaatgaatttccccctagagcctctaaaaaggaatgaacccctgctagcaccttgattttagccaagtgactattgaccatctcagactgttgacctccagaactgtaagtttaaaaagaaatgtattgttttaagctactgtgaaagttgtcagaattaagatgcagtcactaatattaagaaaatggtgacaggctgggcgcagtggctcatgactgtaatcctagcactttgggacatcaaaaaaggcagaytgtctgagctcaggagttcaagaccagtctgggcaacatggcaaaaccccatctctactaaaaatacaaaaaaaaaaaaaaatagctgggcatgctgtcatatgcctgtagtcccagctactcaagaggctggagtgggagaatcacctgagctggggaggcagaggttgcagtgagctgggatcatgccactgcactccagcctgggtagcaaagcaac

SEQ ID NO: 437917 - DNA, 589 bp, Homo sapiens
gaactgtgatcagcctctaaagctggaaagtcaagaaaatgaatttccccctagagcctctaaaaaggaatgaacccctgctagcaccttgattttagccaagtgactattgaccatctcagactgttgacctccagaactgtaagtttaaaaagaaatgtattgttttaagctactgtgaaagttgtcagaattaagatgcagtcactaatattaagaaaatggtgacaggctgggcgcagtggctcatgactgtaatcctagcactttgggacatcaaaaaaggcagattgtctgagctcaggagttcaagaccagtctgggcaacatggcaaaaccccatctctactaaaaatacaaaaaaaaaaaaaaatagctgggcatgctgtcatatgcctgtagtcccagctactcaagaggctggagtgggagaatcacctgagctggggaggcagaggttgcagtgagctgggatcatgycactgcactccagcctgggtagcaaagcaacattatgtctcaaagaaagaaagaaaatggtgacagatagagctgaggaaggccatgaagagagggttctcatgcctgt

SEQ ID NO: 437918 - DNA, 526 bp, Homo sapiens
ggttttgagccttggcaaccccatggtcagtgatgacattgactgarttggtaaagacttaatgaggaatagtcatggaaagggctctgaggatggcaggaaccaataattttattttgcacatgttaaatttgagatgaccggtagagtagacatctacattctgatgtcaagtaggcatttaaacatgtgtgtccagagtccaagggagaagactgagctagagatgaattctgggaatcattcatgtatagatagccaggagactggatgagatctagggaataaatgctgagaaatgtcaaagagacccttggactaaaccttggagcaattcaatatttagaaggtggatagtggaggaggattcaatgaaatagactgagaagcagcatccagggaggtagaaaaataattggaagaatgtggcaacaaggagtcaagtgacacaagtgtttcaagtggagggcatgatcaattgtgtcaaatgttgctctggggctgataaagaagagaatagagaatt

SEQ ID NO: 437919 - DNA, 526 bp, Homo sapiens
ggttttgagccttggcaaccccatggtcagtgatgacattgactgaattggtaaagacttaatgaggaatagtcatggaaagggctctgaggatggcaggaaccaataattttattttgcacatgttaaatttgagatgmccggtagagtagacatctacattctgatgtcaagtaggcatttaaacatgtgtgtccagagtccaagggagaagactgagctagagatgaattctgggaatcattcatgtatagatagccaggagactggatgagatctagggaataaatgctgagaaatgtcaaagagacccttggactaaaccttggagcaattcaatatttagaaggtggatagtggaggaggattcaatgaaatagactgagaagcagcatccagggaggtagaaaaataattggaagaatgtggcaacaaggagtcaagtgacacaagtgtttcaagtggagggcatgatcaattgtgtcaaatgttgctctggggctgataaagaagagaatagagaatt

SEQ ID NO: 437920 - DNA, 526 bp, Homo sapiens
ggttttgagccttggcaaccccatggtcagtgatgacattgactgaattggtaaagacttaatgaggaatagtcatggaaagggctctgaggatggcaggaaccaataattttattttgcacatgttaaatttgagatgaccrgtagagtagacatctacattctgatgtcaagtaggcatttaaacatgtgtgtccagagtccaagggagaagactgagctagagatgaattctgggaatcattcatgtatagatagccaggagactggatgagatctagggaataaatgctgagaaatgtcaaagagacccttggactaaaccttggagcaattcaatatttagaaggtggatagtggaggaggattcaatgaaatagactgagaagcagcatccagggaggtagaaaaataattggaagaatgtggcaacaaggagtcaagtgacacaagtgtttcaagtggagggcatgatcaattgtgtcaaatgttgctctggggctgataaagaagagaatagagaatt

SEQ ID NO: 437921 - DNA, 593 bp, Homo sapiens
ttttctttttcagacatttaataattcaaatgaataagaattagtgacattattattgggatcaataattgatgaactgtaacaatagtagggagataatttgaggtaaaataaacccttcatcttgtcaaataatataattcattgaactatacattaaaaaaatattatctgcaaggctttgttccaagagcagcacagagtgcaaagtgggaaattttggtgacttgaatttcagtggaaatgctgagcaactcctgtttctccctcctcttcctccgaataatctttaaaatgtyctttttagtctagcttttctatctttcgccttgcttccccatgtgattgctcaagatgagagtgagaatctctcttaaaagtcatcttagacagtcatctctagttctgagtgaccagcactgctacaagctaatttatccccaattttacagtttgtatttgttaaaaacttgagtttctgtcattctgtttggatcctgggtccagtcctggccctaccccatattggttgtgtcactttgtgccaggcacttagctttctatgcttcagttttcctcatctgtaaaatggg

SEQ ID NO: 437922 - DNA, 567 bp, Homo sapiens
actgctggactctgtttctgaatatatgtgatgtacaagtgttaacataatagtgattttttttctctcatgtttgttattgtccaatgatctggctatgccataccacaaatatgaataacagtgggaaaatgcagttaatttacaaaatacattcaaatacacttatgtttggtattatatacacaaaatatctgtatggatgatagaatctttttgttttctttaccagtatgttttgtgtttgttttagcagccatttaagtgttttcttactgtcattgtgacaattaacttcatgtgtcaacttgactaggctgcaggatgtgcaggagtttggttaaatgttattctgggcatgtctgtgagggtgattctggatgagattcrcatttgaattagtacactgggtaaagccaattgttctcaatgtggatgggccttatccaacccagtggaggtgagagtagaacaaaaggcaaaggaagggagaatttgctctctctgactgaatgtttttgagctgggacatcaattttctcctatacttggacttgaacttacacc

SEQ ID NO: 437923 - DNA, 543 bp, Homo sapiens
aagctgatgttaaatcttaaagcacttatttatttaagaaaatgacatttattttgccagcatttctttacattgctaggtatgttgatttatgtattaggtttatattgtaatattaaccattattgaggcatagtcagaattcaagtttatgacaaattataagaaaattctttatggagatcgcttcaagatgctgacaattcctgggtagagaggaaaattattggttgggcgttgaaagtcctaagcatctttcgcagattaaaggtggttacatcagctctgaagaaaatggtggaaagttccaaaaggctctcagctggtagaaaagactcatagaaaatagaagacagatttttttttttttttgcatgttagaaaactgaagctgaaaaagagtgaaaactaaaaggcacacctggaagttartttctttgtaatgctattttatttgtaatacatttgataataaattacagtgcttgacatttataattaccatctttattagaaccatagactaggactttttgcattgcc

SEQ ID NO: 437924 - DNA, 629 bp, Homo sapiens
agggtttgtccctgatgcctttacaacagcatctgagcacctctcaagtttttccaggccagctccagtttcagtgaggagagtgtgggctttctattccccaaatattcttactacagttaatrtgtaggttactgccccagcccaactgcaggttcccagatgtgagttccatgtaggcagaaactgtccagttcttgaaattgaattacttccttgtgtatgtgtttttttcctacttaaagctcctcgggatgcttcctctcaaaagtctttgaagaataagaggttaagctaagacaacctgaatcaatttttttttttttgtcaaatgcgattgaaattatccccataattcaataaaatagctttttcccttctttctttttactttgttggaaactatgcaacagaaacaaagtaagaagactctaccttaattttaaaggtaactcttacataaagaagaaagtcattatgccaggccagggggagagtggaaaggggaaatttagagaatagaaacaaacttaagcatcttgtaaattttgagtgaattgtaaacacataatgaatgaatgagaagggccagccaggagtctgtgaaatggtccagttgggaaatgcct

SEQ ID NO: 437925 - DNA, 629 bp, Homo sapiens
agggtttgtccctgatgcctttacaacagcatctgagcacctctcaagtttttccaggccagctccagtttcagtgaggagagtgtgggctttctattccccaaatattcttactacagttaatatgtaggttactgccccagcccaactgcaggttcccagatgtgagttccatgtaggcagaaactgtccagttcttgaaattgaattacttccttgtgtatgtgtttttttcctacttaaagctcctcgggatgcttcctctcaaaagtctttgaagaataagaggttaagctaagacaacctgaatcaatttttttttttttgtmaaatgcgattgaaattatccccataattcaataaaatagctttttcccttctttctttttactttgttggaaactatgcaacagaaacaaagtaagaagactctaccttaattttaaaggtaactcttacataaagaagaaagtcattatgccaggccagggggagagtggaaaggggaaatttagagaatagaaacaaacttaagcatcttgtaaattttgagtgaattgtaaacacataatgaatgaatgagaagggccagccaggagtctgtgaaatggtccagttgggaaatgcct

SEQ ID NO: 437926 - DNA, 500 bp, Homo sapiens
ctgcttccaaccttttctctcactattgatcttcccagtttgtctcaaacccttctgggattaaaaatggccagccctctccattttagtggtatctaaaaactattttcatctctcagttttatactgcaagtcaccccaaatagcattgtcctatttattacttataaatattacaaatgcactctcagcttgctttctcatatcttcgttcagctctgttagcctaactattttttgtgtgtgtgtttctcctaactgcacctccaaatccgagtttctggtaaatttcccagtgtgtttctgagccaaattcrtttgtgttccctctaatgcttgcatctttaacatctttatgcttgtgttttttgattttcctctcctgtgaggtttggggacattgcctgctttattatcagttgcagatttcatttatcagttgttctgaatcaataatgaagatgtaaaacaatgtttgactccaggggctgcagatgaca

SEQ ID NO: 437927 - DNA, 360 bp, Homo sapiens
ctctggaagcagcttgccctcaactagacatagaaattcagctgcaggctcattgctgtgcaatacataaggaattgctgtacaatacagaaggaagatacagctacctcctttctatggcaaacattccattcatcctgaattattaggatacagasagcctagtttagcctagattagcattcatacctagactgttggtgatctgtggactatttaatatgtaaggcatgatgcacaggctcagaggttataaactgaggttataagcccatatggacagttccatgcttagatatggcaggtaatagtaaataatagcttgaatagtgttatttatagtaaaatatctacctgaca

SEQ ID NO: 437928 - DNA, 447 bp, Homo sapiens
ctatcatttatgatactttcagaagactttgcacatgctgaaacctatgtggtataattaataaagcattttttaccacagataatggaatgctacttgaccaacataaattatcaattattttggagagattctaataaggataaactaaggcataaaacaaaragcaataagaaatctgaacacaagtaacaaggctacactgcactagccatctgagtcagaatttctgtgggtggaataaataataaacctgctgatgttaagaaaactaaaacaagttccatacaaatgaaaatttagaaggtgagaaatttctatcagaaaggaaaacaatacagcaaatgtcacatttgtacagaatatgcttcctataatccttcttgaatctatgaatttaaactaccccatttctccttaattctttcagccattagagaaccagtt

SEQ ID NO: 437929 - DNA, 511 bp, Homo sapiens
ttagcactactgcccattcttcacaatgtctatcttcctttatgattttttttctctgaactcatatcttcaatttcctagagtattgttacctagcagggtcagggctattagtggagcagaaattataaacatttgagagacataggtagagggttaaaaacccactagtctactagtttatttcactcattgcttggkatttatctacttaagcaaagcaattaggttacaaatgaactggcgataaaatactttcataaaaattatttatcctgagataaactctttatgatttttagacttgaaataattttatatacttttaaaaatcagttctgtatctaaggtagtatagtccaactaagaaacagagttgatgtgctccatgctgaggtcgaatgaagaagatagaaagtgcccctggatgcctctctaatcattattttagtggaacatttcaatcgcagtctaattattgagctctcccaatccctccagtgctaaattt

SEQ ID NO: 437930 - DNA, 594 bp, Homo sapiens
ttgaaaattttatataaacataagatgtgaacatactgctaaggactgtcctagggcctccaaaagacttatgtaagcaatgggctcagaaatttaagcttcattagctacatgctacacttgcatatcccacatgaaaaatagtactttactattatttggcctaataatataatagtgtttcagcctcattatttctggttcttttctccacctgacacataccctacattcttagggttgtgagatttagcaagtaaaaatgcaatatgcccagttaaatttgaatttcagagaaacaagtatttttagtatagtagattccaaatattgcatkaaacatacttgtactaaaaatttcattcactgattattggaaattcaaacttaactcatgtcctacatgaatctagttctagtatagagtgctagttctagtatacagtggttctagttaaaccagtctataacaggacttctctgaaaatgacacattcttttatactctacgccttggttccatgttcctaaattttcttcatgaaaagactgtccagagcaacttattacaaatagagattactaaggccatcc

SEQ ID NO: 437931 - DNA, 477 bp, Homo sapiens
atgcagaaaaccaaatcaactgttctgtaaagataaagcaatttcctgaaaatttgtggtaaagctttacaaatgttataaaaatgggccacgctgcatgtcaaaaccacaggaatgtgaagattaaactatacattagagtattgtagtaaatagatcacacagagctaataactagttactgttataccacattaaattcactaatgtgaatattgttgtgttttagacactcaaagttcttgggtgttcaggccatcttacagatataagttttgtgaattgtatttatttcttcctttttatattcagtgccacaactctatttcaggccaatattaccttcattgctgatgaccacaacagcctcctaacttaattctttggttcaggtctctcatctccagtctaacctacacttasaacattgcagattaatacttctaaattttgaatctaataataataataataaaa

SEQ ID NO: 437932 - DNA, 617 bp, Homo sapiens
gaacttagggattcataaaaatatctctcaggaatgccaagacattttgtatttgcttcagaatgctttatcttaaccacggagagataattgatatatatcatcacagtattattttaatgtatgtattcttgaatgtttaaaggataaaaaattacattataagttttagaacttgtgattcaataaaatactaaaaaaacatagattatgttattttacattgtgatgttataagatgttttgtttaggaagtttaattcttagcctagaattaaaaggtagcaygctcgaagttctcactgaggttagaggaataagttgcatattataatattctgtggggcatttaatactaacaataaagaatgaagaaaaatctggcgaatttaagaataacctagcttttacagcatttgtgattgtgattttaaaagacctcatatttgaccctaagaactatagaatatacacctgtataatttatcactactttaatatataaattatttctattattatgactaatggaactagatttcttttgttgttaaaataaaaagttgagatagccagaaatgctgtttaactttgcctagtggcactgtagtaaatat

SEQ ID NO: 437933 - DNA, 617 bp, Homo sapiens
gaacttagggattcataaaaatatctctcaggaatgccaagacattttgtatttgcttcagaatgctttatcttaaccacggagagataattgatatatatcatcacagtattattttaatgtatgtattcttgaatgtttaaaggataaaaaattacattataagttttagaacttgtgattcaataaaatactaaaaaaacatagattatgttattttacattgtgatgttataagatgttttgtttaggaagtttaattcttagcctagaattaaaaggtagcatgctcgaagttctcactgaggttagaggaataagttgcatattayaatattctgtggggcatttaatactaacaataaagaatgaagaaaaatctggcgaatttaagaataacctagcttttacagcatttgtgattgtgattttaaaagacctcatatttgaccctaagaactatagaatatacacctgtataatttatcactactttaatatataaattatttctattattatgactaatggaactagatttcttttgttgttaaaataaaaagttgagatagccagaaatgctgtttaactttgcctagtggcactgtagtaaatat

SEQ ID NO: 437934 - DNA, 617 bp, Homo sapiens
gaacttagggattcataaaaatatctctcaggaatgccaagacattttgtatttgcttcagaatgctttatcttaaccacggagagataattgatatatatcatcacagtattattttaatgtatgtattcttgaatgtttaaaggataaaaaattacattataagttttagaacttgtgattcaataaaatactaaaaaaacatagattatgttattttacattgtgatgttataagatgttttgtttaggaagtttaattcttagcctagaattaaaaggtagcatgctcgaagttctcactgaggttagaggaataagttgcatattataatattctgtggggcatttaatactaacaataaagaatgaagaaaartctggcgaatttaagaataacctagcttttacagcatttgtgattgtgattttaaaagacctcatatttgaccctaagaactatagaatatacacctgtataatttatcactactttaatatataaattatttctattattatgactaatggaactagatttcttttgttgttaaaataaaaagttgagatagccagaaatgctgtttaactttgcctagtggcactgtagtaaatat

SEQ ID NO: 437935 - DNA, 587 bp, Homo sapiens
ttatgaggtagcttggagagatctctgcccttttcaatctgtgacagatttcctagttcagagcaaaaaagtctactgctgaaaaatatgcataattaacaggaaagtataataaagttgttgcttaaactactaaaactttgggatatttgcattgactagtttaaggtctartttatcagtttgtagcacatttatgtttgtgaagaaaagatgccagaattcccttattctacttgaaaatagatgctacagactgtaccaggagatgcaagaatatgacggcttattcttttttttttttccccagctctatcagtgttgctaccaacaaccagtgaattcatcagataaaatgatagaaggtgtttccgtgtccagggagagattctagtaaccatattacattagataatttaaatgctccccataacatactgtagactgccgctactgagaatataagttaaatttatatagcactgaaaagttatacatttttattaaacaccagtaatctttcgtccatgagagtgtttcctagttattcctaggaaattcttcaatgcagtcttccaaagcattag

SEQ ID NO: 437936 - DNA, 590 bp, Homo sapiens
taaatttatatagcactgaaaagttatacatttttattaaacaccagtaatctttcgtccatgagagtgtttcctagttattcctaggaaattcttcaatgcagtcttccaaagcattagaatttttttccccctctggtttgacagagccytgtgggcaatgtgcttactctacaaactgtggcaacagagggaaagaaaaccgtaatgctcctctattagaccatgccattagctgttgggaaaccagagctcagctacaaatggcttctaaaaacctcagctcagataagtgcaatgaaatcatacacagcaggaatcacacaccatcagtggtgattcctactctgttcctaaagtttctttctgatttttaagattttataattaccatgacctgtgagacctttcttaagggaaattttcaactggggaaaaatagtagaagctggctttctataatttaagatagtgcaaaatcagtgatagtttcctttataaatactttattatattaaaaatatctaccttatagaggttttcagtttaaggtacactcccatttaatttttacatctttagagatgcag

SEQ ID NO: 437937 - DNA, 590 bp, Homo sapiens
taaatttatatagcactgaaaagttatacatttttattaaacaccagtaatctttcgtccatgagagtgtttcctagttattcctaggaaattcttcaatgcagtcttccaaagcattagaatttttttccccctctggtttgacagagccttgtgggcaatgtgcttactctacaaactgtggcaacagagggaaagaaaaccgtaatgctcctctattagaccatgccattagctgttgggaaaccagagctcagctacaaatggcttctaaaaacctcagctcagataagtgcaatgaaatcatacacagcaggaatcacacaccatcagtggtgattcctactctgttcctaaagtttctttctgatttttaagattttataattaccatgacctgtgagacctttcttaagggaaattttcaactggggaaaaatagtagaagctgsctttctataatttaagatagtgcaaaatcagtgatagtttcctttataaatactttattatattaaaaatatctaccttatagaggttttcagtttaaggtacactcccatttaatttttacatctttagagatgcag

SEQ ID NO: 437938 - DNA, 584 bp, Homo sapiens
gttcattatgactcaaagactcacaaaatatagtcaatgagagccactctgggaatgaatgatgcttatgtcggtgcttactttaagcttctttacaaagagtctccctagcttttcactttcactaacaaaagggtctacggctcttcctttgtgcttggaaattcaggagcacctcccactgcaaagattaggttatgaatctaacaaatgagaacccagtcttcaagtgcaatgtatttgcctatgatcaagtttgctagcagttgagaatctatagttttgcaacaccacgtgattctctctgctgtattctaaatcacagaatatgtggtattattccacttgttctatcacacctacttacagacatctygatttctgagatgtgggctcatctctcaatatccttccagtgtcatttcaaatgttgcctgatctaactccacaacacttcaaacacagaacaccacctcttgtgctcctaagttaaacgtgatggtggattaatcttggtcctttagttgataaatcaaggtaatttactgctgctatacccatacacagtccctcccctgctggat

SEQ ID NO: 437939 - DNA, 563 bp, Homo sapiens
gattttgctgctttcatttgggtcaatatcattgtagttattttgtagacaaagtagtaaaaaacttgatttttccctatcctatatatctgcagctcactgatttaaaatattagcataaaggtccgcaccacagtgatgatgttcaatttcatattgagattgaagatggggaaatagcaagggcataccaattcagccataaatatgttttgggtcaatgtcataaaattgtcacaaaattttggtaattgagaaaaagctaaaactttttttgtttgttttttgtttktaaagggaagaaaagtgcttctgaggctcttttggaataagtaacagttttcagattcacttttgcaaagattgccaatatccttcgcagacaccaacaaaccagactgaacagaaagatccctgtagtaggatgccgagcaaatcattgacttctccaatctctaagagacaatatctaaatgtcagtctcatggcattgtatatttctgcttcaccataagattagcaaacacaagacataaaattatgtttatttcctaaccaatacc

SEQ ID NO: 437940 - DNA, 615 bp, Homo sapiens
gctgtgggtcctgtttgccactggaccctacagcgtggcacctgctagctgtttaatcaagattacttgaataaatacataattgaataaactaagttaatctaattaccttgatgaatgttaagaggtcccttgaactctggctctagggcctctgtttcttttatacctgacagggcattttgcttcactttgctcttttacattgactgtgaaatctttctaaaactcttaaacataaagctccatttcccttaaatgactcctcccttttataactcatcaaatgttatttatcattgaaggatcagattcagaagaccccctgtgtggactctaagggcagttcatgggaaakttgaactgtattgctttaaaaaacccccaaaaccaattaattaattacatccctctgttcttagcttaaatgtcacttcccagagaagcatttccaaaaattgaattcagatcctcctattacaatgtttcattgcagcctttacgttatcttcttggaacatatcacaatttttaattaatttacgatttcatacctattttggggattatttgttcatttccctttttttctttgttaccactacttgatgagac

SEQ ID NO: 437941 - DNA, 568 bp, Homo sapiens
ggaaggacccactaaatggggagatgtacacaaagggaccatggagaacaccgctgtatctgaatcccattaactctctgtgaggcaggcatattacactctcctctcatttaatggttaagaaatggaggcttggaagaatcagagacatgcaaatgtacagagttcttttggtagacacgaccaaaacccaaatcgtcagactcttactccagtgtaaggagactgatctccttgaggatcagtcttgaaggcaatgactgtgtcttgccatcattactgtatcatcttttcctatgtcagtacctggcactcagtaaatattagttttttttgtaaaaattaagaatgaatgtgtgcctctgagctcccgtgttttctggtggtctagtattttgaggtggagatgatcgttccctacttcttatgtttccatgaactggggacccctactccactttcatttgggtagtgttaaagagwacatttctactccttcttttcactctttaactattcttctccaagcactgggaactgctgacctgatgatgagagtctgataaca

SEQ ID NO: 437942 - DNA, 461 bp, Homo sapiens
tttgctcctaccagaggcaagggatagatactaaagcagatacaggtctaggagaaactcttcttccaatagcaagtcyataaaatatcacatccgccacaactcctgggattctcacaggaattttcccatgtaatgcatagttagatatttcttagttgctcctatcttggtcttgccctttcacttattttgccaactccatgaaataacatctgatgtctcttttttcccaaatacctgagttttcactgtactataattatcacaggtgcttaggacatgtttttgacagattgaatacaaatatttcccctgatggacaccaaatgagacagtatttgtgagatggctgtgggaacagtaatcctttattgtgctccataacataggtggaatgttgtatagctgttgaagattcttgagtttgaattcattttattagggacagaaaatgagtc

SEQ ID NO: 437943 - DNA, 610 bp, Homo sapiens
gttttttctctccttccttctctcctttctttcttccaaactaaatttgtttctagcttgaggtaaattcagtggagatgccttaaaaatagtatgagcaagtcagtaacaagagttatgttatatttctagcctcactcatatttcccacttagtatagtaaaaacactggggaactgaagagttatcaccatcatcaacaacaacagcaaccacataataacctgtctgattctgggtgaatcaacatcttcatgtccctctcacaatactagactttatggatgtactccattttaaatactataaaattacattattttaattcttaaatgtttcatacacatcaatatttctttttaaaaaatcaagttaaacaggtatttattcaacattcacatgctctgggttttgaggaattacagagagggagattcagatacattctattttgaggagcttacagyctcactgggtgaaggcatatattcaagaaatacttaaataagaattcaagatactttgaaggcactttaaaataggaaatttggtatctgttgtccctacccactatgttcaaggtactgcataaaattcaggggtaaaacta

SEQ ID NO: 437944 - DNA, 555 bp, Homo sapiens
ttttggaaataaattttgttggaacacagtcacactcattcatttacatattgcctatggctgctttccccctacaatagcagagttgagtagttgtgacacagaccatacacgtagcaaagtggaaaatatttagtatctggctcttcacagaaaaagtttgcccacctctgacttagaatctcctggaaagaggattatagcagtaaagctatctcttatgtgcaaaatagaacaggagcaaaccattacaattgtgtacaaactttgcagaaggtagagaggattatttctgggttgtagtgaatggtacagtatgaaaatatgattagtcttttaataacagataatgaatatcattcatacattcactcaagaaatattctttgaaaacatttagcaatcaaagtttaatgtgctagagagatatcaaatacataaaccyttagtaagtataaattacaaaagctctaaatgctatgaagaaaaggcttagagttcaatggtgagaaaacaaggaaaacaatttacattagatgaggccaatggaaatgc

SEQ ID NO: 437945 - DNA, 555 bp, Homo sapiens
ttttggaaataaattttgttggaacacagtcacactcattcatttacatattgcctatggctgctttccccctacaatagcagagttgagtagttgtgacacagaccatacacgtagcaaagtggaaaatatttagtatctggctcttcacagaaaaagtttgcccacctctgacttagaatctcctggaaagaggattatagcagtaaagctatctcttatgtgcaaaatagaacaggagcaaaccattacaattgtgtacaaactttgcagaaggtagagaggattatttctgggttgtagtgaatggtacagtatgaaaatatgattagtcttttaataacagataatgaatatcattcatacattcactcaagaaatattctttgaaaacatttagcaatcaaagtttaatgtgctagagagatatcaaatacataaacctttagtaagtataaattacaaaagctctaaatgctatgamgaaaaggcttagagttcaatggtgagaaaacaaggaaaacaatttacattagatgaggccaatggaaatgc

SEQ ID NO: 437946 - DNA, 516 bp, Homo sapiens
tcatttcattctctgtctcccactaaatataattataaaaccctggccataatacaagagacaagaagaagaaaactgtgaaaggaggaatgaagagaatagatagactgactaaggagctaggggttttaatagcatgggatgaatgccctctgttttctttttgccttccatacaccctaggcttggggctggagaagcccatgacttggaaatgccaaaaggcacagccaaaaagtcctgttaaaagtctgctctctatcaccaaaggaccagaaaatagctggtccagcaggataccaatatttttgacaatagtcgccccattccagcaaaacatcatgaaaaaaaccatgcctacytctgttcccctgtgctgctggcaaaggttgagcagggagcctggacttccaattccacctgtggcaaggtagcacacagctttcagaatcccctgtagccaggatggtgtcagcagactgtaggggaaacctggactcccctacttccacctca

SEQ ID NO: 437947 - DNA, 516 bp, Homo sapiens
tcatttcattctctgtctcccactaaatataattataaaaccctggccataatacaagagacaagaagaagaaaactgtgaaaggaggaatgaagagaatagatagactgactaaggagctaggggttttaatagcatgggatgaatgccctctgttttctttttgccttccatacaccctaggcttggggctggagaagcccatgacttggaaatgccaaaaggcacagccaaaaagtcctgttaaaagtctgctctctatcaccaaaggaccagaaaatagctggtccagcaggataccaatatttttgacaatagtcgccccattccagcaaaacatcatgaaaaaaaccatgcctacctctgttcccctgtgctgctggcaaaggttgagcagggagcctggacttccaattccacctgtggcaaggtagcacacagctttcagaatcccctgtagccaggatggtgtcagcagaytgtaggggaaacctggactcccctacttccacctca

SEQ ID NO: 437948 - DNA, 525 bp, Homo sapiens
ccttttttcctttcttcctcactcccttctgtccttctcttctaattaatgacattataatattatacatcatagccccagctatggtttggcatgagaaatgtcaggttcagtctaaagtttatctctccaatgtttttgggaaaacttcgtaataacttgctattaaatttatataaacgtgtttgtttttagctgcttttaggaggtcattaataactgattaatatttacaaaatctgaccaaaagcagtgagtttagtaggagatacttaagatcttggcactattgccrttgctcttcactggatgtgtaaaacacttctgtctcctctaggactttctccattgtagacattgatacaatgtcatcttccttagttaatattttggggttttgtttttatcatttattcactttatgatatgatggatcagcagaagagacactgtttacctcttgcctcacctagtcaagacgtccattgccatatggagctactcaaaacacctccacaagatgga

SEQ ID NO: 437949 - DNA, 525 bp, Homo sapiens
ccttttttcctttcttcctcactcccttctgtccttctcttctaattaatgacattataatattatacatcatagccccagctatggtttggcatgagaaatgtcaggttcagtctaaagtttatctctccaatgtttttgggaaaacttcgtaataacttgctattaaatttatataaacgtgtttgtttttagctgcttttaggaggtcattaataactgattaatatttacaaaatctgaccaaaagcagtgagtttagtaggagatacttaagatcttggcactattgccgttgctcttcactggatgtgtaaaacacttctgtctcctctaggactttctccattgtagacattgatacaatgtcatcttccttagttaatattttggggttttgtttttatcatttattcactttatgatatgatggatcagcagaagagacactgtttacctcttgcctcacctagtcaagacrtccattgccatatggagctactcaaaacacctccacaagatgga

SEQ ID NO: 437950 - DNA, 592 bp, Homo sapiens
tcccaacaagttcctcatcgccatctgagaccacctcagcctggatttcattgtccatattattatcagcattttggtcaaagccataaaacaagtctctaggaagttccaaactttcccrcttttttctgtcttcttgtgaaccctccaaactgttgcaacctctgcctgttacctagttccaaagtcacttccacatttttgggtatcttttcagcagcatccaactcctggtacaaatttactatgttagtctgttttcacactgctgataaagacacactcaaggctgggaaatttacaaaagaaagagtttgattggacttacagttccacatggctggggaggcctcacaatcatggcggaaggtgaaaggcatgtctcacatggcagcagacaagagaagagagagcttgtgccagaacgcccctttttaaaaccatcagatctcataggacttattcactatcatgagaacagcacaggaaagatctgcccccatgattcaatgacctcccaccaggtcacttcaacaacacgtgggaattcaagatgagatttgggtggggacatagccaaaccatatcaatg

SEQ ID NO: 437951 - DNA, 592 bp, Homo sapiens
tcccaacaagttcctcatcgccatctgagaccacctcagcctggatttcattgtccatattattatcagcattttggtcaaagccataaaacaagtctctaggaagttccaaactttcccacttttttctgtcttcttgtgaaccctccaaactgttgcaacctctgcctgttacctagttmcaaagtcacttccacatttttgggtatcttttcagcagcatccaactcctggtacaaatttactatgttagtctgttttcacactgctgataaagacacactcaaggctgggaaatttacaaaagaaagagtttgattggacttacagttccacatggctggggaggcctcacaatcatggcggaaggtgaaaggcatgtctcacatggcagcagacaagagaagagagagcttgtgccagaacgcccctttttaaaaccatcagatctcataggacttattcactatcatgagaacagcacaggaaagatctgcccccatgattcaatgacctcccaccaggtcacttcaacaacacgtgggaattcaagatgagatttgggtggggacatagccaaaccatatcaatg

SEQ ID NO: 437952 - DNA, 592 bp, Homo sapiens
tcccaacaagttcctcatcgccatctgagaccacctcagcctggatttcattgtccatattattatcagcattttggtcaaagccataaaacaagtctctaggaagttccaaactttcccacttttttctgtcttcttgtgaaccctccaaactgttgcaacctctgcctgttacctagttccaaagtcacttccacatttttgggtatcttttcagcagcatccaactcctggtacaaatttactatrttagtctgttttcacactgctgataaagacacactcaaggctgggaaatttacaaaagaaagagtttgattggacttacagttccacatggctggggaggcctcacaatcatggcggaaggtgaaaggcatgtctcacatggcagcagacaagagaagagagagcttgtgccagaacgcccctttttaaaaccatcagatctcataggacttattcactatcatgagaacagcacaggaaagatctgcccccatgattcaatgacctcccaccaggtcacttcaacaacacgtgggaattcaagatgagatttgggtggggacatagccaaaccatatcaatg

SEQ ID NO: 437953 - DNA, 592 bp, Homo sapiens
tcccaacaagttcctcatcgccatctgagaccacctcagcctggatttcattgtccatattattatcagcattttggtcaaagccataaaacaagtctctaggaagttccaaactttcccacttttttctgtcttcttgtgaaccctccaaactgttgcaacctctgcctgttacctagttccaaagtcacttccacatttttgggtatcttttcagcagcatccaactcctggtacaaatttactatgttagtctgttttcacactgctgataaagacacactcaaggctgggaaatttacaaaagaaagagkttgattggacttacagttccacatggctggggaggcctcacaatcatggcggaaggtgaaaggcatgtctcacatggcagcagacaagagaagagagagcttgtgccagaacgcccctttttaaaaccatcagatctcataggacttattcactatcatgagaacagcacaggaaagatctgcccccatgattcaatgacctcccaccaggtcacttcaacaacacgtgggaattcaagatgagatttgggtggggacatagccaaaccatatcaatg

SEQ ID NO: 437954 - DNA, 562 bp, Homo sapiens
ttcccactcctttacttttgcagcttctaccactgtttcccttggaaaccaaagtagcagctgcctacaaagacatctctctccctcctcactcattagtcccaaggattagagcctgttttcttcctcactgaaaacatttgatgttaggggactgtgtgcatatgagagacaatgtaaaaacagtaccacactgggtcagacacattgtgcattccatctaatattctgtcttggatagtttcatttttcctcttcattttatatgatacgccatcaatttattttgtgttgtaatggcttgtgtacacaaatcttctctattagctagtaggctatttaaagtctagggatgccaggtgcagtagctcatgcctgtaatcccagcactttgggaggccaaggtgggaggattgcttgagctcaggagttcaagaccagcctgggcaacatagcaagaccccatctctaacaataaaayaaaataaagtctagggagaaatcaacatataaaagagatacattcactcccatgtttattgcagcgctattcacaagagcc

SEQ ID NO: 437955 - DNA, 613 bp, Homo sapiens
cattttatgcaatgggtagaattctgtaactatcattttttaatgattaaattgccccaaatttggccaaggagaacactttctggcttgctcctgtttctctttgacttatctcctcttactttaatcttttttttactttttatcatgtttccatcaaacacttattcattacaaaaagaaaaatagtaatcttacagcagataaacctggtagatgacaccttaacaaagtgaccaagttaatatcatcatcagtaatggtgccttttgatattatgtgytgagaagaacatgtaatcactttgatagtatttctgccaaaaagtggataatcacaaaataatcatgaggagacataagaataatccagactgggggacattctacaaaatacctggcctatagtattcaaaaatgtcaaggtcataaaaaaacaaagactaagaaatgatccagattaacagaaactagagacatgacactaaatgcaatgcataatcctggatcagatattgaacctaagggggaaattttgttattaaacaacattgggacaattagaaacattgtaataaggtttttagattagaaagtagtactgtgccaatgat

SEQ ID NO: 437956 - DNA, 613 bp, Homo sapiens
cattttatgcaatgggtagaattctgtaactatcattttttaatgattaaattgccccaaatttggccaaggagaacactttctggcttgctcctgtttctctttgacttatctcctcttactttaatcttttttttactttttatcatgtttccatcaaacacttattcattacaaaaagaaaaatagtaatcttacagcagataaacctggtagatgacaccttaacaaagtgaccaagttaatatcatcatcagtaatggtgccttttgatattatgtgctgagaagaacatgtaatcactttgatagtatttctgccaaaaagtggataatcacaaaataatcatgaggagacataagaataatccagactgggggacattctacaaaatamctggcctatagtattcaaaaatgtcaaggtcataaaaaaacaaagactaagaaatgatccagattaacagaaactagagacatgacactaaatgcaatgcataatcctggatcagatattgaacctaagggggaaattttgttattaaacaacattgggacaattagaaacattgtaataaggtttttagattagaaagtagtactgtgccaatgat

SEQ ID NO: 437957 - DNA, 552 bp, Homo sapiens
aagaataatccagactgggggacattctacaaaatacctggcctatagtattcaaaaatgtcaaggtcataaaaaaacaaagactaagaaatgatccagattaacagaaactagagacatgacactaaatgcaatgcataatcctggatcagatattgaacctaagggggaaattttgttattaaacaacattgggacaattagaaacattgtaataaggtttttagattagaaagtagtactgtrccaatgataattttctgattttgatcattttgctatggttatattaaaaacgtgcctttattcttatggaacagatactgaagtacttagggagaaaggagcatcacatctgcaccttactctcaaaagattcagaagaatgatgctgcagtttgagtgtgtcctccaaaaagcatgtgttggaaacttattccctaaggcaataatattgggaagtatggcttacagggatgtgtttaagttataagggctccacccgcatgaatggattaatggcaattataaaaaggacttgaatctgcaagc

SEQ ID NO: 437958 - DNA, 552 bp, Homo sapiens
aagaataatccagactgggggacattctacaaaatacctggcctatagtattcaaaaatgtcaaggtcataaaaaaacaaagactaagaaatgatccagattaacagaaactagagacatgacactaaatgcaatgcataatcctggatcagatattgaacctaagggggaaattttgttattaaacaacattgggacaattagaaacattgtaataaggtttttagattagaaagtagtactgtgccaatgwtaattttctgattttgatcattttgctatggttatattaaaaacgtgcctttattcttatggaacagatactgaagtacttagggagaaaggagcatcacatctgcaccttactctcaaaagattcagaagaatgatgctgcagtttgagtgtgtcctccaaaaagcatgtgttggaaacttattccctaaggcaataatattgggaagtatggcttacagggatgtgtttaagttataagggctccacccgcatgaatggattaatggcaattataaaaaggacttgaatctgcaagc

SEQ ID NO: 437959 - DNA, 514 bp, Homo sapiens
atgctgcagtttgagtgtgtcctccaaaaagcatgtgttggaaacttattccctaaggcaataatattgggaagtatggcttacagggatgtgtttaagttataagggctccacccgcatgaatggattaatggcaattataaaaaggacttgaatctgcaagcacactctcttgccttcttttgtccttctgtcttctgccatgggatgattcagcaagaaggtcctagccagatgctggtcctttgaccttggacttctcagcttccagagctgtgagccaataaatttctgttcattataaattactcagtctcagktgttctgttatagcagcaaaaacagatgaagacaaataataggtaaatgtggtcatctggatgaaggatatggaaaattggatgaatggcatatggcattttttgtgctgctcttgcacctttctgtgtttgaaattgaaattaaaggttataaaattaaaagctacaaaaactgatttggataaaactcaata

SEQ ID NO: 437960 - DNA, 453 bp, Homo sapiens
gggtaaacatttccattctgaaagggataaatcagcctaatgagaggggtaccaagccccatgcaagtccaaaacccagcattaaagctccaaaatgatctcccttgactctgtttcccccatcctgggcacactagtgtgagaaatggggtcccgagcccttgggcagccctgcctccagggctttgctgggtacagcccacgtggctgttctcatgaattagagtatggtgcctgcagcttttccagataggagttgcttgatgctggtggctctgtaattctagggtccctgcaacacccccaattccactaggcagtgcccttgttggggactttgtgtaggagttccarcctcacatttccactcagcattgccttagtagagtcgctccacagggcagcgcccctgtggcaggcttctgcctggtaatccaggctttccaatacatt

SEQ ID NO: 437961 - DNA, 550 bp, Homo sapiens
tggcatcccacactctcacagcatttctgatttaaagttggcttcattgctagaggctggtattgccaaacatcatttctgtcccagagctcagctgccggacagaaatgaccctttacaaaragagctgtctcagcaagtagttcagatgagggagtgacatagtgaagttccagttgctttgtgcaacttgcaagcactcccccaggcagtgtgtgacatgtaacatccatctcattttaacctttggttgtctgtggacctctgattgcccatgggatagtcagaaacacaaaggtaaatgccacgtggctgagattttgggggtggattactgagcatgctctaggcacgctagcctgtagagttttgtagactccacttctggttggacaaattttagtggtcacaacctcttaggctggcagttcttaaccaggtgactacttgttttgttaaaagtactgcgttatcaatagagtatgaaagtttgttagaggtttccattttttctttgtcaattagggcagattcaaaattaccctacaat

SEQ ID NO: 437962 - DNA, 550 bp, Homo sapiens
tggcatcccacactctcacagcatttctgatttaaagttggcttcattgctagaggctggtattgccaaacatcatttctgtcccagagctcagctgccggacagaaatgaccctttacaaaaagagctgtctcagcaagtagttcagatgagggagtgacatagtgaagttccagttgctttgtgcaacttgcaagcactcccccaggcagtgtgtgacatgtaacatccatctcattttaacctttggttgtctgtggacctctgattgcccatgggatagtcagaarcacaaaggtaaatgccacgtggctgagattttgggggtggattactgagcatgctctaggcacgctagcctgtagagttttgtagactccacttctggttggacaaattttagtggtcacaacctcttaggctggcagttcttaaccaggtgactacttgttttgttaaaagtactgcgttatcaatagagtatgaaagtttgttagaggtttccattttttctttgtcaattagggcagattcaaaattaccctacaat

SEQ ID NO: 437963 - DNA, 517 bp, Homo sapiens
ctttaaatatgtaaaagtttccagtatacatagcaaggtgatgcaataaataaattaaaaaagaagctgatttgtgagaaagagaggagattagcaacaagctagaaattcacagctgatgtggcaatgaatagtggagtcttcaagcatttgggggaatccagtgcaggtcaaggatggtggattctgaagttttaatattgcatgctaaagtgcaaacccatttggcacatgaccaaatatcagtatggataaaattcagtagctgatgtttatatttttcttgcactcattggaggatttgtctgtgtagcaataaactttccaagacagaatggtagggaagatgcttgaatttgtaatttattgttattctacttaagyatgtgttttatgccagaagtcatgctttatgcaagacctttttgaataatttcagttcaccagtcagaaggaagataattactcaagggtaaggaccatggtttctacttccctccaactaagctgaatgctg

SEQ ID NO: 437964 - DNA, 544 bp, Homo sapiens
cgatttcattttgggggtgatggtagtcatataaccccaacagccctagatgttctgggctcaggagtcctttaatagccaaatatccaacatctgagctactagtattctaccaagatagcctctccagggtaccctgggaacttctcaggaaccttacacatttcaaaattcacccaggttgttgcttgtcaccttggcctgacatcaggcctctaactgtagtaactttttatctgtgttaaaactcagactgttataaatgacctgggcactgttttatcyaaacaagaatgttaaaacaatttttaccaagcctccggcatccccattcacatttgcccactgcatgacactgagatctctacagccttatgcagcccattctggacctgtttgagaaccacacctgcatcttgatgattcaaaaccagaaaagtaacaaaagtaaaaagaggttttatgatccattttgaaccattcagaaacttgggaagaacttccccttctccatactgtatctactcttttcactttcagtttg

SEQ ID NO: 437965 - DNA, 524 bp, Homo sapiens
ggactccccctgtagttctaaactctcagatttgtccacrctaagcctctagtaatttgtcagttacagttcaaggtttttctaccctgctactggttcctgtggatgtttctgtttgtgttgtgtttctgctccagtatttcgattctctgtaccctctctgtctatccctccaattttgggaggcagtatattgcctggtgagctcacttctctgatagatctgagagttgtttatttttcagtctgttcaaatttttacttgttgtttgaaaggagtggggactttgaagctccttacatgctgggccagaaagagtgatgttttcttcaaagtgaaatctgattttcctcactcatgttcgtatgatagggtttcttttgttgatgaggggggcatgccactggcaaggatcatttgaaaactagaccctgtagttttatgtggtgtgaagaacacattttaaagagccagttacccaagtccttctccctgctgagtccatgccagagctggtttgagg

SEQ ID NO: 437966 - DNA, 524 bp, Homo sapiens
ggactccccctgtagttctaaactctcagatttgtccacactaagcctctagtaatttgtcagttacagttcaaggtttttctaccctgctactggttcctgtggatgtttctgtttgtgttgtgtttctgctccagtatttcgattctctgtaccctctctgtctatccctccaattttgggaggcagtatattgcctggtgagctcacttctctgatagatctgagagttgtttatttttcagtctgttcaaatttttacttgttgtttgaaaggagtggkgactttgaagctccttacatgctgggccagaaagagtgatgttttcttcaaagtgaaatctgattttcctcactcatgttcgtatgatagggtttcttttgttgatgaggggggcatgccactggcaaggatcatttgaaaactagaccctgtagttttatgtggtgtgaagaacacattttaaagagccagttacccaagtccttctccctgctgagtccatgccagagctggtttgagg

SEQ ID NO: 437967 - DNA, 576 bp, Homo sapiens
tcattatccacacaaagcactaccaccaacaacaaagacagcaaaggaatcaaggttcagagaaactaatttgccaagattcatagagttactgaacggtggagctggaattcaaatcagtctgctcgattccaaggctcatgctctatctccacccttctcttcccttcctctcttctatgtattgttgctactgagcccttcactgatacaagggcagggtagatggtgtcagttcrgcagctcctgtagtcttcaattcccagctatcttggtgaaatctaacctagagctatgactccttgtatggtcttgagaacctacttctcgagatacagcctcttacataaaaagtgatacaggattgagagcaaaggacattgaaaaataagacagagacacagggccatttgtgcagttgctgatatctttagtcccaacttcctacatgtaggaattttatgttaaaagtgacagtgtcttcctgaaaagacaactggtatcctaagtctgatagaaaatacaagggataaatcaaagataagattcataactatgctagtatgaatgactttc

SEQ ID NO: 437968 - DNA, 576 bp, Homo sapiens
tcattatccacacaaagcactaccaccaacaacaaagacagcaaaggaatcaaggttcagagaaactaatttgccaagattcatagagttactgaacggtggagctggaattcaaatcagtctgctcgattccaaggctcatgctctatctccacccttctcttcccttcctctcttctatgtattgttgctactgagcccttcactgatacaagggcagggtagatggtgtcagttcagcagctcctgtagtcttcaattcccagctatcttggtgaartctaacctagagctatgactccttgtatggtcttgagaacctacttctcgagatacagcctcttacataaaaagtgatacaggattgagagcaaaggacattgaaaaataagacagagacacagggccatttgtgcagttgctgatatctttagtcccaacttcctacatgtaggaattttatgttaaaagtgacagtgtcttcctgaaaagacaactggtatcctaagtctgatagaaaatacaagggataaatcaaagataagattcataactatgctagtatgaatgactttc

SEQ ID NO: 437969 - DNA, 579 bp, Homo sapiens
ggatgtttcctattacatctggtgccccagctcagaactgagacacaatcccctgggatggagagagtaatagaaaatccctaacatcaagattaagtctctgccatataaatagaatgggggctcaaaacagaaatcagtgtgaattttagaaaagaaaaagaaacatattttctgcatgcctcagtttggaacttaaatatgtacccgttataaaagaaagtaggattttccttatgtacttgttttctatgtgcacacatccttttaaaaatgacatcaggtatgggtgagaagggtagcaggagaaatgagaattgtggttgaatcttttcctccagaatgagacaactgattcattctaaagagcttagagatggatttgatctttacaccagtggatcttgacatgtttgggtcatgtactcctttaaggagctgataaaagaaaccttctgttatgaaaaacatasatggacacaaaatttatacaattctatacaaattccaagggcttcagaactcaagcctctttggaagcccatccacagaccccaggataagaaatttgcctctgcc

SEQ ID NO: 437970 - DNA, 560 bp, Homo sapiens
gtctggggcagcattattcttgctgctttattactatcattgccatgtggcctctaatctctgttattaagaacaactttgttttacccagattcttcactttctagaaactctcacttcatgattacttaatggkcatttacttaccactttcattttcctacaatttgagggctttttcaagaatttcaaaaaagggtcaaaatttctgattcccttctaactggaagtcttgagaaaatatcttgcatgccataacaattaaataaacatgtttcaatttctccagttgatgaaaaagtccaattttgtttcatattacttctgcagaattacagaaaatgaaatgttggcagaattccatgggaaaaaataaggattttagcagttttgcctaattcaattacatcattacttcccaaactcaccagttgttataccatattgcaaaatgtcaccagtactttcccagtttcatatattatggagaaaagagaattttattatgtgcctgtacagaaagtggaagaggagtttgtacaagagaagtgtcacatgac

SEQ ID NO: 437971 - DNA, 514 bp, Homo sapiens
tctcatgaacattttctcctgaaatctttgtctcgtgagtatctttgtctcgtgagtcgttctgagcaataagattagtacgtaagcaaaggcatcactcagtttggttttcacatttgtccccattccagctttgtaccgaagcaatctgtccttgctattgtaagcctaatagtctccctcatcagactgagtttctgcagtgagaagaccttttctgtttcatccctgtgtcctcatgcaggtggtaggtgtttagttgtttgcatgtgctcctccctccttctcagctctctcaaaagcagccttttattgctatgggcttttgaggctagatgaattgccaggaaagtgtatccctgtggtgtaatgggccttctcagggacttaaggcatgtctttaattttcattcattcagaagacaatcagagtacctactatgtcccaggcattgtctcggaggattcatgctctkgtgacactcacaaatatataggcaattatcatgcatct

SEQ ID NO: 437972 - DNA, 513 bp, Homo sapiens
atctgtagtcttatttctaccatgactgctctgcttctaagtaggaaccccccagcatttgatggatgaatgaatgagggaataaatgaagtgcaacatagccctgaatggctatacactttagtctgtgccagggaaagtactaagcccacctctggatagaagcgttgtctgtgggaggctggtgtcaacatcaaacagcagagggagcttttctccttggtccctggaggagaggtgctctargtggagaagagagaaagagggggcattccaggggagcacgtgtagatttgcctcctctgagatgtagggtgggctctatgctagctgacctcagtgaaacaagtggacagagtacttaaaggaggaggaggggccaagtgttgttcttgaaaaggacccaccctggaatggttggccgagttcctggcaggctggagagctgggtgccagtgtccctctaggtggaagcccaggaaggtgcccttcctcctcaagtgccgtgagtat

SEQ ID NO: 437973 - DNA, 478 bp, Homo sapiens
atttcaaccagctgctcactgattctgctgcagaaccaaggctgagaactctacaaatacaataagactgcagtaaaaggatcaattcattttcatatctggaaatcatgagaggcttcatggaggagataatatttgagctgagcttgaaaaatgagcagaattttgatagagtacatctctgactgagggaagagcataagcaaggatccccagtggtaagatgttaattgttataataatcattattttctactgcataggaagagtatgcagctgatatctttgagctgcattttcctgtgctacacaatgtggaaaactggtgtttgttgttttggtcygcccagcacgcctgtcccattcttcaagtagtcccagcccacttcctttggagtaagacacctcttccatgcaacattgcaagatcaagcaccctgcccctgctggacatcgatcaggtgggcacatggctcaa

SEQ ID NO: 437974 - DNA, 550 bp, Homo sapiens
tcccggttccaccagagcagtgtcctgctattcgctttatgaaatggagattttgtgtctgatttcatcaggaaagaaagggaattctcctgctataaaccatcttaaagccactgagtcagatcagtaaaatgcgtggctggagtgagtactcattattctaaatatacaacttgtctgctactaccatgactaccaaaaaccayttattcaatccctcttagattgtggaacgctttcctgacattaattctaatattcacaacaacccagcaagagaaataatagtattctgatttcactgtgattcagagagattaaatgacttgcccaaggtcacatagccaatatttaaactatatggttggatgcattgactcctaagacttacaaagtattgactggacctctagctaggcagacaacatggtgtgtgttctgtggaagcagagatggcctagtgtcatcacgagaggaaaccaccaatgcagggccatggcgtgctcttggaggaatgaggctgtagaggaagatacaggggcagctacgc

SEQ ID NO: 437975 - DNA, 406 bp, Homo sapiens
tcaggcttctacttgagttaatttaagattttaatccctgaccccactaccaacctgagatggcagtggtgttgggagatccagggatcttaggtagtgtcatagcttcaggggcaagaggatcaggcccctggctgttggtatctttccattctgttactcactgagatgggcaaaactccttgtgctcaggccttgccatcctgccacactggcrcctaccagagcaccaagttgctagctggcctgcagccatgcggtcctctccattttggctgtgttgtccctgcatcagggctttaatatcttttcagattggttttctctttccccccacactcctctggggcacagagagggtctactgttgtccacacctttctggtcagtgggaaacccaaaaggg

SEQ ID NO: 437976 - DNA, 406 bp, Homo sapiens
tcaggcttctacttgagttaatttaagattttaatccctgaccccactaccaacctgagatggcagtggtgttgggagatccagggatcttaggtagtgtcatagcttcaggggcaagaggatcaggcccctggctgttggtatctttccattctgttactcactgagatgggcaaaactccttgtgctcaggccttgccatcctgccacactggcacctaccagarcaccaagttgctagctggcctgcagccatgcggtcctctccattttggctgtgttgtccctgcatcagggctttaatatcttttcagattggttttctctttccccccacactcctctggggcacagagagggtctactgttgtccacacctttctggtcagtgggaaacccaaaaggg

SEQ ID NO: 437977 - DNA, 406 bp, Homo sapiens
tcaggcttctacttgagttaatttaagattttaatccctgaccccactaccaacctgagatggcagtggtgttgggagatccagggatcttaggtagtgtcatagcttcaggggcaagaggatcaggcccctggctgttggtatctttccattctgttactcactgagatgggcaaaactccttgtgctcaggccttgccatcctgccacactggcacctaccagagcaccaagttgctagctggcctgcagccatgcggtcctctccatttyggctgtgttgtccctgcatcagggctttaatatcttttcagattggttttctctttccccccacactcctctggggcacagagagggtctactgttgtccacacctttctggtcagtgggaaacccaaaaggg

SEQ ID NO: 437978 - DNA, 577 bp, Homo sapiens
tctcctgcttcagactcccgagtagctgggattacaggcacccaccaccatgctcggctaatttttgtattttagtagagatgaagtttcactatgttggccaggctggtctcgaactcctaacctcaagtgatctgcccaccttggcatcccaaagtgcgggattacaggcataaaccactgtgcccagccaataatgataattataacgagaaataagccttttaaaggttaagaaagagtcactgaagtatgataaatgaaactaggagtcattaatttgtttccaatttaccagattggaagtgaatgggactgttgacattgggaagagaaaaggcctagttatcccattactagtagtatcgaaacatagaggctgcagctactacaaggagaactgsgtatcttagtaggaagagaggaggtgataagtacagagcctttctctcttctccatcctgcccttatgccactgccaaccttttactctaaataacatctcagtctacccgagcaagaatacattgctttggatatggcacattaagaaaatgaacatggttttacagcatgg

SEQ ID NO: 437979 - DNA, 461 bp, Homo sapiens
acactgacatcagctcagccctgcagaagtaactacaagagaaccaaggaacattagagctaaaatgaatcttacctagcacctcattcaaagtctttgtttcattaagaagttgaaacacaggaaggtaaagttattttcctagggtcaccaccataagaggggataatcaaaggacttaggaggtaaaactataatgacttgggtgacttactggaygtaggctgttagggagagaaaggagtagagaacaattgcaaatattctcagttggcaaatggaaggaatgatgaggttgggtttggaacataatcccaaaggacacaatcccaaaccccacaatccctaatgttgaaatccccatagatcaaaatcactaaagtctaaatccctgaagtctaaagtccctagcaagtgtgaggtgtctgcataccatccagattagagatatcaagcagaca

SEQ ID NO: 437980 - DNA, 575 bp, Homo sapiens
gaagaaagagaagagaaatcaagaaaggggagaagcaagaatagaacccacagaacatcagtatctaaggggtttgttaaaataaaaaataaataaaataggagtttataaagtagcctacaaataagtgaccagggagataggaagaaaactaggatagaatggtgtcagtaaaagaaacggttttaagaagggaaaasttttcaataattgtaacacacgtagcgagctgcttccccagtatttaaaaggagcagtatgctgctccttttaaacaaaacccttttttcagaccatcagtggatctggtaaataaataaacaacaatttcccaggtacctttgtatcccaaagctcatccatctctggtcaattacaggcagatgcctatctacttgggggggctgccaggaaaattattattgtcctcatacaagtggccaaagaactggcacctcacttttaccctttgcattttctcctttcttccctcctaaatgattctatgcctaaaggtgcagcagctgtctaatggtcatgagtacaaaagatacaaaatagatgatggagaggaa

SEQ ID NO: 437981 - DNA, 591 bp, Homo sapiens
gaggcaggcaggcctcattgagctgaggtggactctacccagtttgagcttcccagctgctttgtttacctactcaagcctcagcaattgcagatgcccctcccacagccagrctgccaccttgcagtttgatcttggactgctgcactagcagtgagcaaggctctatgggcatgggacccgccgagccaggcacaggatataatctcctggtgtgccgtttgctaagaccattggaaaagtgcagtatttgggtggcagtgtcccaattttctaggtacagtctgtcacggcttcccttggctaggaaagggaaatcccccgaccttttgcacttcccaggtgaggcgataccctgccctgctttggctcaccctctgtgggctgcactcactgtccaaccagccccaatgagatgaaccaggtacctcagttggaaatgcagaaagcaccttcttctgttttgaccacgctgggagctgcagaccttagctgttcctattcggccatcttggaatggctatcgagatcttgcacttctttagttaattcctaggtatttaattttatgtgtggctattgtaagtgggg

SEQ ID NO: 437982 - DNA, 605 bp, Homo sapiens
ttttgtaaaataacccaaaaagtgctatccagaaccagctgagagcaagataaatctagagtgggctgcagatgtgaggcatcaaatgatgcatgagctgaccacagggaaactgagctgctttatgtttgaataagttgaaaataaaattaatgatccgttatataaagtaatttttgcctggttaaaagcttatcacacttggtatttgctgaaagaaaaaaaaatcaagatayaagagttaaaccctccttagatgggatggtttttgggaaaagggtagttaaagagagttggattatgtaactgagtcttgtggcattattgtctgacaagatcatggtctctaataaagtaaaataagtgtgagcagctatgtgaaaagttaacatttttagatggctatgttacttcttaaactcttcgtttaaatccatttattgcatctttatctgaaatgggttttttctaaacatttactatcattcatgtattatttccttaccaggtgcaacattatttgaaatgatactttcatagattggaatttgttttcatcaagacaaaatgaattttacatatatatccaagtctttaacattggc

SEQ ID NO: 437983 - DNA, 564 bp, Homo sapiens
tatatataggaatggtgatagagttcatcttgaagatcagaagtattttgtatccttcaaagaatgatcattttaagtgatcatatagtcttagtcactttctcccaaaaggggaattgaggacaaaaatttgggcatatatgttttgtgtatttcaattccaactctgcaattctttcttaagtatagcaattgttctgtcttaagaatcatggtatttttaaaaaatcataattttcaagtcaagttcaagatcaaaaatatgtaattattttagtagggcttaaatatcagaaatgagatgcatgatcttgggcaaattttatcttcttacacctgagtttcctactctgtgaagggagggggaactgattyacacttgattatttctatcattcattttcagtgtaaatattctatggtgttatgtcaaaggcattttatatattgccaggaaatgagttacagcaaaatgcatgccaaagttatgaaatttatgataattatgtgacatacattgcacagctactactcaaaaaagaattttgtagatgtatgaaagca

SEQ ID NO: 437984 - DNA, 564 bp, Homo sapiens
tatatataggaatggtgatagagttcatcttgaagatcagaagtattttgtatccttcaaagaatgatcattttaagtgatcatatagtcttagtcactttctcccaaaaggggaattgaggacaaaaatttgggcatatatgttttgtgtatttcaattccaactctgcaattctttcttaagtatagcaattgttctgtcttaagaatcatggtatttttaaaaaatcataattttcaagtcaagttcaagatcaaaaatatgtaattattttagtagggcttaaatatcagaaatgagatgcatgatcttgggcaaattttatcttcttacacctgagtttcctactctgtgaagggagggggaactgatttacacttgattatttctatcattcattttcagtktaaatattctatggtgttatgtcaaaggcattttatatattgccaggaaatgagttacagcaaaatgcatgccaaagttatgaaatttatgataattatgtgacatacattgcacagctactactcaaaaaagaattttgtagatgtatgaaagca

SEQ ID NO: 437985 - DNA, 564 bp, Homo sapiens
tatatataggaatggtgatagagttcatcttgaagatcagaagtattttgtatccttcaaagaatgatcattttaagtgatcatatagtcttagtcactttctcccaaaaggggaattgaggacaaaaatttgggcatatatgttttgtgtatttcaattccaactctgcaattctttcttaagtatagcaattgttctgtcttaagaatcatggtatttttaaaaaatcataattttcaagtcaagttcaagatcaaaaatatgtaattattttagtagggcttaaatatcagaaatgagatgcatgatcttgggcaaattttatcttcttacacctgagtttcctactctgtgaagggagggggaactgatttacacttgattatttctatcattcattttcagtgtaaatattctatggtgttatgtcaaaggcattttatatattgccaggaaatgagttacagcaaaatkcatgccaaagttatgaaatttatgataattatgtgacatacattgcacagctactactcaaaaaagaattttgtagatgtatgaaagca

SEQ ID NO: 437986 - DNA, 525 bp, Homo sapiens
  misc_feature (1)...(525): n = A,T,C or G
tagtccacccagatcttggtgactgtttaccaaattagagatttgaccactaataaaatatatacaagcattagccttctttctttcctctgctacttgcctcttttcatgttacttaccaaacattatatagcttattagtatcagggcctgaatatgtgatgccttttcacattgtttttycccttttgagttacaattttacttccatcctgtctttcttagacatctatttattaatgtgattaatttttattgagataatttacataccataaattnnaccatgntagtttatataattcagtggtttggccgggtgcggtggctcacgcctgtaatcccagcacactgggaggccaagccgggcttatcacttgaggtcaggagttcgagaccagcctaaccaacatggtgaaaccccagttgtcaccactggagtgggatcatactggcatctggcaggtagaggccagggatgctgctaaacatcccacaacgcataggacagctcctaccaaagaa

SEQ ID NO: 437987 - DNA, 605 bp, Homo sapiens
agcctgagcaacatagtgataaacctatccacaagcatctcatgattcctgccaggattaatccagaaggagccatgttctttgtcaacctggcagacaagataccaggggacagaatctgtccttctctacttttccttctgccctttctcgccccttcttccttcccccaactaccaattacccttaacttggattggtaaggaattgagaaaccatcccagatacaaatactactctggcaggaacttggttcatgtaaagcctctgcctgcaaaatcttgacaatagcaaacagagggcaagcaattccaggctagttaagtaggaaaaaaasccagcttttatttgctgtagataaacctaagcttttgcactgtaacctatatcaggtacctgaacctatgtgcaaaccctgcaccttgtcctctagctagaaagggtgaagttaaaaactcaagaaagtactgtgatctcttattggagagataatcttcccaggagtacaaagccactcaagattgagaaaccaagtggaatgtaaatagaagttcactgggatgtaccaaagagagcactaaccattggggaaaaaaagttaattt

SEQ ID NO: 437988 - DNA, 605 bp, Homo sapiens
agcctgagcaacatagtgataaacctatccacaagcatctcatgattcctgccaggattaatccagaaggagccatgttctttgtcaacctggcagacaagataccaggggacagaatctgtccttctctacttttccttctgccctttctcgccccttcttccttcccccaactaccaattacccttaacttggattggtaaggaattgagaaaccatcccagatacaaatactactctggcaggaacttggttcatgtaaagcctctgcctgcaaaatcttgacaatagcaaacagagggcaagcaattccaggctagttaagtaggaaaaaaacccagcttttatttgctgtagataaacctaagcttttgcactgtaacctatatcaggtacctgaacctatgtgcaaaccctgcaccttgtcctctagctagaaagggtgaagttaaaaactcaagaaagtactgtgatctcttattgragagataatcttcccaggagtacaaagccactcaagattgagaaaccaagtggaatgtaaatagaagttcactgggatgtaccaaagagagcactaaccattggggaaaaaaagttaattt

SEQ ID NO: 437989 - DNA, 589 bp, Homo sapiens
gtaccctaaaaatgtttaatttgcccatagagacatttccataaaagccgttttgttttattttacctcccagataggaagtttctcttagcaattaagagcaattccatgggtcatttttttgattgccaggcatcgtaatctaattattccagattttacattccgtgcatattatctgttatgattctaagaaaactttcatcagatgaagattttggaatagactcatgcaggagccgctcccattttctctacaggaggggcgcagggcagccatctggctgtaagtggtcctggaagctgcactcacatagcagcttacataagatcaaaccatgtcaacagttcacatcaaagagggggcagtggatggagattatgccccctttccctttcatccacatggccagtaccctgatctctggcagagtcacactttaaatcacttctactaggtaagagtctascgttgttttctagttaccacacagaaatttaataacctgtgtattcctggttgaaactgaccaggtagtaatttttttactttctcacataacttagtttctcagtgaaatactgatat

SEQ ID NO: 437990 - DNA, 567 bp, Homo sapiens
actaactacaacttatttccagtaactgaaggcttcagcacaataagccttacagttttcctttctaagtatttttcgttatgtatataaaggcctccaaatacatttataaacccttgaaagaagacacacatttctaagagatttttacatataacaaaattctcactacactcctggccgggtcactgaaacaagagggggcaggttttatttgtatctgagcataagattaagaatcagtagaatcaacactgttcaaagccacacttgtggaaagtttcctattcaaaaatgccggctgatctccaaactgttttaattcttctgtgttaaactgatggctctaggacctcgatggactcaagtccaaaagcattggcaacaccaggcaycttgttggaaatgcagagtctccggcaaaacactagacctattgaagcaggatctgcattttccaacaatcctaggaattggaatgcacgttgaaatctgaaaagcactactccagagagggatttattagttgatatattttcctacaaaccagtcctttggactctctca

SEQ ID NO: 437991 - DNA, 514 bp, Homo sapiens
aagccaccatgtccagcctagaaatatatcctaacgaaataatcatatatgtacacaaagatttgtggacaaagctgttaactggattattactttaataactaaaacttacaaacaatctaaatgtccaacactagagcaatggttaagtaaatcatagaatggtcacacaaaggattgttaaactgctattaaaagttatgctatcaaagaatacttaatgacacaggaaaacactcatgatacagtgttaastggaagataatttttataaccacataaaagtagaatgtcatttctagacgtattcaaataatacgtattgaattctaatatacaatggacattaagattcactgatatttattaaagttgtcataatttagccaaattgctattctgaaaccttattgtgtctctccattattttagggagctcatgccaaggtagtaaagacctacgagtcagccaaacatgaggttaaccctcgctgtgacactcactagctgggtg

SEQ ID NO: 437992 - DNA, 514 bp, Homo sapiens
aagccaccatgtccagcctagaaatatatcctaacgaaataatcatatatgtacacaaagatttgtggacaaagctgttaactggattattactttaataactaaaacttacaaacaatctaaatgtccaacactagagcaatggttaagtaaatcatagaatggtcacacaaaggattgttaaactgctattaaaagttatgctatcaaagaatacttaatgacacaggaaaacactcatgatacagtgttaactggaagataatttttataaccacataaaagtagaatrtcatttctagacgtattcaaataatacgtattgaattctaatatacaatggacattaagattcactgatatttattaaagttgtcataatttagccaaattgctattctgaaaccttattgtgtctctccattattttagggagctcatgccaaggtagtaaagacctacgagtcagccaaacatgaggttaaccctcgctgtgacactcactagctgggtg

SEQ ID NO: 437993 - DNA, 514 bp, Homo sapiens
aagccaccatgtccagcctagaaatatatcctaacgaaataatcatatatgtacacaaagatttgtggacaaagctgttaactggattattactttaataactaaaacttacaaacaatctaaatgtccaacactagagcaatggttaagtaaatcatagaatggtcacacaaaggattgttaaactgctattaaaagttatgctatcaaagaatacttaatgacacaggaaaacactcatgatacagtgttaactggaagataatttttataaccacataaaagtagaatgtcatttctagaygtattcaaataatacgtattgaattctaatatacaatggacattaagattcactgatatttattaaagttgtcataatttagccaaattgctattctgaaaccttattgtgtctctccattattttagggagctcatgccaaggtagtaaagacctacgagtcagccaaacatgaggttaaccctcgctgtgacactcactagctgggtg

SEQ ID NO: 437994 - DNA, 429 bp, Homo sapiens
acaaaggattgttaaactgctattaaaagttatgctatcaaagaatacttaatgacacaggaaaacactcatgatacagtgttaactggaagataatttttataaccacataaaagtagaatgtcatttctagacgtattcaaataatacgtattgaattctaatatacaatggacattaagattcactgatatttattaaagttgtcataatttagccaaattgctattctgaaaccttattgtgtctctccattattttagggagctcatgccaaggtagtaaagacctacgagtcagccaaacatgaggttaaccctcgctgtgacactcactagctgggtgactcaartcagttacttcattttcatgagccttagtttcctcatctgtaaaccctcacctcataggactgttgtgagaactaaa

SEQ ID NO: 437995 - DNA, 615 bp, Homo sapiens
aaacatgaggttaaccctcgctgtgacactcactagctgggtgactcaaatcagttacttcattttcatgagccttagtttcctcatctgtaaaccctcacctcataggactgttgtgagaactaaaagcatatataaaagactggtcaagtgcctgacatatagtagacaataaatattaagcctctttcctttcctgtttttttattattattttttaggttattctcaggatttatgggattaaatctgattcatagaaagtacttttgcaagattctgtctgtggggactggttatgacaatttttgccttatgttctccataatatatgtgaactttcaaataataatcacacacatctttaagtcatttaagtgatttacatgtaaaattcttagatgtgagatgatggaggaagttgcacaaagttaaatatgaagtaaaytcatataaaaatgatgtaaggtttgggaggctgaggcgggcggatcacaagatcaggagatcgagaccacggtgaaaccccatctccactaaaaatacaaaaaattagccaggcgtggtgaccggcgcgtgtagtcccagctactcggagaggctgaggcaggagaa

SEQ ID NO: 437996 - DNA, 615 bp, Homo sapiens
aaacatgaggttaaccctcgctgtgacactcactagctgggtgactcaaatcagttacttcattttcatgagccttagtttcctcatctgtaaaccctcacctcataggactgttgtgagaactaaaagcatatataaaagactggtcaagtgcctgacatatagtagacaataaatattaagcctctttcctttcctgtttttttattattattttttaggttattctcaggatttatgggattaaatctgattcatagaaagtacttttgcaagattctgtctgtggggactggttatgacaatttttgccttatgttctccataatatatgtgaactttcaaataataatcacacacatctttaagtcatttaagtgatttacatgtaaaattcttagatgtgagatgatggaggaagttgcacaaagttaaatatgaagtaaactcatataaaaatgatgtaaggtttgggaggctgaggcgggcggatcacaagatcaggagatcgagaccacggtgaaaccccatctccactaaaaatacaaaaaattagccaggcgtggtgacsggcgcgtgtagtcccagctactcggagaggctgaggcaggagaa

SEQ ID NO: 437997 - DNA, 538 bp, Homo sapiens
attttgtaatgagaagcacctcgggggtagtgttatgacacaggccatggtgtcacatactctgttcagttcaaccgtacaatggactgrtaagaatgccaaacagacatttaaattagacaactatgactttcaataaatttgcacaagatgatcgctatcagatatgtagcatgaaaagcccgttttatattggaaagttgtctttgcctagtaggatttcaaatgtttattgaattgaatatgaggaaatatacttagctctatagttccctgaatattggctctagaatagggtctttgagatgtcatgttccggagaagtctagactcacttcatgattttaaataaaatggctgccccttccccatttcccagattcatgctgagctcgactacctccgtgagaaatgactctcctgtagggctcgatgaccttcatgtcaatgcgctgctcttgttctccaatgaccactgtcctccaaagccggttgtcctcccgttcctcttcggccgtatattctggaatagactctg

SEQ ID NO: 437998 - DNA, 516 bp, Homo sapiens
ctgaaaacttttaattatcttcttttttatcatttctctcactccccctaaaccatcccttccttccttcccactttattggagaygcaggatcaaatataaagtccttgctcctgtggagcatacattcgagtggtaagagaaagacaataaagatgcaaacaaatagttaaataatacaatttgaattagtgatacgtggaaaataaaatgaacactgggacagagagtgactaggtggtgggagtcgggaagtgggaagcatctttgattacagaggtcaaggaagacttctctgaggaggtgacatctgattaacatctgaataaagagaaggagtcagtcacgtaaggatctggggaaaagaacattgcagatagtgggaacttatacaagaaattggcaagctctgatttctcttcttcaaattttatcgtcctgattaaattctcttcccctgcaaacccagccccaggtttcttgtaacacagcatgtaacagtcttccctcagcccc

SEQ ID NO: 437999 - DNA, 614 bp, Homo sapiens
ttgacatgttaatattgagtttttccaattcataagctcactcttttagttttcttttaagactgaaaaattgctaagaagagtggtgttgacatgacaggtttaaaccagtgtktttgccttatgatccattagttggctgggaaatgaaattcagtgaatcagagtcatcattagaaaatgaaatagaagaaccataccagagcataatgcacattacaaaggtgaatattatttcattaagttttcttttccattttctctaaagttatgtagatgcatgtgtgtgctaggttgccatgcaaagtttgtttcttactctaagtcgtagcctaaaatgtttttgatcttagatataattctgaagatagagtcatcttctgtagtgaatttttttctttttgagacagtatctcattctgttgcccaggctggagtgcagtggcctgatctttgttcactgcagcctccacttctcccgggttcagtgatcctcccaactcagcctactgagcagctaagaccacaggcatgagccaccatgcccagctagttttattatttttgcccaggctaatcttgaactcctggcctcaaatgatcctcccccctcg

SEQ ID NO: 438000 - DNA, 544 bp, Homo sapiens
acctggtaattaggagccaattactttttkttttttttttttggctgaagatcagattacttatttggtaaatataaaggcatgtttgtttcacatccatactaaaaggtgttagggggcaggcataaaaacctgaagcaaaagaaaacaactctaggatctactttttaactcagaatcaaaattcccttttttttcttccagattaatttctgtgctagctaacttttggaaatttacacataaacatttacttaattttaaggccatgccataatttagtggacagagatactaagcatttgctgtatttcatagtaaatctccaacgcttatcatttcaaatgtttttaaacactaaataagaacataataaaagtataacatgcctctcttctagattgtcctatatgctgagacatctgaataactgcattgcctcagttacattttataacatcttctccccaaataatttaaacactctccaaaccccctctcctccactgctgtttttctatcttggtaggaggtttgaagtgtg

SEQ ID NO: 438001 - DNA, 597 bp, Homo sapiens
attagaattgaatattcttaatcctcgggcaaatgggcttagttttctataagcaactttttcctgagacagagcaaccttctgataattttacaataggccatttttgtgtctaacacgtattaaatgaggttccttacaaactgtcagacaatattgtttaatgatgaataaaaacatttgcattttatgtagaaagaagaaaatgggcataaccttcccttctgtctctgaggaaaatgagaggccactacgrtaacagcacacactccatcttattcttggactgatcgagcccattggaagaacccttgcccattttgcagtgtattcattcaacactagctctggaaggtgtaaaatgcttccacacagaatgctcctctgtccttgatggcctacagtgtaaaggtgccagaagaagtaaatgcagcccttattctaataccaaagaaagccagaaatccaggactggaagtcagaaaaaaaaaaaaaattcttggttactcttgccccttatcctgatctcatcatccacactgtgatcttgtgcctcttaagggctcaggaaagagagggctgaagaaagggaagact

SEQ ID NO: 438002 - DNA, 503 bp, Homo sapiens
caacctcaatattacagtttattgccctgttgtttattaaccagttttgtatctaacccaacaatcttatccaaatattcttctataaattgcctatagatatctagctgctcaaatgttctttgaactggctttaacaccttagtggttcctgcattaaataattagttgaataaaatcattggcatgtgttcattttatatttgcatgagagttgtaattttgcctttttgagawtcatactttagcaatagtgggcaatgacttttgtttttctattcatcaaaatagctcaaaggctgttagttaagcaatatttccaaagtcattaagtaagttgttgttttaattcatagaaggccgtgaaattgattctacaaaaatcttccaaatctcgatgtgttattattcctccccactggtatgaattagtgaggttctgttgcctcaatacctaatgatcatctcgatgtcacactatatgtggcagtgcctgtgatgtg

SEQ ID NO: 438003 - DNA, 608 bp, Homo sapiens
tgatgtctacacaatgatgaaaacatctaaagacgcacttctcagaacatgtctctgtcattaggtgatgtatgatggtaataataaaattgacatttgggrgaaatcttattttcattagaaaacaatcaatgtttataatttataaatatatgcagtcaaacctcattatttgcagattctatatttgtaaatttgcctcttcactagcatgtatttataaacacaaaatcaatacaaagtactttttgggtcacttgtggacatgtgcagagtggagaaaaatttgagttgcccaacattcatgttgccacctggcaatgtgtgaggctctgtcttcttgtttcatactgtaaacaagtgtccttttcacaacctttttagtgcctttttttccgctcatttttgtatttttccttggtgattttgctgttcaaattggcttccaagcatagggctgaaatactgtattgggaatactagtattcccaagtgcaggaaagctgtgatgtgccttatgaagaaaatatgtgtattagataagctttgtttatgcacaagttacaatactgttggccatgagttcaatgttcataaatcaacaatgt

SEQ ID NO: 438004 - DNA, 608 bp, Homo sapiens
tgatgtctacacaatgatgaaaacatctaaagacgcacttctcagaacatgtctctgtcattaggtgatgtatgatggtaataataaaattgacatttgggggaaatcttattttcattagaaaacaatcaatgtttataatttataaatatatgcagtcaaacctcattatttgcagattctatatttgtaaatttgcctcttcactagcatgtatttataaacacaaaatcaatacaaagtactttttgggtcacttgtggacatgtgcagagtggagaaaaatttgagttgcccaacattcatgttgccacctggcaatgtgtgaggctctgtcttcttgtttcatactgtaaacaagtgtccttttcacaacctttttagtgcctttttttccrctcatttttgtatttttccttggtgattttgctgttcaaattggcttccaagcatagggctgaaatactgtattgggaatactagtattcccaagtgcaggaaagctgtgatgtgccttatgaagaaaatatgtgtattagataagctttgtttatgcacaagttacaatactgttggccatgagttcaatgttcataaatcaacaatgt

SEQ ID NO: 438005 - DNA, 453 bp, Homo sapiens
attgggttaaagaaactgatgtaaactggcctttattaatgtggtagtaaggtgtgtgggaggggcagcattctgtagcaccataattaggtctcagtcttttrgtgagcctgtgcctctggaccgtgaactttgcaagggacttctcagttttccccactccttattcctggatttttcggtggaacaggatggctggagtgggctggggttggtctgggtatttccctttgcccacatggagtagctcattggagttggatatttccctttccccaggtcacttagtctctgttaaaaccccaacagattagactatgattaaatagtttctcttaagggaacagaaactctgatgtatttcaaaatacttccttttctcctccccctgctgtggaagcataaggggatttttctctgttagttattcatggtgagaacctggtaagctcc

SEQ ID NO: 438006 - DNA, 559 bp, Homo sapiens
tgtctttgtccattataaactggaggatcacagttaagccttccatgaattcatagtttggaatcatttaccttaccattattttggatttttttcttattacagtgtcactacactgtattcatgtgggggaacaaacatgtaggtgcttgaacatgccccacagacacagttgtagccctagtatttgtgacggtcattattgacacagtgcagactttrcagatggagcattatgctctcagaggactttaaaaatatgtatattaagcaattaactttctggagttggagttatcaaatcttgctgggaaattaacttccaagagctctgaattggatggaattccatctggcttcagagaacaatcagcctatatgaaacggagctttgaaatgtttttcttgtgcagaaatacgaactagaaagaaaagtgctgatctaatgctaagttttctctgtgtactgactcagttgccagaattataatgaaaactgtattttagtctaacaaatgtatagaattttttatgtaataaataaaattttataggaaag

SEQ ID NO: 438007 - DNA, 433 bp, Homo sapiens
cctgctgctatcactagaaccattaaggggtaaaatctatagaactttgtgacttcacgtagagcacaaattagaggagaggagatagtgatgatggcctagctttctgtcttcgctcttgattaaatttggaggtcctggagggatagactggggtagaaaactcgttgaattwtgatatattttagatcttttctgctctctttctctgccctggcatattgcctaccatatctagaaaacactttttaaaaactgctggatttgatgcctgttcagccagtctccccttgtatacctcctagattaggcacatactatccttatatacaccttttacttgactcctaccaccatagagaaaattttagctttatgtcacatatgcaagctagggtcaagtttcagaactcagcacatgtaatcctgtttc

SEQ ID NO: 438008 - DNA, 433 bp, Homo sapiens
cctgctgctatcactagaaccattaaggggtaaaatctatagaactttgtgacttcacgtagagcacaaattagaggagaggagatagtgatgatggcctagctttctgtcttcgctcttgattaaatttggaggtcctggagggatagactggggtagaaaactcgttgaattatgatatattttagatcttttctgctctstttctctgccctggcatattgcctaccatatctagaaaacactttttaaaaactgctggatttgatgcctgttcagccagtctccccttgtatacctcctagattaggcacatactatccttatatacaccttttacttgactcctaccaccatagagaaaattttagctttatgtcacatatgcaagctagggtcaagtttcagaactcagcacatgtaatcctgtttc

SEQ ID NO: 438009 - DNA, 450 bp, Homo sapiens
ttcaaaatgtttagatacatttaaagtagaataagagcaaactacaattcatttaaatggaatgaaaaaagctcccatggcttacttagtaccagggttaggaaaaaggattcgtacgacagtacccttggaggcaactccttaagactggatttaaagcattaaaatgtgaggaaataaaactgttctctcaggctccagtgaccttaaaaacagtgcagtgattctgatttaccagtttacacacagctatgcctcccttamactttactttaaaaggaggatttgactttctcagtattaagtccaaaggtcaaacaggttgtaaagagtcaagggccccatcagatctactctacaaggtaataaacattcaagtctatcatccctcaccaagaaatgcaaatttttgttgagctagaggatgggagttgggggtggtggatacag

SEQ ID NO: 438010 - DNA, 611 bp, Homo sapiens
tatcactttacctcagcaaatcaatcccagacacattgaccatttttagtaataatctgaggatggcgtatattgtgaaatttctgtcccttgaagtaggctagtccagaatattacagctaaaccaaagggaatgcgatcaggaatagctcatgagactaaatgttggcaaagataggttataggcagagagtcatcaattacaattggggcaggagatctggatgacttgaactgacccttaaatgctctggttcagtaagccgttgtggatctgcatgatcaatggggtattattggatgggctttactcaccaaatgtgttagcatctatcacrtgtcaggcactcactaggcattgaggatacagtgatgaccaagaatgatgtggtttcttccctcacagagtttacatgaggaatgatgattataaacaaatacatgcagacctattttgtctttcgtccttgtgggatttggtataccgtatctcaaagacatgaaactttttgaaagtacatacagtggcaggcaaagttaattatagggacttaagaccttttgaaaatcaaggttaaaaagacctgtggatgagaagacaacagacaaag

SEQ ID NO: 438011 - DNA, 603 bp, Homo sapiens
attttatttatttcattcatgggacagaatagttaattaccaaaaatataatcacaaatataacctaataagatcaggagttatgttttctagcttaaatctatgcatttatttttttcattggaatatttgcagtgctgaagagagtggagataaaatcagttaaaaatagctccttttaaaaaaatactaaattatgttgcttgagatatgagaaggaaatttgttatgaatgccacattaaatttcaacttaagttggcctttgccgtgggagaagaggtggtactgtcaaaagcattgagccttgtayttcatgctctgctgtgaggaaaaggcattggtatttaaaaaaaaaaaaaaaaaaaaaaaaaaaaaaaaaaaaaaaacctttgccacctttgacttcccatggtagtggtgatcagactagtgtgggagatgcgtggggctgcctgatgcttgcctttgtggagaaagaagtctcacaaagaaagccctttttcagctctgcacataggtttcctctgtgacatcttaagtgaataatatatgtataaatatacttttttaaattgcaaacgtaggatgaacaagcctgaag

SEQ ID NO: 438012 - DNA, 603 bp, Homo sapiens
attttatttatttcattcatgggacagaatagttaattaccaaaaatataatcacaaatataacctaataagatcaggagttatgttttctagcttaaatctatgcatttatttttttcattggaatatttgcagtgctgaagagagtggagataaaatcagttaaaaatagctccttttaaaaaaatactaaattatgttgcttgagatatgagaaggaaatttgttatgaatgccacattaaatttcaacttaagttggcctttgccgtgggagaagaggtggtactgtcaaaagcattgagccttgtacttcatgctctgctgtgaggaaaaggcattggtatttaaaaaaaaaaaaaaaaaaaaaaaaaaaaaaaaaaaaaaaacctttgccacctttgacttcccatggtagtggtgatcagactagtgtgggagatgcgtggggctgcctgatgcttgcytttgtggagaaagaagtctcacaaagaaagccctttttcagctctgcacataggtttcctctgtgacatcttaagtgaataatatatgtataaatatacttttttaaattgcaaacgtaggatgaacaagcctgaag

SEQ ID NO: 438013 - DNA, 595 bp, Homo sapiens
gagcaatataagttatatgtattatggtcaagaatacttttaataatcataaagtatgagccatatcttttatggtcaaaaagcttaaaaatccatgtaataagggttaagtttaaaggtgggtttgtgaggtttatggcttagtcaayctatgaataatcagagaattgttgtaatatgagcactgctggtctaatacgcttatttaattgactgcagttttcaaaataggacaagccttatttatttggatggatggtgtaattcaagccccttaagtatattcttgggacatgatatcagaattaaactttaagccaaattttttcatgttcttttctgtgaaacagctataattttattgaatatgatctagtgtaatgacctgtgtgcctgcttctatgagcctttatgcattttttaaaaagccttttaaatgagcacttgagttgcctttaaggcatgacgtactggttgcattatcacaatttccttttggaagaaaccggtatcaatccccttgaatacttttcctctttcttagaggacagatgataccatctaattgaataaggcagtaaggcagtaagaagat

SEQ ID NO: 438014 - DNA, 541 bp, Homo sapiens
ggatggtgtaattcaagccccttaagtatattcttgggacatgatatcagaattaaactttaagccaaattttttcatgttcttttctgtgaaacagctataattttattgaatatgatctagtgtaatgacctgtgtgcctgcttctatgagcctttatgcattttttaaaaagccttttaaatgagcacttgagttgcctttaaggcatgacgtactggttgcattatcacaatttccttttggaagaaaccggtatcaatccccttgaatacttttcctctttcttagaggacagatgataccatctaattgaataaggcagtaaggcagtaagaagatgatcttgttgtagataatttccaagcagttctcggttggcgctttggagagattttgataatcattatttgtgggattcygagtatattttcttacccatcaataacttatcttcctatttttatttctgactttaatcgggttcacatttccccttacttacatgtaggccttcccatagtccatcagctaatttttt

SEQ ID NO: 438015 - DNA, 568 bp, Homo sapiens
tttttccttctctagacctcagctgagcacatttgagaaatgggagggttagcttgggttgtccataaggttttttctacctgtaattatacctccttgattctaaaagatgaaagcccttcaaagttgggaaatgaaaggaaaatgtatagaattctgtaacctgcagagtttgagtatcaatgccataatttacyagccctgtggtcttgagcaagccacttaaaccctgtgtgccttaggtatctgcaggcaccaacagagttgtgaaaatcaaaagtagtataaagaacatgtagctatacattgatcactttgaagctacctgatgagaaccctaaagttaactatcccagagctttcgcacttcctctctgaaaggtatcctcagatgaccgtcactgtgtcccatgtactgacccttgtagagagaaaccattcattggaagaactgtcctgtggcagtcggtgcccattagcttaaaaacgtaaaaagacccagcattctgagtcttcacatataatcagtgtacagatatcccctcggaagatggcagtaatgagccca

SEQ ID NO: 438016 - DNA, 554 bp, Homo sapiens
tttcttgcccatttctactgcaacactaaaaattacttgccatgataggttatgtgtggtttggggagttccgtagaacttgstagggacattcctctcttttaaaagagacatttatttggggtgtgtcaggcagtcagtgtatgtgaaaagatcaaacaaaaatagaatctctccagcaacagaatactgatctttttctcccactattatacctaaaaaactctattgttcagatgataaaagttatcattttttaggatttatactatttctagtgttacagtacctgattcattcctttcttggatatgaattttacactcttcttacctgtatcactcaagcatcaccttcatcgaaggtgagggaaaaattataaaattcaaatacttctcagatatatgcaagatgaggttttagtttgataggatgcccttttttttttttttttttttttttggggtttggaaactcaataaccatttcaatgatgaaccttgctgggtttttttaatcctgtaaggccctttgacctacaggttgttgatagc

SEQ ID NO: 438017 - DNA, 652 bp, Homo sapiens
tttaaaaatgttttgttatgccttaggtgtagtagtaattataagaaataatgcagattttcacaccaagaaaaaaaaaacctgggtgactatcagaaaggttaagcagatattactagaaatgctgaagcagaaattgcagttgttactttatgaaatgttctttagtagaaatttcatctcttgagaatggttgctgcagtgtgttttctgtatgtagagaactatatgttgaatgtattctgtttttcaggggttactcttaaagaagtacctgtgttctattcatacattgcataaagaagtcctctttgcttaagtaaactgctacttatgttttctgtcttaagatggcctgaggaccagatgataagccaagcattcggtctttcctacataaagggtggtaagaacttttcataaatttagtctgaaacttatcctcatcctaataatgaaaatttattttattttttgctgaaatagtagtacattttaaaagttgtgcttcccaagctcgtttatgtcatgagtgcctgtcctgaggggraacctttatctccacacacgtacaaccacttctaggccaagcagcacaccagggcttatgtgtgggaagctctgatttaaatagtttacttttttaaaattt

SEQ ID NO: 438018 - DNA, 552 bp, Homo sapiens
cttattgcttgtgctcagagaactagctgatggtagaagagcacttttaaaggaattgatgagactgaaagctgctcgttagagtgcacctggatcctgccatgacatcacaggcggaccataaacggctctccagaaagcacgacagccttttttcacccctttcttaacaatgagacgtagattgggcttgttctctattcaagcatccttatgagtaaatgtctatttttatggtagagctgcactttaaaaatagctccaatcagtgcgactcttttcccccatatgttaaaaagttatacatgagttaaaatatctcagattgcttaaattcttccaaacccaagccacattcctttttccttttttttttttttaactgtrggggagggggttaggtgggtgggaggggcgaattaactacaaaataaggactttcagggcctccttaactctgtttcagactttttagcagtagcaagatttttaaaccaagatttgagatttctgattttaaaaattcattaatatttggtggatacagtctcc

SEQ ID NO: 438019 - DNA, 568 bp, Homo sapiens
gatgtaaggcagtgtttcttgaacttgagcattcttaagattgacccagagggcttgttgaaacatgtatacatagattcctgggcccaaaaagtgatttcataggcctggggtatgtgcattgggagttgtcttttccctggacatcttgcagctttggttggatgkcttccagggctgggatattccaagtgtcgtttaggtggttgaactcaattagtttaagattgtgtcttagtccattttgtgctgctataactgagtaccacagactgggcaacttctttttaaattttattttaagctctgggatacatatccaggatatacaggtttgttacacaggtaaacgtgtcccacgatgatttgctgtacctatctaagcccagcatgcattagctatttttcctgatactctccctccccctacacaggccccagtgtgtgttgttcccctccctgtgtatatttgttcacattgctcagctcccacttacaagtgagaatgtgcaatgtttagttttctgttcctgcattaatttgttgtggataatgccttccagttcca

SEQ ID NO: 438020 - DNA, 568 bp, Homo sapiens
gatgtaaggcagtgtttcttgaacttgagcattcttaagattgacccagagggcttgttgaaacatgtatacatagattcctgggcccaaaaagtgatttcataggcctggggtatgtgcattgggagttgtcttttccctggacatcttgcagctttggttggatgtcttccagggctgggatattccaagtgtcgtttaggtggttgaactcaattagtttaagattgtgtcttagtccattttgtgctgctataactgagtaccacagactgggcaacttctttttaaattttattttaagctctgggrtacatatccaggatatacaggtttgttacacaggtaaacgtgtcccacgatgatttgctgtacctatctaagcccagcatgcattagctatttttcctgatactctccctccccctacacaggccccagtgtgtgttgttcccctccctgtgtatatttgttcacattgctcagctcccacttacaagtgagaatgtgcaatgtttagttttctgttcctgcattaatttgttgtggataatgccttccagttcca

SEQ ID NO: 438021 - DNA, 624 bp, Homo sapiens
catatcttcagagtttaattttcttagggaaaaaaaaatgaatgccctgcttatttgaacattaattattcttttcagtggattgatcctacttactgtaaagctttgttgatcttttggcttatgtcaccatgtaatgtttatgtgattaatttttgtttgcatgaaaaggaggttttacttaccacaagaacatttttaacctctttgctctagagacatttggagttcgatggaagtatcctgtgtgaatacctgtggttttgatagtgattgtcgcagggtgggttttcttctttctggaggccaactttgcttttatgatgacctattatscctgcgtgtctggctctgtctagtcatatgtatggatctgttcttcctgtctggtccacccaggcttgggaagtaacttgtcaaccctgccctcagagcctgcttgagagggttggcaaactctactggtcctgctgtgaatctctcaggcttgcgagggacgacagatggttgagctaaactgggagccacccctctacgtaatgatgaaaaatgaccagcctcctggtaagtggaaatcaggaccatgcaccttttaattctaataaacaggactttgaaacaaac

SEQ ID NO: 438022 - DNA, 548 bp, Homo sapiens
tcccttgtgtgagcggccttacatgaatctcagtccatggtcaatatagtttcatagttacaagtgaaattagtccctggagtcagcagctaagcttcaataacagctttatccgttccaaactgatgagctcttgtaagttctttaatttctgaaagcatctttattcttcctctataatatgagacaacagtacctacctgagaatgctggaagacttaataaataacagatgtaaccattaacataatgcttggtacatgctcgaaagatgttagctgctgctgttattattattaatatgtgattctgttggggcctttcaacacattaaatgatgcaaggctttcttttgttttccctaagcccgttggaactctaaccattgacttgatcactgtctacacacctgaggctcttttcagctgctctgtttstgagagaaacatctaacctacaaagggaatccccaaatctcacaagtctcagattactaagggattgtcatacctggataaaatcatatttatatgctgtcttccttaagt

SEQ ID NO: 438023 - DNA, 548 bp, Homo sapiens
tcccttgtgtgagcggccttacatgaatctcagtccatggtcaatatagtttcatagttacaagtgaaattagtccctggagtcagcagctaagcttcaataacagctttatccgttccaaactgatgagctcttgtaagttctttaatttctgaaagcatctttattcttcctctataatatgagacaacagtacctacctgagaatgctggaagacttaataaataacagatgtaaccattaacataatgcttggtacatgctcgaaagatgttagctgctgctgttattattattaatatgtgattctgttggggcctttcaacacattaaatgatgcaaggctttcttttgttttccctaagcccgttggaactctaaccattgacttgatcactgtctacacacctgaggctcttttcagctgctctgtttcwgagagaaacatctaacctacaaagggaatccccaaatctcacaagtctcagattactaagggattgtcatacctggataaaatcatatttatatgctgtcttccttaagt

SEQ ID NO: 438024 - DNA, 507 bp, Homo sapiens
ccaacattatattagaaagctgaaaaataaacagcctagatagggatgtctggagctaggaaagaagaatgcctgcagtttagcactggttgctcttttaaagtttgttccgcaaggtgtggccttgtgaagagaattatagtcaacgggaaagtgcgcagatgtcagtcattgttaaatcaaggatcttttacgagagatsttggcgagatttcaccactgatagtcctgttcacctgtgtgaacagaaagttgggcaggtataaaacaactgctttgtttttccaaaacttggcccattacagcatgaaattcacattggcgaagtgaaaaggattaagcctttttcagtagagcaggtatgaggggactttttacttggtaagaaaaactgttgtacaggaaatgaacatagttcacactccagtcacattttatgcagtcaggaactgggtgagcagagtatcatcccaggcatatacagtctgaagatcttttaaggttcta

SEQ ID NO: 438025 - DNA, 572 bp, Homo sapiens
gcctgcttccctccctggcagcatttatcaggttctgcaactgtattgtgctttctctttgtttatgtgtttgtctgcttctgcccagtggaatataaactcctcaagggtaggatcaggrctttgtccttttcattgatacattcctaggtccagaacagcgtctggaacatagtaagtgcttagtaaatatttgacaaacgccttaatttgcttgccaactgtcgttgtttttcagaaatcagcttaaatttttcagcgttggctttcctgatcccaaatccaggtagatttattatagtacccccattattttccttggtacctataaaagccacctaaaatttggtaaactcagcacctgagaagcaagtcagcaccgcttgcatggagggggagatacgaggcgtgaatcttagtaacctatagcagccaacattcctgcgtgaggcaaaatctcatctacagcaagagatgagaagtcacgcagggagaaacatgcctggcaaagtcattacctgactccagatgtggtaggagctgagggtcctgcttctcaaaccttcatgtgc

SEQ ID NO: 438026 - DNA, 561 bp, Homo sapiens
aaaatgaaaacttacatccacgcaaaaacctgcatgtgaatgttatagcagctttattcatcatcggccaaaattggaagcaatcacgatgtcctttaatagttgaatggggacactatggtacatccatgcaatagagtactcttcgtggtaagaaacgagccatccagtcatgasaagacatggaactggcatactactaagtgaaagaaaccattgtgaaaaggctatatgctatatgattccatctatatgacattctggaaacggcaaaactatatagagacaataaaaacatcagtgatttccagagtggcagggggtgagaggaacagagagatgaattggtagtcaagggatttttagggtggtggaactgttctgtatgacattaaaggtagctacatgacattatgcatttgtcaaaacccgtagcatgtgcaacacagttaatcctaatgtaaacaatggacttaagttaatcatatatccatagtcgtacacgaattttcaaaatataccacattaatgcaagaggttaatagtagggaaaactgcata

SEQ ID NO: 438027 - DNA, 561 bp, Homo sapiens
aaaatgaaaacttacatccacgcaaaaacctgcatgtgaatgttatagcagctttattcatcatcggccaaaattggaagcaatcacgatgtcctttaatagttgaatggggacactatggtacatccatgcaatagagtactcttcgtggtaagaaacgagccatccagtcatgagaagacatggaactggcatactactaagtgaaagaaaccattgtgaaaaggctatatgctatatgattccatctatatgacattctggaaacggcaaaactatatagagacaataaaaasatcagtgatttccagagtggcagggggtgagaggaacagagagatgaattggtagtcaagggatttttagggtggtggaactgttctgtatgacattaaaggtagctacatgacattatgcatttgtcaaaacccgtagcatgtgcaacacagttaatcctaatgtaaacaatggacttaagttaatcatatatccatagtcgtacacgaattttcaaaatataccacattaatgcaagaggttaatagtagggaaaactgcata

SEQ ID NO: 438028 - DNA, 581 bp, Homo sapiens
ctttacccctttgctagggggtggagggagcagggagaagaacggggggagggagcaagggtgagcaggcaggcatttttgctgcaattccagctgggatattcgaggattaaaaactctggagcaggtttaccagacttttcgaagactacctggatttgcatttatttttcatgaacactctgaagaaaggcgagctcacgccggcaagggagtgtatgtaaaacaggacagtggaaggtgcacagcgagttcggggctctaagtctcctgacagtttgtcatgatggctgagtcctaagaaatgccagcctaattcaaaataaatgagtttctgtggagtaggayagtcttttccgcaaagtcccgtggaataaaacattcccaagacacgcagtttccgtgtctcacagaaagggacagaaaacaccgtctcaagctttgcaaatcttaatttgagggctgctcgtctctgtccatggtgctaattcctgcctctttctcttgcgtggttgccacggtataaattcacactggtgtcaattttcacaacttttcccccctttcggtgaaaggcaagt

SEQ ID NO: 438029 - DNA, 499 bp, Homo sapiens
ccatctgacacattatctattatcactgtcatttcctggtttgcttagatgccccaaagtaggatgcacgtaacttcacaagagaaattgaatatatttcactttacaaaaaactcattacatttcttattttgcctggaaccaaataagatttttcccacaatgtctagtgaagtrcttggcatttaggcccaagtctacttatttttccctacggatattaagtgtttcttgtacatgatcaatttactgaattctgacattccacataaattctgattaaaaagttaattggcagtgtgatgtaatgggagttacaggttgtgccccacctctgcacctacctagttcagaaacactgagccagcctctgggtttcatttccttcatttgataaaaaggaatggttgaggatagatgggtttcaagatctctgtagcttaagttttatccataattgtaaaactctgcctgctgggttccacatattggatgtaat

SEQ ID NO: 438030 - DNA, 614 bp, Homo sapiens
ttcacacctgtccctatcattttgggttatctacagatatcacagttatctacaagtctttttttgtggatataaacatgcaccaaaaaaagtattagtttccacctagttagaaggcacttatataattataatggtaaagatttacttcaatgtactgaaattatatgggcatatgcaactaattcaatattaacctacgagcatggtaaaaaggaggaaagacaattcactgcctaggtaagtctgatgaaatcaaacagtattatactttccccaaattgtattcatttaaaggttatttctctgtatggagctggggacaaggggaggggttgaaggaagatgaytacaaacccaatcttctgttattcatacatctagtctagatggggtggagtcttccttttcccccttgactccatttcttcaaagtgcttttctttcttcttgctgtgagtttcacccaggtctagagaatagttttaagttgaaattaagactccagaggttgttatacaaaaactgggggtggaggttaaggcatgattttataaacactaattataagataacatagattcaggccttctttctcaagccccaggtattgt

SEQ ID NO: 438031 - DNA, 384 bp, Homo sapiens
gagaaatgctggctggaaaagaacgtwggtcaaatgaatattgtgtctacttatacatccagacgatcctgaggacctcactttcacttagaggaagaaacaattatcatgcataaaactgtattttggtctcctgaatgctgttaaaatatggggttgtaataaagtagtcttcctctatgaagcagaagcattgatagcacttggtcttctggttaaacttcttaaatcctcacagaaagagccctgataaaggttcaactatctttgctgtcagcaatacatgtgtggtccaaggactgtacctgtctgcaaatgcagaggagtggcttgttccagttttatatacagctgctctttttgagaatcattagacacctcgaa

SEQ ID NO: 438032 - DNA, 607 bp, Homo sapiens
actaaaagaaaaatctcagtactcactagtcagtactcagtattttgagccttcttaaatacggccagagaactagactgcctcaaagcttcctcccaagttaacagtattaccattcaaagcttttatattactatgttttatacttctagagggagggttgaaactaagtcttatatgatgcctatctcacatagtcccacccaccaagtagggactctactacctgttgaaygtatacattccatggccttgtgcaggaggtttttcttttttgaggcagagtctcactctggagtgcagtggcacgatctcagctcactgcaagctccacctcccgggttcacaccattctcctgcctcagcctcccgagtagctgggaacacaggcgcccgccaccacgcccggctaattttgttgtatttttgtagagacggggtttcacagtgttagccagaatggtcttgatctcctgacctcgtgagccgcccgtctcggcctcccaaagcgctgggattacaggcgtgagccaccacgcccagctaggaggttgttctgaagtacctctcaagcaagatgattagaagttgtggcatttgcccaaat

SEQ ID NO: 438033 - DNA, 645 bp, Homo sapiens
ttcattaaaaacacattagtgaatcccagccattcaacatatcttgatgtaaccgacaaatgaaaatcctattttttacaagtagacttgttttaaaataagcaccacagacctacccaagtgcaaatcattaagatccactgaacagtgtttctcaggtcaggccaccatctgcttaagaatcacctgtggtggctgttgaaatacaatttcctcagtctctctctgcagataatcagattcagtaagtcytggttggggtgtagaaatctgcatttttaatcaaccaccccaccccactgatcctgataaacattaaagtgttggcagtctcttgtgtaaaggcatttgaaataatcctcaaaactctgggcatattagggtttcctagatagctcataacaaccacggatgccaagcccttttccttgccatccactgatcgttagtttctaaataagacaaatgccaggtagcttgaaagcaaagcatttaggaatataaatcacctgcaaatgcaaaaatgcagacgtaaaataaagcccatgaaactcatccaaagatatttccaagaacccagactggctggatgtggctcaactgggttagcctcttcaaaaaggccactgtgcttgattctatgaa

SEQ ID NO: 438034 - DNA, 645 bp, Homo sapiens
ttcattaaaaacacattagtgaatcccagccattcaacatatcttgatgtaaccgacaaatgaaaatcctattttttacaagtagacttgttttaaaataagcaccacagacctacccaagtgcaaatcattaagatccactgaacagtgtttctcaggtcaggccaccatctgcttaagaatcacctgtggtggctgttgaaatacaatttcctcagtctctctctgcagataatcagattcagtaagtcctggttggggtgtagaaatctgcatttttaatcaaccaccccaccccactgatcctgataaacattaaagtgttggcagtctcttgtgtaaaggcatttgaaataatcctcaaaactctgggcatattagggtttcctagatagctcataacaaccacggatgccaagcccttttccttgccatccactgatcgttagtttctaaataagacaaatgccaggtagcttgaaagcaaagcatttaggaatataaatcacctgcaaatgcaaaaatgcagaygtaaaataaagcccatgaaactcatccaaagatatttccaagaacccagactggctggatgtggctcaactgggttagcctcttcaaaaaggccactgtgcttgattctatgaa

SEQ ID NO: 438035 - DNA, 635 bp, Homo sapiens
tgtcttctatcatgatgcacatggtttgcttgaatctcttcctcagcctccttattattcggaaaccaattttgcacttaacattctagacctgtgagctgttataagggttctgcctcaatgactcaaatttctgataaacagtaagtttcagtgacatccccaccacatgcccctttcaattccacacgtgcacacacacacagacagcaacaatttcctaaacctatacaagttattacttctgtggctttccccctaccttacacagaagcaatactcacaaggaggcagttactcttttaattccaatggaggtcttcataaaacctgacattctccatgctggttacagaaatgaaatagccaggcttttctggtatagaccatactttgcataagtttaagcatctgccatgaggggctatgatacccctgtggagcatgcttaggtaacaaaaygatccatcaattccaataaagatgggttcagtcaactgttgagactcttctaccatcactatccactgtgtggctgacaggcaggaagtaagcaggggacactgccaccaagaaccctgttcctcatccttccctctttgtaggctctgcctctgctccaacaactgtgggaa

SEQ ID NO: 438036 - DNA, 581 bp, Homo sapiens
agctccagaggtagaagaccttcctcatctcaatcagaggcttttggaaactccctacaaacatgagtgcaaagtaggcagtggggataagtctacacaaagcttgcattaagacttacccatgaagtattcacctttttcattattttaaactcttacaacccaggggaggctttctgttaagccccaacacaggaaattgcttttcagtygtcaatagccaacgtctgaaaataaatccagtcactaagtgtggaatgatgtacttgcagccaacatgcatttggctgatgccaacagagaaggcaggaggccaagatataagacctaaatttttttttttaaaaaaaggactgttctactcagtaacagaatctgaaataatgcaaaggcagaaataggccacaaaccacctgcctctctagcttcaacatacatcagcatctgtctcccaaggttgcttcagaaagatatttaagttttctctaactacaataattgttccagtggtctaaaaaaaagaaatggctctgtcctgtgggtttctggttgggtggttgactgttatattgatggggggc

SEQ ID NO: 438037 - DNA, 537 bp, Homo sapiens
ttggtagctccttcaggtttgttccttttgaaatactcctatgaccacctccaacctccaattgttttmaatcacttgctcactttctggcacaataagatgctccaagctcaccttctattttcccttccccagccctagcatcagacattgtctgtggagtcctggttctttttattggagaatgattttagacaccaaattctaggtgctggtgtgtgcttattgctactaggatgtcacagtttctaagtcctctcagcaggcagaaatagaaaaaaaaaaagtgtatgtatattaacccatgtgtaaacatacatatgtatttatttctgtatattcatttgtagacacattaaaataaacagaattcatattaatatctccaactgcaaaccagaagaatagagtttatcctagcatttcttcccctcttgcttacttgtaacttctttctctgtgggtaagaatcctgggtctcatgatctataatttatttactcacctgtttaattctagtacacaggtaaagttgtt

SEQ ID NO: 438038 - DNA, 561 bp, Homo sapiens
tcttgaaacttctcaggggactttactctgtggtgtgttgggctgtatggactgctgatgtctcctctgagaggatttacaaccctgggcacataagaatcacgtgggagaactttaaaaagtgacagtcccagactgcacccccagagatcctgattctggaagtctggagtgggtgtgggtcaggctaatgaagctcctggaggcttgaaggctctgttaggtgtgagcatcccagactctgcctgggtaattctaaaccctggttgcacttcagcatcgcacagggagacttatagaccacttgtgtctcatgtggtgagctgaataaagtccgcgaagatgtccacttctgcatgcctggagcctatgaatatgttactgctgtggtctaaatatttgtgtccccccaaaaaytgtagtttgaaaacctaatcaccagtgtcgtggtatcaggaggtggggtctttgggaggtaattcaggcagactcttccctcatgaatgggatgtgtaccattgtcagagaggccccagagagctgccttgctccttccaccat

SEQ ID NO: 438039 - DNA, 583 bp, Homo sapiens
gatatttccaaatttaatctccagccaaagtgtggatatttatgcatatttcataattcagatagcttactagacataaccatttggttttaacacagatacctacgtccaaaacttaattttttttttatttctttaaacttgcttctttctccayagtctctagtttggttagaaacagcactacctaattaagcaagacttttagtaatcatcctttcttcctcttcctccttgtcgttctcatttccacgtgcccactagttgcactcttccatgcagacacctcctaaaccctttggcattggtttccctgcctctctttcctaggcctgccattccactagaggctacgctctctctcactggacaattacaacaacctactgcagtgactcagcccttggaacatggactctgggttggttggtttgtgtataaaaaacccactcccaggagagtctttgcttgtccttcttccaactgatcttctactcaggaaaactgttatgtgtatatgactactttgctgatttttattgttgttattgatgatgacccgtttttgctcaggcaggaagtc

SEQ ID NO: 438040 - DNA, 583 bp, Homo sapiens
gatatttccaaatttaatctccagccaaagtgtggatatttatgcatatttcataattcagatagcttactagacataaccatttggttttaacacagatacctacgtccaaaacttaattttttttttatttctttaaacttgcttctttctccatagtctctagtttggttagaaacagcactacctaattaagcaagacttttagtaatcatcctttcttcctcttcctccttgtcgttctcatttccacgtgcccactagttgcactcttccatgcagacacctcctaaaccctttggcattggtttccctgcctctctttcctaggcctgccatyccactagaggctacgctctctctcactggacaattacaacaacctactgcagtgactcagcccttggaacatggactctgggttggttggtttgtgtataaaaaacccactcccaggagagtctttgcttgtccttcttccaactgatcttctactcaggaaaactgttatgtgtatatgactactttgctgatttttattgttgttattgatgatgacccgtttttgctcaggcaggaagtc

SEQ ID NO: 438041 - DNA, 603 bp, Homo sapiens
gatttttggttacaacccctgccaaaaggtgaggattttcaattgtccaatggccccaggcccttgatctggctgtctttactactttggggatatgctatggcttgaatgcatgtatcactccaaaattcatatgttggaacttaattcccaaggtgacaatattaataggtggggcccttggaggtgataagaccctgagggctccacccctgtggatgggattagtgcccttataaaacggcttgagagagagtatttgtcccttttcttgatctgtccttccaccagggaaggacacagcaactagrcaccatcttgaagtaatatccctcagcagatatcaaactgccagcatcttgatcttggacttcccagcctccagaactgagaaatcaatctattgtttataaatcatcccatctaatgtgtttttgttataacagcaagaagggaccaaaggtagatgacagagcctatgctaaaagtcttaacactccaacctcattgaggactctaagaattggctttatgaaaacatataaaagcaagcaagcatcatttcaagagaaagcagagcttctagcaaagaatttgcaaata

SEQ ID NO: 438042 - DNA, 619 bp, Homo sapiens
tcatataccttgggctctctgttttacttttgagctagcattctacaaagtaaagcttcttatttttcaatgcagaaattttttattttctgctattatctgagttctctgtgccagggttcattttcttacttagtctgtttctccatgcatctatctgttggcatrggggaggggcagttagttaacttaataaaacagtgtgaaaggaaaagggaaggtgatcactttctaaagtagctgcactgttactttaacaggtaagctgagagctaaaatagacaataaaaaagtacatatgagttcaatagaagtctgattctcacaccacgattgaggacaaaaagacagaaagtgagaatgaatggttggcagggcttattatgagtcaatgaatgtgaaatctttctcaaaatgagttggttggtggagcttattatgagtcaataaacgggcattttatcaattgcaaattaccatatgaacttaagggaagtaatgggaatttcctgtaggataggtgggtaatttaggatgcaaatccagattagtaaagtccttttaaaaatcagatagtagagtgcagagcttagattatgagtccctatttaaagatggg

SEQ ID NO: 438043 - DNA, 568 bp, Homo sapiens
actgtaactacttagctttaatttctttgccactaacatttaccatgccagactggacacaaaccagtgtctttgtgttaagagtggtctctgacatactgggaaaagaaagctcctgggaaaactagaagaattattaaaggccctcctggagattgactccagctttcccttagctttaggactaaatgataacagtgttgagtgagaacaaagcaggaataaataatggatatgagacaggaaatatagcatcaggcattggagactttggtgtcagtgtctgtagcatatacggctggtaccccatttgcatcaccttggcccatgccagmggtcatctgaaaggttaggggacaattcctatacataaccatcagttttctaccctcagtatctctttgtctctccctaacggtgttctctggttacatgaatgatatcagcccacctatagagctgaatggaaaatgcaagaagttaatgacccaggagcaaacttaactcataagggatgggagtggatggtgaaatactccagtctctttgatcctcagttgtacagtta

SEQ ID NO: 438044 - DNA, 552 bp, Homo sapiens
gtaaattagttcagccactgcagaaagcagttaggtaatttctcaaagaacttaaaacagaactaccacttgacacagcaatctcacgattacatgtatccccaaaggaatataaatcattctcccataagacacatgcttacgtatattcattgcaccactattcacaatagcaaagacttggaatcaacctaaacgtccactggtcgtagactgaataaagaaaatgtgtacatgtacaccattgaacactacaagataacgtcctttgcaggaacatggatacagttagaggccattatctaagtgaactagcccaggaacagaaaaccaaayattgcatgttctcacttataaatgggaactaatcattgagtatacagggacacaaagaaaggaacaatagacattgggacctgagggtggagggtgggaggaaagaaaggacagaaaaatggcctattcgatattatgctttttacatggatgatgaaataatatgtataccaaaacccctgcaacacaaagtttatctatagaaccaacctgcac

SEQ ID NO: 438045 - DNA, 625 bp, Homo sapiens
cccttgcctggcaccgatcaagaattctccactgattattccacactataactttcacctgttgctcagtgggttgcattttttttcacccacttctcaatattgtagatgaaactatctgaccagagatttgatttagtccrtatttcatacaatgaagcagtaatgaaaaaaaccagaacattaattctctgtgatgatatcatcaaggaagggggaaaaatttcattctatggagttggttttattgtaataatacagggcaagcatttatctgagtcaggggctacagctgctggctataagccactgtaataatgaagaccagattgaattatcttcaggcgtgattaaagatcaaagaagatttttttttttttttaataaactcagtcttgtttttctttgtcagaaacagtttaggttaagctagctggctaaactgagatggaaactgaaggccttctcaacaaagtaggcaagcagcagagaaataaagaaatgcctaaatgtacctgtgggtggatggataggtgaatggttgtatcaataaataaatagcagagcttatgatagacagaatcttttgaagggcaatcaggagacatgacctgactccttgctg

SEQ ID NO: 438046 - DNA, 625 bp, Homo sapiens
cccttgcctggcaccgatcaagaattctccactgattattccacactataactttcacctgttgctcagtgggttgcattttttttcacccacttctcaatattgtagatgaaactatctgaccagagatttgatttagtccgtatttcatacaatgaagcagtaatgaaaaaaaccagaacattaattctctgtgatgatatcatcaaggaagggggaaaaatttcattctatggagttggttttattgtaataatacagggcaagcatttatctgagtcaggggctacagctgctggctataagccactgtaataatgaagaccagattgaattatcttcaggcgtgattaaagatcaaagaagatttttttttttttttaataaactcagtcttgtttttctttgtcagaaacagtttaggttaagctagctggctaaactgagatggaaactgaaggccttctcaacaaagtaggcaagcagcagagaaataaagaaatgcctaaatgtacctgtgggtggatggataggtgaatggttgtatcaataaataaatagcagakcttatgatagacagaatcttttgaagggcaatcaggagacatgacctgactccttgctg

SEQ ID NO: 438047 - DNA, 594 bp, Homo sapiens
atagtttgcaaatattttctcccttctgtaggttggaccatgatttctaaccaaaaaaatttaaaaagtagtgcctcctccttttatcttcatcaagtcttcctccttgttctcattttcctcttcctsctgctgcttttttctttccttcctgttgtagggtgagtgataatttgatctgaggaggttagtttagtaattatcacacagaaagtttaaaaacactcaagacaggccaggcgcagtagcttttgcctataatcccaggactttgggaggccaaggcaggtggatggcttgaggtcaggagtttgagaccagcctggccaacatggtgaaacccctctctactaaaaatataaagattagcttgacatggtggtgcacacctgtaattccagctactcgggaggctgaggcaggagaatgacttgaacatgggaggtggagactgcagtgagccaagatcacgccactgccctccagcctgggtgacagagcaagactctgtctcaataaataaataaataaatacactcaagacaaatcaaaactgggatgaacaaaaataaagtttggtaacaaatttgtata

SEQ ID NO: 438048 - DNA, 516 bp, Homo sapiens
tccttttatcttcatcaagtcttcctccttgttctcattttcctcttcctgctgctgcttttttctttccttcctgttgtagggtgagtgataatttgatctgaggaggttagtttagtaattatcacacagaaagtttaaaaacactcaagacaggccaggcgcagtagcttttgcctataatcccaggactttgggaggccaaggcaggtggatggcttgaggtcaggagtttgagaccagcctggccaacatggtgaaacccctctctactaaaaatataaagattagcttgacatggtggtgcacacctgtaattccagctactcgggaggctgaggcaggagaatgacttgaacatgggaggtggagactgcagtgagccaagatcacgccactgccctccagcctgggtgacagagcragactctgtctcaataaataaataaataaatacactcaagacaaatcaaaactgggatgaacaaaaataaagtttggtaacaaatttgtata

SEQ ID NO: 438049 - DNA, 608 bp, Homo sapiens
aaaatgggtgatcctgactacygagacaaacaataagaccctatttaggagatgatatgaaacactcaaatgttggttagaatttgagctatttcaaaaagatatgttgtttgaaaagtgaattaaagtgaagaaagattagaaaatatcagttggggggaacttcaataagctggaatagagataattaggtcccaaacaagagcaagagtagtaaagacagacataaaaataaaagtttttaaatcaagaaatattttagtgataaaagtggtaggacttagtgaataattacatgttggaagaaaaagatggagaaaacttgagatgacttcaagctttctacttgggtaacaggcacgcttgtgatactgtattccaacttgaacctagaatcactctcctttattatagcaatcaggtaacacagcatctcatttactacatggtgagcacccagaggactaggtatgcatcctttttacctttgtgttcttgcatctattcaacatttggaattaaagaaaactaactgttgtcttttattgaaagccaagcaatgtgctagtacccatattaggaatgtttcttataatcaatataaaaac

SEQ ID NO: 438050 - DNA, 637 bp, Homo sapiens
tcaaattctccacaatcactggtaccagaagcccaaatgaagtccgttatttgtgagggtggatggcacaggtgacaactatcctaggcatagtttttcttttcttctcacattttccattcaaagrtaaggctgggaaagtatgcagcctgccctaattgcttacagggggagatgttgagttggaaaatgaatatatgttaatgaccaggcacccaatatgttaaaaaaaaacaccaccaaagtgtgacttcagtgcttctggatttgtcttccttccacttttcctattgtatggcagaactttaagaagcaaatccatcagagccttgtaagttaaactgagctgatgccatcatcccttggctaggtgttttggggcaagttcttaaagtccctgagctacagtttgctcatgggtaagatgaggctaacagaatatactccccagagtgggtatcagcataaaatgagataattcatataaggcatctgcttccagctctgtgaccttagcttagtcctcctctgggcttcaatctttcctctgtaaaatggaagcaactgtatctaaaaataaaaagacctaccatttattaagttcttgttatatgttagagatcacattaaatcttac

SEQ ID NO: 438051 - DNA, 650 bp, Homo sapiens
catataaggcatctgcttccagctctgtgaccttagcttagtcctcctctgggcttcaatctttcctctgtaaaatggaagcaactgtatctaaaaataaaaagacctaccatttattaagttcttgttatatgttagagatcacattaaatcttacttctcaggacacgtatctgtcaatatacgtcaaacttggttgattataaaatcacttaattaaaaggctggcattcggtaccttcccctagagattctaatacattcagtttggaatgggatctggtaattttctaattttgagaagtgtcattggtgatttttattatcaggcaaagtttaaaaacacaggattgttgtgacrattgaatgagatgctgagtaaattgcgtgtgtgtgttaagtctctgcttccaccttaaagtctattttttattttgttgaagtatatagcatatacagtaaagtgcacaagttcacaaaatgaggatactgtgaaataccgaggtcaaataacagatatcaccagcacctctcaagtagccaccttcccactgagtcaccattaccccaagagtaaacactgccctgagttcaaaccctagagataagtgatgcctgcctttgaaatttatctaaacaaagagatacag

SEQ ID NO: 438052 - DNA, 590 bp, Homo sapiens
gcatgttcccagctaggcttcaacaaggttatactcaacattcttgttgcactctcatccagtaaacttgtgtcatttttgcagcatatttagtgtcatggtttttgcatttttgtgggttttgttggtgattttgctatttatttgcaggcacagtgctgaagtgctgtctactgtttctaagaaagctgtgatgtgctctgcagataaaatttgaatactagataagctttgttcatacctaagttatagtggcattggccatgagttcaatgttaatgaattaacaatgtatattaaatatctttaaacaaaaatacacataaaacaaggttatatattgattggttgatraaaatgttgtgactagaggcttgcaggaacctaaccctgtatttcccttaggagcactggttcaatgtctgctaactcaatgcttgcaacagctttatagaacacagttactgtgaataacaaggattaagtgtacttgacatacatttcctcacaacaaacttgtgggtttgtttgagtagtcattatgtcctcattttacaaacaaggaaagtgaggagcaaagaagtaccata

SEQ ID NO: 438053 - DNA, 602 bp, Homo sapiens
gaacaaccacccttttcccatattaacctttttaaatgttctcctttcaaactcctgtccagatattccctatcccaagggaccttcttgggataccccaaagggccttctattaggcagaattaatctctgctccattcttctccatctcasctaatagttctttcatcttcccggttgcttaagcccccaaatctgaaattattcttatacttcttcttcttcatgcctcatcttcaatccatctcccagctttgtctatccactcaaccctcaacatatatgttaaatctctcctgcctactttaagccactctcatttgactactggacaacagtctttttttctcatcccagtcttgtttttctctaacccattctccactttaatagacgaatccttttaaaagcacaaatcagtccaagtcactcctatgcttgaacttcctggtggcctcctttaatatttggaataaaattcaaatatcttaatgagacctgcaaagtaaagcatgatctggcccttgagatctcactccagccattttccaattttctgtactgcagtgggaaatgcaagccaacatcagaaacgttgtgat

SEQ ID NO: 438054 - DNA, 602 bp, Homo sapiens
gaacaaccacccttttcccatattaacctttttaaatgttctcctttcaaactcctgtccagatattccctatcccaagggaccttcttgggataccccaaagggccttctattaggcagaattaatctctgctccattcttctccatctcagctaatagttctttcatcttcccggttgcttaagcccccaaatctgaaattattcttatacttcttcttcttcatgcctcatcttcaatccatctcccagctttgtctatccactcaaccctcaacatatatgttaaatctctcctgcctactttaagccactctcatttgactactggacaacagtctttttttctcatcccagtcttgttttkctctaacccattctccactttaatagacgaatccttttaaaagcacaaatcagtccaagtcactcctatgcttgaacttcctggtggcctcctttaatatttggaataaaattcaaatatcttaatgagacctgcaaagtaaagcatgatctggcccttgagatctcactccagccattttccaattttctgtactgcagtgggaaatgcaagccaacatcagaaacgttgtgat

SEQ ID NO: 438055 - DNA, 600 bp, Homo sapiens
tttttttctcatcccagtcttgtttttctctaacccattctccactttaatagacgaatccttttaaaagcacaaatcagtccaagtcactcctatgcttgaacttcctggtggcctcctttaatatttggaataaaattcaaatatctyaatgagacctgcaaagtaaagcatgatctggcccttgagatctcactccagccattttccaattttctgtactgcagtgggaaatgcaagccaacatcagaaacgttgtgattcttttcccctcatgtggaatactctttctctctctctttacttgcttatcctattttttcattcataacaaacaaaaaaggtaaatttgagatgcttttgataactccttaagccaactcagggtcttgcccattatcttgcttcatgatacttggttttcttcattcatagggttattgcagcttgtcattatatatttacttatgagtatctctagaatatttgtctttcctgttagtctataagctgtaaatgtatgaattatgttgccttatccaatactttataccaagtacttctggtgtttagtatgcaataagcccttattaaatattt

SEQ ID NO: 438056 - DNA, 602 bp, Homo sapiens
gaacaaccacccttttcccatattaacctttttaaatgttctcctttcaaactcctgtccagatattccctatcccaagggaccttcttgggataccccaaagggccttctattaggcagaattaatctctgctccattcttctccatctcagctaatagttctttcatcttcccggttgcttaagcccccaaatctgaaattattcttatacttcttcttcttcatgcctcatcttcaatccatctcccagctttgtctatccactcaaccctcaacatatatgttaaatctctcctgcctactttaagccactctcatttgactactggacaacagtctttttttctcatcccagtcttgtttttctctaacccattctccactttaatagacgaatccttttaaaagcacaaatcagtccaagtcactcctatgcttgaacttcctggtggcctcctttaatatttggaataaaattcaaatatcttaatgagrcctgcaaagtaaagcatgatctggcccttgagatctcactccagccattttccaattttctgtactgcagtgggaaatgcaagccaacatcagaaacgttgtgat

SEQ ID NO: 438057 - DNA, 600 bp, Homo sapiens
tttttttctcatcccagtcttgtttttctctaacccattctccactttaatagacgaatccttttaaaagcacaaatcagtccaagtcactcctatgcttgaacttcctggtggcctcctttaatatttggaataaaattcaaatatcttaatgagacctgcaaagtaaagcatgatctggcccttgagatctcactccagccattttccaattttctgtactgcagtgggaaatgcaagccaacatcagaaacgttgtgattcttttcccctcatgtggaatactctttctctctctctttacttgcttatcctattttttcattcataacaaacaaaaaaggtaaatttgagatgcttttgataactccttaagccaactcagggtcttgcccattatcttgcttcatgatacttggttttcttcattcatagrgttattgcagcttgtcattatatatttacttatgagtatctctagaatatttgtctttcctgttagtctataagctgtaaatgtatgaattatgttgccttatccaatactttataccaagtacttctggtgtttagtatgcaataagcccttattaaatattt

SEQ ID NO: 438058 - DNA, 452 bp, Homo sapiens
cagccatgctcattcatttatgtattggctatgactgctttcacactacaacggcagagtcgaggagttgtgacagagaacatttggcctgcaaagcctaaaatgtctactatctgggtttttttaagagagcctttgtagatgcctacactaaaaccttagacaaatgtggtctatactgagaaggcaagaaggaataaacctcaaagtgagactgagaatgatattaaaatgactaagactaagagttaaatataatatctagaacactttaatatctgaacaaccttagaagtaaaggaamaagaccacgacattgttaatgaaacttccgcgaagtgtagttgaggtagctgatgaaggaattaaaaccgttttatatttatactccagagagtgtatattcacatatattcatcctggttatatatgtttaaatccttttgatgtct

SEQ ID NO: 438059 - DNA, 563 bp, Homo sapiens
tgtgtttgatgattaatagcaatagatttcacagaggtggttaataaagaggcaggcagtgttgagacaatatataaaatgattaaaagtgaaatggtctttggtcctcaaaggaagaaggaaggcctaaagagtttgtctttcccaatacctgtcactaagaaggttttgtggcattgagaaaaccaagaagaagttaaagataaaaacttgcaaatggagaaattattcatatggaagtcttgagcagttatttaaccactcttgaaagtgaaaccaaacaatatctcaggcctttttcagctttatgaaaagactgattatcactaatttctttaagtgtctgtttttagataatgaaaacagtggctgaaagaaagaagatggagtcaaaaaaagtttaatactaaagatcaagagagccaaatgttgaatatttggcaacaattgaaagtacgaatccctgagattcaaacctggaagtgctgatttacgtrccagaaagcatgtgttaaaaagttgtctattagccacatttatctaaatgcaacaggaaggatatg

SEQ ID NO: 438060 - DNA, 560 bp, Homo sapiens
ggtattctttttccaaacaaattctcctttagtattccaaatagaaagggaatatgatgaatagatcccttgctatcccaagaattctkttttttcccctagtgctatcagttacttgatatttagttatttgcttttttaaaaaaaaagtattttcttttcttgctatgtgtggatcactcaggaacaaaaatatttggctaaatatttttgacattaactacttaatttgaatatttttaagatttgcacaacttttttaagatattaccttgcttgaataaattaattagaagattatctgttatgtagctgcacataatgaacccttcccagattgggtcattcctagccatattttgccaatattttaaggaccaatttctctcctaaaacttgtccctttatgtagaaagtattcccaaccacaatatatacttggcagttaaaactgaatgtgggtggaaaagaaccaatctttcttgcacatttctcattaaatcccaaaacctctttgtagctaatttttaattctttagagaaaaatcctgttactaaaa

SEQ ID NO: 438061 - DNA, 560 bp, Homo sapiens
ggtattctttttccaaacaaattctcctttagtattccaaatagaaagggaatatgatgaatagatcccttgctatcccaagaattctgttttttcccctagtgctatcagttacttgatatttagttatttgcttttttwaaaaaaaagtattttcttttcttgctatgtgtggatcactcaggaacaaaaatatttggctaaatatttttgacattaactacttaatttgaatatttttaagatttgcacaacttttttaagatattaccttgcttgaataaattaattagaagattatctgttatgtagctgcacataatgaacccttcccagattgggtcattcctagccatattttgccaatattttaaggaccaatttctctcctaaaacttgtccctttatgtagaaagtattcccaaccacaatatatacttggcagttaaaactgaatgtgggtggaaaagaaccaatctttcttgcacatttctcattaaatcccaaaacctctttgtagctaatttttaattctttagagaaaaatcctgttactaaaa

SEQ ID NO: 438062 - DNA, 534 bp, Homo sapiens
ttaaaaaatgaatatagaagtcctcaacagtcttctagtgtatgcttttctaggaaaggatagatcctcttcttctcccctctgaaatatttgaccatctttcattttcagtgtcttgtgttgacattaaatacatcaagtagagagtgaacttaggtattgggtatttggtccccaggtattcaactgtttctactgtattgattgttcctgatctataaatgcttcatcargtgattttcctgtattctgtaatattccaaccttatgtcttaaattttataacccacccttctgattaattatgttcagagcctatctgtatgtattcatctgttctcacactgctataaagatactacctgagactgagtaacttatgaacaaaaaggtttaattaactcaaagttccacatggctgaggaggcctcaggaaacttacaatcatggcagaaggcaaagaggaagcaagcaccttcttcacaaggcagcaggagagagagagagagattgaagggggaagtaccagacact

SEQ ID NO: 438063 - DNA, 557 bp, Homo sapiens
tatatttagaaatattcattttaaatataaagaaatttcaacttacaaagataagtcaccacacaagtttgtaagcaagaacaagccagaaagatcagtgtcttaactgtcctgtaagtgccatgctcatatcttcactgtcttataagtaccatgctcatgtcttccctgttttygtgtttcaactacagcttcccttctccatccctggagaatttcctctgccttttttgcctaagaaattatattagtccttaaacccacctcgatgtagtacataacatttacattttggagttacagctgtgtgatgttggacaagttgcctatgccctctgaacataaggttccccacctgtaaaatgggggtaatataattaacttaacagataattgtgaaaatttactcagacaatgcatatatatggtctaggactagaaactgatggaatcagaatttaaaccaggtctgcatgatttaatacatcatgttgcctcacaaatattggaagctccataaaagtggcactgtcctaaccagccccaattggccctgc

SEQ ID NO: 438064 - DNA, 448 bp, Homo sapiens
atacctacgattttaagaagagctatgtactccctttgtttctgaagcctctacatatagccagcaaaattggccttgtaaccatagtcttccggacctatttaccttctagaagtcctgtttctagcagacctgggcacccattctctgagcatcaggggaccagcaccaccagtccctcatctcctccctcctgtcctctcrttttctgaagctgataggaatcatttcgtgctatctttactccattctcctccaagattactgagctgtttttcttagtttcccaatatgataatatgcacatttcattatttctgaaattcatttattcaattcattcatcagtcttgttcgttcatatgatggatggaagaatatgagtatgttattgtgcaaatctccctctgcagttgtttttaacatttatatatctccactaaatagg

SEQ ID NO: 438065 - DNA, 500 bp, Homo sapiens
gtgtcttgcaataatgcattttagatgttgtggcttgtggtattatggagtacaatctacaattcacataaaattttaggataaaaatgggagactttgcagctgttcaggcctagctgtggtttctgcagggtttcttgaccactcttgtcccctggggctgtggtatacggtaggacaggctgtgctcagcacactagcgtgcctcaaggcctcatgtgcccattccaggatgttcctaccatcactacaggccccctgtaatactcatatcccctgcaatactttactcccaygttggataatcatccccttccttatagcccctcagtgtagatgagacagactcacattttcaaggagaattttattttaaaagccaagggaaaagtaaaagggggagaaaaggaaatataaacagtatagaaattgtcacattttcatttattgtgtttctaatatttccatcctataaaagtaaaaaggaattttagtgagac

SEQ ID NO: 438066 - DNA, 500 bp, Homo sapiens
gtgtcttgcaataatgcattttagatgttgtggcttgtggtattatggagtacaatctacaattcacataaaattttaggataaaaatgggagactttgcagctgttcaggcctagctgtggtttctgcagggtttcttgaccactcttgtcccctggggctgtggtatacggtaggacaggctgtgctcagcacactagcgtgcctcaaggcctcatgtgcccattccaggatgttcctaccatcactacaggccccctgtaatactcatatcccctgcaatactttactcccatgttggatawtcatccccttccttatagcccctcagtgtagatgagacagactcacattttcaaggagaattttattttaaaagccaagggaaaagtaaaagggggagaaaaggaaatataaacagtatagaaattgtcacattttcatttattgtgtttctaatatttccatcctataaaagtaaaaaggaattttagtgagac

SEQ ID NO: 438067 - DNA, 594 bp, Homo sapiens
tctttctgtcttggcagccactcctgtctcctctctttcaatctctattaccctcagtttccatcctcttttctgttgctttcaaataaaagctttgtgggagagaaagagggcctagggtcagactatacagtgcccccaagaaaaggaagaaaagaatgatggaagaatccctgctgtctgtgtggctgggggtggtgggggaagcaatgttggaagagagggatgataaatagataagcccccacgttgaggaggctgctgtccaggagaaatcctgcttcagaagaggaggaaacaaataaagacaaatgtccaggagctggaaatgggtggagttgatgagatggggtgtttgtttgcgtgtggaaattgtagcttctctctcttttcattctacaaagacagaacttytcaatttttaagtcacaatacatttccagaaatcatttatttctaaacattaccagtcaaatcccccattcctttctgcttttagaatttgagtgagattgatttgtgtttttaattttaaagggcagaaaaacaggctgttcaagtgttccgctggcatgggaattccgggcatggtct

SEQ ID NO: 438068 - DNA, 565 bp, Homo sapiens
gcagcctacctgcaaacaagtatttccactgaaatctattcctttatcctcatttttatgtatatattcatttctcactatcaggttgtatgtttttcctgtaagccaccacaaaccttttgtgcaatgagataggtgatgaataaagcatggatgaatccacgcattagatgagtatgtgaagtggatatggagagcacataagaaccaagagcagacagagccctaaggaaagacctggctgacctgccggaaggaaaataggtaatttaggataagcgatgtataacctctaatccagtgtaaaagtaccaaacagattacaatggtgaatgctcataagattgtccccatttgtgtgacattctcagaaaataagatattctacttaattgacttttttagaaaactgaagcttatttctttcaaaagaacatactggcctttttaatcatgtttacagaattctttctaaatagaagattacaaactaatcttctatagaarctgatagattttgttttacttttatgtgattgtttgaaattggcattataaacatctg

SEQ ID NO: 438069 - DNA, 605 bp, Homo sapiens
cttcagtacgccatctatactttgtgttagtatcattcaggcaatatccctaatatttcatctcctttcacatcagtatggaggcaggaaaaattaaggagtgagtccttgaagtgaataagggccaccaatttaatgccccatgaaatttagtagcctgtaagggggcctttttgaagtragccaccaactatccttttatgtttctgtgttgccttgaagtagtttgtatacaactatattgatcctcactagccataaaggaaaagactttgcttctgcttcccattgtaaaaagaccccatgtaggtagtctcctgggaaatctaatagggactcctccttttggtcctgtacaccacttttgattttcatagcatctcaagatctctgtctttggaaaaattactctgcacagtaagcacattcttcagggggaaggtgaagaagaactgatatatggtacacttaacatacacaggtacattttacgctccatcataattagtcctcaaactaaccttgggaagaagagagtatatccctatatcatgaataagggaattgatgttcctaagttatttatttgatttcctactgatagc

SEQ ID NO: 438070 - DNA, 542 bp, Homo sapiens
tttattaagaacttccctgtgccaggcactacactagggatcaggaagacagaaatggaaggcaaaagtttttgcttttcaagggtcccaagtctggagaaatagtctgcatttgtaaattccataagttgtttgctgaaggtcatgtcattattagttagtggacagatcaaagaaaactaacctggaatattctaatccaaaaaagtttgtaggtagactttctcctcactaactccttgaaarcattagaatatgctcttctaaggcttgtattcatttgttgggttttcagagcaaggtatacagccacatactgacattgtaagtccaggctcattatgggtgagtcacatgtgcatgttggagaaggacatagggggtttcaaggtgatgaatagctagggtttgcagtcagccatttctgcccttggcacatatctgttatgaggacttgagaagtcatttaatcttgcatggctttattttaaatgggagcactaatacctaccttataagcagttggatagaggatgaaaaaa

SEQ ID NO: 438071 - DNA, 569 bp, Homo sapiens
tactcttctcctgagactccttcaatgactctccattacatacaaaatgaaatacaagttctctcacctggtatttaatgtcctctatgacctggcctcagccaatgtcttctgccttgtgttttaaataatcattacacagttacattacagccataccaggatatttgccactggaaaatacaacataaactatattagttaggggtctccagggacacagaactgataaaatgtgtgtgtgtgtgtgtgtgtgtgtgtgtgtgtgtgtacagagaaagatttattttaagaaattrtatcattgtggggctggtgagtttgaaatctgaagggcaggataataggtgggagactcaaggaaaagttgatattgtagctctgtttggaaagtctacttggaaaatctggaagcaggatttcctcttacttaggggtcatttgccttttcctcttgaggccttcagctgattggacgaggcccagccacattatggagggtaatctgctttactcaaagtctactgatttaaatgttaatctcacctaaaattatctttataataaca

SEQ ID NO: 438072 - DNA, 569 bp, Homo sapiens
tactcttctcctgagactccttcaatgactctccattacatacaaaatgaaatacaagttctctcacctggtatttaatgtcctctatgacctggcctcagccaatgtcttctgccttgtgttttaaataatcattacacagttacattacagccataccaggatatttgccactggaaaatacaacataaactatattagttaggggtctccagggacacagaactgataaaatgtgtgtgtgtgtgtgtgtgtgtgtgtgtgtgtgtgtacagagaaagatttattttaagaaattatatcattgtggggctggtgagtttgaaatctgaagggcaggataataggtgggagactcaaggaaaagttgatattgtagctctrtttggaaagtctacttggaaaatctggaagcaggatttcctcttacttaggggtcatttgccttttcctcttgaggccttcagctgattggacgaggcccagccacattatggagggtaatctgctttactcaaagtctactgatttaaatgttaatctcacctaaaattatctttataataaca

SEQ ID NO: 438073 - DNA, 554 bp, Homo sapiens
aataatatataatatattcataaaatggcaagtctgaaagtattgggacataacctatgagatgctgctctgggcaaattgcctatggagtaaccctgctgtgcacggagcagtacctctgttgcttcaataaaagtttctatttaacaccaccagctcacccttgaattctttcctgagtgaagccaagaaccctctaggctaagcctcggtgtgggggcttgcctgtcctacatcatgaggacacagtgaaccagtctcatatgacaagctaaggaattttattttattttgtatataacgattggagaactttgaatacagatgcaaawaaccagaattcttctataaaaaatgaatctaaccgtggtgtttagaaaattttggcataggagaaaccagaggcagagatcactttagatgatgagatactgaaatgagctggttatagctgaaatcaagacaagaaggataatattttagaaaaagaacatagaagctggcaacagatttattagaagtgagaggaatagtaaaaaggcagagattaatct

SEQ ID NO: 438074 - DNA, 627 bp, Homo sapiens
tctaaaaagttgccccaaaattggtctctggtcagagattcagattgcaaaataattttaaaaaagagtctcatgggggcaggggcatcaatcctgccctacatatgttcatttgcaagaatggcatctgaatttacactactctcataatgcaggaatcccaagctaagatattaaaaggggcagggaaagaaccttctcctggagcacaggcacatagtgcatccagctgtactctaactaaataacccctctctgcaggctgctgacctctttgtctgtgagtttcagtctacatcatatgcttgattttttgtttttttcaggccctttgcacaaaatatagcatacgccacaggttagatacaactgaagagarcatcactggactagagatagatctgaagatgttgttcagaatatagcagggtagtaatataaggcagacaaaagtaattatgaggtacataaaataaaatgaggattttcaatataatttctggaataaaaacagaaaaatgatggagaaccaatgcttgaaaagagaattgctgacattttctagaattgaagaaaaggccacaaatcttctactaagaaacatgacattttctgcattataagtta

SEQ ID NO: 438075 - DNA, 627 bp, Homo sapiens
tctaaaaagttgccccaaaattggtctctggtcagagattcagattgcaaaataattttaaaaaagagtctcatgggggcaggggcatcaatcctgccctacatatgttcatttgcaagaatggcatctgaatttacactactctcataatgcaggaatcccaagctaagatattaaaaggggcagggaaagaaccttctcctggagcacaggcacatagtgcatccagctgtactctaactaaataacccctctctgcaggctgctgacctctttgtctgtgagtttcagtctacatcatatgcttgattttttgtttttttcaggccctttgcacaaaatatagcatacgccacaggttagatacaactgaagagaacatcactggactagagatagatctgaagatgttgttcagaatatagcagggtagtaatataaggcagacaaaagtrattatgaggtacataaaataaaatgaggattttcaatataatttctggaataaaaacagaaaaatgatggagaaccaatgcttgaaaagagaattgctgacattttctagaattgaagaaaaggccacaaatcttctactaagaaacatgacattttctgcattataagtta

SEQ ID NO: 438076 - DNA, 611 bp, Homo sapiens
taatttttgtattttttagtaaagacagggttttatcatgttacccaggatggtctcgatctcctgacattgcgatctgccctcttcggcctcccaaagtgctgggattacgggcgtgagccaccgcgcccggctgacactatggattcttaacatgtatccctaaagtgtttacggatggggaggtatgccctgtgaattcttaaaattgtgtgtagtaattatatgtatacacatgcattttttctggggaaagagcacaggcatacattggagacattgtgggttcagttctagacaatgacaataaagcaaatattgcaataaagcaagtcacaaaaastttttggatacccagtgcatatacaacttatgttgacactatactatagtctattaactgtgcaagagcatcatgtctgaaaaaccaatgtacataccttaatttaaaaatactttattgctaaaagatgactacactgagataggaagtaagcacatcatgctgttggaaaaatggtgctcataggctcattcaatgcaggattgccacacaccttgaatttgtttaaaaaaaaaaagagcatcatgtctgaaaaaacaatgtacat

SEQ ID NO: 438077 - DNA, 547 bp, Homo sapiens
caattttcatttttttatgcttactaacaagccaaagtaaacactaagtcaaatatttattttagatcttaagatgcagtatgttcaaactttggcaggctaaaagaagttagatgttaagcaaaatagcaatactaaataaagaccatctacaggcaggcgtggtggctcacacctgtaatcccagcactttggraggctgaggggggcagatcgttttaggccaggagttcaagactagcctggccaacaaggtgaaaccccgtctctactgaaaatacaaaaattagccaggcgtggtggcaggcacctgtaatccaagctactcagcaggctgaggcaggagaatcacttgaacccgggaggcggaggctgcagtgagccaagatcatgccattgcactccagcctgggtgacagaacgagactctccaaaaaaaaaaaaaaaaaaagaccaaccacaataatattaatgtacttcacatgggaacacaattattttttatgaaaacataatcctgggctaaaaaacaataaaaagaagcaca

SEQ ID NO: 438078 - DNA, 547 bp, Homo sapiens
caattttcatttttttatgcttactaacaagccaaagtaaacactaagtcaaatatttattttagatcttaagatgcagtatgttcaaactttggcaggctaaaagaagttagatgttaagcaaaatagcaatactaaataaagaccatctacaggcaggcgtggtggctcacacctgtaatcccagcactttggaaggctgaggggggcagatcrttttaggccaggagttcaagactagcctggccaacaaggtgaaaccccgtctctactgaaaatacaaaaattagccaggcgtggtggcaggcacctgtaatccaagctactcagcaggctgaggcaggagaatcacttgaacccgggaggcggaggctgcagtgagccaagatcatgccattgcactccagcctgggtgacagaacgagactctccaaaaaaaaaaaaaaaaaaagaccaaccacaataatattaatgtacttcacatgggaacacaattattttttatgaaaacataatcctgggctaaaaaacaataaaaagaagcaca

SEQ ID NO: 438079 - DNA, 586 bp, Homo sapiens
tctggtccttcccagggctgcctcaaaaaagggaaagggaagagctgaatacacatgctatgcatgagaaagtgacagtggtgagaggacgagccaagagaattctgtgaatagaaggtcatggatgacttgtgcattttacttatttattcacttgtttaagggagggacaggggatagatgcaatccatcaaggatctctatggtctaaaattttatagttccgctatatctttcgttaaactaaactgattttggtgctaacttgaggtctctctggtaaarcaatagaagtcagcaaactcctgctacacaccaatcatgtgccaagcccctcagagggatgagagaaatataaagatgaagttcttagcttttcaaggatatgatgatgtgaccatattatcagtgttataacacaattggttataccttaacagatggatagatgagtggctgagaaagatggaaggaaggatggacagacaccacaatgacatcaagaagtgaatattaactctgagagagaagtatgtggcagcagtgacatttgagctggctgtcatggtgtaatagaaatgtatgg

SEQ ID NO: 438080 - DNA, 610 bp, Homo sapiens
actcctgctacacaccaatcatgtgccaagcccctcagagggatgagagaaatataaagatgaagttcttagcttttcaaggatatgatgatgtgaccatattatcagtgttataacacaattggttataccttaacagatggatagatgagtggctgagaaagatggaaggaaggatggacagacaccacaatgacatcaagaagtgaatattaactctgagagagaagtatgtggcagcagtgacatttgagctggctgtcatggtgtaatagaaatgtatggccttcggaattttaagacctggatgcagtactagattgaccattaactacttgtgcagcttyaggcattgtacaaaaatgagtactgaactggctttgggaagactggtttaactttctgcctaacgtgtggcttttagcctttcccttgttctaacagtcattttgagtcttaaacctagacagaagagtaaagaaaacttttataattaattttgttggcctgttcatgctataataatatccacattaaaaccctaatgtatgatgttgtaagtccaaaataaagataacttacttaaggatttaaaaatagattaatccac

SEQ ID NO: 438081 - DNA, 504 bp, Homo sapiens
tctgagagagaagtatgtggcagcagtgacatttgagctggctgtcatggtgtaatagaaatgtatggccttcggaattttaagacctggatgcagtactagattgaccattaactacttgtgcagctttaggcattgtacaaaaatgagtactgaactggctttgggaagactggtttaactttctgcctaacgtgtggcttttagcctttcccttgttctaacagtcattttgagtcttaaacctagacagaagagtaaagaaaacttttataattaattttgttggcctgttcatgctataataatatccacattaaaaccctaatgtatgatgttgtaagtmcaaaataaagataacttacttaaggatttaaaaatagattaatccacttaatctaaaaaaaaataggattttagcccaacaaaagaagtttgcctaatcattatggatgggctatggtgggattaagttgtatggggttttgtgatatatttgatgct

SEQ ID NO: 438082 - DNA, 648 bp, Homo sapiens
gatgcatttcttaaataagatccctaaagcaaaggccaaagcaaaaaaatggaaataattacatcaaacttcaaggcattctgttcagtaaactaactcttcaataaagttaacaaaagggttaactcttgcagagtgggagaaattatttgcaatcttcgaaacacagatgtagttaacatcatatatataaaacaaactcctgtaaatccagaagggaaagacaggaaatcaaatatttacatgggcaaagttatgaataagcaatttctagagggaacaatccaatagtgtcctggagctgtgttgtgccatcttatgagagcctattatgaaatttcatgagctagttgctaaagggtagcttgaaattggtcatgctgcagtatttataccatggaaattgacaaactgcacaacaaatcaaactcccttctctttcatcatcccctawagccaggagttaaacatttaccagccaaatgctagagaaatccaaatgactaactttcatatacatgagctcactaatggagaaatgcaaatcaaaacaatagtgacatgctatttttatgtctaatcaaattagcaaaaatttgaaggttagataataagtgttgatgagaatataggcaaatggaaacacca

SEQ ID NO: 438083 - DNA, 584 bp, Homo sapiens
tggcctgataggaactgggcaggaggtgagtggcaggcaagtgagcaaagcttcttctgtatttacagctgctccccattgctcacactaccacctgagctctgcctcctgtcaaatcagcggtgacatgagattctcataggagcatgaaccctattgtgaactgcacaagtgtgagatctaggtttcatgttccttatgagaatctaatgcctgataatctgtcactgtttcctatcacccctagatggactgtctagttgcaggaaaacaagctaagagctcccactgattctacgtatggtgagttgtataattatttcattatatgttatattttaataataatagaaataaaatatacaataaatgtaatgtgcttgaatcatcctaaaaccatccctatcccctggtccrtggaaaaactgtcttccacaaaattggtctctggtgccaaaaatgttggggactgctggtctagattttctactcttaatcattatgttctactgactaaaaagcttaaaaacaaagcttaaaaccattaagtgaaaaacagaaaagaagcagagaaagacccgtag

SEQ ID NO: 438084 - DNA, 585 bp, Homo sapiens
aagtacttatggtaccgttttaatttccttgccagaaaggaacatgattcttctttctccatgagcatggccaagttacttcggaattaggcaaataagatgaaaaggaaaaacattctctcaggtcaagcagtttgtttttctaattaaaacaggtaaatctcaatgttgcaaagagactcagatgttctcattttcctttaaaaattaatggataaggatttttcttatttccctttgaaattactcaataggttgccactaagataatgtctttcccaaacacatttaaggatcctgcataaatgaacagattgggacttcggtcaaactccttgtggctgtcagatcacaagtgttcagacctgcacctgcttccctctggctgcatctaaaygaagccaattatactagagaaagtaatcaggtgaacacctagttcatctagcttgacaggtgtttcacattgtgggagtaacactgtgcatttatggaaatgttctatacctgtgcaatcaatgtggcaggcactagctataggtggctcttgagcacttgaaatgtggctagtgcagctgatggatg

SEQ ID NO: 438085 - DNA, 625 bp, Homo sapiens
gtctacatgaaccttacagaagaagtaagctcggctaaactggagctaaacaaaaaccacaaatataaggaaacagtccaccatgagctaaagaaagcagacacaaccaacaggaggatcagagtgccaatattttcagataataggacaatctgaaaatacataattgcatttratataattaaagacaaactaaaaccataagcacagaaaatgacactataaaaataattttaaaaacacacagaatttctggaaattaaaaagcagcaacgagatgggctaagagatggagtgaaagaatgagaagatacacatagatgttgcagaaaagatatttgaagcagcaatggttgagagttttacagaattagtgacaaacatgacttaatattcaggatacacaataagtcctagctagtataaattcacacttagacatattatattgaaatttcagagcaccaaaagaggtggaggatttaaccccccaactcatgacaaagttggagggtcagacatgcctcattataccctcctcccttttggaattcaggaaaagttgaccagcgtttaccatctacacagactttaagtgtgataagaaacatttacagtctattct

SEQ ID NO: 438086 - DNA, 583 bp, Homo sapiens
aaaccaatgtatatcttaaatgtatttgattgatgtctcatatttccctaaaatgtatgaaaccaagcttcaccctgaccactttgagcacatgttctgagggtctcctgcaggctgtgtcacagggcgtggtcactcatatttagctcacaataaatctcttcagaattggaatctcttcatcaacagtactagactcttgctgaaaggattgctaaaggataaacttcatgagcaaattacagtaggagaggaatagtaagcaaagaaactgatgaatacaggtaaattcaaagaagcccaactgaaaaaaaggtgaaaattttaaggaaaatataaaaatgaaggatgacatataagagctcgaagtagccaaagaatggtcattgattgtttaagagaatcatggagctattgatgaacttcagtttgtgttgtcaaatatgtatatttaaaattytaaagtaatttaaaaaaagaaatataatttttaaccaataaaggaaggaaataggggattaaaccaaattaagtaatccaaagtagatgatggtagggagcaagaaaaaagtaaaaatccacg

SEQ ID NO: 438087 - DNA, 456 bp, Homo sapiens
aaacaaactggtagatttgcctacctaagaataaaaatttccatcagaagtaaagactgcaaaaaagtttgccacataggagactcaaatgtaaatacccttaatacttaaaaagatgagcttcccaaaatcaaaatgagagaggacaagaatagacaactaacaaccagcaatcaatagactrtgtgcatataagtatttctaaattcatcactaaccaaagaaaaatcattttttaaaggatacagcatttttctcatataaaattggcaaatgttttcaaagaacttagtctatgtttacaaaatgtagagactttcatgtaattctagtcaaagcataaaccaatattttctttctgaagagcagtttgttaaagatgtattaagagcttaataaacttcagacccagtcattaattacattttctagatttataaaaatacaaagatttgt

SEQ ID NO: 438088 - DNA, 456 bp, Homo sapiens
aaacaaactggtagatttgcctacctaagaataaaaatttccatcagaagtaaagactgcaaaaaagtttgccacataggagactcaaatgtaaatacccttaatacttaaaaagatgagcttcccaaaatcaaaatgagagaggacaagaatagacaactaacaaccagcaatcaatagactgtgtgcatataagtatttctaaattcatcactaaccaaagaaaaatcattttttaaaggatacagcatttttctcatataaaattggcaaatgttttcaaagaacttagtctaygtttacaaaatgtagagactttcatgtaattctagtcaaagcataaaccaatattttctttctgaagagcagtttgttaaagatgtattaagagcttaataaacttcagacccagtcattaattacattttctagatttataaaaatacaaagatttgt

SEQ ID NO: 438089 - DNA, 545 bp, Homo sapiens
ttacatttttctggaaaaaatttctagatatgcccattaattattgtggattttttaaaaaacttaaatccattttctcattttctgtccatactgcagatgactgctccaaatctcctttagagattgtttttctcctgacatcatgccaccaagagatatgctttccatcttcaatatacccctcctaataattgatgactagatgattatgttaaggaacttgacaatttgtttcttggagagaatattgtttgcctaaaaatatgtgattttcaatgcattttactttttactctatttttacttcaatgcattttactttttactgaaagtagtattttagctaactcatttaaaattcccatttctcttgtattcactgttcagataaaaagatataagagaacactatgctttggaaatatgataccgccctggtgctstattttatatcaagtgccacctaaagacaccttctgaacgggtggatgtggcctctggagtaagaccagtagagaggctccagtttacaaaaacactta

SEQ ID NO: 438090 - DNA, 555 bp, Homo sapiens
cttgtctgatttagggcaagttatggacctactctaggcctcagtttccttgtctgtaaaatggggttattaataagagtgcctgccttataagattattatgggggttcattaaggcaatcctggagagtttcactctgcctacctcacaggaagcattcaaaatataatctttttattaaaataaagacaaaagagtgtcttataaggggattttcccataccataggaccatttgtctctcaaaaaaagtattacctttttcaaactgtaaaagttcttttctgaaactctaagcataggttgggtacttggactagattcatgggatatgtttttaccccagacttcattattttaagtatttaattcatagcattcatttagactaaatatttcaatatttttttctctcaaaatactgatagcctggctatcctagctaagcattgtstaggataaggagctagcacggtaaagtaggaagccctctgactttatagtgccgtggacatagtttatgttctagctttgacacttgccagccacgtagtc

SEQ ID NO: 438091 - DNA, 518 bp, Homo sapiens
tctgaggtaattcaaatggaaaaaaaaaaaaagaaacaataacaattcagcatcagacattattgctttccaaaatttcttatgaaacactttatggaatatatggtcatccacttgaataaatggaataaaaggatgaatgaaacgataaacaaatgtaaagatcctttagatatcaatggaccatayggttcaaacccttgaacaaaactattagctccttgagggcaaatcttttttttctgcattcttcatcattctatagaagctgattctcaagaactgtggtatttcttgaatatatttagagaataaacccatgaacccaatacagataaccctaaaccacaaagcagatgagctcctctgtttaaactttttcctttaaagccagtctagaagccctttaaagagtacttgcaaatacaagtgcagtactattctcccaaaaaagaattctgccatcacctcttccatgctgtttataagttactacctttttcacttatcatgtttct

SEQ ID NO: 438092 - DNA, 518 bp, Homo sapiens
tctgaggtaattcaaatggaaaaaaaaaaaaagaaacaataacaattcagcatcagacattattgctttccaaaatttcttatgaaacactttatggaatatatggtcatccacttgaataaatggaataaaaggatgaatgaaacgataaacaaatgtaaagatcctttagatatcaatggaccatatggttcaaacccttgaacaaaactattagctccttgagggcaaatcttttttttctgcattcttcatcattctatagaagctgattctcaagaactgtggtatttcttgaatatatttagagaataaacccatgaacccaatacagataaccctaaaccacaaagcagatgagctcctctgtttaaactttttcctttaaagccagkctagaagccctttaaagagtacttgcaaatacaagtgcagtactattctcccaaaaaagaattctgccatcacctcttccatgctgtttataagttactacctttttcacttatcatgtttct

SEQ ID NO: 438093 - DNA, 620 bp, Homo sapiens
ggacagtgtaactaaatatctaaaatgatatataccaaaacatgactagyggtggggtaatgggtgatttttatattcttctttttatttttaaatctatgtttcctaagtactctctaaagaacaagtgttattgctattaaaaagaaaataagcaattcaagtcgttttcagaaaataacaaataaaagctaggaagatattcctgctaagggtaaatcaatcttctcttgatattattagaatatctgattctatattattgtagcccaattctatttcatagttcagtaatgctaataatgctttgcttatgcaatagaatttatatgtaactgatgcattcataagaccttttctatttagcagtcaattcctttaataaaaatattttggagattgtatggtgaaatatttgggggatagtattttcctgttatacctatatttgcatgcctaaataacattaaattatcaatgcaatttggtatgatttgtcaatattctgttagtgctagtctggcattttataaatagatttatttattttgctaagatagacaaactatgaagcactgtcagttactttgtgaaaatttcaaataccaggtagtgaaacc

SEQ ID NO: 438094 - DNA, 620 bp, Homo sapiens
ggacagtgtaactaaatatctaaaatgatatataccaaaacatgactagcggtggggtaatgggtgatttttatattcttctttttatttttaaatctatgtttcctaagtactctctaaagaacaagtgttattgctattaaaaagaaaataagcaattcaagtcrttttcagaaaataacaaataaaagctaggaagatattcctgctaagggtaaatcaatcttctcttgatattattagaatatctgattctatattattgtagcccaattctatttcatagttcagtaatgctaataatgctttgcttatgcaatagaatttatatgtaactgatgcattcataagaccttttctatttagcagtcaattcctttaataaaaatattttggagattgtatggtgaaatatttgggggatagtattttcctgttatacctatatttgcatgcctaaataacattaaattatcaatgcaatttggtatgatttgtcaatattctgttagtgctagtctggcattttataaatagatttatttattttgctaagatagacaaactatgaagcactgtcagttactttgtgaaaatttcaaataccaggtagtgaaacc

SEQ ID NO: 438095 - DNA, 629 bp, Homo sapiens
agccttttttccccctaaactgcacagctccgtaactaaatgtgacagactgagagaagcagtttattaagacaccaaccccaagtttatttagttcataaactctctcctagaaaatcaatacagtctgtacagggttattaggcaaactcgctaatacattcaattctagtctgcccagccagcagtcttctgaaaaaatgatacccaatataggccaattgggctaattcaaatatcaaggactgaggtggccctggctaaaacamgtctgcaataaaacatgttattccgacaacacgagccttaaaagcagcaggatatctttctaagttttaaaaaatatattttcataaatatacggtactgtaactgctaactggatttgctcaaacaaaaaaaaaaaaactttgtaacattttttcacaaacaggacaagctctgttacaaaaagagacgacaattaatccagactcaataataaataagattttaagtttctctaacactcattttaaaataaatatttgaaaagaacatttaatccctctataaatccccaagatacatgatctgaacttccacatataacatactgtgtagaacatttgacattaggataatttcta

SEQ ID NO: 438096 - DNA, 629 bp, Homo sapiens
agccttttttccccctaaactgcacagctccgtaactaaatgtgacagactgagagaagcagtttattaagacaccaaccccaagtttatttagttcataaactctctcctagaaaatcaatacagtctgtacagggttattaggcaaactcgctaatacattcaattctagtctgcccagccagcagtcttctgaaaaaatgatacccaatataggccaattgggctaattcaaatatcaaggactgaggtggccctggctaaaacaagtctgcaataaaacatgttattccgacaacacgagccttaaaagcagcaggatatctttctaagttttaaaaaatatattttcataaatatacggtactgtaactgctaactggatttgctcaaacaaaaaaaaaaaaactttgtaacattttttcacaaacaggacaagctctgttacaaaaagagacgacaattaatccagactcaataataaataagattttaagtttctctaacactcattttaaaataaatatttgaaaagaacatttaatccctctataaatccccaagatacatgatctgaacttccacatataacatactrtgtagaacatttgacattaggataatttcta

SEQ ID NO: 438097 - DNA, 485 bp, Homo sapiens
taaaggccatctgttggctttcccacatttactgatagtgagagatggaccatggaaattatgaagtccaccaaactaggtttcactgcatccaagttaaagacattgtgtgaatgtgaatacttcccccacaccacaccacataagtagaaatatactkacacaaagtaagaaactcaaaagcattttacaatggtaaaatagattggagaactgaaggggaaaaaaaggcaatggctctgaaagtgacttctgatgttgatgatgttttaacgtttaaaatcttccaagaaaaggaatgcactataacatgcctttcatatactggctctaatacactaaatcctgaacttaaaaagaaatctttattttcacataactatagtaaaattcaatttatagactgctgtaattaaacattttccctgtaactttcgagctgacaccttattaagcatttcatagctcatgtttttgagtaatct

SEQ ID NO: 438098 - DNA, 485 bp, Homo sapiens
taaaggccatctgttggctttcccacatttactgatagtgagagatggaccatggaaattatgaagtccaccaaactaggtttcactgcatccaagttaaagacattgtgtgaatgtgaatacttcccccacaccacaccacataagtagaaatatacttacacaaagtaagaaactcaaaagcattttacaatggtaaaatagattggagaactgaaggggaaaaaaaggcaatggctctgaaagtgacttctgatgttgatgatgttttaacgtttaaaatcttccaagaaaaggaatgcactataacatgcctttcatatactggctctaatacactaaatcctgaacttaaaaagaaatctttattttcacataactatagtaaaattcaatttatagaytgctgtaattaaacattttccctgtaactttcgagctgacaccttattaagcatttcatagctcatgtttttgagtaatct

SEQ ID NO: 438099 - DNA, 620 bp, Homo sapiens
gtccttctctttaaatggagatactacctctttcaaaaggcaattgtgaagatcaaatgacaacttgcacctagcacagaacctggcacatctgagcactcaataaacattccttgatcctaccagtattctcataatcaccatagttttgtctgactccctcttttcaaattaagtggtactctgggatattggggttaaccctgtccaagggctgctttgttggacactgtcagtagagacagaatgtgtaagtttagcagtattttcaagtaaaaagcataaaggaacaattcagatggtagccaatgggtgaaagaagataaaataaaatattcagagaaattacctaagatacagtgcagctgctatagctttgatttatgactaacatcctaggacagagatggggaggaagctgataaacagaggctatgacctgctgtgggcaataatgtytcaggatctcaggtgccacttcacagatgggacataggtgttgcctggttgggttctgagtatctgggtttagtggggctgagctgagacagccaaagagaaagcacataaatatccaagggagagaatgtgtctggcttcagaccttacagatcaaaatt

SEQ ID NO: 438100 - DNA, 636 bp, Homo sapiens
agaattcatcccctcttctttaaggactaaagaggtgcccacaggcaaggatatgtagacgaaatgtgatcatccagtcattcaactaatattgagtgtctactatacacagacatcaataatacttagttaaaaaaactgagcaacaaaaatgttaaaatagccatggtctttggactcatggggttttctgtcagggaagacagatattataaaagtaagtccaaagaaataataataatgactcttactgattgcccatgtaatcagctatgtaactttaaatatattatcttacatgatacttaacactactctgtgaggtataatgagttacctcaatctgaacctctggagccatttaactgttctttttacactgaaaacctgcaattaacacaatgacatgatgtatataaaaagcttagtacaatgcctggcacttgataagtactcagmtctttttcttgcttttaaatttctatttgctcttccttttcagtgcttttttactttggggtgatagtagaggttgactgaggtctcctcttcctccattcttctttcttaactatctgaaaacattgttgctttaattttcccttttcttcagcctggtctataaatggtggtacc

SEQ ID NO: 438101 - DNA, 389 bp, Homo sapiens
cgccgcagagttgcagtaacgaaacttggatggaatgctgtaaatatggctccagaggccatgatctgaagctctgttttccaccacatccaccagcacaaatcaacagtcagcactatacttaattattaaacatgaaatgcttttccactgtcattagtrgcaatccaaagattcccagccacataccagtaaactctagcaagagaataaaaaagagggggcagtgttagaagacattaaagtggccattatttgcaaatgaaagaatggaataactggggagaaatctcaaaccactgagaatgtgataagccagaagttaggttataacatgacaaaattaatacataaaattcaaagtttcttacatatcaccaatacagtta

SEQ ID NO: 438102 - DNA, 628 bp, Homo sapiens
ttataacatgctgagaagttttggatacatgacatgaattttccaaaagagtagttcataggatgcaactcctttgtgcagcatacagtctatgtagtaaaggacctttgccacctgtcacttgcctacatttctaggattaattatcaatattatcttagttaaagcttaatgaaaatgtaaagtatcgttgctcttttacccctttgtatgattgcacatgctattctcactccttgaaatacatatatatttttaatatttgaacacccaggacattcttgcatggttgaagttctagtcaaatgtgaccaacgttgggtggctcctccagaatgtccatctttcatggtggcaactattagattgtaaggttggttggatgctgagtacacttgtgcagagcagacatagagaaagatgggcagagatgacaggcagctggtgtctcctagattttcctgagagccttctccaaagtgctggctttgtggtggcyggtaggcatgtgcacaccgggaggcacagcttcccgacccaggcctgccttcatcagcctttctgggggcctccagccagttagtgaacagccttcaaagaatgtactgatgacctgagtggcttgcaa

SEQ ID NO: 438103 - DNA, 547 bp, Homo sapiens
tgctgttggcctttaacaattcattaaaaatgttggttgccatcttacctgcttatatggcttgcatggcagtcctgtctacctctacctcaagtcagtgctcacatatcatcaatccttggaagtgcttctctttccttagatctcaggctgcttgattgctctgccacctcagctctctgattgattctaaaaacattgattttgtcaatatctggattttccttgttgttacagtagaagtgtaacatggtttccatttattttacatcctcaaataagcctgcattctctcactatattttaatagaaagtaaaatttcatttgtcagatctcttacttaaaagttgtgtataagactttgaaatatatttaggtcagctatataatggcatacaaaatattaycagtctcagaaagaaacattgtaatgtctaataatatttaccaaaaaaaaaaaataaataaataaaatttaaaacttaaatagaacagccatgccagcttgcaacaatttgtgagaagccgtgttcacacctcgggcta

SEQ ID NO: 438104 - DNA, 547 bp, Homo sapiens
tgctgttggcctttaacaattcattaaaaatgttggttgccatcttacctgcttatatggcttgcatggcagtcctgtctacctctacctcaagtcagtgctcacatatcatcaatccttggaagtgcttctctttccttagatctcaggctgcttgattgctctgccacctcagctctctgattgattctaaaaacattgattttgtcaatatctggattttccttgttgttacagtagaagtgtaacatggtttccatttattttacatcctcaaataagcctgcattctctcactatattttaatagaaagtaaaatttcatttgtcagatctcttacttaaaagttgtgtataagactttgaaatatatttaggtcagctatataatggcatacaaaatattatcagtctcakaaagaaacattgtaatgtctaataatatttaccaaaaaaaaaaaataaataaataaaatttaaaacttaaatagaacagccatgccagcttgcaacaatttgtgagaagccgtgttcacacctcgggcta

SEQ ID NO: 438105 - DNA, 577 bp, Homo sapiens
ctgggttcaggcaactctcctgcctcagcctactgagtagctgagattacaggctcatgacaccatgcctggctaatttttgtatttttagtagagatggagtttcaccatgttggccaggctggtctcgaactcctgacctcaggtgatcctccctccttggcctcccaaagtgctagggttacaggygtgagccaccgtgcccagtttctttgatgatcttgatttctgtgctgctttatctaaagacctctttaaacaccaaaaagtcatcactgcctggtagtaaatgtgcatgaataaaggtgacttgtgatacccacctaacaatactggtgagcacttttaatctcttttaatttcttctttgatttatctttttactaactgaggaaattggagttcaccataatctcctttttttttttttaagttatgagaacctggttccaatggagaaaactatggttgtgcattcctcatataatcatgaaatcaagagacactgctatggatgcattccattttcaaacaaccttaagatgtagataattattactattatttcttacatgag

SEQ ID NO: 438106 - DNA, 425 bp, Homo sapiens
tctgcccaactcagagaacattactggtggggctttagacccaaacagaatatggaagagtgttctctgccgtaactcaatggcttctcagaatagacttccrtatcctgatattggagcattctgcaaagaaagagttgactcctcttccgatacttctagaatgaatcttaaaagtcaattaaatgtttcaacatattgacagacagaatatggaagagtgttctccgctataactcaatggcttctcagaatggactttcatatcccaatattggagcattccgcaaagaaagagttgactcctcttccaatacttctagaatgaatcttaaaagttaattaaatgtttcaacatcttgacacactttctgtttggttctttaatgtcttactcttaaatatgtaaagacagctgaagatag

SEQ ID NO: 438107 - DNA, 634 bp, Homo sapiens
gtgctttatctcttttatttatacaagttctctttagagtatacaggaggaaaaacagatggcagagactccagacrtttggggttgaagagcaacattttgggactctctcagacgagttgcagcaactagtagcaagaatgcttacaggaaagcaagttaagaaagtaaatgtcacatctgttttcacgtcttttcccttcatagaagtgctttcctgtaatatttctctcaaatagtcatatgcaaaagtataggaattatgtaacaggaaacttgagaatagtctaaatatgcatgacagccaataaaaatgatactctgggtatgtatttactggagtagaacaatgttcatataaggttctgtgaataaaggaggtttaaagaagaggaattaatgaatgatgaataaagatttgcattgtcttcttggattcaaaaaagagtatttctgagatagaaaaaaaaaataagctttcacctgtcagaatcctgcagcaagtatttcagagggaatgaaacctccaagattaaaactcaatattttagaatgacatttaaccttccaaaatggtattatgagtacaagcttaaattcttataactcttgcaaagtgaggcatttacaaccc

SEQ ID NO: 438108 - DNA, 634 bp, Homo sapiens
gtgctttatctcttttatttatacaagttctctttagagtatacaggaggaaaaacagatggcagagactccagacgtttggggttgaagagcaacattttgggactctctcagacgagttgcagcaactagtagcaagaatgcttacaggaaagcaagttaagaaagtaaatgtcacatctgttttcacgtcttttcccttcatagaagtgctttcctgtaatatttctctcaaatagtcatatgcaaaagtataggaattatgtaacaggaaacttgagaatagtctaaatatgcatgacagccaataaaaatgatactctgggtatgtatttactggagtagaacaatgttcatataaggttcygtgaataaaggaggtttaaagaagaggaattaatgaatgatgaataaagatttgcattgtcttcttggattcaaaaaagagtatttctgagatagaaaaaaaaaataagctttcacctgtcagaatcctgcagcaagtatttcagagggaatgaaacctccaagattaaaactcaatattttagaatgacatttaaccttccaaaatggtattatgagtacaagcttaaattcttataactcttgcaaagtgaggcatttacaaccc

SEQ ID NO: 438109 - DNA, 538 bp, Homo sapiens
acaggcatcccaagcagtgactcaaaccatcggcaatttcagaggaagcttgttatggtgactccacaattaataccacagcccatgtgaccagtcagtcccgcgggaggctggactaagcaacatataaaagtcccaccttgctgggcttcacagtccacagcctttgttgagtcttgttgaagatcaggtaagtggggcatctgtgccctctctctccctgttactctgtctttaggckgccgctgttctgttcctcttatggactgtactttctactgattttttaagtggtttgccatttcttgggcctcacaaactatcctgtatattctatccagactagaatttgcctatctagtctagtctcttgcacctgattttcaaaaggattcgtagactagaagagaagggaaaaaaacctgtggtaagactggggtttggagctatggatgtctagacagaggccaggagaacactcccactttggagacaggtgccacagggagctgcagccaggatagaaaagagaaagaga

SEQ ID NO: 438110 - DNA, 585 bp, Homo sapiens
aaaaatgtcatacctccctgtatgccagccttaggctcaaatcaatggaattttgggaatttttctcccagagagcatttcccacctgagctgagtatgcaggaaaagggagggtgcagcaggagggcagggtgaggaaagtaatcttgccttaagaataacctctgcgagtgtcatcacccagggtgcgtataattgcacaggattaagaaaggcatgtgggcaggctgcgttgctttagatcctcctgcaattagtgtaygccacttcagatcccagaggaaggattaatttgtgtgacgtgtgttcatatgtctacaggtgtgcatgtgtgcctgcagcagggaatcccctggtggtggagctggccccttatccttagtaaatcattctgctacaaaaattaaaaccaaaaaaagaaaaaaaaatttgctacaaatttgaaaagcaaagccaaaaaaaaaaaagtcacctataattccatcatccaaatacagctggtaagttgtagtatttcaaatgttgttgagtattttaatcttgttcttgtgttttttctcttaatttatacttcctctttctaca

SEQ ID NO: 438111 - DNA, 585 bp, Homo sapiens
aaaaatgtcatacctccctgtatgccagccttaggctcaaatcaatggaattttgggaatttttctcccagagagcatttcccacctgagctgagtatgcaggaaaagggagggtgcagcaggagggcagggtgaggaaagtaatcttgccttaagaataacctctgcgagtgtcatcacccagggtgcgtataattgcacaggattaagaaaggcatgtgggcaggctgcgttgctttagatcctcctgcaattagtgtatgccacttcagatcscagaggaaggattaatttgtgtgacgtgtgttcatatgtctacaggtgtgcatgtgtgcctgcagcagggaatcccctggtggtggagctggccccttatccttagtaaatcattctgctacaaaaattaaaaccaaaaaaagaaaaaaaaatttgctacaaatttgaaaagcaaagccaaaaaaaaaaaagtcacctataattccatcatccaaatacagctggtaagttgtagtatttcaaatgttgttgagtattttaatcttgttcttgtgttttttctcttaatttatacttcctctttctaca

SEQ ID NO: 438112 - DNA, 566 bp, Homo sapiens
atgtcacgccatggactccatgactactagctttaatggctggtctccgtggcccactcccattcttaccatgtacaccttccagctgtcctgtgtccwctgtacccttgagaacgctctcttgaatttctccagatcttggttgtctccctggtaggctgctggaagggaccttatctttctttgtatacacagtgttggctgcatagtaggtgaggagaaaggtttgtgtggtgaaataccctcttttatctcaaacctttacttcttggccccccaacttccttgtgtataagccttggttcccccagactctgtctagatccacagaatcattgattttccccaaaatgcggtttccatcttgtctttttaaagctctcttctcttcacaggcttctgaaccaggattcccctgggcatgtgtggtctgaagtggccccttttggtatgtgtgtgagagggcatgaggaaggggaagagggaagcagacagcttagtggtggcatgtggaaaataagtcattctgtaatagaatgcttgagagaagtgctagcccattgccg

SEQ ID NO: 438113 - DNA, 337 bp, Homo sapiens
tttggctaaactgagggtcactgagtctgtgggtgacatggaccaggccctgaactccatgcacattctctatggggattctaacagcagccttggggagttcctgtgctgcccatttgcttaggaacttgtcctaaagccagtaagtggtgaagtcaggatgctaacccaagtccctctgactccagaatggagctctcacttttgtaatgaaagtgctatggcatacagaagagatttccagaaactcattcattcatttatccayctaaaacatgctccctgatacctaccaggtgtcaggcaccatgccaggtactggagagacagtggtgaa

SEQ ID NO: 438114 - DNA, 405 bp, Homo sapiens
agcagcaatgtgggctccaagtagatgcagcagatccacatgtccctctgagggaaagccatggtgccaatrggcaagaacaccatgatgtgcaaggccatccaagggcacctggaaaacaacccagctctggaaaaactgttgcctcatatccagggaaatgtgggctttgcgttcaccaaggaagacctcactaagttcagggacatgctgctgaatagtaaggtgccagctgccacccatgctggtgccattgccccatgtgaagtcactgtcccaggccagaacaccggtctggagcctaagaagacctcctttttccaggctttaagcatcaccactgaaatcctgagtgatgtgcagctgatcaagactggtgacaaagtgggagccagtgaagccaca

SEQ ID NO: 438115 - DNA, 659 bp, Homo sapiens
cttatagggtgggagcaacacgaataatggttcaggacataggctcaggaatcagacttctggaattcaaatctagactccaccacttctattgttcccttaaaacaaatttctcctatgtgagagtaagtgacacagaatctcctatgagccaagcactggagttacagcagcgaaccagatacacagaatccctgcctcccagagctcacatgaggaggaagacagacaaaaagcaactcagcaaatgcataaataagaaattgaagaaaatgaaacaaaatgaccagggaagaggggtgctctttagctcgggtaatgtggaaaggccgatctgaggtgagagcaacagaaatgatgggttacatgatggtggcaatggcagcgtgctgraggtgagaggaaatctgagggaacattttcttgaatgtgaattgactgacaaaagtgtcactgaacacattacctttgattcctaaatagccagaatgacaaagcctatctgtagattactcattgtgttctcattcatttattttttcattcaacaaatctttgttgagtagctactgtatgccaagctttcctttaggtgctggagatgtagcagtaaacagaccaaaagtgctgtttttgtggagtttacacttagaggacac

SEQ ID NO: 438116 - DNA, 567 bp, Homo sapiens
gccatgctcttactccaacatgcttgcaaaawccccaggcagcccagcttttcctcaggatgccagtgtttgaagaaataacttatcttgggaaaattaagtcataatcatgcttctttccaatctaaataacctttggtagctgcccatatcttttaagctaaaagtcaaaactccttgacgtggctttcaggctcctgagtgatgcggcctgtctcccgactcccctctgtccttcctaacccttgcaatggcctgcacatgcccactgggccactccacaccactggacatgctcttccatctggctccattccttccccacccatttttgtcccctacatatcctgaaggattctagctcaagcatattcttctctaggaagaccctattggcgccgccaccacagtctgtgtgcacccctagagtgtgtccacatgtatcccctgtcttgcaatcattcattcacattctgtcctccatactacagtatgaacttcttgggggtagggactgtgtcttgtttgtctttgtatctccagttctatcgcaaagtaaatactcag

SEQ ID NO: 438117 - DNA, 567 bp, Homo sapiens
gccatgctcttactccaacatgcttgcaaaaaccccaggcagcccagcttttcctcaggatgccagtgtttgaagaaataacttatcttgggaaaattaagtcataatcatgcttctttccaatctaaataacctttggtagctgcccatatcttttaagctaaaagtcaaaactccttgacgtggctttcaggctcctgagtgatgcggcctgtctcccgactcccctctgtccttcctaacccttgcaatggcctgcacatgcccactgggccactccacaccactggacatgctcttccatctggctccattccttccccacccattttygtcccctacatatcctgaaggattctagctcaagcatattcttctctaggaagaccctattggcgccgccaccacagtctgtgtgcacccctagagtgtgtccacatgtatcccctgtcttgcaatcattcattcacattctgtcctccatactacagtatgaacttcttgggggtagggactgtgtcttgtttgtctttgtatctccagttctatcgcaaagtaaatactcag

SEQ ID NO: 438118 - DNA, 558 bp, Homo sapiens
gaatgacttaaaatttataaaataaaaatagtcagaaggaatcacctacttcaggattaaatgagttccctaacataaaaagcattagcttagatttctactcttgaggaactcttcagggagggattcaagcatcagtgagggattggacaggaaaaccaccccagctggttggttaccagagaaactcaacatgctcccaattaaactcagtatcttttaccctcaaacttcttaatcctctggtctctcctagttccataagacattgcttacatttacccagtgtaattataattctgtataagttctgtttttctaactctaacttctttattcacataaaataactttcactattcttctgaaagcctttaataatgtgaagatggctatttatccctgtcttctctcctcctacttccacttctaccaccatcaccgccaccaccaccgcctctgycacctccactaccatcatttccaccaccaccatcaccaccaccaccaccatcatcctagttgtggtggtgctgataagaactagtggtaatggtg

SEQ ID NO: 438119 - DNA, 587 bp, Homo sapiens
  misc_feature (1)...(587): n = A,T,C or G
gaaaggcagtggagcaagaagctctctgaatataagccatcatartgttgaacatttacttgaaaaaaataatagaaggtgtcccagagtgattgaattaaaaaagcttctcaaaaccatacatctttaaagttgaggaaagctaatatataaaataaacaacagaaaataattgaggttcaaacccacataaagtcattttaagataaaaatagaatcagannnnnnnnnnnnnnnnnnnnnnnnnnnnnnnnnnnnnnnnnnnnnnnnnnnnnnnnnnnnnnnnnnnnnnnnnnnnnnnnnnnnnnnnnnnnnnnnnnnnttagaaaccatttaaatatctaacaaggtttgattaagtaaacttgaacctattatatgatgaaacagaagagaataagaaataaaggaaatatcaatttcagaaataatcagtaaaaaaaaaatgttaaaagtggatatacataatggataatgcctttaaagaaaaataagataaaacgaaggaaaattctaaaataaaaaataaactaaaaagtaacattaaaataattagagagaaagtgataaatataaaagataggcaa

SEQ ID NO: 438120 - DNA, 627 bp, Homo sapiens
tgattaattcatggctaattacatttaaaccatactccccacacatttccgcaaaagaaattcatatgtatcatacaatgtcacctataaacatttcattatatgttgctgaaataaaatgacagtaagaaatagtcaatatcattatcatgcctaaaagaatcaacaatcaataataatttctcaatatcataaaatgctgagtttgtgcatgaatttgtctcgcttttttcctgtttgttagaattggcatccaaataaggtccatacattgtgcttttttaaatttattttttattttttattttttttttgagacagaatctcactctgtcacccaggctggagtgcagtggtgtggtcttggctcactgcaacctctgcctccagggctcaagcgattctaaggcctcagcctcctgaatggctgggattacaggtgcctgccaccactcctggctaatttttgtgttttcagtagagacagggtttcaccattttkgtcaggctggtcttgaactcctggcctcaagtgatccacccactccggactcccaaagtgctgggattacagatgtgagccagtgcacccagcccatacattgtgtttgatatgtcttttataat

SEQ ID NO: 438121 - DNA, 657 bp, Homo sapiens
tacctagttactacatattcaaaacagtttttatctgtagcctttatactttgaaggacagattggctggacataaaatccttggctcatgctatcttttctttgatgagtctcttgtaggttcttcttcacaatctgtgtgtgaatgttgttgttgagaagcctgatggcaatctaattttttctcttataaatggcttggtctcttcacatgactgactaaaaagtttatttcttcatattttaagtaccataacatggtttagcaattactattgcaagttaattctcacaggtaaaagtgtggcctttcaatatgtagagttgtatctttgatttcaaaacattttttcttgaattattgtttaaggtatttactcttttacattggttttcttcttttggtacrtgaattatatgtatgttggatctcctttgcctgtcttctacattgatcacttttgctttaattcttttttcctccaattttttattgtggtgaaatacacatacagtttaacatcataagtattaagtgtacagttctgagataataagtgcatcatattgtgtacaaactctctctaattcttttttttctctgtctttttaaaaaattttagtttctttggacttttaaatttcttttctctagac

SEQ ID NO: 438122 - DNA, 657 bp, Homo sapiens
tacctagttactacatattcaaaacagtttttatctgtagcctttatactttgaaggacagattggctggacataaaatccttggctcatgctatcttttctttgatgagtctcttgtaggttcttcttcacaatctgtgtgtgaatgttgttgttgagaagcctgatggcaatctaattttttctcttataaatggcttggtctcttcacatgactgactaaaaagtttatttcttcatattttaagtaccataacatggtttagcaattactattgcaagttaattctcacaggtaaaagtgtggcctttcaatatgtagagttgtatctttgatttcaaaacattttttcttgaattattgtttaaggtatttactcttttacattggttttcttcttttggtacgtgaattatatgtatgttggatctcctttgcctgtcttctacattgatcacttttgctttaattcttttttcctccaattttttattgtggtgaaatacacatacagtttamcatcataagtattaagtgtacagttctgagataataagtgcatcatattgtgtacaaactctctctaattcttttttttctctgtctttttaaaaaattttagtttctttggacttttaaatttcttttctctagac

SEQ ID NO: 438123 - DNA, 657 bp, Homo sapiens
tacctagttactacatattcaaaacagtttttatctgtagcctttatactttgaaggacagattggctggacataaaatccttggctcatgctatcttttctttgatgagtctcttgtaggttcttcttcacaatctgtgtgtgaatgttgttgttgagaagcctgatggcaatctaattttttctcttataaatggcttggtctcttcacatgactgactaaaaagtttatttcttcatattttaagtaccataacatggtttagcaattactattgcaagttaattctcacaggtaaaagtgtggcctttcaatatgtagagttgtatctttgatttcaaaacattttttcttgaattattgtttaaggtatttactcttttacattggttttcttcttttggtacgtgaattatatgtatgttggatctcctttgcctgtcttctacattgatcacttttgctttaattcttttttcctccaattttttattgtggtgaaatacacatacagtttaacatcataagtattaagtgtacagttctgagataataagtgcatcatattgtgtacaaactctctctaattcttttttwtctctgtctttttaaaaaattttagtttctttggacttttaaatttcttttctctagac

SEQ ID NO: 438124 - DNA, 527 bp, Homo sapiens
tttgttaataaaatatgatcttatgccatatgtttaaatggaggctttgtttggatgtgacagtttgcctttttattattcgtatttgaatgagttggttttttctggtccagttgctacaggagtatcctgtgacagttgtgtttggaggtgggagaaaattaatatagcttctcctgtttctcagctcattggctcctccatctgttgcactcaattggtagtttattggatatattgtgatactacatttgttctccttgcactcccagtcatttctgttgatctccaccagttctcatgcaatacccttttcattcttagaactgtccagakcagtgcccctctaggtggtccctcacattctggtgatgaatatctgctgtggattccagattataatggtctctttttgccatctccacgtttcctcatagcactcaccattccactacctcaccattcattgttatggcttctagtattagtttcctgacttgctctctcccctctccacacttactttc

SEQ ID NO: 438125 - DNA, 574 bp, Homo sapiens
acagtgattaagtgaccagggtgcaaaccagaattgatagtggcttccagtagctttgcaggaggccagctcctaacaggccttcaatcttgggaaagtgaatccttacctctcatttaactaacgagggaggctgaacatttttcctyatatttattaggtgcctgcctcatttgtaattagctcattttgtcttcactgcagttttcctgaatgaatggaatcctgggtgttatctgctaagtggttgcttgtcctgacccaggaggcttccacatgttctactcttaagacatggttttaaaaattttccatttggggactgctgattgcagtttaaaaaccctggagggcaatgatctatcccatttggtttcaaactccactttatattttctcagtaggaaaattggggggaaagttgatgttttgggtggtagctcatacagctaaagtttcagtctgactgagtatgagtaagcaattcacttctacctgaaagagcaggaaagattcctggagctggaaaagactatagtgatcctatagttcaacctcttgggcccacattgag

SEQ ID NO: 438126 - DNA, 574 bp, Homo sapiens
acagtgattaagtgaccagggtgcaaaccagaattgatagtggcttccagtagctttgcaggaggccagctcctaacaggccttcaatcttgggaaagtgaatccttacctctcatttaactaacgagggaggctgaacatttttccttatatttattaggtgcctgcctcatttgtaattagctcattttgtcttcactgcagttttcctgaatgaatggaatcctgggtgttatctgctaagtggttgcttgtcctgacccaggaggcttccacatgttctactcttaagacatggttttaaaaattttccatttggggactgctgattgcagtttaaaaaccctggagggcaatgatctatcccatttrgtttcaaactccactttatattttctcagtaggaaaattggggggaaagttgatgttttgggtggtagctcatacagctaaagtttcagtctgactgagtatgagtaagcaattcacttctacctgaaagagcaggaaagattcctggagctggaaaagactatagtgatcctatagttcaacctcttgggcccacattgag

SEQ ID NO: 438127 - DNA, 600 bp, Homo sapiens
ctgaaagagcaggaaagattcctggagctggaaaagactatagtgatcctatagttcaacctcttgggcccacattgagaacgtccatcagaaactcaaacaggttgtgaagtttcaggcagaggctctggagtcagacagacctgggtatgaatctggctctgaccctattatctgggaaacttaggacaagtgactcaaactctctgaggcccagtgttctgatgataagtgcgggtctcataggtcattgtgagactacttagtgaatatccatggagtcctcagcaaaaaccttggaacacagaatgcagtcagtaagtggtagctgttattatgattctcactaaagaagaggttagtcgaacaactgtcagggatctttgcagagtagatgactgaattgaatgactttacatacctgggactctcaaatggtgcagggggcgaagccaagcctgcttctgcttgtagttcactccatctgagcctcaatgttcttacctataaaaattgaatcaaatatgaaattgcaccactagatatgaaaatamatacacagtgttttttcataacagctaccttgaggattttagaaat

SEQ ID NO: 438128 - DNA, 616 bp, Homo sapiens
agctgtgaacaaaacagatgaaactcttcaccttcaggaagcttgcacttcagtgagaagagacagaaaatgaacaaaataacaaagaaatgtatatgatgttagacggcataaaagctatggagaaaaatagagtgggaatggagtgggattaacatgtatacatagttgtgtctattatgtggggacacgaaggacatacataagcttacatacctttctaaatgcaaaaaccagccatggccacagcacagccacagctcggagaaaagcttgtgctcacagatgatgctgacatcagagtgcatataacaaaaagctgagtaataaaaataatgcactattttgaagtgaataagcagcaacctaaaaccagtcaaattaataagcactcctgctagtggaccttttcttgggatcaatgatatttttagaattagctttttaaaactgtaaatctcaaataaaatgtttcttgcttttggacaggcactatcttcaataatgataatttcttaatatttgtacagktctctctagatttcaagttgtttccaaatatgtgtgatcagttcggagagtccactgacttccgcgtagtagccctgttacataa

SEQ ID NO: 438129 - DNA, 616 bp, Homo sapiens
agctgtgaacaaaacagatgaaactcttcaccttcaggaagcttgcacttcagtgagaagagacagaaaatgaacaaaataacaaagaaatgtatatgatgttagacggcataaaagctatggagaaaaatagagtgggaatggagtgggattaacatgtatacatagttgtgtctattatgtggggacacgaaggacatacataagcttacatacctttctaaatgcaaaaaccagccatggccacagcacagccacagctcggagaaaagcttgtgctcacagatgatgctgacatcagagtgcatataacaaaaagctgagtaataaaaataatgcactattttgaagtgaataagcagcaacctaaaaccagtcaaattaataagcactcctgctagtggaccttttcttgggatcaatgatatttttagaattagctttttaaaactgtaaatctcaaataaaatgtttcttgcttttggacaggcactatcttcaataatgataatttcttaatatttgtacagttctctctagatttcaagttgtttccaaatatgtgtgatcagttcggagagtccactgacttcygcgtagtagccctgttacataa

SEQ ID NO: 438130 - DNA, 597 bp, Homo sapiens
aggggacacagagtcaaagaaaggacgataccaactcctgggaggggcagacactgcagttcctagccatctgtggggcagccccacaaaagsctcctgtagggtgggcagtctcaggagcgagtgcaatggggatgtcttgtcactgacattaaagaaaggggtgatgagagagggtgtttctcccttgtggtattttggggaataatcttcttcactgatgttgtcttatactaaagtactttcttctttctctcagtttactttcaactagggaaaatttcctagcagcagcagaaataaggcaaagtcccctgccagcaccactcccaactcaggtcccacagccctgtcctccccaggtgcctgagccctgtctcccacccttcatacagtagaagtccagctgttaataccacttatgccagcaagactgcgcagcaaagcagaaatgaccctcagaagccaccttctctgacctggacaagaggatactgcatcccccgcccacttccatccccttacttccagcaataatagggaccaccacacaacctagaagatgctacctgtcttcagattcaagatggaagatat

SEQ ID NO: 438131 - DNA, 496 bp, Homo sapiens
ccaggtccttcccagaaaacagcaggaattagacaaaagtacactcaggaccttcctgggggccaggtgtaccatccttccccttccttatcctctttttaaatttatttatatttttgtggtaagaatatttaacatgagctctatcctcttaacaaattgtaagtgtattaatacaatgcaatattgttgactatgggtacaaagttsttcagcagatctctagagcttattcatcttacttaattattttatgcctgttgattaataactcatttcatcctccccctgtccctggtaaccactgttacagcctttgatttaatgaatttgactatttttagatacttgatgtaagtggaatgatgcagtatttgtctttctgtatttgacttatttcactgcataatgtcctcaagggccatttatgttgttgaataaggcagaatttctttcctttttaaggctggatagtattctatcatgtgtatatacc

SEQ ID NO: 438132 - DNA, 493 bp, Homo sapiens
caggtggtctaaaatcctgtccaagaggtgaagatgaggaataccagccaagagaagctgtaggagagcttgccaatgcctaggcgctacaggagccatgcacagctagacaaagcagacatgcctgttatactaaagaactgtggccaacacccagccagcagggagaggagagtctgtgaaggacacattcaagttctccacgggagaaaggtcagccataagcacctgccaagcccagaaagctcctatgccagttcacaaagttttcaggtctttctttctcattcctttgcagcccctacccaaatggacaagaggcagctgggtgagcaagggaagaaaattaaaaacttctagtagctaatagagaagatactcttctttcctgtgcagccttccttcctgcagtagtaccaagtaggaaagagaaggaaatccaacattcaagggaagaccttctgattactgaaawaagattttttttatgtaa

SEQ ID NO: 438133 - DNA, 618 bp, Homo sapiens
gtataggctttggagccagacagacctgagctccagtcccagctctgcaactttcattattcaacaaatactcattgaattcctgtcaaatgccaggcacatgtccagtgcaagggacacaagaggacaagacctacatggccctggcctctcactgctcacagtctggtgggaacaaatatccagtgaatgaacaagctcatcaaccactgtgagaaagcagtgagggacagacacaggatgggccctgaaagagacagggacagtgggtgctggagggccactcagggcattcagggagggcatctcaggaaggggatatcggatctggggactggacaccaggcaggagccaagtatgtgggactggagaagggtatccaggcaaagagctcggagtgatgggggaagagaaaaagctggagcatgcaggagcatgcaggagggatgtggccagasacggcagagcgagggcaggcaggcctcagaggtcatggtcaggagcacagtgctcatgggcagagcagtaggaggcccttgagggtttgagcaggggaatgatggggtctggcctgttttttcaaaggatcacactggttgctgctgtttatatgacct

SEQ ID NO: 438134 - DNA, 518 bp, Homo sapiens
ggtggaggctggtcctagccttgcggggacatgggcctggccctgggactggtacaggttgataaaccccattccttggaggtggtggcaacatggctcagcatgaaaggtggggtccaggtgtgtgtgcatgtgcatgtgaggtcagcaaagccctctctgctcccccaggccctggacccaggccctggggctaagctagggctgctgcatgagtccccagtttgctaatggaggggaggcctcccttgataatgagaatmaccttatgaactcccctgggctgccgcctcccagactttattttttctgactcagtctcaatttgaaataaggagagagaggctgagagagagaaaaattccaagctgtcacctttggtagatgctccagaaaaggagtctaagtctcacttgtcacaggcagggaaaccgaggctctaagagggagctcagtgtttgtacaaccagttggtggcagagctgggacaggcatcgggactcagcagagctcctgac

SEQ ID NO: 438135 - DNA, 438 bp, Homo sapiens
ggggaggccaccgccctgcgcccctgcattaaagaggctgatgttctccatgaggggaggggaaaggcacagtgtgaagtgctcaagttcaccttctgaagcagcttgggctgaggtgagggggtcacatggacagccccccagagccccasccagtgtaccaccaatatcctggtttccaaagcctttaaactacatagagttttacagtttgcgtgggctggatgcagcctgagtgcccacagagggggctgcagggccaggctgggccagaccagctgtggggctcagggagggcctggctggaagaagggggtctgggcagcccctctctcagcctgagggaggctgaagggtctgcagtcccagtcgctcccccatggccaagctggcacttccctccaacaggcacagaatccccagccccagacacctgct

SEQ ID NO: 438136 - DNA, 414 bp, Homo sapiens
gcaaaaaagagaaagaccttatgggcaagcaattcaaaagcctctgtgtgtctactctttgttagtgtttcgattggccagarcaagtccattggccaacccagattgaagaggtggagaaataaacttccattcctgatggaaggatttgaaatgccaaatcacaaaagtacgaatgcagaagggaaagaatttatggttattttacaacctaccacatgtacacttaatatttatatattttaccatatgcaagttatatattaatacaacaaatagaaaaatatggggtttgagtcacatgatgacaacaggtactcttggtgtcagtatgcttgtaggtttccttgttagggtccctgttttctacatggcccctaattctgcagagacagtgttgttacaagatgcatg

SEQ ID NO: 438137 - DNA, 643 bp, Homo sapiens
agctagcatatgtaagtgaacacagacatagagtaagcaaattgaaaacatgcaaattttcctacttggtcmtgaggtcatcattgatatgtatggctacctttctccacccttccttccatattccccccgccagcttccccgcccccagtctcaacccaaagctcagatggagatgtcagtattctccgcttggtggagtcacccaaacttccattactgaaggctctgctatccagccttcatttgggcagggagtaggtttctgtggttttccattaatctttactatgggacgtgggagcactaagaggcacctcagagaatcccctgatttcaagacggggtcttcttcccgacactgcagcagcatcccagtctcccactggtaattgggagcaatcattccagacagcagattaacctctttcttccctgttggttcagtggcacaggcccaaaatggccaggtggcagtctcgttttctgattcagtggaaccattgctgtgtccctgggagctaagccctctaagccagcagagaacacagttgccacaatgtgaccaggaacaaagtccttgtgggtgggttattaggtgtcattgtggcaggagccacgccaccttctaccccttgtccct

SEQ ID NO: 438138 - DNA, 643 bp, Homo sapiens
agctagcatatgtaagtgaacacagacatagagtaagcaaattgaaaacatgcaaattttcctacttggtcatgaggtcatcattgatatgtatggctacctttcyccacccttccttccatattccccccgccagcttccccgcccccagtctcaacccaaagctcagatggagatgtcagtattctccgcttggtggagtcacccaaacttccattactgaaggctctgctatccagccttcatttgggcagggagtaggtttctgtggttttccattaatctttactatgggacgtgggagcactaagaggcacctcagagaatcccctgatttcaagacggggtcttcttcccgacactgcagcagcatcccagtctcccactggtaattgggagcaatcattccagacagcagattaacctctttcttccctgttggttcagtggcacaggcccaaaatggccaggtggcagtctcgttttctgattcagtggaaccattgctgtgtccctgggagctaagccctctaagccagcagagaacacagttgccacaatgtgaccaggaacaaagtccttgtgggtgggttattaggtgtcattgtggcaggagccacgccaccttctaccccttgtccct

SEQ ID NO: 438139 - DNA, 643 bp, Homo sapiens
agctagcatatgtaagtgaacacagacatagagtaagcaaattgaaaacatgcaaattttcctacttggtcatgaggtcatcattgatatgtatggctacctttctccacccttccttccatattccccccgccagcttccccgcccccagtctcaacccaaagctcagatggagatgtcagtattctccgcttggtggagtcacccaaacytccattactgaaggctctgctatccagccttcatttgggcagggagtaggtttctgtggttttccattaatctttactatgggacgtgggagcactaagaggcacctcagagaatcccctgatttcaagacggggtcttcttcccgacactgcagcagcatcccagtctcccactggtaattgggagcaatcattccagacagcagattaacctctttcttccctgttggttcagtggcacaggcccaaaatggccaggtggcagtctcgttttctgattcagtggaaccattgctgtgtccctgggagctaagccctctaagccagcagagaacacagttgccacaatgtgaccaggaacaaagtccttgtgggtgggttattaggtgtcattgtggcaggagccacgccaccttctaccccttgtccct

SEQ ID NO: 438140 - DNA, 638 bp, Homo sapiens
tccctggggcagcaggcccctgcgttatcgtgggactggtttcccacactctacttggcatctgttttaccagggaatctgatgtgcttgctacatcctgttcctgggatccaatccacatgtgattaatgtaggagaccagtgtgcattttgtaaaatgtacagacaagcaagttcgctgcagactatcactgacacatcaggggactcgctcagactcagactgtgcggctcggccccaggcccagctcccgtcctcccaggcctgcacagtgactcagggttacagaagattctccaggagagcagacaccccagcgaagtcttagaaaggagaagtgcacacttatcccggttcctgtatttcaggacttttcgttaattcattcacccatctatcatcacaggatgagtagctaccgtggcccaggcactggctgaggccctgggacaccacagtggacagaagaggccccatccctcccctcggggagcccacatggtaatggggagagatgacagacacataaaggactgaccagctgtggggcatgtgggtggcgatgaggtcagggacacaggacaggtgaaggggcagygcatgatgggagggagtgggacagtgacacgtgagacgc

SEQ ID NO: 438141 - DNA, 549 bp, Homo sapiens
gttgctggtgaagtcaggcagtcctgggtttcagcttcagctctgtgaatggctaacaaggtggacttgggctagcatttgtgtcactctcagcctcagctttcccatctgtaaaatggagatgattggtatcaagtggggctggtaaggggattccaagagaaagccccatcacgtgacacatagcagatgttcaatgacaggtttgtactggagaaaaggctcttcttttgctaccgcagatgtttcctgatcacctgatgaccaggatttattggcatgttggtaaagccactgtgtccgagtcccaggtcgcccaagagccagctgtgtcctctggggcaaatcacctcttccctgagggtgggaggaagtggtcaaggtagagcaatgttgttcaatcaggaaagtgggatttttctcaatttcaaacattcctttcagtgcagacatttaacaaattaatttttcaaagacagtcaggcatcaactcacaacacctgacrcctcctacccccttcccactcttcccagtttcctaagcaaacc

SEQ ID NO: 438142 - DNA, 495 bp, Homo sapiens
cagactgtagggtgagaaaaagtccccccaaaagcttaacsctttactctccagctgcagcagacctgggcagccaacgtcagggactctcctcagttttctcattgctgacaatgatgagggggccacgcacggggaaaagactcaaagaataaaataaacccatggggttcagcccagtcgattccttaaaaccagtaagccagtgccctgccctgcagtgtagtgtgggctgcacgtctcagtgctcagagggtagggacatgtgtctgtattcacaggcaggagcagggaaggcagaggtgggagcacccaccttctcctctagggagaacactggagtgagtgaggggccagaggtctgggctggtgatcccaggtccatgcttgattcttctagaactcagatgtctttcttggaggcaggtagcatgcagaagtcaagagcctggagcagagtacagtagccttgggagggtttaaggttaggaagag

SEQ ID NO: 438143 - DNA, 443 bp, Homo sapiens
gtaaagttccactcacatcatatcaaggctacagactatcaacatgattgatgattattgatgctgaccttagtctcctggctgaagtcatgtttctcaggtttctccactgtaaagttactcttttgctcctcttttccatactgtagtctctggaaggaagtcattatgagtagtccacatttaaggagtggggagttatgctccatcgttgaggggaagagtatctacataaattattgggaattcttctttacaataaatttgcctcttctccacaatttagtaatttattcaatcatttatatcagcatgracttatggatatttattttattttggtggttataatccaatatgattatttattttgttgctcaatttgttcaagttttggccatcttttgctgtagattagcatatttattatagttatttcaaag

SEQ ID NO: 438144 - DNA, 599 bp, Homo sapiens
atatcagccaccagcatagcccatgcataaagctgagctggttgcttttagaagcacggtgtgtagttcacagtgaccagcttgcagtctttggtggtacttctgtttctgctagctgtgatgcccagttggagatatcaggaaccagtgtagcccatgtasaaagctgatctggttgctttcagaagcctggtgggacgttcaaactggcttgagtccctagatggcttgtcttcaagcccattatcagagccgatcccaaagacctgcctaggcagggagacaccatcttctgtgcattttggtgaagaataacagctagttttgcttaactcaggaggacaaacagtggttccactcagccagaacgccttccccatggtctcacccaagggaaaagatgcccaccttgcctatttaggggaagcatgtgagctatttttaaataaaactattaataacaactacagctaaaatacattatcaagggatacgtattacaaaatgatgaaaattctgacatccaaaacaaaatgtgtgtatggtggggtgagtaaagttagagttgtcgcatgaaatcaaagttgttatcagcttga

SEQ ID NO: 438145 - DNA, 561 bp, Homo sapiens
gcatctaaatgtataaagcaaatattaaatgatctgaaggtagagaaagattgcaatacaataacagtagaggactttagtgctccggtttcaacaatggacaaatcatccaawcagaaaattaagacggaaacattggacttgaataatacttcggaccaagttaacttaataaacatatacagaatattccacctaacagcaacataacacatattcttcgcaatcacacatggatcatcactaaaatagatcacacattaggctacaaaacaagtcctaacaaatttaagaaattttaatcataccaagtatcttttctgacaataatggtataaaactagaagtcaataacaggaataatttcagaaaattcccaaatacatagaaatcaaacaacatgctcctgaacaaccaatgggtcaatgatcaaattaaaagagaaatttaaaaatatcttgagacaaataaaaatggaaacaacatattaaaacttatggaatccagcaaaaatagttctaacagaaaagtttatagaaacagaaaccatatcaaaaaaag

SEQ ID NO: 438146 - DNA, 561 bp, Homo sapiens
gcatctaaatgtataaagcaaatattaaatgatctgaaggtagagaaagattgcaatacaataacagtagaggactttagtgctccggtttcaacaatggacaaatcatccaaacagaaaattaagackgaaacattggacttgaataatacttcggaccaagttaacttaataaacatatacagaatattccacctaacagcaacataacacatattcttcgcaatcacacatggatcatcactaaaatagatcacacattaggctacaaaacaagtcctaacaaatttaagaaattttaatcataccaagtatcttttctgacaataatggtataaaactagaagtcaataacaggaataatttcagaaaattcccaaatacatagaaatcaaacaacatgctcctgaacaaccaatgggtcaatgatcaaattaaaagagaaatttaaaaatatcttgagacaaataaaaatggaaacaacatattaaaacttatggaatccagcaaaaatagttctaacagaaaagtttatagaaacagaaaccatatcaaaaaaag

SEQ ID NO: 438147 - DNA, 561 bp, Homo sapiens
gcatctaaatgtataaagcaaatattaaatgatctgaaggtagagaaagattgcaatacaataacagtagaggactttagtgctccggtttcaacaatggacaaatcatccaaacagaaaattaagacggaaacattggacttgaataatacttcggaccaagttaacttaataaacatatacagaatattccacctaacagcaacataacacatattcttcgcaatsacacatggatcatcactaaaatagatcacacattaggctacaaaacaagtcctaacaaatttaagaaattttaatcataccaagtatcttttctgacaataatggtataaaactagaagtcaataacaggaataatttcagaaaattcccaaatacatagaaatcaaacaacatgctcctgaacaaccaatgggtcaatgatcaaattaaaagagaaatttaaaaatatcttgagacaaataaaaatggaaacaacatattaaaacttatggaatccagcaaaaatagttctaacagaaaagtttatagaaacagaaaccatatcaaaaaaag

SEQ ID NO: 438148 - DNA, 581 bp, Homo sapiens
ttgttggtgatgatatggagtaaagggaaccctgatacactattgatgggaatgtaaattagtacagtcattaagaaaaacgatatggatgtttctaaaaaaatcaaaaaatagaattaccatatggtgcagcaatcccacttttgagtctgtatctaaagaaattgaaatcagtacattgaagagatgtctgcacttccatgttcattgcagcatttattcacaatagccaagttgtggaatctacctaagtgcctctcaacagrtggatggataaagaaaatgtggtatatatacacaatggaatattatccagccttaaaaacaagtcatttctgccatttgagacaacatggatggaactggcaaaatgagccaagcgaagactgacaaataccacacattcccacctgtatgtggactctaaaacaactgaattaatagaagcagagagtagaatggtagttaccagaatgtgagcgtgggagaaatggagagatgatggttaaaggataaagaatttaatttagacaggagtaattaggttttgtgtggttttttttttgacatttattgcactg

SEQ ID NO: 438149 - DNA, 581 bp, Homo sapiens
ttgttggtgatgatatggagtaaagggaaccctgatacactattgatgggaatgtaaattagtacagtcattaagaaaaacgatatggatgtttctaaaaaaatcaaaaaatagaattaccatatggtgcagcaatcccacttttgagtctgtatctaaagaaattgaaatcagtacattgaagagatgtctgcacttccatgttcattgcagcatttattcacaatagccaagttgtggaatctacctaagtgcctctcaacagatggatggataaagaaaatgtggtatatatacacaatggaatattatccagccttaaaaacaagtcatttctgccatttgagacaacatggatggaactggcaaaatgagccaagcgaagactgacaaataccacacattcccacctgtatgtggactctaaaacaactgaattaatagaagcagagagtagaatggtagttaccagaatgtgagsgtgggagaaatggagagatgatggttaaaggataaagaatttaatttagacaggagtaattaggttttgtgtggttttttttttgacatttattgcactg

SEQ ID NO: 438150 - DNA, 578 bp, Homo sapiens
tgaacataacattacttagcactttataaatatatacaatcatacattgtcaatttacaataagttttcttattaaaaaaatttaaagtacttattttaatgtcagttatgtacaatagatttttttttaataatggctagagagttgttcttatttgtattgaaatgttttctggatcatccatttagtcccattgtctgctgatttttattatactcagtgccatactttaaaatgattataatttacattttgttgtgttatctggtactataattttttccaaatacattgtgatatggtttggctctgtgtccctgcccaaatctcatcttgtagctcccataattcccatgtattgtaggagggacctggtgggagatgattgaataatgggggcaggtctttcccatgctgttcttgtgacagtaaatgggtctcatgaaatctgatggttttaaaaatgggagttgccctgcacaagttctctctttgcctgatgccatccatgtaagatgtgatttgctcctccttgccttcygccatgacttccccagccacgtggaattgtaagtcc

SEQ ID NO: 438151 - DNA, 500 bp, Homo sapiens
acccccaaatgccaaggacctctgatacaggtcacatttgacagtttactttaaaagtaaacgggcttccaaaggtacccatgttggggaggtcttgtaattcatggcaacatcctgtccctgagtaaaaaataytaacatgaagagtcctcttcccttcttctaaactttcctatatgttcctataaaagccttccaacttgtagcagattctggaaaactcccaactgtgttggtatgtcttccaggatttatcctcatatttgtcttccaatatacttttatcaaattttttgtctcagccttattttggtggatacttctaaaaattctttctcatgatccaggtacgaagggaactataaagtttaaactttgtactgaattaagctgaattaagaactctaataaaagatttccctaaactcaaataaggttggcaaatattcatagaatttagaattcttttggatgaacatgacccagggttacctgattgt

SEQ ID NO: 438152 - DNA, 500 bp, Homo sapiens
acccccaaatgccaaggacctctgatacaggtcacatttgacagtttactttaaaagtaaacgggcttccaaaggtacccatgttggggaggtcttgtaattcatggcaacatcctgtccctgagtaaaaaatactaacatgaagagtcctcttcccttcttctaaactttcctatatgttcctataaaagccttccaacttgtagcagattctggaaaactcccaactgtgttggtatgtcttccaggatttatcctcatatttgtcttccaatatacttttatcaaattttttgtctcagccttattttggtggatacttctaaaaattctttctcatgatccaggtaygaagggaactataaagtttaaactttgtactgaattaagctgaattaagaactctaataaaagatttccctaaactcaaataaggttggcaaatattcatagaatttagaattcttttggatgaacatgacccagggttacctgattgt

SEQ ID NO: 438153 - DNA, 560 bp, Homo sapiens
atgggttttttttttcggacagccctagtgttgcaggacttttccttagttcagctaaagacggggttcttgtccaccccacggacatgaaaatttaggcttccaggaggtttaaagggtgagtgaagcagggttttattgggtgaaaagggaaaaaagaggggaaayagggactctcgcaaagccagagtccctctgctagagggctttccgccaggcacttgaatctgaggttccacccaggaagaggaggggccaggctcgggctcctccctgctgcaaaagtcctgaatttccccaggctccacctcagcttgttggagcctggcttgttggagtttctccaggaccccctcccacctggctgtctcactagcagtctaacacactgacctatgtgtgacctatatcaacttgtagtcatgttggttaaaatctgaaatgctaaatcctggatgacaaaagctggttatgctttcctggaaagggagctacagaatccttctttccacagtaaatctgagggtcaaaaaaaaatttttttttaaaggctgtaagag

SEQ ID NO: 438154 - DNA, 652 bp, Homo sapiens
ttgagtccttgtgtatgatttcaaatataggatttagttaaagatcatattaaaagttagtactataaataagcatgagttgaattgctctgtaggtaaaacattgacctcatacttaacctttactttgcaaactttatggttcaacaaaaatgcatgcatcatgattttgagttaagtttaatggcagttgtttgacactctgaagttgctcattcatgttgtttcttggggagagggagctggacaggcaaattttgctccttggacttttagagtatgttacatattggctccaatgatttgcttctcatctggatatcccatatgtctttttgaagtctcttgctctcattctcgaatccctccttgagaaggcgttcctgttcctaaaagggaaagtggagactaagcctatccagcttaacacatttccaccarattagttccccttttggtacttatattgatccttcaagaatttttgactatcactctcttctgagtctcctatacctgccaataatttttctatgatttttttagcttcaaaaatgttgttgttctacagtttctaaaatattagtgacccagcgttttattccttggtcccttcaccatttgcactcatgcaacacagtctttctggaaa

SEQ ID NO: 438155 - DNA, 569 bp, Homo sapiens
atggagcaagtagtgagaattggctagtctagagaaataactttgatagtggagctgaaggagtttgatgattaataatttccaaaacataaggaatggaatcatccaagatgattcctaagtttttgatctgagcacttctatgaatgatgtgggaatttattgtgattagaaagactgggaaggagttgttttggacaggraaattaagttttgttctgtacactttaggctcaagatgtctcttacacatctgaatggagatgttgcaccagaagctggatacaaaagtttgaatttgctcatgcttgggaatacagatttgatggtgataaacatattggtgctactgaaagccttgaagctggatgtgatcatctggggactgaaagcagaaaaagaaaagaggcacaagaacttaagtgttataatatttagaggctaaaaggagaaagaggatagagtaatctgaaaaagtctaccaataaggaaggtggaaaattaggaaatgtggtattctaataggaaccaattccaagtgaaacaggcatttcagaaaggtggaaggg

SEQ ID NO: 438156 - DNA, 606 bp, Homo sapiens
gacttttcataccttaagtagattagcataagtttggttgcatgagaggtttgattacatagagtagattcacagacacaagagactgtagtgattgatggaaggaactttggaaatgaaaatcttcaggctcacttaaaacctgttcttcagtagtcactttttcactaattctgcaggcaagaatccccaaatccaaaattctaacaagcccagggagtggatcaggcatttctttccaaaacagaagtgctttgtctttgaccggccaataaatgacaaaaaactcttactccatgttgaagaagtacgagaagaccaactggatagtaatttccagatgcaatcagaaaatttctgttcttatatcttcacccatgcaaagaccaagaccctgagagagggaatccttgtcactggaaaccgtgagtctatttccctatatgggtgtttactgargcctactgtatctcaaaaactagtaaactaagcttatgagcacgaacaactggtaaggagataacatctgtgttatgaggtgtgggataagtgaaggattttttctcagtgagggtataaaagctgtattgtgaatttacacaaaac

SEQ ID NO: 438157 - DNA, 533 bp, Homo sapiens
ctcggggtttttttgttgttgttgttccatgtggatgttagaatagtttttactaattctatttttaaaaagtcatcgataatttgataggaatagcattgaatatgtaaatcaatttgggcagtatggctattttaacaacattgattcttcctatccatatgcatgaaataattttccatttgtttgtgcagtctcagatttctttcagcagtgttttataattctcattgtagagatgcttcacctccctgattggctgtaaacctaggtattttattcttggttattcacaatagctattgtgaataggattgtgttctyggtttgactttcagcttggacattattggtgtgtagaaatgctacttatttttgtacatttacttttttatcctgaaactttgctgatgtttatcagatggatgagactttgggcagaaattatggagttttctaactacagaattctattgtctatgaagagagagagtttgacttcctctcttcctattggataactttttttttcc

SEQ ID NO: 438158 - DNA, 488 bp, Homo sapiens
gtatattctgttattgttgggtggagtgttctgtagatgtctgttaggtccatctggtcaaatgtcaagttaggtcctgaatatcttcgttagttttttgcctcaatgatctgtctaatattgtcagtggagtgttgaagactccaactattattgtgtggttatctaagtctcttcataggtctctttgaacttgttttatgaatctagggtyctctagtattgggtgcatacatatttagtataattaagtcttctcgttgaattgaaacttttatcattatgtaatgcccatctttatcctttttgatcattattggtttggagtctgttttgtctgaaataagaatagcaacccctgctctttttgttttccatttgcttgatagatttttcttcatccctttactttgagcctattggtgtaattgcatatgagattggtctcttgaacatcgaagacagttgggtcttatttctttatgcaa

SEQ ID NO: 438159 - DNA, 536 bp, Homo sapiens
taggttgccaagttatgacctcaacttgtgtttcataactccaaatccactacatagactctattatcaaggactggaataatcagtcttaaagtgggttgtcagacatatcaaaagcaaaacaaagataagattgtcaagatgaacacaaatataatatacttagttgaaaaaaaggatacattaaaggattttaaactacttakaaagtcttactttcttgtattccatatagggagctccatttagttataaagaattgctgccacagcatggatttgatctttgatctgatttgttcaagattttgggaggccaagcagtgattgcaaattcttatgaaaatctcttgttctttcctcttccaaggcattatgaagccagaaggaagctcctctgatgtgtgcactccagaagtctttcactcttttgtcaatatggttttgtcacactctcttgagtctttctatgcatttgtcctcttcgcgcaggcagcattaaccagggtgacctcagcaccatagtaaattacattc

SEQ ID NO: 438160 - DNA, 536 bp, Homo sapiens
taggttgccaagttatgacctcaacttgtgtttcataactccaaatccactacatagactctattatcaaggactggaataatcagtcttaaagtgggttgtcagacatatcaaaagcaaaacaaagataagattgtcaagatgaacacaaatataatatacttagttgaaaaaaaggatacattaaaggattttaaactacttagaaagtcttactttcttgtattccatatagggagctccatttagttataaagaattgctgccacagcatggatttgatctttgatctgatttgttcaagattttgggaggccaagcagtgattgcaaattcttatgaamatctcttgttctttcctcttccaaggcattatgaagccagaaggaagctcctctgatgtgtgcactccagaagtctttcactcttttgtcaatatggttttgtcacactctcttgagtctttctatgcatttgtcctcttcgcgcaggcagcattaaccagggtgacctcagcaccatagtaaattacattc

SEQ ID NO: 438161 - DNA, 566 bp, Homo sapiens
tccacttttctatatgtgtatttatgcttcaaagtaatttacttatctaacaaaatatggaaataaatataacmaaatatgccaaggactatacactgaaaactatgcaatatgccaagggctaataaatggtggaacatatcatggttatggactggaagactgactattttgtgagtctaatttttccacaaatatatctatatattcaatgtaattgccagacttatacatatagtgagttgatttatggtaacgatagtgaaaggataatcttctcaataaatggtgtcaggccttctatacacgttagaaagaaataaaacctggttcttaccctcctgacattaaaaataaggcaattccaaatggattatagatctaaatgtggaagataaaacaatcaaacttatagaaaaaaaaagtcaatgacattattttcacattctccagattgggaaactgatacaaaactataatattaagtgtaaaaaaaaaaagtcaatacatttaactacattaaaattgagaactgacaaagatataattaagagactgaaaaggca

SEQ ID NO: 438162 - DNA, 566 bp, Homo sapiens
tccacttttctatatgtgtatttatgcttcaaagtaatttacttatctaacaaaatatggaaataaatataaccaaatatgccaaggactatacactgaaaactatgcaatatgccaagggctaataaatggtggaacatatcatggttatggactggaagactgactattttgtgagtctaatttttccacaaatatatctatatattcaatgtaattgccagacttatacatatagtgagttgatttatggtaacgatagtgaaaggataatcttctcaataaatggtgtcaggccttctatacacgttagaaagaaataaaacctggttcttaccctcctgacattaaaaataaggcaattccaaatggattatagatctaaatgtggaagataaaacaatcaaacttayagaaaaaaaaagtcaatgacattattttcacattctccagattgggaaactgatacaaaactataatattaagtgtaaaaaaaaaaagtcaatacatttaactacattaaaattgagaactgacaaagatataattaagagactgaaaaggca

SEQ ID NO: 438163 - DNA, 577 bp, Homo sapiens
gttgcacagacacctcagtacttggatacagttgccttttattgcaaargcaagatgcaaggacaggcagtgtgaggaaacgtccctggggcctgagcagcattgcccaaaagagtggatgttgagattgcagcttgctgtggctgcactgaacgctggggctcaagtgatggggtgtctgtgtgcactttagtaagtgtatgtgtgtatgcctgtgtgatgtctaggggctatttaaagtgtgagaactggctcatggcctcccttgccctgaaggcaacactacagaaaataaacaagtgttactatggacaaatatttattgggattattttttctgcagttcacaaatccttcttacaaatatcattatccagatttttttctcttgttgactttgaatctattctgagtgtttctcagtactttacccatcttaaatgacttgacttttaaacattgagcctatgtcagttttgacatccatttgttacagaaaatagaaggagagggatccctcctttctcatcaccagggccaattccaaatttgacagcccatcctaaaacagggctgc

SEQ ID NO: 438164 - DNA, 515 bp, Homo sapiens
ggttaataccgagtcattgattccttacaggggtagctcttgtggggcaggatctgtgacagggcctcacttcccaataccttcacccaggtgacttcacgcttcccttgggaaggcaccttgtagcttgcaaaatgcactcactccactctctgattatctgattctcccaacasccggcaaggtcagccttattatcctcatctcagagacatgagaacatgaatggggaggtgaggtgacttggacaacttgcgagtgaaggaagtcagactggattccatcttcagattccaaatgccaggagctggcatgcagtgagagattgcctgtgtcaggcacactttctgtgcttcctttgtactaacttgatttttcagaacaactcaatgaaggagccattactgtttaacaggcagggaaactgaggcactctcagtgtatcacacaaggtgggctggcatctggggccagcttggagtccagaatcttcatcatctcgctcctgcctccca

SEQ ID NO: 438165 - DNA, 515 bp, Homo sapiens
cagtcattgttatattacaaacagacttgcatgattaaccagttgttacacttactttttcaagttggagtatatatgactcagtgcagactggtctctcttatgtgaatgcacacatgcagaaatgcagagtcaattttacatgcccataaagacatttgtaaagaattcagctcttatggtctgttgtataaatgtgtatctaggcactttggaatttgacctcacagatgttacaacttgatcagtcrtttgacctaatttgtggtagctatctgtatgttttgcaatcttaatacagacatgctttccaaaaagattaatacagaaccatcctgccgttttggataagtctatccagctgtggaaagggcaacctgtggtttctctgtactggtgtttaatgggggaagaatatgaacagctttaaagagctgtgtattgtggttactactattaaaaaataagatctgcacgagtctgactggcctttgggtggcctttgtggacggctc

SEQ ID NO: 438166 - DNA, 587 bp, Homo sapiens
tcctgccgttttggataagtctatccagctgtggaaagggcaacctgtggtttctctgtactggtgtttaatgggggaagaatatgaacagctttaaagagctgtgtattgtggttactactattaaaaaataagatctgcacgagtctgactggcctttgggtggcctttgtggacggctcgtagctggaaagtgttgatctgggttttctggcattcttttaagttaaaaagttaacatcgggacakgggtttgatcttttgttgtacctgatgacagtgcagagattctccacagctggataaaaatgtcacaaagctacttactgtacatgggcagtatcagatttcaaatcctaatatttcagctgtgcttttaatactcaaaatattaggggatggggtgttgaagctttcccttttttgcttttaacaatttatagaatttaacagatgtactgtctttcatgtggcctcacatttaaagttatgagaacatacacatggtttacaacttttactatatacctttccttggccaccaagtattttaaaagtgtgccaccttttaacctttacttttttta

SEQ ID NO: 438167 - DNA, 550 bp, Homo sapiens
cggaaacatttcgccagagctcagggcctcaatttattttaatgcatggaaagagtttattaaaagtgaacctcaaattactgaggttttgccttcttttattgtatgatttttaaagtatttgccatactagtaagagttctgcagagaagtgacatgtgggagtagagattgtctgggtcagactaaatcagcatttctttggcacagscttgtcttgggccgtctgcctgagccgactgtatgtgtgagctgcaaaacagaaaaaagctgttgagagtcttagcccaggctaagagcccattacccccattttgttatttctgcctgcaaacagcagttcaattagcttttctggtgataaaagataaagatttattgtaccccatatacaattgaaatcagaatttcacaggagggtcacagtcattagagaagttttggaatactattctcctaataagcaccatatgggttgttgctgttataatttaacacctactaagcaggcatctcattctaggctttgaacagctgagaggctagctcc

SEQ ID NO: 438168 - DNA, 537 bp, Homo sapiens
gagtttattaaaagtgaacctcaaattactgaggttttgccttcttttattgtatgatttttaaagtatttgccatactagtaagagttctgcagagaagtgacatgtgggagtagagattgtctgggtcagactaaatcagcatttctttggcacagccttgkcttgggccgtctgcctgagccgactgtatgtgtgagctgcaaaacagaaaaaagctgttgagagtcttagcccaggctaagagcccattacccccattttgttatttctgcctgcaaacagcagttcaattagcttttctggtgataaaagataaagatttattgtaccccatatacaattgaaatcagaatttcacaggagggtcacagtcattagagaagttttggaatactattctcctaataagcaccatatgggttgttgctgttataatttaacacctactaagcaggcatctcattctaggctttgaacagctgagaggctagctcctaccttttgtgcagcttaaagtcaaagccacaggtagga

SEQ ID NO: 438169 - DNA, 566 bp, Homo sapiens
taaattactgtgtgtttaaaggtttctgattttaatctaataactgaaatatcaaactatattttaattcaggcatttgggcatcactaccasgtgttctcatcagatttaggaaccctgcagcaagatttatcagtgtcaaaatgctaaaatcctaaatttagtgccagaatccctctcaaatggcatttatattttgatagcttaacctactttgaatcccctgagcatcttgtctgtttttattagtagattttgctgatcttttttaacttttcaaaggctctttaaattatcctaaagtcatatatttaccatgagaaagcaggtgtctttttagagtgtagatgcttaagtcgctcataaaattaatttcctcgggttaggagaacattttgaaactctaatttgaaaaactctaatctggcttctaaaaacactgtatcagtattcagaaataataaaaatggaaacataacaacataataaatttaatttaacctagcatagcaaaagagtagggcatttttgcataatcagctagatagttttcagaggcaaacaca

SEQ ID NO: 438170 - DNA, 566 bp, Homo sapiens
taaattactgtgtgtttaaaggtttctgattttaatctaataactgaaatatcaaactatattttaattcaggcatttgggcatcactaccacgtgttctcatcagatttaggaaccctgcagcaagatttatcagtgtcaaaatgctaaaatcctaaatttagtgccagaatccctctcaaatggcatttatattttgatagcttaacctactttgaatcccctgagcatcttgtctgtttttattagtagattttgctgatcttttttaacttttcaaaggctctttaaattatcctaaagtcatatatttaccatgagaaagcaggtgtctttttagagtgtagatgcttaagtcgctcataaaattaatttcctcgggttaggagaacattttgaaactctaatttgaaaaactctaatctggcttctaaaaacactgtatcagtattcagaaataataaaaayggaaacataacaacataataaatttaatttaacctagcatagcaaaagagtagggcatttttgcataatcagctagatagttttcagaggcaaacaca

SEQ ID NO: 438171 - DNA, 553 bp, Homo sapiens
ctatgtctataattctgcagctaaacataggtagagatcaatacacaaccatcatttctcatcttaaattcataaccacaaacctcatagagatctgttaatgctagtcaggcaattacactgtttcccattcctttaattccttcactatcctgtttcaatttcacacctttttctgctttcttatatgtaaaacacctcctccctgtccttactytcaagtgatcactgtacatcttatttcatgaagaatattcaaatgattaaaagaaaacatcacagattcccatcaccacgtctgcccccacaccgtttacaaacccacactccctgctgcccatcttgttgccccgggtgaactatctgaactactatctaaagtcagtttcttcccacgtgcactacattccagcagcttttacttagcaaagaacattttccagcaatttccttatctctccttaacaccattttctccccttttcctactggatcattctcatcagcatgtaaacaagttattacttgtttcccaacctgaccacatttttca

SEQ ID NO: 438172 - DNA, 553 bp, Homo sapiens
ctatgtctataattctgcagctaaacataggtagagatcaatacacaaccatcatttctcatcttaaattcataaccacaaacctcatagagatctgttaatgctagtcaggcaattacactgtttcccattcctttaattccttcactatcctgtttcaatttcacacctttttctgctttcttatatgtaaaacacctcctccctgtccttactttcaagtgatcactgtacatctkatttcatgaagaatattcaaatgattaaaagaaaacatcacagattcccatcaccacgtctgcccccacaccgtttacaaacccacactccctgctgcccatcttgttgccccgggtgaactatctgaactactatctaaagtcagtttcttcccacgtgcactacattccagcagcttttacttagcaaagaacattttccagcaatttccttatctctccttaacaccattttctccccttttcctactggatcattctcatcagcatgtaaacaagttattacttgtttcccaacctgaccacatttttca

SEQ ID NO: 438173 - DNA, 538 bp, Homo sapiens
ctttgggacttcttagagcctttaatatgcaaatatgcattgtaaatctttaagagtgagacagaaaatattgtgtttgtcaagcaaaattaagtctgggagcctatttttgaatgagtgtctccagggctttgattccatagagcacacgtctggtaagcagtatggccagatggctcctccttttaggtgagtctctacaaatagggttttgttattgtggctcttttctttcartgaggaattgataggccttctcgtgatcccagattttatttgtaggtctattattgtatttcctatttttgctgaatttgatttttctttaccaatttctctaccactttggaaatgcatcaagaacagtttttgttacctcagtacctaataatgccagtgcctagctcagtatttattaactatttttgaaagaaaaactaaacatagcattttcacaggaagattataaatccatggagcattacagatagttctaaggtattttaaatattccaaggctatgcggaaagttaaatga

SEQ ID NO: 438174 - DNA, 538 bp, Homo sapiens
ctttgggacttcttagagcctttaatatgcaaatatgcattgtaaatctttaagagtgagacagaaaatattgtgtttgtcaagcaaaattaagtctgggagcctatttttgaatgagtgtctccagggctttgattccatagagcacacgtctggtaagcagtatggccagatggctcctccttttaggtgagtctctacaaatagggttttgttattgtggctcttttctttcagtgaggaattgataggccttctcrtgatcccagattttatttgtaggtctattattgtatttcctatttttgctgaatttgatttttctttaccaatttctctaccactttggaaatgcatcaagaacagtttttgttacctcagtacctaataatgccagtgcctagctcagtatttattaactatttttgaaagaaaaactaaacatagcattttcacaggaagattataaatccatggagcattacagatagttctaaggtattttaaatattccaaggctatgcggaaagttaaatga

SEQ ID NO: 438175 - DNA, 538 bp, Homo sapiens
ctttgggacttcttagagcctttaatatgcaaatatgcattgtaaatctttaagagtgagacagaaaatattgtgtttgtcaagcaaaattaagtctgggagcctatttttgaatgagtgtctccagggctttgattccatagagcacacgtctggtaagcagtatggccagatggctcctccttttaggtgagtctctacaaatagggttttgttattgtggctcttttctttcagtgaggaattgataggccttctcgtgatcccagattttatttgtaggtctattattgtatttcctatttttgctgaatttgatttttctttaccaatttctctaccactttggaaatgcatcaagaacagtttttgttacctcagtacctaataatgccagtgcctrgctcagtatttattaactatttttgaaagaaaaactaaacatagcattttcacaggaagattataaatccatggagcattacagatagttctaaggtattttaaatattccaaggctatgcggaaagttaaatga

SEQ ID NO: 438176 - DNA, 538 bp, Homo sapiens
ctttgggacttcttagagcctttaatatgcaaatatgcattgtaaatctttaagagtgagacagaaaatattgtgtttgtcaagcaaaattaagtctgggagcctatttttgaatgagtgtctccagggctttgattccatagagcacacgtctggtaagcagtatggccagatggctcctccttttaggtgagtctctacaaatagggttttgttattgtggctcttttctttcagtgaggaattgataggccttctcgtgatcccagattttatttgtaggtctattattgtatttcctatttttgctgaatttgatttttctttaccaatttctctaccactttggaaatgcatcaagaacagtttttgttacctcagtacctaataatgccagtgcctagctcagtatttattaactatttttgaaakaaaaactaaacatagcattttcacaggaagattataaatccatggagcattacagatagttctaaggtattttaaatattccaaggctatgcggaaagttaaatga

SEQ ID NO: 438177 - DNA, 584 bp, Homo sapiens
ataagctttctccttacacagatattttcatagctcaaccagaaacttttggttaaataagcatagacttgtctaaataatggaatactatgaagctgtcataggtttgtaaagattgctaaggcataaaagtctatttaaaaaaagtacaaagtagtgtggatagtctgctgccactcatgtaagaaagaaggaaaatgagaatttatgtttgtatttgtttgcatttggatagaaaatctccagaggataagcttaaaagtgagtagtgatggtgatgggcctcttggatgggaaagatgagagagtgagagcaaaacttttcatagtatatggtcwcatattattttgatttttatatgaacattctcagtaatggagggcatcaaaatatcagtggctaattccaaagctcctgctattacagaatgacagcatccgatggaggaggatgttcatgtatcaccaaacagctcaagcatggcttcattgcagtgtaacatgcatcatgtcatgtgttattgcttacttaacaaacctcactctatcccacggattaatcaagataaagtagctaaatattg

SEQ ID NO: 438178 - DNA, 584 bp, Homo sapiens
ataagctttctccttacacagatattttcatagctcaaccagaaacttttggttaaataagcatagacttgtctaaataatggaatactatgaagctgtcataggtttgtaaagattgctaaggcataaaagtctatttaaaaaaagtacaaagtagtgtggatagtctgctgccactcatgtaagaaagaaggaaaatgagaatttatgtttgtatttgtttgcatttggatagaaaatctccagaggataagcttaaaagtgagtagtgatggtgatgggcctcttggatgggaaagatgagagagtgagagcaaaacttttcatagtatatggtctcatattattttgatttttatatgaacattctcagtaatggagggcatcaaaatatcagtggctaattccaaagctcctgctattacagaatgacagcatccgatggaggaggatgttcatgtatcaccaaacagctcaagcatggcttcattrcagtgtaacatgcatcatgtcatgtgttattgcttacttaacaaacctcactctatcccacggattaatcaagataaagtagctaaatattg

SEQ ID NO: 438179 - DNA, 584 bp, Homo sapiens
ataagctttctccttacacagatattttcatagctcaaccagaaacttttggttaaataagcatagacttgtctaaataatggaatactatgaagctgtcataggtttgtaaagattgctaaggcataaaagtctatttaaaaaaagtacaaagtagtgtggatagtctgctgccactcatgtaagaaagaaggaaaatgagaatttatgtttgtatttgtttgcatttggatagaaaatctccagaggataagcttaaaagtgagtagtgatggtgatgggcctcttggatgggaaagatgagagagtgagagcaaaacttttcatagtatatggtctcatattattttgatttttatatgaacattctcagtaatggagggcatcaaaatatcagtggctaattccaaagctcctgctattacagaatgacagcatccgatggaggaggatgttcatgtatcaccaaacagctcaagcatggcttcattgcagtgtaacatgcatcatgtcrtgtgttattgcttacttaacaaacctcactctatcccacggattaatcaagataaagtagctaaatattg

SEQ ID NO: 438180 - DNA, 572 bp, Homo sapiens
ttttaaaaactttcaaacctagggaaaatctgaaacagtagtacaataattatacatgtttgctaaaacttttgctatatttgyatttgcatatttttctttttctcttttcatcctgaatctactgagagtaagttgcaaatgttatgacacttcctaaataattcagaaaagaaggaaggaagaaacaaacaaagacacacctgtctgttatccttttaatttctttacttttcaatttaccatgtctttgtgtttaattatcattccaaggataacttaagtaaaattacttgggaaagttttgtttcatagatacttctaacaagataaactgaagtcatttacatgaatgttatttctgaatattctacgaaaatagatttcatttcataatcacttaagaagctatcataaatcaaaagtcttaaaattaaattttataaatgtttaaatgatgcatttttcccaaagagtaattattagctaaataaaaagagaaagtgcatgccaaaacgtgaatagagtaaaattgtaataaagcagcttttattcacttgagttttagaaat

SEQ ID NO: 438181 - DNA, 572 bp, Homo sapiens
ttttaaaaactttcaaacctagggaaaatctgaaacagtagtacaataattatacatgtttgctaaaacttttgctatatttgtatttgcatatttttctttttctcttttcatcctgaatctactgagagtaagttgcaaatgttatgacacttcctaaataattcagaaaagaaggaaggaagaaacaaacaaagacacacctgtctgttatccttttaatttctttacttttcaatttaccatgtctttgtgtttaattatcattccaaggataacttaagtaaaattacttgggaaagttttgtttcatagatacttctaacaagataaactgaagtcatttacatgaatgttatttctgaatattctacraaaatagatttcatttcataatcacttaagaagctatcataaatcaaaagtcttaaaattaaattttataaatgtttaaatgatgcatttttcccaaagagtaattattagctaaataaaaagagaaagtgcatgccaaaacgtgaatagagtaaaattgtaataaagcagcttttattcacttgagttttagaaat

SEQ ID NO: 438182 - DNA, 539 bp, Homo sapiens
cgaattcacaatgagccatgaaggaataggagaccaatggcaaggatatagaagaacctgggcctgaaatatgctagtccttcagtagcrtgacttagataaggatctgtatccctggactccccaatttttggggagactatacctggactattttatttgcctgaacatcttaaataaaaattcaagggaaaagcagtaaaagtacataacacaatagagaaataaatgaagaaaaattaaaagtactttagattttcccaacatgaataaagaaaactgtctgtagagatatctaaattataaagagaagaaagacatatttttttatcatggttaatggagttataactagaaacagagaaagctatatatgtgtatttatttttataggaatgaacatatgtactctctcacaaacaaacacgtgtgtgtgcatatgtgtgtatgtaagagatataccatttatctatcttcctagctctctatataattcctttgacaatatcattactagtagattcaggtactatctctca

SEQ ID NO: 438183 - DNA, 539 bp, Homo sapiens
cgaattcacaatgagccatgaaggaataggagaccaatggcaaggatatagaagaacctgggcctgaaatatgctagtccttcagtagcatgacttagataaggatctgtatccctggactccccaatttttggggagactatacctggactattttatttgcctgaacatcttaaataaaaattcaagggaaaagcagtaaaagtacataacacaatagagaaataaatgaagaaaaattaaaagtactttagattttcccaacatgaataaagaaaactgtctrtagagatatctaaattataaagagaagaaagacatatttttttatcatggttaatggagttataactagaaacagagaaagctatatatgtgtatttatttttataggaatgaacatatgtactctctcacaaacaaacacgtgtgtgtgcatatgtgtgtatgtaagagatataccatttatctatcttcctagctctctatataattcctttgacaatatcattactagtagattcaggtactatctctca

SEQ ID NO: 438184 - DNA, 286 bp, Homo sapiens
agattggtgtatgcaatttccaagtaaactccaaggcagtgaaataygaaagtttaaaaaaaccaagtttccaaaaatatcatagaatttctgaaatatgtatatatcatagagtatatttctatgtaatcaattagtataaacatgccaaaaatattagctattaattaaattggagctataaaataagactattcattgagagttttacatggtatctctgtaaacatgattaaagttctaacccattgtgagatgaggaataggctgcctagcaactgtttta

SEQ ID NO: 438185 - DNA, 286 bp, Homo sapiens
agattggtgtatgcaatttccaagtaaactccaaggcagtgaaatacgaaagtttaaaaaaaccaagtttccaaaaatatcatagaatttctgaaatatgtatatatcatagagtatatttctatgtaatcaattagtataaacatgccaaaaatattagctattaattaaattggagctataaaataagactattcattkagagttttacatggtatctctgtaaacatgattaaagttctaacccattgtgagatgaggaataggctgcctagcaactgtttta

SEQ ID NO: 438186 - DNA, 444 bp, Homo sapiens
cctgaagcagacaggagaaagtcattgaaattgcttcaaattacctgagaaattgccataatttgcaacttcacaatgcaagcctggatytcccaagttagctctgatctcaatgatgagtttaaatgccaggatgatattttaactatgcagagtcataggcatacatgaaactccattagtttagaatctaatgaagacttatgttgacatatcattctatgtatttcagcatattatctactaagacattataagaacaaaaccccccaaaattccattcttttttgaggtagggtggctttttctcttttaatatttttttacatttgagttcttcatgtttcctgaaggtaaatgatgcatgagaaaacttggaatatcttgactagcattttaaaagcatattaaatattattttcaaaactgaactatgaatagttc

SEQ ID NO: 438187 - DNA, 444 bp, Homo sapiens
cctgaagcagacaggagaaagtcattgaaattgcttcaaattacctgagaaattgccataatttgcaacttcacaatgcaagcctggatttcccaagttagctctgatctcaatgatgagtttaaatgccaggatgatattttaactatgcagagtcataggcatacatgaaactccattagtttagaatctaatgaagacttatgttgacatatcattctatrtatttcagcatattatctactaagacattataagaacaaaaccccccaaaattccattcttttttgaggtagggtggctttttctcttttaatatttttttacatttgagttcttcatgtttcctgaaggtaaatgatgcatgagaaaacttggaatatcttgactagcattttaaaagcatattaaatattattttcaaaactgaactatgaatagttc

SEQ ID NO: 438188 - DNA, 596 bp, Homo sapiens
aaatacagattttgtgtgtgtgtgtcactagtgtgaaaaaagttgtagtggagagcttggtatgtcaggcaayggtgctaggagaggctgtcttttgggaaatatttcataaaatgggaaacacttggaagaattggtagtttgataaactccataaaagtgagttgagtgttggccataggtgagaacagcatggaaggagtggagggagtggagagaaaagaatgtgtcccaggagaaataaagggctgcaatatttcaatgtacagagacctgagtatgtttgggtttaggagacactgagttacacagaggaataaaatatatggtcgaaggtaaaaagcggcttgggtgaggctggagacagaatcttaaatggagttaatacattattctatatgttcttctgaaggatcaaaaaatattattctctaactttccccaaaatagtaagcatcataaaagtacttttctaagacagttgatccgtatgcaattagcaaagtaaaacagactggaagaaataaaaatattacaaaattggtaaactgttattctgtgtttacataagacaagcttcctaaaacactgcaaag

SEQ ID NO: 438189 - DNA, 414 bp, Homo sapiens
acaacactattcctatccctttgtgagcaytgaagacttttccctcataccctttcaggtggttcttttcccaaactcaagtagttttctcacatgcactgagcagtactcagctgtatgtacaagggggactctggagatttctggggttatttctttgtatagctctctctacttcagtactgtgctgtatacatgccagccaccttgatctccctgcaattccagctcctcaactcaaagttctgtgttccacttgtgttcccattctgtggtataagaataaatgcatatttactgtttgttccatttctggtacaaagcagagcctaaaagccttgtaatttcctgagtgataggagtgtcttttgttaataataacaaacttctttcaaccacatttgaatttatgct

SEQ ID NO: 438190 - DNA, 414 bp, Homo sapiens
acaacactattcctatccctttgtgagcactgaagacttttccctcataccctttcaggtggttcttttcccaaactcaagtagttttctcacatgcactgagcagtactcagctgtatgtacaagggggactctggagatttctggggttatttctttgtatagctctctctacttcagtactgtgctgtatacatgccagccaccttgatctcyctgcaattccagctcctcaactcaaagttctgtgttccacttgtgttcccattctgtggtataagaataaatgcatatttactgtttgttccatttctggtacaaagcagagcctaaaagccttgtaatttcctgagtgataggagtgtcttttgttaataataacaaacttctttcaaccacatttgaatttatgct

SEQ ID NO: 438191 - DNA, 414 bp, Homo sapiens
acaacactattcctatccctttgtgagcactgaagacttttccctcataccctttcaggtggttcttttcccaaactcaagtagttttctcacatgcactgagcagtactcagctgtatgtacaagggggactctggagatttctggggttatttctttgtatagctctctctacttcagtactgtgctgtatacatgccagccaccttgatctccctgcaattccagctcctcaactcaaagttctgtgttycacttgtgttcccattctgtggtataagaataaatgcatatttactgtttgttccatttctggtacaaagcagagcctaaaagccttgtaatttcctgagtgataggagtgtcttttgttaataataacaaacttctttcaaccacatttgaatttatgct

SEQ ID NO: 438192 - DNA, 414 bp, Homo sapiens
acaacactattcctatccctttgtgagcactgaagacttttccctcataccctttcaggtggttcttttcccaaactcaagtagttttctcacatgcactgagcagtactcagctgtatgtacaagggggactctggagatttctggggttatttctttgtatagctctctctacttcagtactgtgctgtatacatgccagccaccttgatctccctgcaattccagctcctcaactcaaagttctgtgttccacttgtgttcccattctgtggtataagaataaatgcatatttactgtttgttccatttctggtacaaagcagagcctaaaagccttgtaayttcctgagtgataggagtgtcttttgttaataataacaaacttctttcaaccacatttgaatttatgct

SEQ ID NO: 438193 - DNA, 573 bp, Homo sapiens
caaatgaattctaatcaggtaggtactagcagctcctcagggaggtaaaagctatcatttagaatgtggctgccctttctgggtagctttttgttttttctgatcataatggcatgcaaaaagataatacaagaaagtaccaatgctaaggcttacattggtaaagagagagagaatattactcttcagcaattgttcattgttatcagtactggatttgattacggatataggatttatagctctaaatttggagctctaaagaaacctttagttttgaaataactgtaagaatttgtaactcttgagtttccaatattaaatcattttcccaacttttaaaagttagattctccttttatccataaaatggtcctgaawacttgaagtttattataatcacatatctcatgttaaaacaaaaaaaaagctacaatccctgaactaacaattttctttttggggattctgggcaagagggctgactagaagcagctaatatgcaccaatttcaaggagagaagacagtgtgatcagtaaacactagctcttcaactagatcatccaagagta

SEQ ID NO: 438194 - DNA, 576 bp, Homo sapiens
ttgagggctttactcacatttccagcatgccacagtcaccatacagataggagtatagtcaccccttcctgtgagccttgacccccagcttttcaccaagcagggtccctggatgaatattcagccacacccagctgaacattcccgttagcaggatccttgtatttctttgaggtgaagctccaagaggcaactgaaaactcctctgccactgtaactgcagtggtacttcctttgctgccttcagactgggaaaggaacaaagaccatgagtgctttaaccacacctccaataaaccatggctgccctaaagagaagaggccagtctgtctccccaggtcccctggtccccrctgcttgtcattgggcagggactcctggcttgaatccacaacacagctgccccacccagggctgattgtaccaactggtagtggctctgcatatctctgcagtggagccccaagaaacaagtgaaagtcctgctgccacaaccattgccaaggtcccatctcttgcttcctccaagctggggagggaacataaagcctgagcttaccccagggctgcagtgt

SEQ ID NO: 438195 - DNA, 629 bp, Homo sapiens
ataaagagaacacattttcaactcattggcatccctgaaagagaggggagaaagcaggcaacttggaaatcatatttcagaatatcattcaccaaaactttttcagcttcacaagagaagccgacattcaaattcaagagatgcaaataacccctgcaagatactatatcagatgaccatcccaaagactcataattttcagattcttcaaggttgacatgaaagaaaatatattaaaggcagctagaaagaaaggacaggtcacctacaaagggaaactcatcagattaacagtgactgtttcagcagaaacactccaatctgaaatagattgggggcctatattctgcatttttaaagaaaagaaactccaaccaataatttcctacccagccaaactaagctttataagcaaaggagaaataagacccttttcagacaaggaaatattaagggaacctgttacaaccagacctgccttacaaaacgtacttgagggagttctaaacatggaaagcaaagaccattaccagccaccacaaaaacaawcttaagtacataggttatggacactataaaacaaccacataataaagtctgcataataaccagctaacaacacaaagata

SEQ ID NO: 438196 - DNA, 490 bp, Homo sapiens
ataaggaacttaaattaacaagcaaaaaacaaccccattgaaaagtgggctaaaaacctgaacagacacttttcaaaagaagacatacatgtggccaataagcatatggaaacaagctcaacatcactaataattagagaaatcaaaaccacaatgagataccatctcatgccagtcagaatagctattattaaaaaggcaaaaaacagcagwtgctagtggagttgcagagaatggggaatgcttatacactgctggtgggaatgtaaattagttcagccactgaggaacacagtgtgatgacttctcaaataacttaaaacagaattaccatttgacccagcaatcccattattgtgtatatacccaaaggaatataaatcattctgtcataaagacacatgaatgcaaatgttcatcacacactattttcataatagcaaatattgcatgttctcactcacaaatgaaagctaaacaatgacactac

SEQ ID NO: 438197 - DNA, 558 bp, Homo sapiens
tttgatgaagataggttcttcatagattctaatatccagaatctataaggaacttaaattaacaagcaaaaaacaaccccattgaaaagtgggctaaaaacctgaacagacacttttcaaaagaagacatacatgtggccaataagcatatggaaacaagctcaacatcactaataattagagaaatcaaaaccacaatgagataccatctcatgccagtcagaatagctattattaaaaaggcaaaaaacagcagatgctagtggagttgcagagaatggggaatgcttatacactgctggtgggaatgtaaattagttcagccactgaggaacacagtgtgatgacttctcaaataacttaaaacagaattaccatttgacccagcaatcccattattgtgtatatacccaaaggaatataaatcattctgtcataaagacacatgaatgcaaatgttcatcacacactattttcrtaatagcaaatattgcatgttctcactcacaaatgaaagctaaacaatgacactacatgggtacaaagaggggaacaaca

SEQ ID NO: 438198 - DNA, 558 bp, Homo sapiens
tttgatgaagataggttcttcatagattctaatatccagaatctataaggaacttaaattaacaagcaaaaaacaaccccattgaaaagtgggctaaaaacctgaacagacacttttcaaaagaagacatacatgtggccaataagcatatggaaacaagctcaacatcactaataattagagaaatcaaaaccacaatgagataccatctcatgccagtcagaatagctattattaaaaaggcaaaaaacagcagatgctagtggagttgcagagaatggggaatgcttatacactgctggtgggaatgtaaattagttcagccactgaggaacacagtgtgatgacttctcaaataacttaaaacagaattaccatttgacccagcaatcccattattgtgtatatacccaaaggaatataaatcattctgtcataaagacacatgaatgcaaatgttcatcacacactattttcataatagcaaatattgcatgttctcactcacaaatgaaagctaaacaatgasactacatgggtacaaagaggggaacaaca

SEQ ID NO: 438199 - DNA, 613 bp, Homo sapiens
gtttggaaaactttagatagcaggtcaaattctttttaattcartctgttcaactgaggtctttatgggcttggagtagatattgctttaggctgtatattagtcaataagctagataataaaaaatggagtatatttttccattttagagtaatgatgaaagtcacataaagacaatttcccaggtaactgaaattaatattcattattgctaaaaagtttttgtttttattttcatgattgggaggaaagcatttcttaattgggttattcatattctggcctcctgaactagaagttcagataatttgaatttctgaaataattatcagtcataacactgtggtgtgatataaccatgcctttaaagcctgttacagggaatctatgctacagattgtaacagctatgcttttcttatttataactgctttttaacttacttttaaaaatgtagtttctttctatcaatgtgcctgcttccagtgctgcctcctccaccaactcttcttaggcatttcgaaacatataaccattgagggtatatatgatcctgacattaaaataaatttattacaattttattattattacttagtagtattgaacattt

SEQ ID NO: 438200 - DNA, 613 bp, Homo sapiens
gtttggaaaactttagatagcaggtcaaattctttttaattcagtctgttcaactgaggtctttatgggcttggagtagatattgctttaggctgtatattagtcaataagctagataataaaaaatggagtatatttttccattttagagtaatgatgaaagtcacataaagacaatttcccaggtaactgaaattaatattcattattgctaaaaagtttttgtttttattttcatgattgggaggaaagcatttcttaattgggttattcatattctggcctcctgaactagaagttcagataatttgaatttctgaaataattatcagtcataacactgtggtgtgatataaccatgcctttaaagcctgttacagggaatctatgctacagattgtaacagctatgcttttcttatttataactgctttttaacttacttttaaaaatgtagtttctttctatcaatgtgcctgcttccagtgctgcctcctccaccaactcttcttaggcatttygaaacatataaccattgagggtatatatgatcctgacattaaaataaatttattacaattttattattattacttagtagtattgaacattt

SEQ ID NO: 438201 - DNA, 534 bp, Homo sapiens
ctagctccaaggttcccatggtttgacttttaattcacctagctctggtagtggaagggactaggcatacacaagtctccctagaccacagaacaaagtagcaaaaccctaaaaggagtttgttggtatactcctccaacttctgctaacagcagagcttctaactagcctgaattagggagttaaccgggctgacaaactacaatattcctctgttattgatggtttttctttccaaagtttcagttaactatggccaactgcagtctgaaaatattaaayggaaaattccagaaatagacagtttgtaagttttaaataactgttatcaccatatgttgttataattgttctattttataattagttattatgtttccttcattattgtgcctaatttataaatgaaacttcatcataggtatgtataggaaacaaagcacagtatatatagggtttggtgccatacacagctgcaggaatctgcagaatgtcttggactgtatcacccacggataagggggactagtgtat

SEQ ID NO: 438202 - DNA, 522 bp, Homo sapiens
ggggaaaaacctcccaagcttagggaaataaattgaaatcaagattcaggaaactcagatgacaccaaataggaaaaatccagagacacacatttgagacatattataatcaaattgttaaaaatttagacaaagagagaattttgaaagcaacaagggacagcaaatagttacacaaaagggatgcccaccgtgtaagatatccatggattttctttttccagaaactttataggccaggaaggagctggatgatatattcaaaatcctaaaagaaaaaaaaattactgcccaagaataccatacctagtaatactatctttcaaaaatgaaggcaagaataagactttctcaaacaaacaaaagtcgaggaaggatatcaccattagatgtgccttacaagaaattctaggaattcttcaagctggattaaaaggatactaattgatasgataaaaatacaaaaataaaaaacttactggtaaaagtaagtacattgtcagattcaaactagtaatcagg

SEQ ID NO: 438203 - DNA, 544 bp, Homo sapiens
cacagtttgaacagttgcctgctctcaatttctgtacagcctcgtcaccgatggtctgcataccacactctagggagcactgtgctaggccatacagtaagttcagtaaactgtacaaaayttatatacacaccacattctctgacaacaatggaattaaattagacatcagtaaaagtataaactaacaatcttcataaaattattttatttttagctgtggtattggcattgtaagtagtttgagagagattagagagagtaaggtcttaactctaaagatgcaacaaaattaactgcattttgaccattgttgaatttgagtgttagctatgtgggggtgctttatctttctctcactgttttttcacatttgaaattttctctaattaaaaaataatttctatatattttgaaaaataccccatttgcacatgaatcatgaatcaagggatggagattaagaaagcacacagagctcagtgaataatggaaccgttaaatatcagcacttggggaagcagtaacagaagatcttacaggt

SEQ ID NO: 438204 - DNA, 549 bp, Homo sapiens
aattaaattagacatcagtaaaagtataaactaacaatcttcataaaattattttatttttagctgtgrtattggcattgtaagtagtttgagagagattagagagagtaaggtcttaactctaaagatgcaacaaaattaactgcattttgaccattgttgaatttgagtgttagctatgtgggggtgctttatctttctctcactgttttttcacatttgaaattttctctaattaaaaaataatttctatatattttgaaaaataccccatttgcacatgaatcatgaatcaagggatggagattaagaaagcacacagagctcagtgaataatggaaccgttaaatatcagcacttggggaagcagtaacagaagatcttacaggtaaatatataatcataagtccttgtactaagaaagacggactgaaaattaataagccaaatgtccaactgaaactaagcagcatactggacccaaagaagggcagaaatcatgaaatacaaaataatgaggaaatagagaggaacacaaccaaggcttgc

SEQ ID NO: 438205 - DNA, 604 bp, Homo sapiens
aactaacaatcttcataaaattattttatttttagctgtggtattggcattgtaagtagtttgagagagattagagagagtaaggtcttaactctaaagatgcaacaaaattaactgcattttgaccattgttgaatttgagtgttagctatgtgggggtgctttatctttctctcactgttttttcacatttgaaattttctctrattaaaaaataatttctatatattttgaaaaataccccatttgcacatgaatcatgaatcaagggatggagattaagaaagcacacagagctcagtgaataatggaaccgttaaatatcagcacttggggaagcagtaacagaagatcttacaggtaaatatataatcataagtccttgtactaagaaagacggactgaaaattaataagccaaatgtccaactgaaactaagcagcatactggacccaaagaagggcagaaatcatgaaatacaaaataatgaggaaatagagaggaacacaaccaaggcttgctatttgaaaaagattaataaagtagagaaactgcttctgagactacttaagcacaaaaaagcacaaataaacaatgtttggga

SEQ ID NO: 438206 - DNA, 591 bp, Homo sapiens
tgtactgaggatctgtttgtgcaataagacaagaaaaagaaattacaggaataaggattgaaagatataaagcaaaactctcattggtcacagacgacaggatggtctactgagaaaccacaaaagaatctgcacagaaattattggaaataagagagtttaggaagggggctgcctctaggatcaataagcaaaaatcatttgtattgctatacactagcaataaatagttggaaaacataatttatcaagaactctgcttagaaaactcaacgttaactaagagtaaggttaacaaaaatgtgtacaatttacatgcggaaaattataaaatttattgaaaacattttaaaatggcctaaataaatggaaacagattccacatcatggataggaaaaatcagtattttaaagatatttaattcacagagtttatgtgattctratcaaaatctcaaaagactttttgaggaaatttaactaactgagtcttaaaatttgtatgcaaggcactcttgaaataaaaaacggtggtgggactcgaggtattgctcctcacaagagggcattagctgcaggggtgtgcctgca

SEQ ID NO: 438207 - DNA, 476 bp, Homo sapiens
gtgtttaatattttacctgggtactgtacataacattttgcagcttggttttttcactcaacatatgatgatgttccatgggaactccaaacacggggaggctaggcgacttgctcaaggcagctgttacctctgtcagaaagacagaggctttcagattcaagaagtagaccctgcatgtctgattctgttctgtaaacccccttcatactcagaagcatgcaataaacaagcctggggtaattatcaatgcaaaggttaccctcccagaagaaatttccaaaacactttcattattctctgctcttgacatgaagagaactgaataagccatcatcaactgagataatggatgccaaaacatccagtaaataacctcatagagcttagctctcactaagtttttggagcatyttccagtaattcaaaggacctggggaaccttaagcactgcttaggatgctccataaacatct

SEQ ID NO: 438208 - DNA, 452 bp, Homo sapiens
gattgtgaaaacatttggagagaactgattattataatcagagctaggaagattatcaaataatgttgctgctgctatttgaacgggtggcctgcctctccacacttgcgggcgtttctcgttgggtggaacgagagacttaagaaaagaaagagacacagagacaaagtatagagaaagaaaagtgggcccagggaaccagccctcagcataaggaggacccacgccggcaccagtctgtgagttccyttagtatttattgatcattatcaggcatttctcagagagggggatgcggcaggacaatagggtaatagtggagaaaaggttagcaggaaaacatgtgaacaaatgtctctgcatcataaacaaggtaaagaaaaaagtgctgtgcttttgatgtgcatatacataaacatctcaatgccttaaagagcagtattgctgccagc

SEQ ID NO: 438209 - DNA, 452 bp, Homo sapiens
gattgtgaaaacatttggagagaactgattattataatcagagctaggaagattatcaaataatgttgctgctgctatttgaacgggtggcctgcctctccacacttgcgggcgtttctcgttgggtggaacgagagacttaagaaaagaaagagacacagagacaaagtatagagaaagaaaagtgggcccagggaaccagccctcagcataaggaggacccacgccggcaccagtctgtgagttcccttagtatttattgatcattatcaggcatttctcagagagggggatgcggcaggacaatagggtaatagtggagaaaaggttagcaggaaaacatgtgaacaaatgtctctgcatcataaacaaggtaaagaaaaaagtgctgtgcttttgmtgtgcatatacataaacatctcaatgccttaaagagcagtattgctgccagc

SEQ ID NO: 438210 - DNA, 452 bp, Homo sapiens
gattgtgaaaacatttggagagaactgattattataatcagagctaggaagattatcaaataatgttgctgctgctatttgaacgggtggcctgcctctccacacttgcgggcgtttctcgttgggtggaacgagagacttaagaaaagaaagagacacagagacaaagtatagagaaagaaaagtgggcccagggaaccagccctcagcataaggaggacccacgccggcaccagtctgtgagttcccttagtatttattgatcattatcaggcatttctcagagagggggatgcggcaggacaatagggtaatagtggagaaaaggttagcaggaaaacatgtgaacaaatgtctctgcatcataaacaaggtaaagaaaaaagtgctgtgcttttgatgtgcatatacataaacatctcaatgcyttaaagagcagtattgctgccagc

SEQ ID NO: 438211 - DNA, 623 bp, Homo sapiens
gtgggcaagcaaacagttttccacattccaaggttttgcccccatatgggtgatgttctattgcaaataggttttaaatcatatggcctgatttgggcgtgtgttgttaataggctgtgaagttgtctgtcaattaaaacattggcctgtgggcaggccctgtggctcagttgttggtttgtttggtcacacgcaagccaggaaaatctctaggttgtaaggcttatagtagccaaaattgatggcttgtggtccttarcattcatggttatggtttaaacaatggcttaactggaaggttttagcctctggcttgcaaaccaatgaaagcacccagaccaatatagtaaggagatcaatagtacacagaacagtgtgcagctgtgtttgactggcttttgttgtttattattgaatttcctccagaatgtactactgccaagaaggggttgtctggttttttcattattgtatatgatgttgattttattatctccaaattttaatttactaagtggagttttctacctccctttttgatagtccatactgattgtgggaatggccctgtagtactaatttgaaacttcttgaagggaatcagagggagatcctggattatt

SEQ ID NO: 438212 - DNA, 512 bp, Homo sapiens
ggtccagtgtcttgcagtcctacaacaagtgagaggcttgctgccatcagagaggtttatttcacacttacaggcacacacagacacagaccagagactcccagcagcagagcccaagcactggcttcgcccctcagtgccctggggcatgttcagggcagggttgagggggacgccctgcacatggctttgctgtgcaatgactggaaggccgcccggcatgggcagtagagacccctggcctctgagcaccttctagctcackggtagtgggattctgcattagtggggctgagagatgtgggggcccctccagccccattatagtgcacctgaaggggtccacagcctgtgtcctagaagagggaagaggaaggaaggtgggtggggctggtagtatggactaaggtgctgcaggacctggggccagggacatcctgtgcagaagctccggctgcctctttgcggtggtggcctgaccgtcccacagcagcctccaccagggccctggt

SEQ ID NO: 438213 - DNA, 572 bp, Homo sapiens
cactctctcggttcactgcaacctctkcctcccaggttcaactgattcttctgcctcagcctcctgagtagctgggattacaggtgtgtgccaccatgcccagctaatttttatttttgtattttcagtagagatggggtttcaccatattggccaggctggtctggaactcctaacctcgtgatctgcctgcctcggcctcccagagtgctggatatatggatgtgagccaccgtctctggcacttttggttttcatttgcatgaaatatctttttccattcctttcttcactttcagtctttgtgtgtctttataggtaaggcagcgcatatagttgggcctttttttttttttgtccttcagccagtctctagcttttaaatgggcaatttaatctatttacattcaaagttattactgataggtggcaacttactcctgttattttattgattgctttctggttgctttgtatattctttggtccttgcttcatctgttattatttatttttgcagttgggtggttttctgtagtgataaggcttgattcctttatctttcccctttg

SEQ ID NO: 438214 - DNA, 546 bp, Homo sapiens
caccagtgtgggcttggtggaacaaagacagagctccagtgctggaaaggtgcagtggatactggcctccagaatagggtgcactccagacatgactctggtctcaagatggtgccctgctgcagcagactggcttacaggggatagttgggggatggggagtgcacatattgtgctcctaatctagggcaatgaagctgtgtgaatgccctgcagctctccaaactgggtgacggtgggattctcctgttgtaaggactttaggtgtttgcagtggcaatcagggatggtggggatcttttgtttatcygcaataagtgactcctgacattaggcagttctgatcttgatgagggacaaggggtttcagaggccaagtgcttccacactgccctcctggacttctaatcaccacaggtgcatttccactcctcttttgcataccagcactcttccttcaacactccagtcaacactgagctgtttattttttgctttggttccttcttgtctggggtggcgggtggggaggagatgaataccagg

SEQ ID NO: 438215 - DNA, 613 bp, Homo sapiens
gtacacacacaaaaagcacaaaccaccaaagaaaataatttacaaagtaggctttataaaaattagaaacctctgctttttgaaagacatagataagaaaatgaaaaggcaaaccacaaacctggagaaaatattcataacatatatattagacaaaagttgtatttccatattatataaataattctaaaaattcaataatagggagacaatcaacctaattgttttttaaaatggttaactgatacaaacagaccctacataaaagaacttatatgcatagccaatcagcatgtgaaaagatgttcaacgtcattagtcatcaaggaactagaaattataagcaaaatgggataccattagagacccactaacattaaagaaactgacaatttcaagtgttggaaacaatgtagaacaactgcaacaaccgtaaatttctggtggaaatgtaaaatggcaaaactactttggggaaaaaatgrctttttttagaaagttgaacgtatactcctagggatttatataagagcttgaaaaacatatatcaacacaaaggcctatgtatttatgcttaccccaactttatccaaattaatctaaagctaaaatt

SEQ ID NO: 438216 - DNA, 603 bp, Homo sapiens
tgccaagtcaatggttgcacacaaagtaccaggagatgtgttaatttgctcaaataatgaaaccacatctggtacagcagctgcaattggaatcatcacttggttaagcttatggtaatccactgtcattctccaagatccatctgtcttctgcacaggccaaatgggagagttgaatgggaatgtggtgggaatcaccacccctgagtctttcaagtccttgrtggtggcactaatctctgcaatccctccagggacacaatattgtttttgatttactatttttctaggtagaggcagctctaatggctttcatttggcctttctcaccacagtagccgtcaccctaccagtcagggagccaatgtgaaggttctgccagctgctaagtatgtctatgccaattatgcattctcgcactagggaaatgaccacaggatgagtccagagacccactggacccactgtaagtcagacctgagctaaaacttcattaattacctgactcccataagcccctactttaactggaggaccacaatgacgttttgggtcccctggaatccatgtcagctcagagccagtgtccagtagtccctgaaa

SEQ ID NO: 438217 - DNA, 603 bp, Homo sapiens
tgccaagtcaatggttgcacacaaagtaccaggagatgtgttaatttgctcaaataatgaaaccacatctggtacagcagctgcaattggaatcatcacttggttaagcttatggtaatccactgtcattctccaagatccatctgtcttctgcacaggccaaatgggagagttgaatgggaatgtggtgggaatcaccacccctgagtctttcaagtccttggtggtggcactaatctctgcaatccctccagggacacaatattgtttttgatttactatttttctaggtagaggcagctctaatggctttcatttggcctttctcaccacagtagccktcaccctaccagtcagggagccaatgtgaaggttctgccagctgctaagtatgtctatgccaattatgcattctcgcactagggaaatgaccacaggatgagtccagagacccactggacccactgtaagtcagacctgagctaaaacttcattaattacctgactcccataagcccctactttaactggaggaccacaatgacgttttgggtcccctggaatccatgtcagctcagagccagtgtccagtagtccctgaaa

SEQ ID NO: 438218 - DNA, 555 bp, Homo sapiens
agttccctagattttcttttctgactctgacttgctcctcagttccaacctactgaaaagaattttaacagtcactacccagtgtccataccaaagtgattcatatctatgaagtagatcataaaacaatatttcagaagaaataattctaagttgtggatttcccccattatctaagtagctatcacaaaagatactcaaatacatttttaattttaaaaaagtttaattaaaaaattaacacataccatatagcactttgaggaagtatgygtttttaagacgtaagatgttataaaatcagaaagtgttaagatattgaaaactacaaaatctttatattctgaagaaaactaattcctactaaaacaaagattctggtgatgcccaggaaggctgggaggctctgagctatcccaacatgataatatgtggacaaatgggcaattttattatataagcacatgttcattgtagaaaaagtagagaatatcaagaagaaagcaataaaaagggagcacctataatcccaaaaccaattagataaccattagt

SEQ ID NO: 438219 - DNA, 665 bp, Homo sapiens
ctggtaccctaaattctaaagactgtgattccttttcctccataactcaagtgagtcatgggtgtttctgctggaatgagaaggggcagcaagagggggaagtggtaggtatcaccctctataatagaaattgggaagacattaagcacagatactggccaaacctgcaaacagctgagtgagtttggtgtatttgggaccaaacacagcaaacatgatgayatatgcagggcagtgaccatgactatctttggtctggataaattgcggctctggaaaggcaacacacttgaataggaattatttgaaacagtgcaggtgttttactgcaacatattctaccacaggaaagaagtttcaggagtatctctttttaatcatggccatatcactcgtgtaaaataaatgactttaccatatgtataatgctggtgagtgctgaggagcctttggttagctttatttctgaaagcagtctatcctaatgtacatgcataaaaacccaaacctaatgcattttattattggcagtggagccaatccaccattaacaaagattataaggaccactttggtcattgcttatacatctcgttgaacacaaattataatactaattatagcaataaatagcattgtactaaatagtctatgcttcatttaat

SEQ ID NO: 438220 - DNA, 559 bp, Homo sapiens
cccaacctgtctggtccccgtggcaattccacacgatcatggaaagagatgcatcaggccctctccaccatgtgattcttctgattctctttccttatcataaatcatagaatctaagactcaaagaatccattcaaaaatgcacattattttatatacaactaaagaagaaaaaacaagctgcaattatactatactatatatttcttataagataaacttttaaaatattacagtaaagtgcttatttaggctttgttttatataacttcctttcacctgtccctgcaaaatctactccccatctttttccatatggctttctgtcccagaaggctgccttagaagagctacctctgtagttaaactgtggccctcagaccctcgagcctccaccagacttttccargaggtacacaaggtcaaaactatctttataataatatgaatacattattcatcttttctgctgtgatggcatttgcattgatggtataaaagcaaaattgaataacgcctgtctactgttgccttaggcatcaaggcaggggaactaaac

SEQ ID NO: 438221 - DNA, 559 bp, Homo sapiens
cccaacctgtctggtccccgtggcaattccacacgatcatggaaagagatgcatcaggccctctccaccatgtgattcttctgattctctttccttatcataaatcatagaatctaagactcaaagaatccattcaaaaatgcacattattttatatacaactaaagaagaaaaaacaagctgcaattatactatactatatatttcttataagataaacttttaaaatattacagtaaagtgcttatttaggctttgttttatataacttcctttcacctgtccctgcaaaatctactccccatctttttccatatggctttctgtcccagaaggctgccttagaagagctacctctgtagttaaactgtggccctcagaccctcgagcctccaccagacttttccaggaggtacacaaggtcaaaactatctttataataatatgaatacattattcatcttttctgckgtgatggcatttgcattgatggtataaaagcaaaattgaataacgcctgtctactgttgccttaggcatcaaggcaggggaactaaac

SEQ ID NO: 438222 - DNA, 587 bp, Homo sapiens
tggtgatgaacctaaagcaatataatataatcacccaatgcccataatttacattagagtgcacttttggtgttacacattctatggtattggacaaatgtgcaatgacccatatccattattaaaatatacagagtattttcactgccctaaagatcctctatgctctgccacttcattcttccaccaccccaacgtctgtttttttcataaaactttgagttaatttagatttgtagtacatagctgtaatctatgtagatcagattacaatctgtagaaagctgggagacatgttctgtctcacccatcactgatctcatccttatggaatgcgattttagccctggtgaaatccagctgggatcatagaaaaacacatktccctgatgctttcaactcactctctgttcctggatagtatttatttatttctgttctttacaatcagacgtagtacagagaacagctaataggataaacacaacgtttcttttctgctctatactgattccaatgaaaattgaattcccgattctctgacaaaaaatatttcataggaattttgaccctgaatctcatgtatt

SEQ ID NO: 438223 - DNA, 476 bp, Homo sapiens
tcatgcacctggttaataataaccacattgaagttaaaagtgcagaatttcctctcattccagtgactttcctcagctaaactatacctgctttcaaccttgtaagtgactcaggatcttataggatttgcagataaatcctaacacaatattcaaaatggccatagattgtacataagaaatccacaaatacatagatctttcccctttgcttgtgtctgctagttacctyattagcatcagtcatttaattttgtatattgatatagttatattctaaaaagacttacattacttttcaaaaatacacaaaatacgttgagatgacattagaagtagttgataaagtgaatgcatgggactacaatagtaaggaaataaaatcaagctaagaatgaggttgatataaaatacatatcatgaagcattatttgcttgccacacaaaagaggtatatttgcctctcaatatcccag

SEQ ID NO: 438224 - DNA, 510 bp, Homo sapiens
tgacagtgtggcaaggggatctgcatgactttacaatgtgaagaagaaataaaagcaggaccaatatgagcacatggctgtttgcagccaccatctgaaatggttagtgccagtgctgcaccagttgtcaaataccaacattcttatgtttaataaatactaattttactatcttatctgttaaaagaaattgggaagcccttatctggaagtttaaataagttgtctattctagaagctcttctctataaaaatttttctcttgacyaagagtttaaatggagcacaagagaattcacgttttcgattcctgacaattacctggcttggggcacattcgtcttgctacttaaatttgaaatgatgtgtcttaactggcagctgagctggaggatcagttgacatctttttgtgaaatttgagaagactaacatggatgtatatctcacctacattctaaaaagggattcaagccattcatgggaacaaagctgagttttttattcatct

SEQ ID NO: 438225 - DNA, 533 bp, Homo sapiens
ggatttttcttaaaactggtaaaatgcaaattgttaaaaaaagatatctttccataccttatgtctgatatttgatagatagtaccataagaaaatccaaatgacagctttcagtttcttaatatcaaaatttgactagtaagagagatttgatttcctactttgtttgggaaatctgggaaaatatggtcataactgagtttgtggccttgacatyatggagctcaccaaagctctatgatttttttctcataccaatagacagtcttctctacagaactgcatgttacaaagaagcaaaacactaaagtacagacttaaccttcactacctctgtggctttagaaaaatcatcagcttttctgtatcttggttttctcatttctgaatttttgataccaattcctatcccagcctacctcataagtgatgctatctaaatcaactgagattagctaatttatcaaaaatgctttaaggacaataaaatactatatacctttaagaaaatagatctcttaatcaccttctac

SEQ ID NO: 438226 - DNA, 602 bp, Homo sapiens
aattatgaattatgtagtcccacaaagtgaaataagaggtatgataaatgatgtacctgattctacgagaggaggtaatagggatacctgacctattctaggggtgaggttagaggggaagtgatcaggaaagtcttcgtgggagaaataatatttaaactgataactctaggaggagtccaaagtgaagtgcagttagagtacgcaaaggcccagaggcaataagatcatggcacatatggaaaaatggaataagttaaagaaagccagtctgtttctgtttaatagcatttgcatcacctactttcttctgagaaggatatctctttccacttgtatctactgcatttycttccaggcccgtttttattatctctaaagttagaaggggcacaaatgacaaaatgttatagtttaggagtcagtggaagtaactaaacagtggaagttccatccacctccaaaccataattttaagtaacattatatctgcctttaactgtcattgctcctccagccccccatgaaatggactttcattctgagaatagattggcagcaacagctggcattttccttagaaatagttggctttgcctcaa

SEQ ID NO: 438227 - DNA, 590 bp, Homo sapiens
aacagtagtttctgtacctacataatgaattgtaaaaagcacagagaaagaaaatctcccactgtgggaagacaagcagcctctagatgctcacgtcttcaccctggagtcagcagtgggcataggtttgctgtctgttctataggaattaattttgagctggatgagttatccttctgacctgtccctctgcctatttctcatgtcagaaagaagcatcagagccagcagcaaccagcagcctgggctctagtccagtgtttcctgtaaaagagcctccaagagggagatacggtcgagaaaggggatgtggtctcttcatagacatgtaccctgataacctagaaaggcagacatcagagtaccacagtactgaagggaaaatcatcagcacaaagaaaacctaagatttctgtattttccttttaacttaagcttttctgcaacycccacaggaaaacgcaggcaacaggccaagatttatattaccactgatcctgtttgattttaagagaagaaattctactcagatgtaagtgtgatctatctgtgacatctgtcacctattagttacaagagctaatttagtt

SEQ ID NO: 438228 - DNA, 563 bp, Homo sapiens
ggcatttacagaaggctgagaagagaactctgcaaagaattttaaagactatacttttaagataaaaattgatgaatttcttaataagtggatttttttggaagatatttttcaaaagaattagaacaaaacaaaaagctacatggagtgtcttaccaaaccatttgctgcctaagtcattctatgtttattcaacagaggaatacacacttgccaaaggaaaggactttgggaaaaaggaaacagacaaaagacttggcagtcatgagacaaggtcatgggaataaatgggaggggcatgcaaagaagatttaaakaggtacccccaaagtattttatattctaatgtttcattattttccaataagaacataaaacaacttatagaattcgtgaaccaaaggaagataaaataggttacagtgtgcaaccacaaaggcaggaagaatataaactagatccaagaaggaggttaattacaaaacaggaatatggtgaacaatttttattatgcattttcaataaatgaggcacaaatttatctctatgatttttagccatca

SEQ ID NO: 438229 - DNA, 329 bp, Homo sapiens
tgaaggcttggagatgggcatcatccacctgcctttgcaaaggaaaaaatcagccaatcaaatcactgattatctctgttttatttatcacaggaccgtaaatggccacagctacgtaaggcaaaatagggactactggctaaaagaatttgtgtttctacatyctcatttttcttccagcaccaaaggcaaggttctgcagaagaaaactcaataaatgtacattgaatgaatttgttgaatgaaattgacaaccagtttgcagaattcagaccagatatatcagttgcgtcagacgaatgacttggggcccttggcatacggataat

SEQ ID NO: 438230 - DNA, 699 bp, Homo sapiens
tttttatacggcaacaggaaaggctttagctgatgggtacatgtaaaaaatgatgaggtgctttattttttcagcccctgagcattcttctgcacaaaatctttcagtgtttaatctccaaagctttctgagtttagaagctcttaagagctaacatgcatatactgtgacaaaaaaactgaagctctatgaattcaaagttayatatctttatgtaattttccacaaagattacatttcattgtctttacaaaatagttttacatgaaagttcaaactctttctaggtattagaataaactaagttgtacccaggacacattacagacaataggtaaattcaagctctgtctaactgatcatttgattttcaactatctgaaacatggcttgtggtaggttgaccatggtggtattatttgtcatgaagaagacacaaatgactgacacagagacagataatttccccacacatacaaaaaatgaagatttgataattacttggttcattttattcaatcaagtctttgaaactcctattctgtactaagtgctgggcaaaattaaaataacatacaaagccatttccatcttcaaagtgcttataagtcaaatagagaaaatgaatatacacataaatatacacagttctatgtatgcggtttatgcaaagtactcagcatgaattaagtagaccag

SEQ ID NO: 438231 - DNA, 455 bp, Homo sapiens
tacaagaaaagtgagtttgggatcaacagcagagtatatatagtacttaaaacatataaattaatataaaatttaaaaacaaaaacaagccagccaaatcaaataattcckactgtcctcaggtttatttcatgccacagttaaaagtggggaatgggaggagatagagcctgtgtgacttctctgattttccttcaaggttaaaattaaaatgttggtcctcctagagacttactgctaagcctctgttcagtaatgctcaggaggcctttcctggggtctctctcgcttcctggactgtattaatagtagtgctatttccattccagagttcacataccatttgtgacttccccagtcacagtaggaaaatcttcttttattttatccttgcctttcagaagctgtcaaacccaattttccttctttttagttctatctgggccctcagcagt

SEQ ID NO: 438232 - DNA, 525 bp, Homo sapiens
tttttgcgtggattcaaaaatagcctaggtgatggctaaaggttgaaaaggtgcctcattaaattaaaaaggaattttaaagaattattttcaatgcgtgttasaactttattcaaatctgccttcttaataaaaagggcttatattctttcattgtgttggcaagaaaaaagaaataatattacgagaaattcaagccgatgcagcaaaatattggtgggaagccaatattttttcaaaacagataattaaagaaatctgaatgatagaaaaaaatgtataggttccccttggttttctaaatatgaatgtgctaaaagaagaccatactaaaaattagtgacaatgtaagaaccagctgggaaccctgaaaattgaagacaagtctcagttaatttagaaagtttcatttgccatggttgaggatgtgtgcccttgtactgcctcaggaggtcctgaggacatgtgcccaaggtggtcagagcacagcttggttttatatgttttagggagacatgaggcatc

SEQ ID NO: 438233 - DNA, 211 bp, Homo sapiens
tttgtgttcccagtcttccttcaaactattacaatctattggtttcccttktttaaaaaaatgagaggatactcttcagtcattatcttagtggatttttaaaaattttctttcactttatggaaaactctttgctttttggaaactcttttcctgtacttcctgttacatcagactctccattctctcttatcttatccttctgattata

SEQ ID NO: 438234 - DNA, 576 bp, Homo sapiens
gacaagggattaatatccaagatttataagaaactcaaacaatagcaaaagcaaataacccagtttaaaagtgagcaaaagacttgaataaatatttctcaaaagaagatacacaaatggccaacaggtattgaaaaaatgttaaacatcactaatcatcagggaaatgcaaatcaaaaccacaatgaaatatcacctcaccccacttagaatggttattwtccaaaatacaaaagataataagtgtttgcaaggatgtagagaaaagggaacctttacacactattggtgagaattaaaaattagtgcagctattatggaaaacagtttggaggttcctaaaaaatttagaaataaaactaccatatggtctataatcccactactgagtatatgtccaaaagaaaggaaatcagtatgccaaagatatatctacactccagtgtttattgcagcattatttacagtagctgagatgtggaatcaacccaaatatctaccagtagatgaatggataatgaaaatgtggtatatatacacaatagaatactattcagccacacaaaataataaaat

SEQ ID NO: 438235 - DNA, 554 bp, Homo sapiens
taaatactttccctgtatataattgcttgattaaattctcagagttgtatcatggcttactatatttakcttgcaatttctcaagatttgatcatctattgaagtatcatcccccattccttgttcatatactctgccattctcatattagaaattttgattccaagaatatattccacaatgcatcctcacttgtagttcaaggcatgcaagtaagcaaaatcttatgttcattttataaagggaagccaggtaattttagcccagccagctctgcatttgcacaatctgcattttacttttatgaaaagaaaataagtgagcaggaaacatgttaatagtgggtattaattttataaagcatcttctagggcacaaactcaggtaactaaagaatcaatgtaaatagtttatctactatcttttttatagtgcctagggaaagctgttatttaaactgattaggttctatgcattttgatgtcaataaaaatagtacattcatttgtttattaaaaaatgtttagaatgacttctatatcactgtgctagac

SEQ ID NO: 438236 - DNA, 554 bp, Homo sapiens
taaatactttccctgtatataattgcttgattaaattctcagagttgtatcatggcttactatatttagcttgcaatttctcaagatttgatcatctattgaagtatcatcccccattccttgttcatatactctgccattctcatattagaaattttgattccaagaatatmttccacaatgcatcctcacttgtagttcaaggcatgcaagtaagcaaaatcttatgttcattttataaagggaagccaggtaattttagcccagccagctctgcatttgcacaatctgcattttacttttatgaaaagaaaataagtgagcaggaaacatgttaatagtgggtattaattttataaagcatcttctagggcacaaactcaggtaactaaagaatcaatgtaaatagtttatctactatcttttttatagtgcctagggaaagctgttatttaaactgattaggttctatgcattttgatgtcaataaaaatagtacattcatttgtttattaaaaaatgtttagaatgacttctatatcactgtgctagac

SEQ ID NO: 438237 - DNA, 578 bp, Homo sapiens
aggataagttctcctcactattctctaactaaatggaggatacaaygagtgttaaaatacatgatattcctatataaatgtaagggcaaatttattgtgattgcttcttataatttccttcatttcaagcacagtgaagaaaaaataggctatcgatcacaaaggcaatcttctattaattttgtgtaattgggctttgggtaaaaactcaggcattagataattagaaaaatgttcaaagtacaggtattctgtgttgtcaattctggactgtttctttctctttaaaaatcagttggcgataaaaagaaagaggttgatgtcttctaaaaattaaggtgctcaaccaaagcttctgtttgtgtgtaggccagtccaccttcataggttggtaggagttattcacacagaattattatttagttcagtaaagagttttaagttagcaccaacagaaaataaatgactattcaaggctcacagttccaaagccagagtatgttcacaatgatgattacagcccatgcaattttaaaataagaatcaccaatctcccttagattcattatagaaaaagc

SEQ ID NO: 438238 - DNA, 572 bp, Homo sapiens
tatattattaatataaaggaaaccaaatgtttctcttcatattatgggattatcaattttcattatccccaagtggcttcaaattattaagaaatagttaaaatgaagagaggcctgaaaaatacctatctcccttttctcaaaattattagctgatctgtygggggatagtttctgattgtttttcttaagaccacattaagattcacccaaaacaaatgacctcatctagatcagctgtcagctctgcatttacttgcattatctccagaacacaagctgttacttggtgtattcactcaaacaatgaattatttcaggaaggaaagaaaatcagtcaatctggttaaggaaaatgaataattgtttgaaatgaccaggaaacagagtggtaacaaataatccagaagttccacgtgcaaaggtcttctgtatttaatagctccatgaataaaagtgcctcattgctataaataccaggaaacaatgatttaatatagctgcaattctgtttgtaaatagccagaaacttgtttttgtaacataaatatttcacttgagtttgagaggcc

SEQ ID NO: 438239 - DNA, 613 bp, Homo sapiens
ctgaaataattgcattgtaaaatatactaaatggcccaggcctagagagttggtagcataactcaatgacatctgcaaggatatctgacagaaatagtgatttcagatttgagtaattgacctcaggcaattctttctgttggccttctttagggaatagggtagaattatttgtttaatttctgacaataaaaatatattattaatataaaggaaaccaaatgtttctcttcatattatgggattatcaattttcattatccccaagtggcttcaaattattaagaaatagttaaaatgaagagaggcctgaaaaatacctatctcccttttctcaaaattattagctgatctgtcgggggatagtttctgattgtttttcttaagaccacattaagattcacccraaacaaatgacctcatctagatcagctgtcagctctgcatttacttgcattatctccagaacacaagctgttacttggtgtattcactcaaacaatgaattatttcaggaaggaaagaaaatcagtcaatctggttaaggaaaatgaataattgtttgaaatgaccaggaaacagagtggtaacaaataatccagaagttccacgt

SEQ ID NO: 438240 - DNA, 613 bp, Homo sapiens
ctgaaataattgcattgtaaaatatactaaatggcccaggcctagagagttggtagcataactcaatgacatctgcaaggatatctgacagaaatagtgatttcagatttgagtaattgacctcaggcaattctttctgttggccttctttagggaatagggtagaattatttgtttaatttctgacaataaaaatatattattaatataaaggaaaccaaatgtttctcttcatattatgggattatcaattttcattatccccaagtggcttcaaattattaagaaatagttaaaatgaagagaggcctgaaaaatacctatctcccttttctcaaaattattagctgatctgtcgggggatagtttctgattgtttttcttaagaccacattaagattcacccaaaacaaatgacctcatctagatcagctgtcagctctgcatttacttgcattatctccagaacacaagctgttacttggtgtattcactcaaacaatgaattatttcaggaaggaaagaaaatyagtcaatctggttaaggaaaatgaataattgtttgaaatgaccaggaaacagagtggtaacaaataatccagaagttccacgt

SEQ ID NO: 438241 - DNA, 615 bp, Homo sapiens
tcaaggaactagaaaaacaagaacaaaccaaacctaaacccagaagaagaagggaaataatcaagatcagagcagaactaaatgaaattgaaatgaaaaaaatacaaaagataaatgaaacgaaaagctgattctttgaaaagataaataaaaktgatgaaccattagtaagattaaccaagaaaagaagagagaaaatccaaacattctcaattagaaacaaaatgggagatactacaactgacaccacagaaatacaaaagatcattcaagactactatgaacacctttatgtgcataaactagaaaacctagagaagacggataaattcctgggaagatacaggcttcctagcttaaatgaggaagaattagatactctgaacagaccaataacaaggagtgagattgaaatagtaataaaaaaattaccaacaaaaaaaagtccaagacaagattgattcacagcaaaaatctgccagacattcaaagaagttgcaccaattctattgacactattccacaagacagagaaagagggaaccctccctacatcattctatgaagccagtatcaccttaataccaaaaccaggaaaggacataaccaaaaaag

SEQ ID NO: 438242 - DNA, 615 bp, Homo sapiens
tcaaggaactagaaaaacaagaacaaaccaaacctaaacccagaagaagaagggaaataatcaagatcagagcagaactaaatgaaattgaaatgaaaaaaatacaaaagataaatgaaacgaaaagctgattctttgaaaagataaataaaattgatgaaccattagtaagattaaccaagaaaagargagagaaaatccaaacattctcaattagaaacaaaatgggagatactacaactgacaccacagaaatacaaaagatcattcaagactactatgaacacctttatgtgcataaactagaaaacctagagaagacggataaattcctgggaagatacaggcttcctagcttaaatgaggaagaattagatactctgaacagaccaataacaaggagtgagattgaaatagtaataaaaaaattaccaacaaaaaaaagtccaagacaagattgattcacagcaaaaatctgccagacattcaaagaagttgcaccaattctattgacactattccacaagacagagaaagagggaaccctccctacatcattctatgaagccagtatcaccttaataccaaaaccaggaaaggacataaccaaaaaag

SEQ ID NO: 438243 - DNA, 443 bp, Homo sapiens
cacaatatatcaaaacctctgggatacagcaaatacagtgctaagaggaaatttcatagccctaaatgcctacatcaaaaagtctgaaaaagcacagacaatctaaggtcactagctcaaggaactagaaaaacaagaacaaaccaaacctaaacccagaagaagaagggaaataatcaagatcagagcagaactaaatgaaattgaaatgaaaaaaatacaaaagataaatgaaacgaaaagctgattctttgaaaagataaataaaattgatgaaccattagtaagattaaccaagaaaagaagagagaaaatccaaacattctcaattagaaacaaaatgggagatactacaactgacaccacagaaatacaaaagatcattcaagactacyatgaacacctttatgtgcataaactagaaaacctagagaagacggata

SEQ ID NO: 438244 - DNA, 615 bp, Homo sapiens
tcaaggaactagaaaaacaagaacaaaccaaacctaaacccagaagaagaagggaaataatcaagatcagagcagaactaaatgaaattgaaatgaaaaaaatacaaaagataaatgaaacgaaaagctgattctttgaaaagataaataaaattgatgaaccattagtaagattaaccaagaaaagaagagagaaaatccaaacattctcaattagaaacaaaatgggagatactacaactgacaccacagaaatacaaaagatcattcaagactactatgaacacctttatgtgcataaactagaaaacctagagaagacggataaattcctgggaagatacaggcttcctagcttaaatgaggaagaattagatactctgaacagaccaataacaaggagtgagattgaaatagtaataaaaaaattaccaacaaaaaaaagtccaagacaagattgattcacagcaaaaatctgccagacattcaaagaagtkgcaccaattctattgacactattccacaagacagagaaagagggaaccctccctacatcattctatgaagccagtatcaccttaataccaaaaccaggaaaggacataaccaaaaaag

SEQ ID NO: 438245 - DNA, 567 bp, Homo sapiens
catttctgccaatccttggggaagagggatggaaagttgacattagaaccacattatacaatgcatgtaatttgctggattaactgtatgaaatattgcatatagctcataccatcagaggcatgaactctgcaaaccctattattctggttttcagtggaagatccacaagtgactgcagtcaaggttataattcccaaggcaaagaggggatttagagtatgtatactcccatkagtaattggtaaagtgatggtcaacacagaagaatattggcacagctcattcaaataaatgtcattattttgactaattatttgaccatacccagtggaaataaagatatgaagagaagttgttattatttggctctgtgtccccagccaaatctcatctggaattttaatccccacatatcaagacaggcacctgctgggaggtgattggttcatgggggcagttttccccatgctgtccttgtgatagtgagggagttctcacaagagctgatggttttaagtgtggcatttcctcactatttcactcactctttcactcactctctcc

SEQ ID NO: 438246 - DNA, 628 bp, Homo sapiens
tgatggctatctgcctatgtaaagtataaggaaaatttgaacaatttgatctcagaaagtgaggactcagaaaaatgaaagtgctgaatttctctttaattttctctaattcatcacctttatagacctggtctttaaaaattatttgtacaatgcagtcaccaataccctgaaactatctctcatctttgttctgaagaatggaaaaaaaaaaaaaaacgctctcccctaattctgggcttagcttgtgttataaatctggagctctgagagctaaaatatactctgaacttttcttcagggaamttaaagatcaattttccactttttaaggagatgcatctaacagaaaatatgggtgtttggacaaccctcagtgatttatgatcctctagccagttgcccagactcatctgcataattatctttctcatttttcctggaatagttggggagaaaaatcaaaagaaataattatttaatattctcagatcatatcatttggaagggcttaagataccctaacagctttcaaatgtcacagtccttgaaataataatgtattatgagtatgggttttcagaatacgtagagcttgatggcattgatttttcaattttgttataaa

SEQ ID NO: 438247 - DNA, 628 bp, Homo sapiens
tgatggctatctgcctatgtaaagtataaggaaaatttgaacaatttgatctcagaaagtgaggactcagaaaaatgaaagtgctgaatttctctttaattttctctaattcatcacctttatagacctggtctttaaaaattatttgtacaatgcagtcaccaataccctgaaactatctctcatctttgttctgaagaatggaaaaaaaaaaaaaaacgctctcccctaattctgggcttagcttgtgttataaatctggagctctgagagctaaaatatactctgaacttttcttcagggaacttaaagatcaattttccactttttaaggagatgcatctaacagaaaatatgggtgtttggacaaccctcagtgatttatgatcctctagccagttgcccagactcatctgcataattatctttcycatttttcctggaatagttggggagaaaaatcaaaagaaataattatttaatattctcagatcatatcatttggaagggcttaagataccctaacagctttcaaatgtcacagtccttgaaataataatgtattatgagtatgggttttcagaatacgtagagcttgatggcattgatttttcaattttgttataaa

SEQ ID NO: 438248 - DNA, 621 bp, Homo sapiens
cagggctagcactgggtgggcaccttccattcgtgtgattcatgagcattggctcatatcattttacagctctaccatcttcagcacaatgtttcaagcacattacggaaggggaaagggaaggtggaaaaggcacacctgcgtcttagcaacaatggtctagaaacttgtggatatctttgcaaatatctttcctgctcatatttcactggcaaaaacaagttgcatgtccatatgtaaagctggtagaagggttagatgtgagacttattggtgagaaatggctatcagtcccatcctaataattactctgctctgtctgggcatgaatcttggcagagagctggccacctcttccacacaccctcttcagtaaggaaaggcartgattcttaatctggggttcaggcgctaccaaaacataaacatggaaagctaattttacttgaggtattattttctatgaaaagaaagatatattctatagtatagtgtataatttgcatacatttttaaactgaaacatgagattccaagaaaataacatgtttcaattatcactcaaacacacacaaacaaacacacacaggcacacaaatattcacacagagcatcaatcat

SEQ ID NO: 438249 - DNA, 598 bp, Homo sapiens
ctgcacgttgtgcacatgtaccctaaaacttacagtataataataaaattaaaaaaataataagaataatataattttgccatggattttagaactgaaagattccctgaycccttttctcttcccctatcaaagagatagttcaaactttagagaccacagtagaagttcaatgctttatttgccccaacttaggtgaattactgaaataagacacaggaacaagcttcaccaaacttccttctccattgccagaggttcctttttatatggaaggtgattttcttctcctctctaaaagtgcacaaatgtcatagagagaggaataaattagcaacacaaaatctcatggtgttgcatgaaattaatttttaatccagattaatgtccaatgcagaggtagaagaggaaacgaaagttgatgggggcagataaagtataaaagaataagactttggaggtgacaaggatgaagcttggggtggcccccatgtggaggataggcaacttctctggcagaggtcacacagacaggtggggaccgaggaccccactgagcctcctttttcttctccccagctgcatacaagtgtggtat

SEQ ID NO: 438250 - DNA, 598 bp, Homo sapiens
ctgcacgttgtgcacatgtaccctaaaacttacagtataataataaaattaaaaaaataataagaataatataattttgccatggattttagaactgaaagattccctgaccccttttctcttcccctatcaaagagatagttcaaactttagagaccayagtagaagttcaatgctttatttgccccaacttaggtgaattactgaaataagacacaggaacaagcttcaccaaacttccttctccattgccagaggttcctttttatatggaaggtgattttcttctcctctctaaaagtgcacaaatgtcatagagagaggaataaattagcaacacaaaatctcatggtgttgcatgaaattaatttttaatccagattaatgtccaatgcagaggtagaagaggaaacgaaagttgatgggggcagataaagtataaaagaataagactttggaggtgacaaggatgaagcttggggtggcccccatgtggaggataggcaacttctctggcagaggtcacacagacaggtggggaccgaggaccccactgagcctcctttttcttctccccagctgcatacaagtgtggtat

SEQ ID NO: 438251 - DNA, 424 bp, Homo sapiens
aaacaatacccaaatcttctcagtaattccagcctactaggtgtgcctggccttgaatcactcaagggctcactttcaccaaagacattccactcttgagtcttttcttgctgttaggagacaatttttcctggaacccaggtgttctaggcatcaccagcctcctgagagtgcaacagccatcatatcaatttaaaaaactgttccgaggactctccattgctctttagttagaaatactccaacccagagaggaagggtgaccttcccaaatatttctgagaatcctccaaagtacttgcacctataatccacatgtttcttaggtcccaggaactatggrtcctagataaggccactttccatttagacatcctcaggtcagtgggttgaagagccaatgatgtcacgcttatgcaccaaa

SEQ ID NO: 438252 - DNA, 587 bp, Homo sapiens
acgccagggaatggaatgcctgtgtagcacatgttacatcgccctgctacttatccaggatgtgtcaggaaaatgtttgcacaaagttgcatagtgtgaaagctgaagctgctgattggcaaagaagctgagtcaccgaaggaggataatcccaggcagtacagaatgagctcagctgaggttgtgcaatgggttgtgaatgacgatgaagttgtggatcacctctggttctgagacactctgttcttggtgttcagttggacaaaacccaaactcttttcctccaggtagctcacatcacaaagggacagtgtgggcctggagaagctaactctgagaggctcccttccatgaggaagacaactcatggtggtagtgggtccctcaaagagatcayaagagacttccccagtaactttcttcctaagcatatttgaaaatacttgcatttggaagagcaaatgcaagtacacagatttttgttgttccgtgtgtagtaagtacatttcaccctgtacctgtaaccagagcactttcagattctaggccctgaagctcattttgcccacactgatgggtgcctctgt

SEQ ID NO: 438253 - DNA, 602 bp, Homo sapiens
taccagctgcctcagttcaccacatatgtgatgagtcacattgtccacacccagtgttaaaactttttggccaatttcggatagtgctscatctatcatgccacaataactcacaagctgaaccctattgacacccagttgcacaagcaaactttggatcttttttaaagtaaagggccgtatttattgtactatgtatgtatttcctaaccatttaacacacataaaacagcaccaccatttcattaaagtcctatcatctctttgcatgtgtcactgatgttttagtgttgtgcctctaatcccacttttctcatgagcctgtggtttcttgtgtgattttgcatagcatggtgatttttaggaaggcatatgctgtgttctagcagaaatgactgtaccttattgtctagtataattcttaccaaaactatcatttttcatgtgaggaaaatgagattcaaagagtttgagtaatttacccaagaataacatctggtaagtggttaagcagagattcaagctatctgctgtgacatattatgaaaaccttgggtctctcatttgatataggagccagcttatgttttgaggtggatttc

SEQ ID NO: 438254 - DNA, 512 bp, Homo sapiens
cagcttgcatgaagatgaggctctgatggcagcaaaagatcaaaattacccttaaagttctctaagaaagatatcatactggaaactgatatacatcactccttaagaacagttttcctctttgtgtttttctctgttggtaagttcctttagttgagtctcagatgaagtcaatgactttggttaaggatctccctgaatcacattcagcagaaagacatgctcagcctgggaactgagaccagcaaaagggrcaattgattcattcttccatgtaactaacagtcacaacctcaacagaatggctgacagataaaaactacagtgtaaattgctatttagcattgggttattgaatgtttgttggtttgctgtttttggtttttgtttgttttcttttttctcttttattttcctgggtgggaggaaggctgggctcatagggatcactctactaagcatgattcaatgcaattgttcagcaaaaaagatagcaagttaagagccacagt

SEQ ID NO: 438255 - DNA, 515 bp, Homo sapiens
ataggagcccttatgagtactggaaatatcctacaactgatcagggaagtagttacatatatgtacatacagtcatgggtctgagtcatgtggggacacattcygagaaatgcatcatctattttgacgttttatgaacgctgagtacatatggacacaaagaagggaataacagacaccggagcctattgagcatggagggagggagaagggtaaggatcaaaaaactacctattgggtgctatgctaatcacttggcttatgaaacaatctttacaccaaaccctcaagacatgcaatttatctgtataacaaatctgcacatgtacccttttaacctaaaagttaaaaaaaagaaagaaaaaaagagaaagtatcaatacattcaaagttggtggtcatatggtccatatttcctgacaataatgtaataaacataatcaataagaaaatggattgtgaaaaaaacccacctaatatgagtgcatgtgttagatatttaagaatccctgaca

SEQ ID NO: 438256 - DNA, 515 bp, Homo sapiens
ataggagcccttatgagtactggaaatatcctacaactgatcagggaagtagttacatatatgtacatacagtcatgggtctgagtcatgtggggacacattctgagaaatgcatcatctattttgacgttttatgaacgctgagtacatatggacacaaagaagggaataacagacaccggagcctattgagcatggagggagggagaagggtaaggatcaaaaaactacctattgggtgctatgctaatyacttggcttatgaaacaatctttacaccaaaccctcaagacatgcaatttatctgtataacaaatctgcacatgtacccttttaacctaaaagttaaaaaaaagaaagaaaaaaagagaaagtatcaatacattcaaagttggtggtcatatggtccatatttcctgacaataatgtaataaacataatcaataagaaaatggattgtgaaaaaaacccacctaatatgagtgcatgtgttagatatttaagaatccctgaca

SEQ ID NO: 438257 - DNA, 605 bp, Homo sapiens
agaagtactttaaaagaagaaactgtaaccattcaaccatatgtatctcaaaatatttattgtcttttattaattaaataactataatactacgttttcagatggctctgaaatgtgttttgttttgttttgagacagagtttcactctgtcacccatactggagtgcagtggctcgatctcggctcactgcaacctctgcctcccaggttcaagcaattctcctgcctcagcctcccaagtggctggaattacaggactccaccatgcccagctaatttttgtatttttagtagagacggggtttcgccatgttggccaggctggtctcgaactcctgatctcaagcgatccgcccacctcagcctcccaatgtgctgggattacaggcatgagccaccacgcccagccctgaaatatttcaaagcttcttttttattctgttatttgtacagtcttccaaatctcactccattataataaacataatttaaataagyttaatataaatataaaaatgctagcagtatattttaaattcagtttaataaagtaaaaggtaagcagaaaaattaaaatgtctaagtttctctctaatttacttga

SEQ ID NO: 438258 - DNA, 577 bp, Homo sapiens
tggaatggggcccaggacaggcccctcatggcatttcccaaaatcgggttcccatgtttatcaaaactagagtgacactgattagcccaatgttttccttttctacattttggacatatttcaggctcaacacttttctttcttcctctatctggcggcctgacytgctgattttttctacatactttttactatgaccatgctttccacagttaaaacaagctccaggaaacagagtatttcctttatccactctcagtcctgccattgcctgtgccaacaaagtagctttatgcagattacctctgataccatcacaggccttgatataatcaactaaatgtgctttccctctaatagttcgcagagcagcctggcaatcgggattagcattgtcgaaagctaatgaccgcaacactatatcctgagcagccaaatctgcaatcacctttttaagagactcttgtaaccaagctataaactccacatatggttcttttggtccctgtttgacagcactaaaggaacgttattgttctctacctgaagtgatttttttccccaagctctattgcgc

SEQ ID NO: 438259 - DNA, 561 bp, Homo sapiens
attgtgcaaaacctttggagaaagcattgaacccatgaaatcagccatctaagaaaaagtctctaacatgggatctgtaagggtgtgctgaaattttaaatgtgaatgtagtggaatcaatagttttttatttttatttttgaagaattttaaggacaaatgaagaatcgatacttttttgaaaatgtgcaatatggttgagtgcgtgcygccaaaacagcataatcaccctggacccgtgggaggaggctcttttgatgagaactgactttccagatgaaaggaggcctgcctataaacaagctagcgggaacacattagcattcttacagggggccgccaggtttcaataatgccagtggtcctttaaccaaaactgccagaaatgttctccctacataaaccacagaaagtatgatcatttaccacccaccacgaatcatattgacataatttttttaactttgaattcttaaactaaggaggatggtttgggcttgggtatatctccttgaggttatgttatgaatgatttggactgtcatgggaaagatgcatgtt

SEQ ID NO: 438260 - DNA, 619 bp, Homo sapiens
ctcactggcaaccccaacagttcccaaatgcctcccaggactggcagcttccaaagcacttggtgagctcattacaatacaagtgtctcagaccagctgaattagaaggtctggcatgtgtgtttaacatgctctgtgggcaggtctcatctactgccaggtttggaaccagtgatctacacaaagtaaaattttcttactgggtcagtatttaatactagtgaaatttgggaaaaagcaaatattaaaataataagtaccagaattgtatttgtccaaaagatgttttattgtgctgttctgggctttaatgtacagaattactrtatccagctgttgggcagaggttggacatgctaaatgtcaggtgtcatgctaatgtcaggggtttcctttccctttgcagggtgctgtctcattttgttttctgcctttttgatggttaccttgaacctgagcaattggtagtttcaggtgaaggaagcaagtgtggatgatattgttacaattttggagacccacatgtgtgaggtagcctaggcgaatgttgaagctctgtttagcatttaccagtccccatctgcggcagatctgtgctaggcacagggacacagagaga

SEQ ID NO: 438261 - DNA, 619 bp, Homo sapiens
ctcactggcaaccccaacagttcccaaatgcctcccaggactggcagcttccaaagcacttggtgagctcattacaatacaagtgtctcagaccagctgaattagaaggtctggcatgtgtgtttaacatgctctgtgggcaggtctcatctactgccaggtttggaaccagtgatctacacaaagtaaaattttcttactgggtcagtatttaatactagtgaaatttgggaaaaagcaaatattaaaataataagtaccagaattgtatttgtccaaaagatgttttattgtgctgttctgggctttaatgtacagaattactgtatccagctgttgggcagaggttggacatgctaaatgtcaggtgtcatgctaatgtcaggggtttcctttccctttgcagggtgctgtctcattttgttttctgcctttttgatggttaccttgaacctgagcaattggtagtttcaggtraaggaagcaagtgtggatgatattgttacaattttggagacccacatgtgtgaggtagcctaggcgaatgttgaagctctgtttagcatttaccagtccccatctgcggcagatctgtgctaggcacagggacacagagaga

SEQ ID NO: 438262 - DNA, 533 bp, Homo sapiens
aagataaggggctctgctgtctgtcatgtgaggccaggccagagtcaggttggaaagtaggccatgatatactgggccaaagagacccgtttaacacagttttatggcttgtaagggtgactttccccaggcttcttagacagggatttgagcaagaaaaaaaggttagagttcagtccttgagatatggacagaagkctcccgcccccatgccacagagcccatttctcagatgtgaggacctgaccgccaccactggagatgcagtattgggattttgtcatcaccttccccagggccttctttaaaatgcacattttcagaagaataggtgtgggtgtaaataacattttggtcctcaacattcctggaggggagagatgagcagagcagggctgagacgcggctgagggtcctgtgtggggcggctgtgctgaggcaggcagatctgctcacctgagtcacttccacggctgtgtccactcacttgtccccaggcaggatggggcacctggcagggggctgtgtgttcc

SEQ ID NO: 438263 - DNA, 533 bp, Homo sapiens
aagataaggggctctgctgtctgtcatgtgaggccaggccagagtcaggttggaaagtaggccatgatatactgggccaaagagacccgtttaacacagttttatggcttgtaagggtgactttccccaggcttcttagacagggatttgagcaagaaaaaaaggttagagttcagtccttgagatatggacagaagtctcccgcccccatgccacagagcccatttctcagatgtgaggacctgaccgccaccactggagatgcagtattgggattttgtcatcaccttccccagggccttctttaaaatgcacattttcagaagaataggtgtgggtgtaaataacattttggtcctcaacattcctggaggggagagatgagcagagcagggctgagacgcggctgagggtcctgtgtggggcggctgtgctgaggcaggcagatctgctcacctgagtcactyccacggctgtgtccactcacttgtccccaggcaggatggggcacctggcagggggctgtgtgttcc

SEQ ID NO: 438264 - DNA, 647 bp, Homo sapiens
catttggacaagggtcagtacaaagatatgcaaagaataaaatgcaccacagattttcataatttgtaccttttccttatataaatttatctcggtgattctatctagttttcttaatatacaattgtaggtttgtagttgaaaatacctgtcacgttttcttttttaaagactatactcaatctaatactgaacattttaaattcatgactatagtctagagttctaacataaaaagtgaaatgtgctttattcatttctgttgaagctactattcacacaccctgtttttcaaaccaatgcaccctatgtttcaaaccaaagtgctacgtatggtctctaataactttttcagtcagtgttccagttatctgttgtgtaacaaagtagtamaaaacactggcttaacacgaaattattcttattacatatgagaatgctgtgggtcaggaatctgaacaaggcagtgtgtgttggctgcttcctgaagtctctggtctgcatcaaggcagtgtagtctgcttcatgtggtctctgatctcagcttgaaggacagccaggtctggggacattgaggaggcacccaggcctctccttgtggccagactggacctcctcccagtccagcagtctcggagaactaggtt

SEQ ID NO: 438265 - DNA, 475 bp, Homo sapiens
ttggctgcttcaccagcaacagaaactccaaattaggatgaccggattccacaaataaaatacagaatgcccagttatatttgatttcagaagaacaactaactttttagtatatgtcccaaatattgcatgygatatactcattctaaaaatgatgcattgtttttctgaaattctaatttcactggtcatcctgcattttatctggccactccaagtgccttcaatgggccaagtgccagtgtggcttcacgccttaacttggcccaagttgctttgtccacagtaaagtcttcataatgcactctcacgtggattggggcactttgcaggaccatggagtttgatcacacaccgtcgtcccctggatctgcgtgggtccttctggtgggtagtcatacattggctgtcagaaaatttgagcttggctatttttgtctgtaatctagagtttaacaggcactaattttcataa

SEQ ID NO: 438266 - DNA, 475 bp, Homo sapiens
ttggctgcttcaccagcaacagaaactccaaattaggatgaccggattccacaaataaaatacagaatgcccagttatatttgatttcagaagaacaactaactttttagtatatgtcccaaatattgcatgtgatatactcattctaaaaatgatgcattgtttttctgaaattctaatttcactggtcatcctgcattttatctggccactccaagtgccttcaatgggccaagtgccagtgtggcttcacgccttaacttggcccaagttgctttgtccacagtaaagtcttcataatgcactctcacgtggattggggcactttgcaggaccatggwgtttgatcacacaccgtcgtcccctggatctgcgtgggtccttctggtgggtagtcatacattggctgtcagaaaatttgagcttggctatttttgtctgtaatctagagtttaacaggcactaattttcataa

SEQ ID NO: 438267 - DNA, 586 bp, Homo sapiens
catgccttttttcagttataaacataatctgaataactttcaagcccttaaatattttcttttcatggcatttaaagggtgaagagttgtagcattgtgtttgcccgaataaatgccatgtattgagataagccatgccatgaggaacatccttaccagcccatgactatttcctcagaattgataaataaggataaactcagacagaactggtttagttcaactgacatgcatttttttaagcaggaaaatactttttaaaaaaataactatataaaataaatggcagctgagagcggtggttcacrcctataatcttagcagtttgagaggtcatagcgggcagatgacttgaggtcaagagttcaagaccagcctggccaaaacggcaaaaccttgtctctactaaaaatacaaaaaacagctgagtgtgttggtgcacgtttgtaatccttcctactcaggaggtggagactgagattctcttgaacctgggagacggagtttgcattaagccaagatcacgccactgcactccagcctgggcgagcgagaccttgtctgaaaaaacaaaataagtgaatga

SEQ ID NO: 438268 - DNA, 572 bp, Homo sapiens
aaactctatacctatttcctactatccttaaaaagwctgaatgcagaagtaatgtgtgcctgctcaccagctgttccaagtgtatggctgagcaccactcaagtccaagggaaacttccaattccaggtgttttgtccagtctcccatttcccagccaaccagaaaccaagcccctagcagaactatgactattcaccatctgaagaggaaaatttcccctctgcagagagcatgccccttgttgacaggcagctctgagcactgctcacctgggcaaagccaaagagaagagcaggagctgagacctgctctgtgtgcctcaggacggcccctattcctaacagcccaaaggacatgcacgatttccactgagtcattcaatgggacatcactgactgggactcaaccctgtacctggccagtgcctgaggctcaaacaaccagaacctggcccttccttcatggagcctccactcaagaagctacaggtagaaagcaggtccctgcagaaagggcccttcagctgaaactcctagaaaccaaaaccttcagctagggcatcttccccacc

SEQ ID NO: 438269 - DNA, 569 bp, Homo sapiens
taaaagccagaactatgcaaatatcatcctcagagaagtgtcctttatttctttcccttacccctgttcgyatcatttctacctctttccttcctactgccctgcaggtatgaatctcattcatttctggttgatctttcctgtttctttttgcacaaatgagtggatacaggtataaatggatcattcttcctcctcacactgaagaggaaggcaaactgcatccatctcaagcctgctgggagatcccaacagacactctgggcagctctcccaggaagaattcagcagagtagcccaaatgtcactggtggggctctggccactgagctggttcatgctcaaccacttgcctttcccatttacgggagcccagatgcccacctgatgcagccagagggaaaaatgacaagaggggacagaatgggtgacgctcatgtgtgccagcagtggtcagaagttcccttacccagaaaacaggaaacaaaagcaaaacaatttaggctatttgaacatctttgcaggatagggtatcaggaagttttaaagtaaaagccttcctcttacaa

SEQ ID NO: 438270 - DNA, 607 bp, Homo sapiens
acttacttctaaatgccactrtgcagaagctttttagtttgaagcccttgagttttcatgtgtgataatttgctaccaatataatgtgtatattctgtcgattacattgtataatacactttaaggtgtgaataaattgtgaataacatgtgtttattgtatgccttttatttatatagttttattgtacacaaattgtatgatattgaatgaattacgtgcaattgcattccattcagtgcactaggttttattacgtcaatgcttggaaatttgttccatcgtgacattgtctctagacaattttattttttgaattccatttgatcatgaaatgaatgagttcaaattatgttatatatttgcatatatatgaatacatatatattgtaaataaatttatgcatatgcagtatggataaatacatatacatgtataagtatatacacatatataattaagcctggttgaaattataattgttaattattttaaaaatggttctcttttaaaccacttgtggtatgattgacatataaacagttgtacatatataagtatatatctagatgagtttgggagtatgtatacaatcgtgaaaccatc

SEQ ID NO: 438271 - DNA, 608 bp, Homo sapiens
aaaagagtaaaactggaggaatctcactacctgacttcatatatactacagagctatagtgacccaaacagcatagtattggcatagaaacagacacatagaccaatggaacagcagacagaacctagaaacaaatccacacacctacagtgaactgattttttaacaaaggtrccaaaagcatacactgaggaaaagagaatcttttcaataaacggtactaagaaaactggatatccatatgcagaagaatgaaactagatccctatctcttgccatgtaaaaaaataaaatctaaatggattaacgacttaaatctaagacttcaaactatgaaattactacaacaaaacattgggaaaaattcccaggacattggtcacggcaaaaatgtcttgagtgtataagtaaatgtggtacttacacacaatggagtccttatttttcagccataaaaacaaatgaaatcctgtcatttgcgacatgggtggaactgaagatcattatgctaagtgaaataacccaggcacagaaagacaagcaaaggcaacaaaaggaaaaatgaataggatcacattgatgcgggattttttgtcccttagttcagc

SEQ ID NO: 438272 - DNA, 493 bp, Homo sapiens
ttatgttaaaacctgtggaaaatatctgggaggagacatggttgataagaatttttcagaaatatatgcagtttccaagaacaaatactattcctatttgtataggctaacctgtaattgtagtaaaaataatcttaaccacaattaagctaaagatgatatcaataacagtttaatagaacttatgaaacacttccaaatatgttatcacaattaacactcgtaacaacacttttaagaagggatttattaacttttgccttcaytgaagaaatatttatgtagtacttgtacatgcctgctatagtttcaacattttaatactgagctcctcttccatacgtagttctgtacattgctatcagaattcatttgctgagtcaagtgaaaattcgaggtgggattttgacagaaattgaatggatcatatcatattattatatagtatagcatattaattatatgatattatattaactaatgtggaataact

SEQ ID NO: 438273 - DNA, 574 bp, Homo sapiens
aaaaacaaagataaacagatgggacttaattaaactacaaaacttctgcacagcaagcgaaataatcagtagagtaaacagacaacccacagagtgggagaaaatcttcgcaatctatacatccaacaaagaactaatatatctggaatctacaaggaactcaaaggmatcagcaagaaaaaccaaacaattctatcagaaagtgggctatgacatgaatagacaagtctcaaaagaagatatagaaatggtcaacaaacatatgaaaaaacagtcaacatcactaatcatcagggaaatgcaaatcaaaatcacaatgtgataccaccttacttcttcaggaatggccataataaaaaaaataatagatgttggcatggatgcagttaaaagggaacacttttacactgttagtaggactgtaaactagtataatcactatgaaaaacagcgtggagattcctcaaagaattaaaagcagatctaccatttgatccagcaatctcactcctaggtatcttcccagaggacaagaagtcattatatgaaaaatatatgaaaatatatgaaaaat

SEQ ID NO: 438274 - DNA, 536 bp, Homo sapiens
ctctatccttcctgacatttctttctttgattataattggtagatgaacattaatagttgcatgtcttttgagtcaaaaaaatcaataatgtagttaktggctgcatgaatgagtgatataaggcacactttggatttgtactgtgttttgggcaagaggcaagaagtgtttgtaacacatgtgctacaaatccccagctaaggagctgagagacagggtaggataaggaagcattctgggcttcttagacccaggagttcttcatcttgaatcctagatctctcacttgttgtgtaatcttggaccagttactcaaagtttctgaaatgtaatcctaacattttttaaatgtagaggaaaaaaaataaacatttaaaactgagatagactcttgtgcatcaaacaacttttgttttgtttgtacatttaaaagattgcattccaacttcattaagaacatcatgcttctaattatcagtattttaaagatcagagcatatgatagcactttattatgttaaattttaatgtccac

SEQ ID NO: 438275 - DNA, 536 bp, Homo sapiens
ctctatccttcctgacatttctttctttgattataattggtagatgaacattaatagttgcatgtcttttgagtcaaaaaaatcaataatgtagttagtggctgcatgaatgagtgatataaggcacactttggatttgtactgtgttttgggcaagaggcaagaagtgtttgtaacacatgtgctacaaatccccagctaaggagctgagagacagggtaggataaggaagcattctgggcttcttagacccaggagttcttcatcttgaatcctagatctctcacttgttgtgtaatcttggaccagttactcaaagtttctgaaatgtaatcctaacattttttaaatgtagaggaaaaaaaataaacatttaaaactgagayagactcttgtgcatcaaacaacttttgttttgtttgtacatttaaaagattgcattccaacttcattaagaacatcatgcttctaattatcagtattttaaagatcagagcatatgatagcactttattatgttaaattttaatgtccac

SEQ ID NO: 438276 - DNA, 562 bp, Homo sapiens
gtagctgctatatagatagttgtgatgatgtattgtttagggtacaataacaagaaaacagcctgtatatgttcagtacagatacaattttttttttttttaatttatggctggtcgaatccatggacgtggaacccatgaatatggacggccaactgtattattattcattgtgcttcaaccacactctctgtcattcttttcatcaaacactgtaaaaatgcaaatgcttccatttcaagttttgcactcacgattccttctgccttcccccagatgttttctttgcttgctgtcctattttgtttctttagttcttcagatgccccttcttcaggaagtcttttcctgataatgctatccaacccatgttcctcaatttatacttgacacctcagctatattttagtttaaaawacgacatttatctcaaactggcttcacattatgtacttgttatttatttaaatctccctcccttgctagaaagttagcttttaaaggggcctggatttaatttgttttgtctattgtgccatctcctggaactagattagtgtcc

SEQ ID NO: 438277 - DNA, 622 bp, Homo sapiens
ctgtaaataatacacattattctgcatcaggcataaaagtgccttcacagtccagtaacctttgaattcaaaagacattgcttgttctgcccaccctcccccaactaatatacagtagcagaacagagacagcttaactaataaataattcatttgaaaaagagaagaatgggaaaagcagatcgcagattgttgaaaataacagtgaatgatatggggaaaactttttgattagactttgttttgctttttgattttctaaaacatttattttgggttcaggggtacatgtgcaggttttttatataggtaaagtagtgccatgggggtttgttgtacaaatcattttgtcacccagtatgggggttctaagcctmgtacccccatagttattttgtttatgatcctctccttcctcccatcatccagcctcaggtaagccctcgtgtctattgttctcctctttgtgttcatgtgatttcatcatttagctcccacttaaaggtgagaacatctggtgtttggttttctcttcctgaattagtttgttaagaacaatggcctccagctccatccatgttcctggaaaggacatgatctcgtgtgtttttatgcctggata

SEQ ID NO: 438278 - DNA, 538 bp, Homo sapiens
gtgtcaaatggaagggggacaataattgcatgtttcaaaatagctaaagagaacatttggaaagttcccaaaacaaagaaatgatgaatgtctgagatgatggctatactaattacactgatttgatcattatacattgtacgcatgtatcaaaatattacatgtacctgataaatatctacaaagattatgtatcaattaaaaataaaaaattatagaaatggagagacatgaagcacacagaagaaccaatatctttctgagtttgaagtaaaaaaaamcactgaaaaaagctcagtgacattttagaattccaaaggtaaagacaaattcctaatatctccaaaagagaaaaaaagattactatttagaaagaaattaaaagttaaaatcacattggcattagacctcttataagacatgtttaggaaattagaaaaaattatagaagacactggaagaaacattcaacgttccaaagtaaaatcactttagatctatcattgtacacatttaagccaacattgaaataaagata

SEQ ID NO: 438279 - DNA, 533 bp, Homo sapiens
attggtatcataaattaacattaaccataagttccatctaatcttcatgccccactcaagttttactagttgtccattaatttatgtaaagtaataatttctttgtaattcatgattactcattttacttaatatgtctctttagttctcttcaaactggaacaattcctcagcctttccttgtttttccatgctttaacccttttggaaattacaggccagttgttttttaggaatgttgctcaattttggtttctaattatgggttgccttatgatgaaactcaagttctatattgatgtagtttggctgtgtccccacccaaatctcatcttcaattgtaacgcccataattcccacgtgttgtgggatagatctggtgagagatarctgaatcatgggggtggtttccctcatactgctttcatggtagtgaatcagtctcttgagatctgatggttttataagggatttcccctttcacttggctctcattctctcttgcccgccaccatgtaaggagtccctttgct

SEQ ID NO: 438280 - DNA, 533 bp, Homo sapiens
attggtatcataaattaacattaaccataagttccatctaatcttcatgccccactcaagttttactagttgtccattaatttatgtaaagtaataatttctttgtaattcatgattactcattttacttaatatgtctctttagttctcttcaaactggaacaattcctcagcctttccttgtttttccatgctttaacccttttggaaattacaggccagttgttttttaggaatgttgctcaattttggtttctaattatgggttgccttatgatgaaactcaagttctatattgatgtagtttggctgtgtccccacccaaatctcatcttcaattgtaacgcccataattcccacgtgttgtgggatagatctggtgagagatagctgaatcatgggggtsgtttccctcatactgctttcatggtagtgaatcagtctcttgagatctgatggttttataagggatttcccctttcacttggctctcattctctcttgcccgccaccatgtaaggagtccctttgct

SEQ ID NO: 438281 - DNA, 533 bp, Homo sapiens
attggtatcataaattaacattaaccataagttccatctaatcttcatgccccactcaagttttactagttgtccattaatttatgtaaagtaataatttctttgtaattcatgattactcattttacttaatatgtctctttagttctcttcaaactggaacaattcctcagcctttccttgtttttccatgctttaacccttttggaaattacaggccagttgttttttaggaatgttgctcaattttggtttctaattatgggttgccttatgatgaaactcaagttctatattgatgtagtttggctgtgtccccacccaaatctcatcttcaattgtaacgcccataattcccacgtgttgtgggatagatctggtgagagatagctgaatcatgggggtggtttccctcatactgctttcatggtagtgaatcagtctcttgagatctgatggttttataagggatttyccctttcacttggctctcattctctcttgcccgccaccatgtaaggagtccctttgct

SEQ ID NO: 438282 - DNA, 603 bp, Homo sapiens
cctttcacttggctctcattctctcttgcccgccaccatgtaaggagtccctttgctgttatttcatcttccaccataattgtgaggcctccccagccatgtggaactgtgagtccattaaacctccttcttttataaattacccagtctggggtatgtctttattagcagcatgagaacaaacttataaatatatatttggcagaaatttggcaagtgtgatgtggtattcttctcattgaatcctgtctggtaacaaagatttaaatttgtcctgttatgaatgatttctacttggatcactgatatctgccaggattcatggatttattwtcttcagtagactataattcattactattattttgataaacatattgtctataatttgttcagtggaaggttatttaaagtggttcttgtgtctttttgaaatgtctctattactcactgaacacattcttactttctggtgtaaaaggtgtcgtaagtgcattttgtagtttctctttggctgtcttgaaatcagatatttttccagagccatgtttccttttaatgatgaatgttatttagaagccgagatttagatgctatgtgtgc

SEQ ID NO: 438283 - DNA, 603 bp, Homo sapiens
cctttcacttggctctcattctctcttgcccgccaccatgtaaggagtccctttgctgttatttcatcttccaccataattgtgaggcctccccagccatgtggaactgtgagtccattaaacctccttcttttataaattacccagtctggggtatgtctttattagcagcatgagaacaaacttataaatatatatttggcagaaatttggcaagtgtgatgtggtattcttctcattgaatcctgtctggtaacaaagatttaaatttgtcctgttatgaatgatttctacttggatcactgatatctgccaggattcatggatttattatcttcagtagactataattcattactattattttgataaacatattgtctataatttgttcagtggaaggttatttaaagtggttcttgtgtctttttgaaatgtctctattactcactgaacacattcttactttctggtgtaaaaggtgtcgtaagtgcattttgtmgtttctctttggctgtcttgaaatcagatatttttccagagccatgtttccttttaatgatgaatgttatttagaagccgagatttagatgctatgtgtgc

SEQ ID NO: 438284 - DNA, 596 bp, Homo sapiens
ccttgtttttgatgacagttgaaaaataaagctgctattatccttataacatatgtaaaattccccaatatgtagctattcaattatatttccytgtggcctctgattcaccatgttgggccactcctcagcatggacaatttccttaccctgttagtgctctggcaccatgcaccaggtcagcccttcaatgtgaacactctccttactttcttggactttgacacaccacagtagaggtgtggaagccctcctcatcctgctcactctctgacaccttatatcaagctgcctgccaagggtatacttctcactatgatcaagctctgacatcttgctttgggtcattgttttcaccaactgtcaactggagatacctaccttgatcactcccacctaatggatttaggattgaattgttcaagaggtaacaatgaaagaacactcatttgatttttaaatgtaaaaaaatattattttaacgtaaaatatgtatcgagataactgcagatttgcgtgcaaacttgagaacaactacacagaaataccagtgtacattttacatggttacacaattacatcaatggtaacatttt

SEQ ID NO: 438285 - DNA, 596 bp, Homo sapiens
ccttgtttttgatgacagttgaaaaataaagctgctattatccttataacatatgtaaaattccccaatatgtagctattcaattatatttccttgtggcctctgattcaccatgttgggccactcctcagcatggacaatttccttaccctgttagtgctctggcaccatgcaccaggtcagcccttcaatgtgaacactctccttactttcttggactttgacacaccacagtagaggtgtggaagccctcctcatcctgctcactctctgacrccttatatcaagctgcctgccaagggtatacttctcactatgatcaagctctgacatcttgctttgggtcattgttttcaccaactgtcaactggagatacctaccttgatcactcccacctaatggatttaggattgaattgttcaagaggtaacaatgaaagaacactcatttgatttttaaatgtaaaaaaatattattttaacgtaaaatatgtatcgagataactgcagatttgcgtgcaaacttgagaacaactacacagaaataccagtgtacattttacatggttacacaattacatcaatggtaacatttt

SEQ ID NO: 438286 - DNA, 623 bp, Homo sapiens
agatgcaatactcctggaacactttactacttaatgtataaagaatatttgtaaaccaattagaataaaatgtcactgtaatcacaataactaatacagcaaaacatagtcatttctttctaaaagaacaaccaaaaccacagtagctagcaacatagcaataagaaatgcctaagtagaaaacttgagaactttgctaaaggacataaaatacaacttaaagtaattgagagacaaacaatattttgaataaataccaataggaacaaagaagttatcctccagagcttgctatggaatagaaagaagagtatagagaaatgtataattccatttatgtgaaaaaataaagataagattagatgtatatgaatacaggcataattgcagagaaaaaggactgtagaggcraacatcaggctcctacaagtccttatctctgctctagagaattttagagaatatatttgtatgtgtgtagacagggatgtgggaaaagtattattagatattgttatgaattgatgggaatatattacttagaataaagggaaggtaaaatatacaaagatgcactcatacagaaaaattcatacagttaaacatatgaatgaatgtgttta

SEQ ID NO: 438287 - DNA, 631 bp, Homo sapiens
atatttttaattaaagatatacagcattttctgaataacaaatatgtctttttttatgtgagaaagggaaataaatacattcaggtaagaccccaggtatcaaggaaaatgaagacactgagcaactagagatggaatcttgagaaagaaaagtaaaagaatctcagcagacacaaataagattgaaattacttttaccttagtcctgatatccctggatatgtacagattcttcacatgcctatacaaacacatatgactgattcccaaattaatcagggtcaaaaatgaatccaaagaagaaacatttactaatagttcctacaaatttagcctataaatcacactatttgaagatttgagatctacgaaaaatatagtttaaactctgtgtatcagtaatgggcagtttctaaactccaaactgatagagragaaaggaatgtgaagatcagaagactcttactgaatcccgcagatatatgagaattctctgtgttcaaaagggcagcatttgagtggaggtggtgtgcatggaaggctgttgatggaaggaccatagcaaatgtataaagaattctcaaaattcaacagtaaaagaatcaatccaatgtgtaaaatagtaaaagat

SEQ ID NO: 438288 - DNA, 583 bp, Homo sapiens
agatattgacaacatttcaatttcaatgtagtgttatttacaagtgtgttctggggagtcagcaagttctttggtttgaaaagcaagacattaaaatatgtcatagttactttcagttaaaggaaaacaccaaatatttgatgaaaatcatgtggcaaatatgtataactattcaaagaaaaagtaatatttcaatgctctatacatgtggtatcrttctctggtatttattttaaagtgcctttttgttacagttacatcagatgaattctcaaagattttgtgtttttcaggacaatgagcataaaaagaatactaatatattctgagatttaaagtacttaataaggaggtgtagctggccttcaggaatcatgttttgttaattcaatacaaagcaagagaagtttgatgttttgcctagtagtagcacttcaaccattcagagtgtaaggtccagagaatgtaatttccaaagtaggttaataattattcttcaccagcagctattccctgggtcacacagtcttgcaaccctggtcgttatgaaaattaagctgtgtctgttatacatgttttgggg

SEQ ID NO: 438289 - DNA, 583 bp, Homo sapiens
agatattgacaacatttcaatttcaatgtagtgttatttacaagtgtgttctggggagtcagcaagttctttggtttgaaaagcaagacattaaaatatgtcatagttactttcagttaaaggaaaacaccaaatatttgatgaaaatcatgtggcaaatatgtataactattcaaagaaaaagtaatatttcaatgctctatacatgtggtatcgttctctggtatttattttaaagtgcctttttgttacagttacatcagatgaattctcaaagattttgtgtttttcaggacaatgagcataaaaagaatactaatatattctgagatttaaagtacttaataaggaggtgtagctggccttcaggaatcatgttttgttaattcaatacaaagcargagaagtttgatgttttgcctagtagtagcacttcaaccattcagagtgtaaggtccagagaatgtaatttccaaagtaggttaataattattcttcaccagcagctattccctgggtcacacagtcttgcaaccctggtcgttatgaaaattaagctgtgtctgttatacatgttttgggg

SEQ ID NO: 438290 - DNA, 487 bp, Homo sapiens
taaattgaatgatttagccaggaggatactagtaatcaaaccagacaagagccagatgagctgggttttaatagtggtcattgtgtcttacctgtgtagtgaatattgtgactatttgaaaaccactgtgactgaatattttgttatttaaatatactttttttctctttttttccactctttattttctttttcacctctctctgttactagcagcaaatctatatgggtgtgcagcaacctcaattcttgccctttagtagaaagaatttgaccaatgaggcataggtcaaagatatttctttcatctgccattgtttcatccttggaatttgtgtctgttttgatgcctctactcccattaaagaagagtttctgaaaaacaagcaataaatgtaratagcctatatttctcctctgtctagtccacatgggccctgttttcctagagtatttgcaacattgggcttccagggtgcaattcaca

SEQ ID NO: 438291 - DNA, 490 bp, Homo sapiens
cttgctgctttgtctcttgaaaagccttctctccttctctgttcaataggggcttacattttgccttatatgtgaagcccttccctactcttttcctaatccatcatcttctgtccttcccatgtaacactgtgcatattttaattggttttcatgctatatcactttctttgactagctgactttctcattagactgtaatcctctttgtagcaggattataacttccaaatttctagtatttggaaggttgcaaagaacatagtaatgataaaaaacacttgtgaaaaaaattaataaattaatgtcagaactaaaaaggatgtatactccatggaatactatgcagccataaaaaatgatgagtttatgtcctttgtagggacatggatgaaattggaaatcatcattctcagtaaactakcgcaagaacaaaaaaccaaacaccgtatattctcactcataggtgggaattgaacaatgagaacat

SEQ ID NO: 438292 - DNA, 529 bp, Homo sapiens
tgtgtggaaaaccttctcgatattgatcttgtcaactatttttttattattataccaatagcacagactgcaaaggtaaatacagacaagtacaactccatccataaaaagcttctgcacagcaaagaaaacaatcaagagtgaaaaggcaacctatggaatgagagaaaaatttttgcaaattgtatgtctrgtaagaggttaatatacaaaatacataagaaaataaaacaactcaatagcaaaacaacaaaaacaagataactcaattaaaaaatggacaaggaacatgaataggcatttctcaatagtagatatacaaatggccaacaggtacgtgaaaacattaatgatcagggaattgcaaatcaaaatcacagtaatacatcacctcacatttgttaggatggctattagattaaattaaattaaacacagaacaaacacatactcatttctgagtatatatccaaagaaaataaaatctggagctctaagaaatatctgcactcccatattcactgtagta

SEQ ID NO: 438293 - DNA, 529 bp, Homo sapiens
tgtgtggaaaaccttctcgatattgatcttgtcaactatttttttattattataccaatagcacagactgcaaaggtaaatacagacaagtacaactccatccataaaaagcttctgcacagcaaagaaaacaatcaagagtgaaaaggcaacctatggaatgagagaaaaatttttgcaaattgtatgtctagtaagaggttaatatacaaaatacrtaagaaaataaaacaactcaatagcaaaacaacaaaaacaagataactcaattaaaaaatggacaaggaacatgaataggcatttctcaatagtagatatacaaatggccaacaggtacgtgaaaacattaatgatcagggaattgcaaatcaaaatcacagtaatacatcacctcacatttgttaggatggctattagattaaattaaattaaacacagaacaaacacatactcatttctgagtatatatccaaagaaaataaaatctggagctctaagaaatatctgcactcccatattcactgtagta

SEQ ID NO: 438294 - DNA, 562 bp, Homo sapiens
gtttgtagtattacattaggctcatatgccttaaggtcaattgtggcatataatataacacaatcacaggagtgatatctcatgacattcacaggttccagggattcgagatgtggaattttggggctattcctagaaattttccctactgcagaattcactactagagactccaaaaacaagtagttgaagatttattttttttaatgaggagtatgactagagctcagatgggtaaaatatcccgagagtttaattttccattttaaagatggcaaagtgaatacagtagtaaaacaatacattattcaattagtctttggaaaaattatgtatatttggcaaaagcatgtttaggtctcaattttacacaacagacaaatgaaacatgaaataaaatatattagagaaaaacaaaacatatttctaatatataagatgactttaaaagacatattttgytttgttaaatattaaccttttaaaataactaccataaacatttcaaactaatcaagataaatcttgcaacttacaaaaagccattgatatacagtaaata

SEQ ID NO: 438295 - DNA, 525 bp, Homo sapiens
cagaaaaacaggaattctcacacactgctggcagaaaagtgaaaagatacaataacctagaaagccagtgtgaaagttttctacgaagttaaatgtacatttactatatgatccagccagttcattcctaggtattacccaagaataataaaagcatatgtttgcacaaatatttcttcccacattcatagcagctttatttgcartagcaaaaaaccaaaataaaatcaaattcatatcaagagattagtgcataataaaatgtgtttccataaaaggaaacgctactgagcaataaaaaggagcgaattattgataaaagtgatatcatagatggatatcaaattaaccgtattaagtgaaagaaattagaagaagaatagaatgcagagtgtatcatatcatttacatagaattccagaaaaaaacaaactaatcaataatgacagaaagcaaatagtggttgccttgggatcctgggcagagagaggttttggagggagcttttaaaacagaaaattagaa

SEQ ID NO: 438296 - DNA, 575 bp, Homo sapiens
aatgataaaaatacaaataaactaatttaaaaatacacaaaagcttttaatatattttttccaaagaaaatatacaaatgaccaagataactgaaaatatatgtccacacaaaaacttgtccacaaatgttgatagtaatataattcatgatagcctaaaagtggaaaaaattcaattgttcatccctggaaaaatggataaacaaaccatggtatatatatctatacaatggaatattgtttggtcataaaaatgaaatactgatacatgctataacatgaatgcatttttaaagcatcatgctaagtgaaagtatacagttacaaaatttcacatatatgattttattaatttgaaagtttacaatagagaaatttatagagatagaaagtagattaatytcttagagctgaataggagatctaagggttaggggaaatagtttaaaaatataagctttttctggagatgatgaaagtgttttaaaattgtggcagtagtcacatatatctgtcaatatacaaaaaacactgaactatgcattttaagggggaaaattttatgttatataaag

SEQ ID NO: 438297 - DNA, 371 bp, Homo sapiens
aatcagaaataagacaagaatgtccagcataatgtcactatttcattcaataacatattgaaggttgaaaagaaataaaacaatgaggaaragaggataataggaatgagaaagaggcaaaaattttttatagatgatgtcattatcttcacagaaactgtaagtaaataattgacaaattattaaaactaacataaaagagctacaatctgtcagatataataaagcataataatcgctatctataaatttagaaaatggaagaaagaaggttatattaagaaaagcagagagagagagaggtggcgagagagggggaaggaaagagagaacaaaagaactacaaagtaccaaacgaaatatgtgaaaaa

SEQ ID NO: 438298 - DNA, 569 bp, Homo sapiens
ttttagttactaatgtctgaggcaatagatagcacctggtgcaggctacagactaaccaatcagcttgggaggaagaactgatgaatgaaatgctttgtcgagtaaaagcttggaaaatattgagcatattcccgggaatacagaaggccacacacwtgcctagggtggtgacatgaatgcatgtgagtcactcaaatgcctcaaccactcacctttgactgatcttgaagctctgcacaaaaataaagcagtcaatagagactgtccctgcggaagcagagacactggactggctagacaaataattaaaatcagctattttaaatatacttaaaaatctaaaaaaaatttccaaaaactaaaggaaagcatgagaagaatgtctcaccaaatagagaatacagtcatgtgctgctgcatatcgaagtttcagttaatgatagactacatatacaatggtggcctcataagaatataataccacattgtaacagtacgtttctatgtctcaaaatagactcaccattgtgttaaaatttcctgaagtattcagtatggtaacctactg

SEQ ID NO: 438299 - DNA, 563 bp, Homo sapiens
accattttttttttgaccattttctgaggtacagggatagctatctctcaaacaaatgttgctgctatcaacccatcgaggcaagaacagtcagtgtaatttagtttgtcactccattttgaaatttcctacaggagttaaaaggcattacatagtataaayttatgtttatggggacataaaacataaacatgtaattgtgacaccaataaaataaagggagattgaactgtaaagaagtagagttcctgtatggaactgaagctaaattagtatcaatataaaagaaattgttataacttcaggatttttttaatgtaattcccataataaccacattgaaaatatctatagaataacaaaaataaactgattgggtaatcgaaaaaggtctctacaaagaaatcaactaaactcaaaggaaggcagtaagggaggaaatggaggaggagaagctataagacaaggagaaaagaaataacaaaatggcaatagtaagtccatccccaccagtaatttctttaaatgcaaatggattaaactttccagtcaaaagacatgga

SEQ ID NO: 438300 - DNA, 548 bp, Homo sapiens
agaaatcacaaggtaaatcacattaaattgctttaagataaatgaaaataaaacacatcacaccaaaacatatggaatgcagttaagtgactgtagtgaaatttagagctataaacctatatttaaaaagaagatagatctcacatcaataatggactcttctacttcaacacactgaaaggacaaattgaaactaaaatcagcagaagggaggaaatggtaaagattagagtggaaatcaatgtcatagacaagagaaaaacaatgcaaaatataaaaccaaaaagttctatgaaaagaaaaaaatcagcaaatctttagctacacagatttttaaaaaacaaagaaaacttcaatcactgaaattaagaagccrtcactactgatcttagagaaatggaaagcattctttttttaggagagacagggttccaccatgctacttattgtccatgttcacagaaaattatttaaaatttttcagttcaaaaagattttgttgatttctatgatgggcagatcaacaaaaaagctttcaagaagaaaaa

SEQ ID NO: 438301 - DNA, 631 bp, Homo sapiens
taggtcttgaagaaatgtttgtgacacagtcataaatcatttttgtcagtttctagaaattaatacattgtggattaagcgagacttatcaaagaagtataatttttcacttagagaaaccttataaatggaactgaaactaggtgaatttgggaccaaaataactgtttgatattagaaatatcatagtttctgcccagttttaattttgtaagtaaactaaaattgtttaaaacagatgtaacaagaagtgacaaatgtgacacctaataataattacatatatgttaataattttaattcacrgttgaaaataatatttgcaataaaaaataaaaccttatataagctaatcctaaatagatgcagttgctttctaaatttctggactataaattccaggtggaatattagaaatattctgatactatagatgcttttatgcatatattctgcttttaggacggaaacttattttgtgtaaattaatagcagagagcaaataaggctttgagtccttagtgtggggcttactaaaggtgtattaatggttgctgttatttatagtaatatctttaaaatagtctcactaaccaaggaagggcttgggaagcataaagaaagaaattgg

SEQ ID NO: 438302 - DNA, 580 bp, Homo sapiens
tattttctcctgttctttctcagcttgacatgcactgatcttaactaagatttgtctgtaacactaagtctgatagtctgcaaactacattgcccattctcaccttacagctagttaccagactttgccagtaggaaaaaacacagtagaccagaaaataggacgagaagaaaagctagtttctccttccttttcttgcttctagaggcacctataaaagtagttatctccttctgtgttcccaatttcaaccagaacttcctgtctggtggatcatatatggagctctactatgattgaaggtgggcccttcctttccaattctaggactaactgggcagaaccccagcagcgcagaaccaaatgtctggggtcctactaayaccatctcctttctttactcacctttcccagttctaagaatggcagtggcttcctgaagttactaatctctagatagctctcttgtttatttcttctcctccaaaactctttttcccccttatttccttccaatgtctttacataactaattctctttagtaaataaaaaaataggagctttattttattattttct

SEQ ID NO: 438303 - DNA, 621 bp, Homo sapiens
atcaagcagatactcaagctgaaaaatgcaattgacatactgaagaatgcatcagtcttttaacaacagaattcatcaagcagaagaaagaattagtgagcgtgaagacaggctacttgaaaatacacagtcagagaagaaaaaytgagaagaataaaatcaatacagcacacctacaggatctagaaaatagcctcaaaagggcaaatctaagagttattagccttatcaaggaggtagagaaagagataggggtggaagttttattcaaagggataataacagagaattttccatgcctggagaaagttatcaatatacaagtacaaaaaggttagggtaacctcaacccaaaggctcatggtaacctcaaaccaaaaaacatacaacaaatacacaaacaataaaaatcaagaaactaaatcacatcaccatagaaagtcacctccactaaaaggaaggcaagaaggaaagaaggaagaagagagcaaaaaaaaaaaaaaaaagaaaagaaaacaaataacaacatggcagaagtaagcccttacttaacaatataacattgaatgtaaattgattaaatttttcaataaaaaggcatagagtggctgactggatttt

SEQ ID NO: 438304 - DNA, 674 bp, Homo sapiens
accacattttctctatccagtctatcactgatgggcatttgggttggttccatgtctttgctattgtaaatagtgctgcattaaacatatgtgtgcatgtgtctttagagtagaataatttatattcctttgggtatatacccagtaatgggattgcttggtcaaatggtatttctggttctagatccttgaggaattgccatactgtcttccacaatggttgaactagttaacattcccaccaacagtgtaaaattattcctaaaattaaataagcctgaattcatactttattgtatttaagatattttgaaaccatatgaccatctaagtagatgcagaaaaatcactcaataaaacccaacaccctttcatgataaaaaccctcaaccaacaagccacagatggaatgtacctcaaaataataagagacacatatgaaaaaccaagagccaacatcatactgaatgaagaaaagttgaaaatatttcccctaagaactgtaacamgacaaggatgcccactttcactactccaattcaacataatactagaagtcctagccagaggaatcaggtaagagaaaaaaaaaatgaaaggcatccaaattggaaaagaagaaaccaaattatctgctgacaacatgattatatatctagaaaaccctaaaaact

SEQ ID NO: 438305 - DNA, 621 bp, Homo sapiens
atcaagcagatactcaagctgaaaaatgcaattgacatactgaagaatgcatcagtcttttaacaacagaattcatcaagcagaagaaagaattagtgagcgtgaagacaggctacttgaaaatacacagtcagagaagaaaaactgagaagaataaaatcaatacagcacacctacaggatctagaaaatagcctcaaaagggcaaatctaagagttattagccttatcaaggaggtagagaaagagataggggtggaagttttattcaaagggataataacagagaattttccatgcctggagaaagttatcaatatacaagtacaaaaaggttagggtaacctcaacccaaaggctcatggtaacctcaraccaaaaaacatacaacaaatacacaaacaataaaaatcaagaaactaaatcacatcaccatagaaagtcacctccactaaaaggaaggcaagaaggaaagaaggaagaagagagcaaaaaaaaaaaaaaaaagaaaagaaaacaaataacaacatggcagaagtaagcccttacttaacaatataacattgaatgtaaattgattaaatttttcaataaaaaggcatagagtggctgactggatttt

SEQ ID NO: 438306 - DNA, 621 bp, Homo sapiens
atcaagcagatactcaagctgaaaaatgcaattgacatactgaagaatgcatcagtcttttaacaacagaattcatcaagcagaagaaagaattagtgagcgtgaagacaggctacttgaaaatacacagtcagagaagaaaaactgagaagaataaaatcaatacagcacacctacaggatctagaaaatagcctcaaaagggcaaatctaagagttattagccttatcaaggaggtagagaaagagataggggtggaagttttattcaaagggataataacagagaattttccatgcctggagaaagttatcaatatacaagtacaaaaaggttagggtaacctcaacccaaaggctcatggtaacctcaaaccaaaaaacatacaacaaatacacaaacaataaaaatcaagaaactaaatcacatcaccakagaaagtcacctccactaaaaggaaggcaagaaggaaagaaggaagaagagagcaaaaaaaaaaaaaaaaagaaaagaaaacaaataacaacatggcagaagtaagcccttacttaacaatataacattgaatgtaaattgattaaatttttcaataaaaaggcatagagtggctgactggatttt

SEQ ID NO: 438307 - DNA, 564 bp, Homo sapiens
attctccaaggtttaacaaaaaaagggttctgactgtgcatttaatacatattcccatgagagtagaagagaatgagaataaatattaattacttttaatcattattttattgaggatggtgacataaagaagatgagtattttggtttaaattgtgatgggatgccacttttacaatatagtttaataaatatacaactcgttaaaagatgttgtttgaacctatatgcttaactctgttcattcataaattcccttaaaataaatgtactagaaagtgaaaataaatctgtcctctctattcaaaatggaagatgagaatggatatcatcaatagatgggtggtaatgcagataggattgtactgaaggaagtactgaaaagctgataatgtgaaacataaaagaaatcttgcatgaaagtrtgtgaacagaatatctcaggagaaagaacaaaacaaaaacagaaacaaaaggaaacaaacataaaatggtaaaacaaccaagttcagaacagaaggcaccagttcaaactgtgaagcttcaaaaggaggaattgtgtgat

SEQ ID NO: 438308 - DNA, 445 bp, Homo sapiens
gtaaaacaaccaagttcagaacagaaggcaccagttcaaactgtgaagcttcaaaaggaggaattgtgtgatgtatttggccaacgtgttagcccaaatttagttcaagtatggatggctgtgcaaaaggaaggcactgtggcacagagctctctgtgagacctgtgaaagtgagatagtccctaaaagaattagctttctacaattaacatggaaaacaaccactctgaatcagtgaagtcctgtgcaacttgctggctggtctcctacttcctccctgcctcmcaggcaacagaatgccaatacagaaaaataaaatagataagtgtaaatatcttcctttcctttcctaataatttagactaaaacacaggaatagaaagccacatcaatgtagaaagcaatttataaattcataaattttcatgtctcactagtctaaaag

SEQ ID NO: 438309 - DNA, 404 bp, Homo sapiens
tgaaacaggggtaagtgttcgaatcaagaccttctgggcccactggaggtgctaggctgcctcaggacaccatcagcacttcaccatccacaacatcctcaacagctgggagccaagcgcagaccccggggggcttcctgttscacaagctccactctctttttcctctccacccttgctattgggcctcccctccaaatctgcctgacaaaggcagcaggatctttaatactgttcagctttgtaaatggagactggatactgtagaaagttaagaaattccctggtccagtctgggggaggaaaaaatacacaatgtatcatggatggtttcactttcttgtccactcagacacatgctcattcttgttaaatggatgtatcagatgcttcaaaagtcctga

SEQ ID NO: 438310 - DNA, 482 bp, Homo sapiens
gtttttatgttaatccctagtacatggcctgctgtaaacacccaggacagccaggaaatgtttgttgttgtttgattttcctcatccccagtctcaacgggaagccaggccgatgagaacagccacttgtcatcaggctctccctttagaagtcactgaaagggccccaggatgtggtgaggagggccccaggcactagaattaagagaagawctaacttgccaccagattgctcggtgaccacagaaaaatcacttcttcccctgggcctcagttttctcctctgtaagatgatactggataagatcagtgtctttaaaacttgttttttagctggagccccctttgttccaatgaacccttactcagaagtctgtttttttttaaatggagatggtggtctggagctctactagattcatcgcccatgtcctgggcctgaggagaggggtccggtgagcagattaagagctgcattggtc

SEQ ID NO: 438311 - DNA, 482 bp, Homo sapiens
gtttttatgttaatccctagtacatggcctgctgtaaacacccaggacagccaggaaatgtttgttgttgtttgattttcctcatccccagtctcaacgggaagccaggccgatgagaacagccacttgtcatcaggctctccctttagaagtcactgaaagggccccaggatgtggtgaggagggccccaggcactagaattaagagaagaactaacttgccaccagattgctcggtgaccacagaaaaatcacttcttcccctgggcctcagttttctcctctgtaagatgatactggataagatcagtgtctttaaaacttgttttttagctggagccccctttgttccaatgaacccttactcagaagtctgtttttttttaaatggagatggtggtctggagctctactagattcatygcccatgtcctgggcctgaggagaggggtccggtgagcagattaagagctgcattggtc

SEQ ID NO: 438312 - DNA, 573 bp, Homo sapiens
atgggagcattttgttaaatttttaggacaaatcctctaggctgaaagctttatggtgtccctattgcttatcaatctatcttaaacttcttatatctcattttcaaaaatacctataacttgaattcatccatcctcatcctcccattctgcactataatgtaataagcttttcttcagtttcttttgagccatattgtagtagaaatagggctggggccaggcacagtggctcacacctgtcatctcaatactttgggaggccaaggcatgtgaaytgcttgaggccaggagtttgagactagcctggggaacagagtgagaccccatctctacaaaaagaaagaaaataagtaatagggctgagccagctatcagaagcacccatgctcttgctctgtttttgactcttagtggccctgggtcttttaggccatcagcttaccttcttgaaagactgtctctacagctgtgaattaacagccttctactaaatcctctgagaagtctctttctgctttgaaattcagtgactcttttacctcatagcatattctcagttcagtgttcagg

SEQ ID NO: 438313 - DNA, 573 bp, Homo sapiens
atgggagcattttgttaaatttttaggacaaatcctctaggctgaaagctttatggtgtccctattgcttatcaatctatcttaaacttcttatatctcattttcaaaaatacctataacttgaattcatccatcctcatcctcccattctgcactataatgtaataagcttttcttcagtttcttttgagccatattgtagtagaaatagggctggggccaggcacagtggctcacacctgtcatctcaatactttgggaggccaaggcatgtgaactgcttgaggccaggmgtttgagactagcctggggaacagagtgagaccccatctctacaaaaagaaagaaaataagtaatagggctgagccagctatcagaagcacccatgctcttgctctgtttttgactcttagtggccctgggtcttttaggccatcagcttaccttcttgaaagactgtctctacagctgtgaattaacagccttctactaaatcctctgagaagtctctttctgctttgaaattcagtgactcttttacctcatagcatattctcagttcagtgttcagg

SEQ ID NO: 438314 - DNA, 541 bp, Homo sapiens
ggtggactcactggtgagctcagaaccacaaggacatgtgttccccagcacagcaaggatgaccttggaggaggctagtgtcacagagggcgacacagagtgggtcatggagacagaaccagactgggcagaatccagggcttgagtcactcgctgcagrcagtcatgtcaggggtgtgtcactgccagggaccagagctctgcagggatgatgacaaatggatttgggccagcaaggtctgggtcaagggagcaagatagtttcttcttctgtcacccataatgatgagtcccttaaggaaaggctgtgccatccatttctggctcccctgcacttattactgtgccaagcacatgatatatagtcaacgaattgatatatcaatgaatatctgagaaaataaagggaggaaagcaagagtaaaacatggaaatacaggaagtggcaccgaagcagaaacatgtagaaaggacagaaaaagtgaagccaagaattgaaaaaacagagaccccaggaagtggtgagagaaaggaactgaaa

SEQ ID NO: 438315 - DNA, 596 bp, Homo sapiens
attaatataagcaccccagacttgatacttctagatttcagatttcaagcatacacgcccaaatttatcatattgctattctaaaaaaaaaaatcttgatatatttatctcctttgtgcttttttgaaaatgtaatattgttttctctcatgtttatactttaccggaaagaaaaatgggtttttttttcctcagctgaaaaatggaatgagactgtatgtgaaatcactcgtgtaatactttgtttttccaagttcaagggattggtggtggtgaactggggagaacactgaatttaatatattactgtgcttactattcctcaaagaattattaggtcttataacaaaaacaacttgaggtttgtctccttgcactctggttcattagagaaggtgaagaattactgaaaagatagaggagattacataaaaacaaagttcaraaaacataagttctgtagaggaagacaaggaaaaacagaaaaagtagaaactgctctagtgggaatgtattggttgttttgtctccttagtcttttaatataggacagagattctgtaatataacatagcaggctcatcccattaagtaag

SEQ ID NO: 438316 - DNA, 538 bp, Homo sapiens
  misc_feature (1)...(538): n = A,T,C or G
atattcaaatggacacaaaaattattacaagaattctcactgaaaactacatcaagttgacaagtgtatggcactcgaaagcaaagttgagtattttaattttggagatggcaatgtgtagatctgtccttttggttgaattcagttctaggaaatatgttttcaggtttagtgcagtaattgaatatggttttaagtctacctagttgttagaaaagagtaaatcttggctgggcgtggcggctcacgcctgtaatcccagcactttgggaggcagaggcgggcagatcacgaggtcaggagttcgagaccaacccggccaatatggtgaaacyatgtctttactaaaaatacaaaannnnnnnnnnnnnnnnnnnnnnnnnnnnnnnnnnnnnnnnnnnnnnnnnnnnnnnnnnnnnnnnnnnnnnnnnnnnnnnnnnnnnnnnnnnnnnnnnnnnactgcacacaagcctgggcgacagagccgagactccatctcaaagaaaaaagaaaagagtaaaactctttggttaagcca

SEQ ID NO: 438317 - DNA, 573 bp, Homo sapiens
atttataacgatagttataatttataaccaagtaagaaaacttacttggcaccatggctggcagacatagtagaaagacttttcattaaatatcctactgtacctcgtgtctttgaatttttgactgtgtcaatgcattacctgggggaaaaatataaacttaaacatcaaatgagttaaaaaaaaaaaaaactgcttatgagatattgcagttgctccatcttctctttgatgtatttgctattcctttccatttctagcaaagcaaatatcaagaaagaaaagagaacaggcaatttgttagtgcaggcacctagctatcattttgttttttggcaatacacttgtctttcaattctagtggtaccaactcataaaatttttgttacttacacatcatttgtgtaatttattaacagtctctcaaattaattcaaattcacattatctctattagttcttatggtactagaaactacttatccatatgtggcctattagctgactcactgagtgacagtaccaagaaatttgccartgtaaaattctggctccttgctttatttgctggaa

SEQ ID NO: 438318 - DNA, 521 bp, Homo sapiens
gtggtgtatccatacaacacaactcaacaataaaatagaatgaactattattgttacatactacaatgtcagtttatctcaaaataattatgctggatgaaacaaaccagataaaaatattatacactatatgatttcatttatatgaaatttttaaaaatgcaaactaccgtgacagtaagcagatcagtggttgcctggggggtgtggtggaggacttgaaggaytgagatagagcagggagtgatgtgttggttaaatgtctttcccttgaatgcccagtcctctgggattttatcgtcatggcttctgctccagttcagagatgtcaaagctggacttggtgaaccagatttgaagaattattctacctcaaataccaattatgtctctaccaagaaaccacacttttaggatctcagtgaaacattcattttcatgtcactatgcagttatctatataattagaaataagagcagaacacaaattttgaaaacattttaatgacatagtgagtcaa

SEQ ID NO: 438319 - DNA, 405 bp, Homo sapiens
aaatgctgatctcttccagaacaccctcatacatacatccagaaatattttttaccagctctctggacatcccttagcccagtcaaggtgatgcataaaattaaccatcatatatagaccacaggaaggggaaatatgaattgcccaatgatttgactattgctataatggaaagaaaaagattttcaatgctgataaaacaaagttaattaaacagatatatgttaagtaagaattgtgatttgaagagaaataagacatattctctyttttgtcatctctcttttggggactatagcctaagacttccttaaattttttttaactgaagtacattttattttagttcatgtagggcatgtctgtctagacttttcagttacttttacaaaaatatccacgaga

SEQ ID NO: 438320 - DNA, 585 bp, Homo sapiens
atctactaataatttaggattgttctttcaacccattgctaaccacagcatcacgcacaatgatgttaagagtaaatgctttgatatttgtcccactaagaaaaaagatctacttatttatatttgcttttgttattggacaataagataaataaccaattcactttttaaatcattaatttgaaactttattaaataaatacagtatatatatatgcaggtttttaaatttaaaacattttcttttgagacagggtctcactctgttgcccaggctggtgtgcagcggtgcgaacacggctcactgcagcctcaacctctgaggctcaagggatcctcccacctcagcctcctgaatagctggaactataggcgtgcactaccatgtccagctacttttttattttttgtagagatgggggtctcactatgttgcccaggcttgtccaaactccttggctcaagtgattcttctgccttggcctttsaaagtgctgagattataggtgtgagccacttcacctggccaggatatagaatttacatgatatcaagaggaataggacctcagcagtgttgctcaca

SEQ ID NO: 438321 - DNA, 561 bp, Homo sapiens
gttttaaaggttgccatggaaatggtaagattgagaaaaataactatttggctttttttcctttgactttctaatgactttataatgaaactgcgtattgattttataatgaagctacataactgatatttgcaaagggataatataaggatgaatctttttacagctctggaatataaaggctatttgaaatctttcccattcccaacaccttctcttgaccccctcttctcccatcagctcttgtctaatttctctaccttcctcactagcaaacttctttgaaatggttataagtactttctgtcttctctttctttacagagcccactccattagggcctcctttccatgcttctattaatacaagtgtttctgttccaygtcctctgtgtagctaaattcaggggccaattcccagtcctcatcttaacttgactgagtaacagcatttgacgtcattggttgtttccttctttgaagctgtgtccgtgtctattcaccaccatagccctccctttttgttttatatggacctcattgggtggctgctgtgcaatt

SEQ ID NO: 438322 - DNA, 579 bp, Homo sapiens
gaaatgtgattactgtgtagtttccacagcaacaccattgatgatcactcccactccatcaagaatggatcagagattgagcaggagccatactcttcggtcgcttcttcgaaagagcaggatttattttcaactctatgtaattatttgctggaacctcattttgcagaactgttattttacagtgggagtactggggaaaggtatttaaactgctctaaaataaggacacattggaagtgttttctctgtaagggaaattgtccaaatttgacttttgagtcaacatttttaatggatatttagggcttatcaaaattgcttgcagcccaaataaaacatcaagcagagggatacattttactggtagaaattcatgacttcattggattaagattttatagtatttttgtgwtctatatctcttcaagttacagtttgacagaagttgcattaaatctgccattttcagatgaatcctgaagatggagaaattataaataatttttataaatgataaagctatgttcttctttagcagtgaatgccacagtcaaaataaataaataatttaaatgc

SEQ ID NO: 438323 - DNA, 561 bp, Homo sapiens
acatgcaatattatagctatagttttcacttaaaatcatatatatttttatatcttgctacatgaccttttatgaatatcattttttgtttgcttgtttttgagacacagtcttgctctgttgcacaggctggagtgcaagggcgtgatctcggctcactgcaacctccgactcctgggttcaagcgattgtccatgcctcagccttccgagtagctgggactacaggcgtgtgccaccacgcccaggtaattttttttttatttttggtagagacagggtttcaccatgttggcyaggctggtctcgaactcctgacatcatgattcgcccaccttggccttccaaagtgttgggattacaggtgtgagccactgtgcctggccgcgaatatcatttttagtgatcacttgctatttcattcaggagattgctggaatttgcttaaactacttttctaattctgtactcagtcactttctatttgctttctgagtaggcgctcaaaatatttagttataataaataactccctatgtggtatgattggagtaatgacaaa

SEQ ID NO: 438324 - DNA, 561 bp, Homo sapiens
acatgcaatattatagctatagttttcacttaaaatcatatatatttttatatcttgctacatgaccttttatgaatatcattttttgtttgcttgtttttgagacacagtcttgctctgttgcacaggctggagtgcaagggcgtgatctcggctcactgcaacctccgactcctgggttcaagcgattgtccatgcctcagccttccgagtagctgggactacaggcgtgtgccaccacgcccaggtaattttttttttatttttggtagagacagggtttcaccatgttggccaggctggtctcgaactcctgacatcatgattcgcccaccttggccttccaaagtgttgggattacaggygtgagccactgtgcctggccgcgaatatcatttttagtgatcacttgctatttcattcaggagattgctggaatttgcttaaactacttttctaattctgtactcagtcactttctatttgctttctgagtaggcgctcaaaatatttagttataataaataactccctatgtggtatgattggagtaatgacaaa

SEQ ID NO: 438325 - DNA, 599 bp, Homo sapiens
ttgagttaacacaggaaaatctaaatgtccttctgrcttattttttctttcccagttcattctgcagacaactatgagactcttttctgaaagcaaaaatctcagtatacaggcctttctctacttaagaaactttaaaaattctgctttttctaattccttcttagacttttctatttggatgctcagtttacagtcaaatgctatctgcttgattacaagacttttattccattaaaccaagatttattgatgccttcctttatattgtattctgtgcaaggcaaggtgagtcaaagatgaactactcatcgtcctaccttccaggggacatttagtccaacatgggcagtcggagtgggggcagagaggaaccaaaagcatgttgtaaaaagtcacatgctgttttaaggtctatagtggaagtttcagtaagtaattattttcttaattttcatggcattttatctttatgtcttatgtggcatcatcactttcttcttttagtatctttacctcttctatgatattaaagtttttgagaagcaacatatagatagtatgctttgtgatatatatatatttttaatccttcaaca

SEQ ID NO: 438326 - DNA, 599 bp, Homo sapiens
ttgagttaacacaggaaaatctaaatgtccttctggcttattttttctttcccarttcattctgcagacaactatgagactcttttctgaaagcaaaaatctcagtatacaggcctttctctacttaagaaactttaaaaattctgctttttctaattccttcttagacttttctatttggatgctcagtttacagtcaaatgctatctgcttgattacaagacttttattccattaaaccaagatttattgatgccttcctttatattgtattctgtgcaaggcaaggtgagtcaaagatgaactactcatcgtcctaccttccaggggacatttagtccaacatgggcagtcggagtgggggcagagaggaaccaaaagcatgttgtaaaaagtcacatgctgttttaaggtctatagtggaagtttcagtaagtaattattttcttaattttcatggcattttatctttatgtcttatgtggcatcatcactttcttcttttagtatctttacctcttctatgatattaaagtttttgagaagcaacatatagatagtatgctttgtgatatatatatatttttaatccttcaaca

SEQ ID NO: 438327 - DNA, 599 bp, Homo sapiens
ttgagttaacacaggaaaatctaaatgtccttctggcttattttttctttcccagttcattctgcagacaactatgagactcttttctgaaagcaaaaatctcagtatayaggcctttctctacttaagaaactttaaaaattctgctttttctaattccttcttagacttttctatttggatgctcagtttacagtcaaatgctatctgcttgattacaagacttttattccattaaaccaagatttattgatgccttcctttatattgtattctgtgcaaggcaaggtgagtcaaagatgaactactcatcgtcctaccttccaggggacatttagtccaacatgggcagtcggagtgggggcagagaggaaccaaaagcatgttgtaaaaagtcacatgctgttttaaggtctatagtggaagtttcagtaagtaattattttcttaattttcatggcattttatctttatgtcttatgtggcatcatcactttcttcttttagtatctttacctcttctatgatattaaagtttttgagaagcaacatatagatagtatgctttgtgatatatatatatttttaatccttcaaca

SEQ ID NO: 438328 - DNA, 518 bp, Homo sapiens
ccactttcatcagcaataaaattccctgcatttaccatcttcaatttgttcatacaacctgattattcccagatgccaaacaagagcttgggatacagacggctgtcacattgagctgttaaacactgaagcccccccccgtggacagcaaagctgaaagagtgcactgtaacacacaccctctggggctccagggggtcacaggtacccccctagatgctgccatggggcckcagggagttctgctcctgccagcgcccagaagcacttgtcctggcccctgtacctgctcacctgcgtgctcctcctcctgtgaggggttgagagttgcaggctgagtaaacgagccaccccttttgccagccccgtgaaggggtccgggaaaatttcctgttttactacggcttttatatattgtcttctttaggctttgaaagaattctgagtcaggtattattattcccactttgcaagtgtagaaactgaggctgtgagggttagccaatgcctgcaaactg

SEQ ID NO: 438329 - DNA, 573 bp, Homo sapiens
cttcccttcactatataaataaataatattatttaaataccttttgaacccaccaataaaacacacagaagacaatcacttatggggtaagattttgagaaaacctgaatttattttcctgaccctaaatatcatcccctctcatttattctggatcattgaaattttgcattaggaaatcctttacttggtttaaagaatgttccttttttagaattttacatctaaaatccctaaggggagagtgaaaccttaatgtaagaatagtgagtctgaccttcactaactatgcaawgatggctacaataaacaacttattttgcaaaattgtgagaatcaaataaggtactgaatataatcatgcctagcactaagaatgggtcatgttaagaaagtaataaacattctgttgatcattctgacaaatccagtcctgttaagtagattcctaaagccttcaaaatccctttgaaaaaaagcagctcaacagaactatagatacctaaaacattactatcagatggagctgttagacaaacttttattgagctcctgtcatctgccaggtactat

SEQ ID NO: 438330 - DNA, 584 bp, Homo sapiens
tacaaaagaaaaatacaaaacaatcttgatttgtgttctcttatgtgatatcttgacccagaaaaaaatgcatagttttcagtcttagagctatctaaatacagagagtagtgctgccaaatgcacccacctatgttagaacactttacgttagaactaagaaaaagtgatttcctttattcaactgctgaccaacagaacagatcactataaacccaatttatttgatgtggtgagttagaggctccctcattaacaaggaagccaacaaagggactgatgttgaagggaggatcattcctggtgcttaattcatgtgcttgttcacatatcaaatcttggtattgttccttttgaatgacacatatattttgcccttgaaagggtcattacaacctggtcatacccttaaagaggcatgggaaagtatgaatacaagaaacagatggtattctccttttagacctccttagattagcaattttcaacaattttctgactgtagaatacatatgacatgatcatatttwaaaaaaaaaaaaaaacaaagctagagttagtgaaaaaagccactagaagcgctg

SEQ ID NO: 438331 - DNA, 568 bp, Homo sapiens
tttgtatcctcttctggggaaagartatgttttttgttgtacgcagaatactttatcatgtatgagtttattattgttgttatttggagattaatatggtttaagaagatgtgtatgggtgcgaagtttattattttattattgttatttggagattaatatggtttattattgttgttatttggcgattaatatggcttaagaagatgtgtatgggtgcgaagttgacaagatttgcacttgtgatagttaattttatgtattaacttggttgggccacagggtgcctacatatgtggtcaaacattatgctggatgtttcagtgaaaaatgtttttggatgagattgatggttaaactggtagactttgggtaaagcagattactctgcataacgtggcgtacctcattcaatcagttgaagctctcagtggaacaaaagattgacctcctccaagaggaaatgaattctgcaagcagatgatggcctttggacttgaattacaacatcagatcctccctgggttcatgcctaatggctttcagatttgaactggaacattgactt

SEQ ID NO: 438332 - DNA, 568 bp, Homo sapiens
tttgtatcctcttctggggaaagaatatgttttttgttgtaygcagaatactttatcatgtatgagtttattattgttgttatttggagattaatatggtttaagaagatgtgtatgggtgcgaagtttattattttattattgttatttggagattaatatggtttattattgttgttatttggcgattaatatggcttaagaagatgtgtatgggtgcgaagttgacaagatttgcacttgtgatagttaattttatgtattaacttggttgggccacagggtgcctacatatgtggtcaaacattatgctggatgtttcagtgaaaaatgtttttggatgagattgatggttaaactggtagactttgggtaaagcagattactctgcataacgtggcgtacctcattcaatcagttgaagctctcagtggaacaaaagattgacctcctccaagaggaaatgaattctgcaagcagatgatggcctttggacttgaattacaacatcagatcctccctgggttcatgcctaatggctttcagatttgaactggaacattgactt

SEQ ID NO: 438333 - DNA, 553 bp, Homo sapiens
aaatatttaatttgctacatttggggggtaatttgttacacatcaatagataactaatactcattcctatcagcatttgtaatagaattcttgctgatgttgtcattttttcagttattttggcagataaaaatcatcttattgttttactttgcacattttggttaatagttttctcatgtttattaatcatttttttcttcttccaatggtgatttacatttatccatttttctgtcagggtttcagtttttattcctttaggatttgcatttctgctaaaaactaayacaaaagcaaagttatcaataggggccatgaagaagcctcagaaatgcacaattcatagattttcttagattcacaaagtgacaagatttgggcaacaaattatgcttaaagatgatgtttggcatttcacctggtaatatttgcttctttggtaactgaagcaaaatgtggaagattttgtattccaaaaatgccacagcagcatttcccaacctgcaccatgagtttaacactcttcccactaagtgctagggtcaagagt

SEQ ID NO: 438334 - DNA, 576 bp, Homo sapiens
agcaagttgctgaagaataccatgatataatctcgttagaaatawcgaaatggcagaaaaccaaataccatatgttctcacttaatggcagctaaatgatgagaacgtaggaacacaaagatggaaacagacattagggtctacttaagggtagggtgtgggaggagggagaagagcagaaaagatcactgctgggtactgggcttaatttctgggttattaaaaataacctctacaaaaaccactgcaatgaaactgtactgctgctgagttcttttaaagatacaaaaactagacaatgcccatactgtttaaaatattccaggaatagacaaaatgtgaagcaccctaattcttattatgcagctaaaacaatcttgaaaataagattagcaggcgataagcaaacagacaaaaaatgtcagattaatctgacatgtaatacaatcaaacagactaaataaataccatacaaatcaaatcagaaatgtattaaaagtataatatataatgaacaaatagagcttgttactagttttatattaatatatctaccaatacatgtattaataagta

SEQ ID NO: 438335 - DNA, 592 bp, Homo sapiens
tgcaaaccagttaatgaatttatctaattaataaaataatatatctgaagtttatcagagttactcagggaaactgggaaacaagcaatcaaaaaaaaaaattatacatagccattagaccaagctgccyatttggatgtgattaaagatgaagtgtcacttccctaaatcagtcctctcaaacaccattgtagcagaattctcagtgaccacaagtcattacatccccctattttcaaagcccctgttagaaaaaaataatataaaagaagatcaagttgccttaagaataactaaacgaatgttgaatcacttcctcagataatcaaatcaaggcatttttacaatcaacttggaaaggaagaaaggtttgaattgcacaagtgaaatgcctattcccagtcagttggcaaagactactatctctgcagccttaagttactctccctgggttttattttcttggctgcaaactggagccaagaaataatctccaagattatttcacctcttatactcactgagcttatgggccaaacctccaagcttaagagcatcagagaatgggcattattaagaaagataaaagtaa

SEQ ID NO: 438336 - DNA, 592 bp, Homo sapiens
tgcaaaccagttaatgaatttatctaattaataaaataatatatctgaagtttatcagagttactcagggaaactgggaaacaagcaatcaaaaaaaaaaattatacatagccattagaccaagctgcccatttggatgtgattaaagatgaagtgtcacttccctaaatcagtcctctcaaacaccattgtagcagaattctcagtgaccacaagtcatyacatccccctattttcaaagcccctgttagaaaaaaataatataaaagaagatcaagttgccttaagaataactaaacgaatgttgaatcacttcctcagataatcaaatcaaggcatttttacaatcaacttggaaaggaagaaaggtttgaattgcacaagtgaaatgcctattcccagtcagttggcaaagactactatctctgcagccttaagttactctccctgggttttattttcttggctgcaaactggagccaagaaataatctccaagattatttcacctcttatactcactgagcttatgggccaaacctccaagcttaagagcatcagagaatgggcattattaagaaagataaaagtaa

SEQ ID NO: 438337 - DNA, 565 bp, Homo sapiens
agtgtacactgtacctaacgtgtagtcttttatccctcaacacccccctaccctttctcccagtccccaaagtccaacctatcattctatgcttttgcttatgtattcaattgcatcctcatagcttggctaccacatgtgaggaagaacatacaaagtttggttttccattcttgagttacttcacttagaacaatagcctctgattmcacccaggttgctgtgcatgccattttttattgatcaataaactttcatataaacatacatataaatgtaaagctttacatataaatgtaagccatacaagcttatgaaagccatataatggctacattgataaagtatacacacaagggtcaacatttctatgaattagtttatcagccttttttgaacaactattatgtgttcagaagaaattactttggcaactagctagaaaacatttattgtttgattattcattaatcattgacttcattttaattattcattaaaaatcattgacttccttcttgacttttccttcccaagagattgttaacagaaattccataattga

SEQ ID NO: 438338 - DNA, 401 bp, Homo sapiens
ccaacctatcattctatgcttttgcttatgtattcaattgcatcctcatagcttggctaccacatgtgaggaagaacatacaaagtttggttttccattcttgagttacttcacttagaacaatagcctctgattacacccaggttgctgtgcatgccattttttattgatcaataaactttcatataaacatacatataaatgtaaagctttacatataaatgtaagccatacaagcttatraaagccatataatggctacattgataaagtatacacacaagggtcaacatttctatgaattagtttatcagccttttttgaacaactattatgtgttcagaagaaattactttggcaactagctagaaaacatttattgtttgattattcattaatca

SEQ ID NO: 438339 - DNA, 515 bp, Homo sapiens
aacagataaacaagagacactgataatattscaatgcaaacaaaaaagattaacatataatatgatgaattatgccatgagcttttaaaaataggcaaggcggagataaactaacctgtagaaaactacacaaggatatgaaaaggcaattcatgaactcctgatctcaggtaatcctctggcctcggcctcccaatgtgctgggattataggtgtgaaccctgtctctactaaaaacacaaaaattagccaggcgtggtggcgtttgcctatagtcccaggctacttgggaggctgagacgcaagaattgcttgaacccaggagacagaggttgcagtgagctgagactgtgcccgcgccactgggcaacagaacgaggctccatctcaagaaaaaaaaaaaaaaaagaaaagaaaaatgaaaaggcaatgcacagatcttacccaaatgacaaaaaatatatatattagaaaaagatgtccaattatagtagcaataagagtgcaaatgaaat

SEQ ID NO: 438340 - DNA, 515 bp, Homo sapiens
aacagataaacaagagacactgataatattgcaatgcaaacaaaaaagattaacatataatatgatgaattatgccatgagcttttaaaaataggcaaggcggagataaactaacctgtagaaaactacacaaggatatgaaaaggcaattcatgaactcctgatctcaggtaatcctctggcctcggcctcccaatgtgctgggattataggygtgaaccctgtctctactaaaaacacaaaaattagccaggcgtggtggcgtttgcctatagtcccaggctacttgggaggctgagacgcaagaattgcttgaacccaggagacagaggttgcagtgagctgagactgtgcccgcgccactgggcaacagaacgaggctccatctcaagaaaaaaaaaaaaaaaagaaaagaaaaatgaaaaggcaatgcacagatcttacccaaatgacaaaaaatatatatattagaaaaagatgtccaattatagtagcaataagagtgcaaatgaaat

SEQ ID NO: 438341 - DNA, 515 bp, Homo sapiens
aacagataaacaagagacactgataatattgcaatgcaaacaaaaaagattaacatataatatgatgaattatgccatgagcttttaaaaataggcaaggcggagataaactaacctgtagaaaactacacaaggatatgaaaaggcaattcatgaactcctgatctcaggtaatcctctggcctcggcctcccaatgtgctgggattataggtgtgaaccctgtctctactaaaaayacaaaaattagccaggcgtggtggcgtttgcctatagtcccaggctacttgggaggctgagacgcaagaattgcttgaacccaggagacagaggttgcagtgagctgagactgtgcccgcgccactgggcaacagaacgaggctccatctcaagaaaaaaaaaaaaaaaagaaaagaaaaatgaaaaggcaatgcacagatcttacccaaatgacaaaaaatatatatattagaaaaagatgtccaattatagtagcaataagagtgcaaatgaaat

SEQ ID NO: 438342 - DNA, 515 bp, Homo sapiens
aacagataaacaagagacactgataatattgcaatgcaaacaaaaaagattaacatataatatgatgaattatgccatgagcttttaaaaataggcaaggcggagataaactaacctgtagaaaactacacaaggatatgaaaaggcaattcatgaactcctgatctcaggtaatcctctggcctcggcctcccaatgtgctgggattataggtgtgaaccctgtctctactaaaaacacaaaaattagccaggcgtggtggcgtttgcctatagtcccaggctacttgggaggctgagacgcaagaattgcttgaacccaggagacagaggttgcagtgagctgagactgtgcccgcgccactgggcaacagaacgaggctccatctcaagaaaaaaaaaaaaaaaagaaaagaaaaatgaaaaggcaatgcacagatcttacccaaatgacaaaaaatatatatattagaaaaagatgtccaaytatagtagcaataagagtgcaaatgaaat

SEQ ID NO: 438343 - DNA, 508 bp, Homo sapiens
tttgcaagtgcatttaacagcctatgagaaatcttaagctcaaatatggtagaggtcayacaaattcataatggaaaagattatcctaaagggaaaaaactggcttttctatgcgtgttttacacatttggttgtctgacaactgaagctaatcaagatagttcaagatgtgctatgcctgagaatgtggttttctggaataaaggtgaaaagagaggacatttacttactacaaatctaaaataaagcactattaaccagcactagtctcagatactcagaactgaaatttctctttccatagtaaattttaaacttggatggtattttatgtagaattattggagaaaatgacccaattatatgtgtttctttcatactgcatgaagattcgtttctacatctttaaaaagaaagctataaaaatttacaataaggataaagactattttctgatgcattatatttatgactagtttattaaaaataattatttggttttttagaa

SEQ ID NO: 438344 - DNA, 508 bp, Homo sapiens
tttgcaagtgcatttaacagcctatgagaaatcttaagctcaaatatggtagaggtcacacaaattcataatggaaaagattatcctaaagggaaaaaactggcttttctatgcgtgttttacacatttggttgtctgacaactgaagctaatcaagatagttcaagatgtgctatgcctgagaatgtggttttctggaataaaggtgaaaagagaggacatttacttactacaaatctaaaataaagcactaytaaccagcactagtctcagatactcagaactgaaatttctctttccatagtaaattttaaacttggatggtattttatgtagaattattggagaaaatgacccaattatatgtgtttctttcatactgcatgaagattcgtttctacatctttaaaaagaaagctataaaaatttacaataaggataaagactattttctgatgcattatatttatgactagtttattaaaaataattatttggttttttagaa

SEQ ID NO: 438345 - DNA, 508 bp, Homo sapiens
tttgcaagtgcatttaacagcctatgagaaatcttaagctcaaatatggtagaggtcacacaaattcataatggaaaagattatcctaaagggaaaaaactggcttttctatgcgtgttttacacatttggttgtctgacaactgaagctaatcaagatagttcaagatgtgctatgcctgagaatgtggttttctggaataaaggtgaaaagagaggacatttacttactacaaatctaaaataaagcactattaaccagcactagtctcrgatactcagaactgaaatttctctttccatagtaaattttaaacttggatggtattttatgtagaattattggagaaaatgacccaattatatgtgtttctttcatactgcatgaagattcgtttctacatctttaaaaagaaagctataaaaatttacaataaggataaagactattttctgatgcattatatttatgactagtttattaaaaataattatttggttttttagaa

SEQ ID NO: 438346 - DNA, 626 bp, Homo sapiens
catagtgaatttattataaaactataaattttggaatgttttagggccaataaataatatctatgmtgtcttgaagttaatatttatgcattcactgaacttagatgtttctatccctttatgtctgtagtctctatctctgttccacatttttatcattctacattctgacttctaccaatatccagctgcaatggggcttcaatggttcctgagtcattactcttccttagcagcacctagagacttctgtaaagcagctcaggtgaatgtcaactaaacactcgtctaaaaataaaataaaaatacataaatatgtattgagtgctttaaacactgaactataaacatccaatgctaaaaacagaacagaaatataaaaatgcaatttgtaagggcttttcaaggtctaagagaagtagtgctcatagaacacagattgatgaaaatattgacttccaatcggcccaatcagtccaccaccaattgtctcactttcaaagtgtgaggctatccagagcaatgaagccagagaaagaaataaaagtcatccacatagaaagagaggaagtccatctatctcttttcagagagatataattctacacctagaaaaccttatcatc

SEQ ID NO: 438347 - DNA, 626 bp, Homo sapiens
catagtgaatttattataaaactataaattttggaatgttttagggccaataaataatatctatgctgtcttgaagttaatatttatgcattcactgaacttagatgtttctatccctttatgtctgtagtctctatctctgttccacatttttatcattctacattctgacttctaccaatatccagctgcaatggggcttcaatggttcctgagtcattactcttccttagcagcacctagagacttctgtaaagcagctcaggtgaatgtcaactraacactcgtctaaaaataaaataaaaatacataaatatgtattgagtgctttaaacactgaactataaacatccaatgctaaaaacagaacagaaatataaaaatgcaatttgtaagggcttttcaaggtctaagagaagtagtgctcatagaacacagattgatgaaaatattgacttccaatcggcccaatcagtccaccaccaattgtctcactttcaaagtgtgaggctatccagagcaatgaagccagagaaagaaataaaagtcatccacatagaaagagaggaagtccatctatctcttttcagagagatataattctacacctagaaaaccttatcatc

SEQ ID NO: 438348 - DNA, 596 bp, Homo sapiens
tgaagactactgtcacagatatatttctgtaaaactgagaatgtaaatgaaaactcaaaattccatttctgtggatgcatgtcagtattgctttttttctgtactaattaaaaatgtcagtatataaggttagttacatattatgtatcaaattattttgttgacagtatagacttcttaagtacatattacaatgtaataaagtggattggctataattttttgycatgtactctatgcatagtttaaaggaagttatctcttacttcctaaggttaactgctattaatattgaatattttcagatagctttcttttaatttacatgtgtatgcataatatgtctgtatttctcaaacacagtggtatctgaatatatatatggtgtgccacctcaattattttacttatattttgggagaatgttttatgttagaacacataggtattccattttctttttaacatctaaatataattccacatagtagattatcataatatatacaattttttaaattgagtcacttaagttatcttaatttttattattataagcaatgctttcataaatgcttttgtgcacatattgaagt

SEQ ID NO: 438349 - DNA, 596 bp, Homo sapiens
tgaagactactgtcacagatatatttctgtaaaactgagaatgtaaatgaaaactcaaaattccatttctgtggatgcatgtcagtattgctttttttctgtactaattaaaaatgtcagtatataaggttagttacatattatgtatcaaattattttgttgacagtatagacttcttaagtacatattacaatgtaataaagtggattggctataattttttgccatgtactctatgcatagtttaaaggaagttatctcttacttcstaaggttaactgctattaatattgaatattttcagatagctttcttttaatttacatgtgtatgcataatatgtctgtatttctcaaacacagtggtatctgaatatatatatggtgtgccacctcaattattttacttatattttgggagaatgttttatgttagaacacataggtattccattttctttttaacatctaaatataattccacatagtagattatcataatatatacaattttttaaattgagtcacttaagttatcttaatttttattattataagcaatgctttcataaatgcttttgtgcacatattgaagt

SEQ ID NO: 438350 - DNA, 567 bp, Homo sapiens
cagcctcaaactcctggggctcatgtaatcctcccacctcagcctcctgagtagttaggattacaagtacacgctatcatgrcttactaattagatttttttttttttattgtagagataggttctcactgtgttgccctggttgtttctgaactcatgggctcaagcaatcttcctgtctcggcctctcaaagtactgggattacagttgtgagccaccactgccagcacatttagatccttagtatggcaggaatttatttttctagatgagtgatatagagatctgtctttagttttttaagtatatagctgactattttaatgcaaccctccctaattatctgaaatgtcacttgcttatatatgaattccttgtatgtgcataggtctgttttgcactgtttagggtgatttatctacttcactgttccttggggttccaaaactttctgttatgttttggtatttgagtagtcaagtgaataattctttattcttttttatttctttaagattttattgcctattttgtccatttactttttcaattgaatgtagaataac

SEQ ID NO: 438351 - DNA, 567 bp, Homo sapiens
cagcctcaaactcctggggctcatgtaatcctcccacctcagcctcctgagtagttaggattacaagtacacgctatcatggcttactaattagatttttttttttttattgtagagataggttctcactgtgttgccctggttgtttctgaactcatgggctcaagcaatcttcctgtctcggcctctcaaagtactgggattacagttgtgagccaccactgccagmacatttagatccttagtatggcaggaatttatttttctagatgagtgatatagagatctgtctttagttttttaagtatatagctgactattttaatgcaaccctccctaattatctgaaatgtcacttgcttatatatgaattccttgtatgtgcataggtctgttttgcactgtttagggtgatttatctacttcactgttccttggggttccaaaactttctgttatgttttggtatttgagtagtcaagtgaataattctttattcttttttatttctttaagattttattgcctattttgtccatttactttttcaattgaatgtagaataac

SEQ ID NO: 438352 - DNA, 567 bp, Homo sapiens
cagcctcaaactcctggggctcatgtaatcctcccacctcagcctcctgagtagttaggattacaagtacacgctatcatggcttactaattagatttttttttttttattgtagagataggttctcactgtgttgccctggttgtttctgaactcatgggctcaagcaatcttcctgtctcggcctctcaaagtactgggattacagttgtgagccaccactgccagcacatttagatccttagtatggcaggaatttatttttctagatgagtgatatagagatctgtctttagttttttaagtatatagctgactattttaatgcaaccctccctaattatctgaaatgtcacttgcttatatatgaattccttgtatgtgcataggtctgttttgcactgtttagggtgatttatctacttcactgttccttggggttccaaaactttctgttatgttttggtatttgagtagtcaagtgaataattctttattcttttttatttctttaagattttattgcctattttgyccatttactttttcaattgaatgtagaataac

SEQ ID NO: 438353 - DNA, 608 bp, Homo sapiens
aatgacacacagtaaaatgttataagaattcaggagcatttcccaacccatcttctggttataatttagaatatactagatctttaaaaaattaaaaaaaawttttttttttggggagacggagttttgccatgttgtccagatgcagtattttgagcctattgtgtctataatgtaaagacaattagaaaatttgacaaattatcccatattagataatcccttgtcatgaattgcattaccctgactgacatttttctcagtaggtgaaccatgaggcactagatgaaacagtgatgattaaaaagggtatgtattagaatcacttggagggtttggactatagatcacgcttcaggtcccatccggggagattctgattgaattgatctggggtgagatacaaacgtcttccacttcatattcctgatcctctgattcctacttagccaaagtgtcctcttctctgtaatattttcttttacttccctggactctattttttctcttctctgaatttccaagtttacaatactcccagggctcttatgtgtgtactcatttcttattaaatcatctttttttcttaattcaacttttaatgtttt

SEQ ID NO: 438354 - DNA, 536 bp, Homo sapiens
gaaggtacagtactgaagacagtaggaagacagtatggtatcagtaaaagaacaaatagagaattcgatcaaagtagccgagaaatcaacccccacacatatcgtcaactgatctttgacaaaggactaaaggcaattcaaacacttaaaatattcatgaaaaagacacagaaaggaagttaacaaactagatgaaattcaatttagcagaatttsatccaaaatagtagactatctttcgttgaaagacagtcttttcaacaaatggtactgcaacaagtggatatctacatgcaaaatcataaatatagacacagaccttaaaactttcataaaaattaactcaaaattgttgcaggaagtcagggaccccaaatggagggacctgctggagccgcggcagagcaacataaattgtgaagatttcatggacatttatcagttcccaaataatacttttataatttcttatgcctgtctttactttaatctcttaatcctgttatctttgtaagctgaggatgtatgtcacctca

SEQ ID NO: 438355 - DNA, 545 bp, Homo sapiens
cagctttgtaaataatggaagtcttgacattctttaatactacagagcaaatagctccacactctaattactgttgtattgtgtttgagtatctttggtgatggtaattaaagagtgattcttgcatatttttcttaaaatatccatgcatccctttcatgctgctaaattcttccaaagacacatgccagtaactgggaagaaacacagaccagactacatttcttttcaggctttttatctcagttatttgtattaacagactgcaaaaaatggatattatttatgctggaagagagaatggaagggtatcctaaatatcagtattagagctttttgctcttttaggttcttaggtgaaggtgatgaagtattttattttaggggcttttaatcttttgcttgtgggttttttctttgtctagtattacartcttgaacaattatgaagaagatattacactacttttcctggtcaaattacaataaacctaatagaatggaaattttactgtttaaggattagtgtagttgtttccagcttt

SEQ ID NO: 438356 - DNA, 636 bp, Homo sapiens
cttgaaataaggaaaaaatactaaactagaaaagtagctctgcctttttattctggatatttcagaattgatttttgacttttctgagaagtgacatgaataatttagggaatagagcataatgctgtttaaaatggttaaagtataataccacagaggcaactgcgtaaaagtccctgaaaaatcacaaaggtgtttaatgtttctaattatgtttaaggaattcagtggtgaggtctgggaaatgacttgctgagcttgtcagctcactcactgacccactcaaattcctgaacagaaatctggactctttctaagtcattacttcagctcaggaaactttaggcaatttcattttgccttaagtgggctttgagactccagaatgatttgggggagggagtaggttaattgaagtagaaataaagctcacctataataatgggctctatagggatgaatatttcctatctaaatgtattttcatcatagcagctaattactaccaatttgaatctatcttaatagaaataaagaaaaatgttttctccactattgttttatgaacgatacatmtgttaatgccaatggcttattatttttaaggaaatgtatttatacagttgacccataaac

SEQ ID NO: 438357 - DNA, 573 bp, Homo sapiens
ttactcatttttaggctgctttaagtacatggaaattttgacaaaagtctagaaacaaggaaatattcaaaggcccttttttatacaatgacaataaatgtttttcttgcttttggaaacatttttattgctgtagtacaaaaaagttcttgattaaagcctttgattcaggagttccatgtagtctaagacagaccrgttaggtttatgtcagagtactatcaaatacagtgtctggagagctaagatccaatttggcaatactgtaaaaattccagtatctgtggcgctgcagaaacaactttcagagtgaatcccgattccattatcaagctcttttgtgagagcagttaatatgaccagggtctagcaggttttctttaagctccaatgatagctgatggacagaaaatgttgactggaaaacttcccaaggagaaaagtaaatgtctcattccatgagaatgttttacaactattgtttaataaagagaggttatagttatagcaacagcagtaaaggatggtgtggatgagtaaaccccatactcctggtcatgaaaattttttcag

SEQ ID NO: 438358 - DNA, 450 bp, Homo sapiens
gactggaaaacttcccaaggagaaaagtaaatgtctcattccatgagaatgttttacaactattgtttaataaagagaggttatagttatagcaacagcagtaaaggatggtgtggatgagtaaaccccatactcctggtcatgaaaattttttcagtagttgaataactggtacaatgaacaagaacaayctgtgggatgtaatgaaaagataattttatttttttctctagtaatgtctctacatttatttgatgggtataatttgtcctcttccctgactgaaaaccagtccttgtctgataactcttaggaaataggaagtcctactgtcacttaagtcataagcaaaatttcatttccgaaattagaaatgttttgactctactgggtttacattccctcctgaaacaaaaactggacgaaaatatatgaaacaacagttttgaa

SEQ ID NO: 438359 - DNA, 605 bp, Homo sapiens
cagtgtctggagagctaagatccaatttggcaatactgtaaaaattccagtatctgtggcgctgcagaaacaactttcagagtgaatcccgattccattatcaagctcttttgtgagagcagttaatatgaccagggtctagcaggttttctttaagctccaatgatagctgatggacagaaaatgttgactggaaaacttcccaaggagaaaagtaaatgtctcattccatgagaatgttttacaactattgtttaataaagagaggttatagttatagcaacagcagtaaaggatggtgtggatgagtaaaccccatactcctggtcatgaaaattttttcagtagttgaataactggtacaatgaacaagaacaacctgtgggatgtaatgaaaagataattttatttttttctctagtaatgtctctacatttatttgatgggtataatttgtcctcttccctgactgaaaaccagtccttgtctgatwactcttaggaaataggaagtcctactgtcacttaagtcataagcaaaatttcatttccgaaattagaaatgttttgactctactgggtttacattccctcctgaaacaaaaa

SEQ ID NO: 438360 - DNA, 598 bp, Homo sapiens
taaaacaaaaattgtattatggggcttataacctatataagtaaaaatgtaaaaaatagcataaaaacaaggatgggagaaattgaagtacattactggaaatttgttatactgtatatcatagtatagatgaaggtgtgttgtggtaagttaaaaacgtagtctataaaccctaaaaaaccactgaaatatcaaaacaaaagtttatagctaatatgccaggagagaaaatgaattcataagaacastaaatctgaattaaacaagaaaaaggtgaaaaaaagaaaaaacagatgaagcaaatagtagacaaatagcatgatgatagacttagttacagtaatagccatattgaatgtaagtgttatgaacagcccaataaaaacagggttgatagcttggataaaaaagcaagacctcatttatatgttgccttcaataaatcaattttaaatacaaagacacagatagattaaaagtaaaagaataagaaatatatgcagtactaacactggtcaacagaaagtgtctctattaataagagacaaaataaaattcagagaaaggaatattaccaaaaaagaataaatggtcattg

SEQ ID NO: 438361 - DNA, 598 bp, Homo sapiens
taaaacaaaaattgtattatggggcttataacctatataagtaaaaatgtaaaaaatagcataaaaacaaggatgggagaaattgaagtacattactggaaatttgttatactgtatatcatagtatagatgaaggtgtgttgtggtaagttaaaaacgtagtctataaaccctaaaaaaccactgaaatatcaaaacaaaagtttatagctaatatgccaggagagaaaatgaattcataagaacagtaaatctgaattaaacaagaaaaagrtgaaaaaaagaaaaaacagatgaagcaaatagtagacaaatagcatgatgatagacttagttacagtaatagccatattgaatgtaagtgttatgaacagcccaataaaaacagggttgatagcttggataaaaaagcaagacctcatttatatgttgccttcaataaatcaattttaaatacaaagacacagatagattaaaagtaaaagaataagaaatatatgcagtactaacactggtcaacagaaagtgtctctattaataagagacaaaataaaattcagagaaaggaatattaccaaaaaagaataaatggtcattg

SEQ ID NO: 438362 - DNA, 598 bp, Homo sapiens
taaaacaaaaattgtattatggggcttataacctatataagtaaaaatgtaaaaaatagcataaaaacaaggatgggagaaattgaagtacattactggaaatttgttatactgtatatcatagtatagatgaaggtgtgttgtggtaagttaaaaacgtagtctataaaccctaaaaaaccactgaaatatcaaaacaaaagtttatagctaatatgccaggagagaaaatgaattcataagaacagtaaatctgaattaaacaagaaaaaggtgaaaaaaagaaaaaacagatgaagcaaatagtagacaaatagcatgatgatagacttagttacagtaatarccatattgaatgtaagtgttatgaacagcccaataaaaacagggttgatagcttggataaaaaagcaagacctcatttatatgttgccttcaataaatcaattttaaatacaaagacacagatagattaaaagtaaaagaataagaaatatatgcagtactaacactggtcaacagaaagtgtctctattaataagagacaaaataaaattcagagaaaggaatattaccaaaaaagaataaatggtcattg

SEQ ID NO: 438363 - DNA, 563 bp, Homo sapiens
atcagaaaactagaaagacgttaaaagagaactacaaatgtcacttatgaacatacatgtaaaaatcctaaacaaaatattagcaaaccaaattcaacaatatgtgaaaaggataatacagcatggataagtgggtgttagccacacaaggttggtttaccttagaaaattagtcagtgtaattcacaacaaactataagagaaaaaccaaatgatcatatcaattkatgcaggaaaagcatgaaacaaaattccgcatccattccttataaatactctcagttagtggactaaaaacaagcatcttcaaactgataaagacaattaggaaaatctgcaaatatcatacttgatagtgaaaggcagaatgtttttccctgaggtgtgatctcaccacttctattcagcattacgcaggaactttttactagtgcagtaaaacatgaaaatgaaagaaaagcaaatgataaaggaaataaataaataaaacatctttatttacacatgacctgattgtccatttagaaaatctgacggaatctgttaaaacaagcaagcaagca

SEQ ID NO: 438364 - DNA, 563 bp, Homo sapiens
atcagaaaactagaaagacgttaaaagagaactacaaatgtcacttatgaacatacatgtaaaaatcctaaacaaaatattagcaaaccaaattcaacaatatgtgaaaaggataatacagcatggataagtgggtgttagccacacaaggttggtttaccttagaaaattagtcagtgtaattcacaacaaactataagagaaaaaccaaatgatcatatcaattgatgcaggraaagcatgaaacaaaattccgcatccattccttataaatactctcagttagtggactaaaaacaagcatcttcaaactgataaagacaattaggaaaatctgcaaatatcatacttgatagtgaaaggcagaatgtttttccctgaggtgtgatctcaccacttctattcagcattacgcaggaactttttactagtgcagtaaaacatgaaaatgaaagaaaagcaaatgataaaggaaataaataaataaaacatctttatttacacatgacctgattgtccatttagaaaatctgacggaatctgttaaaacaagcaagcaagca

SEQ ID NO: 438365 - DNA, 542 bp, Homo sapiens
tttatgaaaacgaaaattttcactctacaaaagacacttccaagatggtgaaaagataaaccacagaggggaaagaaatattacaaaatatatatctgataaaggattggtatacaaaatatacaaggaactccaaaaataaactcaacaaataaactccaaaataaactctaaaactccaataaataaactccaaaaataaaactcaacaattttaaaaaaacccagttaataaacatagaaaagatctgaacagacctgaccaaggaagttataaaaatggcaaataagcataggaaaagatgctcaacatcatctgtcattagaaaactgaaaataaatttgtagtacttctacacatctattaaaattactaaaatccaacacactgacaatgccaagtgttggtgaggacacagagtaacgtggattctcattctttgctgatgggcmgaatctggaaattcttacaaagttaaacatagttttaccatacaatttagaaactgtcctcctaggtatttacttaaatagattaaaaa

SEQ ID NO: 438366 - DNA, 478 bp, Homo sapiens
tccctatattactaaggttggtctcaactcctgacctcaagygatcattccacttcgtcctcccaaagctctgggattacagttttgagacactgctcccagcccctcttcttttctttggtactctagcaatgcccttcttttttttggtgagacatgcaccccagggactgaacacctgctggtgtacttttctccctctgccatcaccccatgtagtcagctcctgtttcttctacagatctttcagacctcaactcctccatcgctctcaatgaagccccttctatgctgtcagtcatggccacatttattttctatgtcctattgcagttttgggtatgttccctgtagcgtggggcttctcagcatgtatgctgtgagcttgctggactagatgattcgttggtgtggagagggctcctgtgctttgtaaatggcatccctggcctctgcccactagttgcaagttgtgaca

SEQ ID NO: 438367 - DNA, 638 bp, Homo sapiens
agggctcaggcagtcaaccccttggagcaaataaagataaaagcaagttaaggaatggggggctcaatatatttagaaaaaggcaggggtacttgggcagccccactaattcacttattctgccattcaytcactcatttattcaacaaatatttgaattcatataacaggcactatgctaggcaaaggagaataaatcagtaaattaaaaatgtagtaaaatagggccaggtgtggtggctcatgcctgtaatcccagtactttgggaggctgaggcaagtggatcacttgagatcaggagtttgagactagcctggctgatatggcgaaaccctatgtctattaataatacaaaaattagctgggcatggtggcaggcacctgtaatcccagctacttgggaggctgaggcacgagaatcgcttgaacctgggaggtagagattgcagtgagccaaggtcaccccatcgcactccagctggggtgacagagcgaggctctgtctcaaaaaaaaaaaaaaagtgaaaatagagttgaaaccaaatgaaggggggacactataaataagtaaacaaattgatattatgaaatattatgtgactaaagaaagaaatagcatgcaaagagagaacacaac

SEQ ID NO: 438368 - DNA, 589 bp, Homo sapiens
gttaattactgttgtacaaaattagcacataaagacaaatatgaagcagaaagtaaaagctcctctgtttcctcccatttctatttatcttttccaaatctgccatcaagagttagatacatgcatgcatactcatatcatgccttcatctaataaagatttttaagaattatttctaaaaaatccttggaactttttgcctgtctatatatgtgttttttttttaatttttcaaatagctaaatatcacatcatatggatgaaccatatgttatactgtttcctattaatggatattccaactgtttcaactttttcaacaggtactgtaccagtggtgctttggtaaacattcttgtgcrtatatttttgtgcagatatgcacacaaatcatgcttaaatagtgctttaagataagccccctaaatgtgaagttgctggtacaattaagtatacacttaaaattttcatagacccttcaaagttgcctacccaaaggattcatcagtgtgtatttccattagcatgaaattgcccacttcttagcattttaatcagtgattgacagtatcagtctttttaacttttt

SEQ ID NO: 438369 - DNA, 589 bp, Homo sapiens
gttaattactgttgtacaaaattagcacataaagacaaatatgaagcagaaagtaaaagctcctctgtttcctcccatttctatttatcttttccaaatctgccatcaagagttagatacatgcatgcatactcatatcatgccttcatctaataaagatttttaagaattatttctaaaaaatccttggaactttttgcctgtctatatatgtgttttttttttaatttttcaaatagctaaatatcacatcatatggatgaaccatatgttatactgtttcctattaatggatattccaactgtttcaactttttcaacaggtactgtaccagtggtgctttggtaaacattcttgtgcatatatttttgtgcagatatgcacacaaatcatgcttaaatagtgctttaagataagccccctaaatgtgaagttgctggtacaattaagtatacacttaaaattttcatagacccttcaaagttgcctacccaaaggattcatcartgtgtatttccattagcatgaaattgcccacttcttagcattttaatcagtgattgacagtatcagtctttttaacttttt

SEQ ID NO: 438370 - DNA, 600 bp, Homo sapiens
gagactgatttagtaatagttcagcttttgataaggttaaacagaattgcttttaaaaaaatctgttatattataaaacttttttttctaacgtttggttttataacattgccttaatttttcagtaattctctactgtcagatttctgtatgtatttaattatttctcttctgtctttcgtgtctttctgagttgatagtctgatcctaatgtgtaaaataatctatgttagagcaaaggattcatcacagataagaaagaagactaattaaaacatccatcagttaatgtgacctttatgaattctgtacgggttagtatttattatctagttaagacttgtgaatttattatttgaaaatcgttacttactcatgttcatgatagaatatatgagactctaaaatatcaagatatgtaattgcaacatattaataattcgctgataagcwtaaagaccaatgaaacagcagaatttagtgaagcaaatgactaaaactgacaacaaaaatgtaaacaggatgttagctaattaatattttcccctctttttttacactttgtcctttggcagacaactttaagaatgatacattcaa

SEQ ID NO: 438371 - DNA, 563 bp, Homo sapiens
gagcaaggattttaaaatgatcttccctaaaacatgttaccaaaagagaagctttgcctttttgatagcactatataacaattttaaaaaggtggcttgggaactttctmtggaattgctgagtaatcctgtgtttggtgccctttttttgtaaaggaaccagccaatttactacccacctttatcatttttgccattccagtgcctatagaaaggaatgtgataaattcccagcacctttatatgtgaaaggtacacatgcagggaagagaagctgcaaatgtacctcagagcctttccttgcttgaaatttattcacagtctgtttgacagcagacatggtcctgcctatagatggtgtccttgggaattagcaactcactgcctcttagtttgctcattgtactttttgcaagttagtcccccatactgaaaaacctaccgactgtttggtgcttcattacccagcaggaacatggaaactaagccagattattttcagtgtttggaggactactgggctgcaaagtggtcccaccttgccccttactcacattgctgtt

SEQ ID NO: 438372 - DNA, 563 bp, Homo sapiens
gagcaaggattttaaaatgatcttccctaaaacatgttaccaaaagagaagctttgcctttttgatagcactatataacaattttaaaaaggtggcttgggaactttctatggaattgctgagtaatcctgtgtttggtgccctttttttgtaaaggaaccagccaatttactacccacctttatcatttttgccattccagtgcctatagaaaggaatgtgataaattcccagcacctttatatgtgaaaggtacacatgcagggaagagaagctgcaaatgtacctcagagcctttccttgcttgaaatttattcacagtctgtttgacagcagacatggtcctgcctatagatggtgtccttgggaattagcaactcackgcctcttagtttgctcattgtactttttgcaagttagtcccccatactgaaaaacctaccgactgtttggtgcttcattacccagcaggaacatggaaactaagccagattattttcagtgtttggaggactactgggctgcaaagtggtcccaccttgccccttactcacattgctgtt

SEQ ID NO: 438373 - DNA, 560 bp, Homo sapiens
tatatacgtaacaaacctgcacactgtgcacatgtaccctagaacttaaagtataataaaaaaaaattaaaaagtgacaaaattagtaatatctgggttttgttaaactgataaagatcacarttagtatcttttataaaatctcatagcttaatccaccatccatccatttctttctcttctctctacacacacacacacacacacacacacacacacacgcattatatatttcatctatttctatttctatatgtatctacacatctgtctcatataattaaatgtacacaatgactatttctggatgataatgactttgatcttttacctttttcattgtgttctttaattttgttctactttgtaaataacgagagattattatatttcactaaagcaataaggtattttcaagaggcattttctaataggtgtttactgtagcaaatatgataacctgttgcttttcactgacaaactaaagccaagattccaactctcaattttttaaggctctcctaagtttattaaaactctttcaactaaaggaagattat

SEQ ID NO: 438374 - DNA, 560 bp, Homo sapiens
tatatacgtaacaaacctgcacactgtgcacatgtaccctagaacttaaagtataataaaaaaaaattaaaaagtgacaaaattagtaatatctgggttttgttaaactgataaagatcacagttagtatcttttataaaatctcatagcttaatccaccatccatccatttctttctcttctctctacacacacasacacacacacacacacacacacacgcattatatatttcatctatttctatttctatatgtatctacacatctgtctcatataattaaatgtacacaatgactatttctggatgataatgactttgatcttttacctttttcattgtgttctttaattttgttctactttgtaaataacgagagattattatatttcactaaagcaataaggtattttcaagaggcattttctaataggtgtttactgtagcaaatatgataacctgttgcttttcactgacaaactaaagccaagattccaactctcaattttttaaggctctcctaagtttattaaaactctttcaactaaaggaagattat

SEQ ID NO: 438375 - DNA, 534 bp, Homo sapiens
aaacatgaaaacatttttcttttcaaggtagtgttgaagactaagggatgaaaatgaatgcagtaggaagaacagctctttcactaattggaayatacagtggacaatcagtgcatcttaacatggaaaagtcccaagcagcttgtgacaaaaaaaaagaaaaagaaaaaaaaagtgccactgaagaagctagagatggtgggggaaagtctgtaagcaagggattgtttctcatggaagaaattcaccagcctgttttctatttgaatagtgtttctgactcaagggttggcagaggcagggcctggtgggaggtgtttgggttatgcaggtggatccttaatgaattgcttgatcctattcttgcaggagtgagttctcactcttagttccccaagagctggttgttgaaaagaatctggcatcttcttgctctctctttcttcctctctcaccatgtgatctacacaagctggctccccttcgccttccaccatgagtggaagcagcctgaaacctccaccagaaacagat

SEQ ID NO: 438376 - DNA, 534 bp, Homo sapiens
aaacatgaaaacatttttcttttcaaggtagtgttgaagactaagggatgaaaatgaatgcagtaggaagaacagctctttcactaattggaacatacagtggacaatcagtgcatcttaacatggaaaagtcccaagcagcttgtgacaaaaaaaaagaaaaagaaaaaaaaagtgccactgaagaagctagagatggtgggggaaagtctgtaagcaagggattgtttctcatggaagaaattcaccagcctgttttctatttgaatagtgtttctgactcaagggttggcagaggcagggcctggtgggaggtgtttgggttatgcaggtggatccttaatgaattgcttgatcctattcttgcaggagtgagttctcactcttagttccccaagagctggttgttgaaaagaatctggcatcttctygctctctctttcttcctctctcaccatgtgatctacacaagctggctccccttcgccttccaccatgagtggaagcagcctgaaacctccaccagaaacagat

SEQ ID NO: 438377 - DNA, 621 bp, Homo sapiens
aatgataagctaaatagctaagtaaaatgttcttcagtgatataaagaacagatatacatttaagtaaacaagataattgctaaattgttaacaattataagaaatagaactatgggtattttttaccatgctcataattaatttcaattcctaatttttctaaaataagtatttttataatacaaaacccatcaagaattacatgtttaaaattagagaataaattttaggacttttagkgtgataaatgataatttatctcaataattttaagaaatgtatatttgaagatagttattagtcaacattcaactaagctaagctgcagaaacaaatgaactctgaaatcctagtgacttaaacaaaggcttatacttcattcttttttaagtccattgtggctcaggcagtccttctctatcttgcagccattcatgtagaaaatatgtcctccaaaattaccatagcagaggaggagaaatataaaggagacacactagggtgtaattgctttttacaaatcattgttcatatttcattgccagacctagacatatggctctttaactgctgggaaggttgtgaggctgggaaatgtaaagaaacagagtaatactggg

SEQ ID NO: 438378 - DNA, 371 bp, Homo sapiens
actatacttagtgtgcctacactatagcttaaaataacttcaaaggtttttgagccactgaaattagtgcaccctaaaaaagatagagctgttatcagaaaaaaacaatatatgaaaatctatcttaggtgaatccctctttagtagtcatctaatagcctcatagattaaataagcactttctttcatgtctgaatcacatctattacatataattactttccttccaagcaagtgaaagaaagaacaagaaggaagagctatataaagattataattaataaytgataggcagttttccacaaaacgaagcctgtattgtgagttacataatcagtacctcagcaacctcagttttcttctcaaaagta

SEQ ID NO: 438379 - DNA, 574 bp, Homo sapiens
tatttaattcatatgactaagcattctgttgattaaaccacactctgccacttgttagatgtgtgacctaagatgaattgttactgacccatccatggcctcactacccagtgtgcacagaggccaataccatggcactggcttttgagaaaagaaaagctttrttgcaagtcatttggcaaggaggcaggaggaaatgctcaaatctctctccttgagctggtggctgggaaagattttataatcatagagtaatgagatgtgatctgattagatcttacaatgaggtgatccctggggacatgatctgactggatcctttcatggggtgatgccagagctcaatctggttgaatcctggatcctgctatgtggtgcctgcttcttaatgctgtccctgatcctcagttcaagcacttaggttccccctgtggttgcatgcttggttcatctaagcatgctcaggttacatgaccctcagggtccatggcaactgaaaaatgactgacaactttattacataaaagttgaactagattggtctggtatggtgacaaagttacttaagcactct

SEQ ID NO: 438380 - DNA, 574 bp, Homo sapiens
tatttaattcatatgactaagcattctgttgattaaaccacactctgccacttgttagatgtgtgacctaagatgaattgttactgacccatccatggcctcactacccagtgtgcacagaggccaataccatggcactggcttttgagaaaagaaaagctttgttgcaagtcatttggcaaggaggcaggaggaaatgctcaaatctctctccttgagctggtggctgggaaagrttttataatcatagagtaatgagatgtgatctgattagatcttacaatgaggtgatccctggggacatgatctgactggatcctttcatggggtgatgccagagctcaatctggttgaatcctggatcctgctatgtggtgcctgcttcttaatgctgtccctgatcctcagttcaagcacttaggttccccctgtggttgcatgcttggttcatctaagcatgctcaggttacatgaccctcagggtccatggcaactgaaaaatgactgacaactttattacataaaagttgaactagattggtctggtatggtgacaaagttacttaagcactct

SEQ ID NO: 438381 - DNA, 574 bp, Homo sapiens
tatttaattcatatgactaagcattctgttgattaaaccacactctgccacttgttagatgtgtgacctaagatgaattgttactgacccatccatggcctcactacccagtgtgcacagaggccaataccatggcactggcttttgagaaaagaaaagctttgttgcaagtcatttggcaaggaggcaggaggaaatgctcaaatctctctccttgagctggtggctgggaaagattttataatcatagagtaatgagatgtgatctgattagatcttacaatgaggtgatccctggggacatgatctgactggatcctttcatggggtgatgccagagctcaatctggttgaatcctggatcctgctatgtggtgcctgcttcttaatgctgtccctgatcctcagttcaagcacttaggwtccccctgtggttgcatgcttggttcatctaagcatgctcaggttacatgaccctcagggtccatggcaactgaaaaatgactgacaactttattacataaaagttgaactagattggtctggtatggtgacaaagttacttaagcactct

SEQ ID NO: 438382 - DNA, 631 bp, Homo sapiens
tctcagcaattttcaaatatacaatacttagttaattaatgatgtgtgttaacaccatgtagtacaatggatctcctgaacttattcctcctgtctagctgaaattttgtattctttgaccagaatctctccaattcaccctgtccttgcccctggccactggtaatcaccattctactctctgcttctgtgaatttgacacttttagattgtgtattgattaaattttttttgatgattatgaggttgaaacctttctatrtgtttattaaccattgtaatgttctgtttaagacttttgctccatttcacattggcatgtctatctttttcttattcagacggaagagttcttttatattgtagctatagaccttgtttaatttgagatactttttcctgttctatagcttgacattttactttataaattgtctattgatcaaaagtttttaattttaatgtatttctttatatttaataataccccaaatcatgaagtttttcttctttgttatatgttagaaacttaattgctttctactccatatttcatctataatcaaaaccagaatttatttttatatgtgctgggaagtaggggaaaattttatatttctacatagggcta

SEQ ID NO: 438383 - DNA, 579 bp, Homo sapiens
gaacatactctctattgttttagtactttgaaatctgtggagagtcccttttagtccactgtatattcaaattttataaatccaatttatacacttgaaaagaatgacatttatgcagtgctttttaatrtaatggatatgtcatttaggtcaaattttttgattaggttgttcaaatcttcatacttaatgattttttgtgtaatttttctaccattactgcaaaaaaatgtattaaatcccatactataattgtggattggttcactctttttaggtttctgttagaattttccttattaagtttaaatgtatattattggtgcatatatatttagaatttttgttactcataaatgtgtcgtcgtgaaatgccactctatttcttagatttatttgctttaaatccttctttgtaaatgaatatacaggctttctttttgttattttatatataatatgtagttttttttataataattatcaattcatggaaagttgcagaagatatagagggaggttttctatattcatcactctgtattccccaatggtaacatcatatgtaactgtggtata

SEQ ID NO: 438384 - DNA, 579 bp, Homo sapiens
gaacatactctctattgttttagtactttgaaatctgtggagagtcccttttagtccactgtatattcaaattttataaatccaatttatacacttgaaaagaatgacatttatgcagtgctttttaatgtaatggatatgtcatttaggtcaaattttttgattaggttgttcaaatcttcatacttratgattttttgtgtaatttttctaccattactgcaaaaaaatgtattaaatcccatactataattgtggattggttcactctttttaggtttctgttagaattttccttattaagtttaaatgtatattattggtgcatatatatttagaatttttgttactcataaatgtgtcgtcgtgaaatgccactctatttcttagatttatttgctttaaatccttctttgtaaatgaatatacaggctttctttttgttattttatatataatatgtagttttttttataataattatcaattcatggaaagttgcagaagatatagagggaggttttctatattcatcactctgtattccccaatggtaacatcatatgtaactgtggtata

SEQ ID NO: 438385 - DNA, 579 bp, Homo sapiens
gaacatactctctattgttttagtactttgaaatctgtggagagtcccttttagtccactgtatattcaaattttataaatccaatttatacacttgaaaagaatgacatttatgcagtgctttttaatgtaatggatatgtcatttaggtcaaattttttgattaggttgttcaaatcttcatacttaatgattttttgtgtaatttttctaccattactgcaaaaaaatgtattaaatcccatactataattgtggattggttcactctttttagrtttctgttagaattttccttattaagtttaaatgtatattattggtgcatatatatttagaatttttgttactcataaatgtgtcgtcgtgaaatgccactctatttcttagatttatttgctttaaatccttctttgtaaatgaatatacaggctttctttttgttattttatatataatatgtagttttttttataataattatcaattcatggaaagttgcagaagatatagagggaggttttctatattcatcactctgtattccccaatggtaacatcatatgtaactgtggtata

SEQ ID NO: 438386 - DNA, 546 bp, Homo sapiens
ctgcctgaaaccaagaagaatagaaaaaaaaaagttgaaacaatcaaaagagactctaaagtgaycatgcactagcatctgttcctcatttatggaatacttctgtgagcctatacttcctaggcagtgattgatactctttggagccacacccttggggttgaatcctggctcagccagttgctagctgtgtggttttgggcaagttactttagcagtttgttcctcaaagttctcatctctaaaatggaaataataacagagttgctatagaattgagttaatacttgtgcagcagtgcctggtatgtggtaaacagtaaatattaactatttattatcttatttacccttactttattatttattatctcatataccctgcatgctttgcgatctagtttccagatatgcaggcagttgtaactatgatttgaaagggagaaaagacatttgtagagttaagtctatattttaggattaaaatagcctatagtttaggataaaattttgagctgccagctcaaaataaagaataaaaaaccat

SEQ ID NO: 438387 - DNA, 546 bp, Homo sapiens
ctgcctgaaaccaagaagaatagaaaaaaaaaagttgaaacaatcaaaagagactctaaagtgaccatgcactagcatctgttcctcatttatggaatacttctgtgagcctatacttcctaggcagtgattgatactctttggagccacacccttggggttgaatcctggctcagccagttgctagctgtgtggttttgggcaagttactttagcagtttgttcctcaaagttctcatctctaaaatggaaataataayagagttgctatagaattgagttaatacttgtgcagcagtgcctggtatgtggtaaacagtaaatattaactatttattatcttatttacccttactttattatttattatctcatataccctgcatgctttgcgatctagtttccagatatgcaggcagttgtaactatgatttgaaagggagaaaagacatttgtagagttaagtctatattttaggattaaaatagcctatagtttaggataaaattttgagctgccagctcaaaataaagaataaaaaaccat

SEQ ID NO: 438388 - DNA, 525 bp, Homo sapiens
agttttttttcttgactaattgttctggcaaggacttacagtactatgtttcgtgaaagtggagagagaaggctttcacaccttgtacytgagcttagaggaaaagttttcagttttttaccattgagtatgatgttatctgtggtttttcatgtatgatctttaatatgttgaggtaatttcctcctatttttagtatgttgggtgtttttatcataaaagggtgttgcattgtgtcagatgctttctctgcatcacttgagatgatcgtttggttttgtccttcattctgttgatgtgtgtaactacactgattgctttttgtgtgtttaactatccttgaattctagaaatgaatcccacttgtttgtggtgtataatcctttttaatgtctgttgaatttctggtgaatttggtttgagatttttgcatcaatattcatcaggaatacttgtctattgttttcttttccaagagtatacttatctggctttggtatagtgtagtgctgacatcataaaatg

SEQ ID NO: 438389 - DNA, 525 bp, Homo sapiens
agttttttttcttgactaattgttctggcaaggacttacagtactatgtttcgtgaaagtggagagagaaggctttcacaccttgtacttgagcttagaggaaargttttcagttttttaccattgagtatgatgttatctgtggtttttcatgtatgatctttaatatgttgaggtaatttcctcctatttttagtatgttgggtgtttttatcataaaagggtgttgcattgtgtcagatgctttctctgcatcacttgagatgatcgtttggttttgtccttcattctgttgatgtgtgtaactacactgattgctttttgtgtgtttaactatccttgaattctagaaatgaatcccacttgtttgtggtgtataatcctttttaatgtctgttgaatttctggtgaatttggtttgagatttttgcatcaatattcatcaggaatacttgtctattgttttcttttccaagagtatacttatctggctttggtatagtgtagtgctgacatcataaaatg

SEQ ID NO: 438390 - DNA, 525 bp, Homo sapiens
agttttttttcttgactaattgttctggcaaggacttacagtactatgtttcgtgaaagtggagagagaaggctttcacaccttgtacttgagcttagaggaaaagttttcagttttttaccattgagtatgatgttatctgtggtttttcatgtatgatctttaatatgttgaggtaatttcctcctatttttagtmtgttgggtgtttttatcataaaagggtgttgcattgtgtcagatgctttctctgcatcacttgagatgatcgtttggttttgtccttcattctgttgatgtgtgtaactacactgattgctttttgtgtgtttaactatccttgaattctagaaatgaatcccacttgtttgtggtgtataatcctttttaatgtctgttgaatttctggtgaatttggtttgagatttttgcatcaatattcatcaggaatacttgtctattgttttcttttccaagagtatacttatctggctttggtatagtgtagtgctgacatcataaaatg

SEQ ID NO: 438391 - DNA, 442 bp, Homo sapiens
aagaatagagaaggaaagaagggctgtggccctttggggatcccagacctggaagctccctgagccaaggctgtgacatcctttttaggtctctgtggttcctggcatccccaagcttctgggcaccacaccacgtttcttggtgttagctgttgatatrgtttggctttattcccacccaagtctcatcttgagctttagctcccataatccccatgtgttgttggagggacctggtgggaggtaattgaatcatgggagcaggttttttccatgctgttctcatgatagtgaataagtgtcatgagatttgatggttttataaagggcagttcctcttcgcatgctctcttgtctgccaccatgtaagacatgctttggctcctcttttgccctccatcatatttatgaggcttccccatccatgtggaactgtgagtct

SEQ ID NO: 438392 - DNA, 472 bp, Homo sapiens
ggttttataaagggcagttctcctgcacacgttctcctgcttgctgctatgtgagatgtgcctttgcttctcttttgccttccgccatgattgtgaggcctccccagccatgtggaactgtgagtcaattaagactctttcctttgtaaattacccagtcttgggtatgttcttataacagcatgagagtggactaatacagccatcgaagctgcttatggtacacctggttcagctgcagtctcacagggagccagtgcccttgccagtgcctagagctgtcctcccttctgcagctggtgtgccttgctgcacacagtgtgtggaccccacactcactcacacacccccactgctccacacytggcttgcccttggcaggtgtgggatccaagctggtagcaggagccaagggcagccttccaggctgagtgggcataatgtgcctagcaggccagagcaaaagtcaggc

SEQ ID NO: 438393 - DNA, 518 bp, Homo sapiens
ttctatgtatatatatgtatatacatcatatatactattattacgaagattttcttttatccttgttggagttatatggttgaataatcattggtttggcattctttcatcacttaaggagttttagttttagtttgtcatctacaatgctctggagaaccactaaaatatwcctaaaatattcttaggtatatattagtttttaatacattttaaaagtctgaaaatattgtagctatctggtaagaccaatggggatttagttattgaaagatgctgctacagaaagttcctaaaactaattttgtcagtttattttatttatcaaggtgtttatatgtttttaatgctgcataaaaagttaccataaagtgagcagcttaaagcagcacagattcgttatcatacggttcccattggttaggttcctaggtctgggttagctgggtcctaaactcaaggtttcaccactctaaaatcaagatgttggctgggtatagtggctcacgcttgtaatc

SEQ ID NO: 438394 - DNA, 500 bp, Homo sapiens
gtggcaggagaaagaatgagtgtcgagcgaagggggaaggcccttataaaccatcagatgtcatgagaactcactcactatcatgagaatrgcataggggaaactgctctcatgatttaattatctccacctgttcctgcccttaacacttgggggattataattcaaggtgagatttgggtggggacccagagccaaaccatatcagtgagacagtattaacgcccaaactctgcctcctatcagatcagtggtggcattagattctcatagaagtgcaaaccctaatgtgaactgcatttgtgagggatctaggttgcatgctccttatgagaatctaatgcctgatggtctgaggtggagcagtttcatccccaaactgtcatcctgcatgccctccacctcagtccatagaaaaattgtcttccgtgaaaccagtctctggtgccaaaaaggttggggaccactgcagtaaagtactctttgaccaaaaatatctt

SEQ ID NO: 438395 - DNA, 567 bp, Homo sapiens
gatctctgcaggttctctctgtaacacccactctatatctcagttctgtcttctaacttctctgttttggaggaatatctttaaggcaccatggattcctaattaatcyttgcatctcctatatttggagaagaggagaaagagccagtcactatgatttctataaatattaacaatctcaaccaggtgcggtggctcacacctgtaatcccagcactttgggaggctgaggcaggtggataacaaggtgataagttcgagaccagcctgaccaacatggtgaaaccctgtctctactaaaaacacaaaaattagccaggcgtggtggcgcgtgtctgtagtcccagctactcaggaagccgaggcaggagaatcacttgaacctaggaggcagagattgcagtgagccgagatgatgccactgcactccagcttgggtgacacagtgagactccatcacaaaaataaataaataaataaataacctcatttagtcccacagcaattcatgtttcataaataagtaaactaagaccccaagtgttctagtgagttgtctcatgtcac

SEQ ID NO: 438396 - DNA, 607 bp, Homo sapiens
aagcttacatgacaaaagtagataaattggacttcatgaaaacttttttgtgtcaaaggcagcatcaagaaagtaaaaagaaaacacacagaatggcagaagatatttgtgaatccaacctgtgataaggaatagtctccagaatataaaagcgcacataactaatcaataaaagataagtaamcccaatttaaaaagtgagccaaggatctaaatagacatttctccaaagaaaatatatatatataagccaaaatgtttatgaaaagattaccaacacatagtcattaggaaaacgcaactcaaaccgacagtacccactaccatagctaaaaatagaaaagatggtagcaagtgttgcggatgtggagaattggacactctcattcattcctgttggaaatgtaaatggtacagcccttttggaaaacagtttggcagtccctcaaaaagttaaaaattgaagtatgatatgatccagcaattccactcccagtatatatccagaagaactgaaaacatatgtctacaaagaaatatgcatacaaatgttcataggacatggatggaccttgaaaactgctaagtaaaacagttacaaaagacc

SEQ ID NO: 438397 - DNA, 607 bp, Homo sapiens
aagcttacatgacaaaagtagataaattggacttcatgaaaacttttttgtgtcaaaggcagcatcaagaaagtaaaaagaaaacacacagaatggcagaagatatttgtgaatccaacctgtgataaggaatagtctccagaatataaaagcgcacataactaatcaataaaagataagtaacmccaatttaaaaagtgagccaaggatctaaatagacatttctccaaagaaaatatatatatataagccaaaatgtttatgaaaagattaccaacacatagtcattaggaaaacgcaactcaaaccgacagtacccactaccatagctaaaaatagaaaagatggtagcaagtgttgcggatgtggagaattggacactctcattcattcctgttggaaatgtaaatggtacagcccttttggaaaacagtttggcagtccctcaaaaagttaaaaattgaagtatgatatgatccagcaattccactcccagtatatatccagaagaactgaaaacatatgtctacaaagaaatatgcatacaaatgttcataggacatggatggaccttgaaaactgctaagtaaaacagttacaaaagacc

SEQ ID NO: 438398 - DNA, 383 bp, Homo sapiens
tggtctttactgagttttcaaaaggtattcactgagtgaaaccaaattcgaggttctattacctatcaagaacaagaagacagttgattgtgaagctatgtgctattatagtaggtgaacctggggatagaatgccatgtgctaatgatggctgaggcatctacctagacactcctgaagagaagtacatgctctcagatgccagaagacaccctgagggagggccaggaaacacctggttagggatggcacctaagctagaatctgagactttttctctrcttcctcttttgctgacatgtgaaccatgttctttaatccagtttcaccagaattcataaaatcttagttgactttcatatgtgcaccgtatgtcattgagg

SEQ ID NO: 438399 - DNA, 578 bp, Homo sapiens
agcagttcaggggaatatggaatccacaaataggaatcatattatactagctaatgtgagatgaatttttaatatcctatgtgtatttgaagacagattgaagggatttccggaccatttcaagagttaccaaaggagaatgtatcactgctttcagttccgtacctttgtccttatgggggtaagaagacaagtaataattaataattaaaatttatgtcatttacaatgaaatatttgattatgtaacgcgacgcttgattttatttgcataacagtttattttcatgcagtaaattcagatgtatatatgaagaaacctgaagtgctaggcttgaagtttagagcagtataatcatgctttttgaattaatttccaaattatcttcttcggagcctgtgaaatatgcgtagggccatctttagcgttacagttgggtataagcagaaaaatcagcatggccaayggaactgttctgtttagggatagcccacctgaagaattatattaacattcagggtttctacagaggatgaaatactatatctgtccaagatatattgaatttactgggagt

SEQ ID NO: 438400 - DNA, 541 bp, Homo sapiens
acatatatgtgcacaaagatttacaaatacctgcatatatgtacatatacttatagcactatatgtagtgcaarctgggaaaaattatatgttcaaaattgggttaggtcatcatgcattgacatatgtaacctataaaatacttgtaaaatactaaatgatgggtgaaatgtttttaatgtagtatttaaccatcacattccctattacatttccaccatttattgaaattttattatgtcctaagcaccaggcttgagcacttcccaattttttctttttcctttctcttattcttctccctcactctctgcttgccttcctccattcattcttttgattcatcattcatctgctgaacatctcctcattgcttggaattattatccatactgagtgtctgataatgaacaggacaaacaagaactgtacccttaaggagtttctgttccagtgtggggttggtagtgatagataataaagaaataaagaatgtatcagactgtgatcacaatgaaacagtataatgtatcatgtatag

SEQ ID NO: 438401 - DNA, 541 bp, Homo sapiens
acatatatgtgcacaaagatttacaaatacctgcatatatgtacatatacttatagcactatatgtagtgcaagctgggaaaaattatatgttcaaaattgggttaggtcatcatgcattgacatatgtaacctataaaatacttgtaaaatactaaatgatgggtgaaatgtttttaatgtagtatttaaccatcacattccctattacatttccaccatttattgaaattttattatgtcctaagcaccaggcttgagcacttcccaattttttctttttcctttctcttattcttctccctcactctctgcttgccttcctccattcattcttttgattcatcattcatctgctgaacatctcctcattgcttggaattattatccatactgrgtgtctgataatgaacaggacaaacaagaactgtacccttaaggagtttctgttccagtgtggggttggtagtgatagataataaagaaataaagaatgtatcagactgtgatcacaatgaaacagtataatgtatcatgtatag

SEQ ID NO: 438402 - DNA, 559 bp, Homo sapiens
aatgttcatagcagctttacttataatagtcagaagctgaagataactcaaatgtccatcaataggtgaatggagaaatgttgatatatcattacaactgaatactagtcagctataaaaaggaataaattgttgatacaacatggatgaatttccagttgttccattaatcccattcattaggatgagtgaaagaygccagatgaaaaaaagagtatccataagcaggagttgaacaatgagaacacatggacaccaggaggcaaacaacacacaccagggccagtcaggaggtgggtggcgaggggaaggagagcattaggacaaatagctaatgcgtgcggggctcaacacctagatgaccagttgataggtatagcaaaccaccgtggtgcacgtatacctaggtaacaagcctgtatgttctgcacttgtatcctggaacttaaagtaaaataataataataataataataaagaaagaaaaaagtatctattgaaagattccatccatataaaattctagaaaatacaaactgatctatagtaacagaaagca

SEQ ID NO: 438403 - DNA, 400 bp, Homo sapiens
cttccctccatgaacaagtttatcatgacccttcattcccttcatgacagaaagcaagaaaggaatcctttcaatgccccttttcagcaggaagtagccagatagactggacacccctcttcactgygccattttccctttcttgggatcctaacagacaagtagacatgagcatggagaaatacaaagggtcaaagatttgcccaaaatatttatcagggggaaaatgaggagagcaaggatcacctggtggccatcaagcagaccatcaggaggcaaagccccttatctgaagaactcagaatggtactttcctattatctaaagccacatctggtaccaggcttctttccctagaatttctatacatctccggaatgcacgcatgttggaacccatt

SEQ ID NO: 438404 - DNA, 496 bp, Homo sapiens
cccctctgcccggccaccaccccgtctgggaggtgtgcccagcagctcattgagaacgggccatgatgacaatggcggttttgtggaatagaaaggggggaaaggtggggaaaagattgagaaatcggatggttgccgtgtctgtgtggaaagaagtagacatgggagacttttcattttgttctatactaagaaaaawtcttctgccttgggatcctgtagatctgtgaccttacccccaaccctgtgctctctgaaacatgtgctgtatccactcagggttgaatggattaagggcggtgcaagatgtgctttgttaaacagatgcttgaaggcagcaggctcgttaagagtcatcaccactccctaatctcaagtacccagggacacaaacactgcagaaggccgcagggtcctctgcctaggaaaaccagagacctttgttcacttgtttatctgctgaccttccctccactattgtcctgtgaccctgcca

SEQ ID NO: 438405 - DNA, 580 bp, Homo sapiens
gcagtggtgcaatctcggctcaccgcaacctccgcctcctgggttcaagtgactcctctgcctcaatctcccgagtagctgggaccacaggcgcackccaccatgcccggctaatttttgtatttttagtagaggcggggtttcaccatattggccaggctggtctcaactcctgaccttgtgaactgcctgcctcggccttccaaagtgctgggattacaggcatgaaccaccgcgcctggccaatgagcagtaatgtttttaaaggaatcttgtttttttttttttgagcagtgggtctcagcagtgggcttaaaacgtttagtaaaccatgctgtaaacaatgtgctgtcatctaggctttgttatcccgtttctagagcacagatagagtagatttagcataattcttaagggtcctaggattttcagaatggtaaatgagcactgttctcaacttaaagtcactagctgcattaggccccaacaagagtgtcagccctgtccttacacgctttgaagccaggtgttgacttctttctagctatgaaaggtctagatggcatcttcttccaatata

SEQ ID NO: 438406 - DNA, 580 bp, Homo sapiens
gcagtggtgcaatctcggctcaccgcaacctccgcctcctgggttcaagtgactcctctgcctcaatctcccgagtagctgggaccacaggcgcactccaccatscccggctaatttttgtatttttagtagaggcggggtttcaccatattggccaggctggtctcaactcctgaccttgtgaactgcctgcctcggccttccaaagtgctgggattacaggcatgaaccaccgcgcctggccaatgagcagtaatgtttttaaaggaatcttgtttttttttttttgagcagtgggtctcagcagtgggcttaaaacgtttagtaaaccatgctgtaaacaatgtgctgtcatctaggctttgttatcccgtttctagagcacagatagagtagatttagcataattcttaagggtcctaggattttcagaatggtaaatgagcactgttctcaacttaaagtcactagctgcattaggccccaacaagagtgtcagccctgtccttacacgctttgaagccaggtgttgacttctttctagctatgaaaggtctagatggcatcttcttccaatata

SEQ ID NO: 438407 - DNA, 597 bp, Homo sapiens
cacctgtggttatcatgtgcaatgggcacattcaacacaaatcaaattattctgaagcttgctttctttcttttttccctactccctttcttaattgaggggagcaaaaagttggtttccagggatatgtcttctctcttatgctggtcccagattgatgcagtcatggaaactaggcagtaaactcattcttggcagctgccrgcactggtctgattctttcttttaaaagcatgagattctttaataacacatattggaaagattgatgccaagtgattccaggtcatcctagaggaggcttgggaacattgttgaatagatttaaatgattcagttaagtgagtgatttaacccaaggtttgtgtctaatttaaacaggacctataaaatatagaacaattggtttgtttcttttttagaatattgaagattagattttaatttgagaattttactaatttgagggttttattttttgtttttaagcgttcaaaatgttgaattgtagatatgctgagttttataatgagcacaatgaaggtttttcaactggcccgttaaagccaacccactaatgaaatgaaaatatgaaat

SEQ ID NO: 438408 - DNA, 585 bp, Homo sapiens
ccctgtggccttggctcacatgacaaagagaaatattaaaaatactgagccactggaccagcatactcactgatcaatcagaacaggtgacagttgaaaacaactgacagggctagctgaacatcggccccacctctgagtctgcacctccacctctgtacatctacctcctggggctgtcaggtgaaatggagagaaagcasccagcacagcagcttgcatacagcagggattcaataaatgttccttggcttcccccaaagatcccagaaggtgttgaggtctgaattttctgcagtgggtccctgcaaagacatcattctttccagatgttgaggaaagttgtgaaccgcttcttccagccagggcttaggagcagggaggctgagaacgatggtctgggtgcaaagacgaactgcaatcagggttcactgatcacctttgtccccctggtggtctttgtcctgcccagggactctggcacaccttcctgtcatgcactccaggaagatctgggtctgtgcgtcagacccgggccagccagccccctctcggtgtgtataggcagcttgtcactacaaaatc

SEQ ID NO: 438409 - DNA, 524 bp, Homo sapiens
ggctgtcctgggcctttccttttttttttttttctttagaggtggagtctcactagagacagggtctcgctatgtcgcctaggctggtctcaaactcctgggctcaagcaatcctctcccctcagcctccaaaagttctgggattacaggcataggccactgcacccggcctgggccttttcctactcttcacactgccttgagccagccatctcagccaccctgtggggtctttgtggtgataagacctgattcacttcttgccagctttgatttcttctttggattccagacccgcaaaataaaccatccatttgacatctccacttaggtggagaagctcacactctgtggatctggcatcttccctggaaaacagaaaactgtctcactttctctggccctgcccacacccatctccccagatagctycactgctaaccccagccagcaacctgtgagtcacccctgaaagtccaacgtcgtcattagactctacctgcatgctggatacaccacttatg

SEQ ID NO: 438410 - DNA, 524 bp, Homo sapiens
ggctgtcctgggcctttccttttttttttttttctttagaggtggagtctcactagagacagggtctcgctatgtcgcctaggctggtctcaaactcctgggctcaagcaatcctctcccctcagcctccaaaagttctgggattacaggcataggccactgcacccggcctgggccttttcctactcttcacactgccttgagccagccatctcagccaccctgtggggtctttgtggtgataagacctgattcacttcttgccagctttgatttcttctttggattccagacccgcaaaataaaccatccatttgacatctccacttaggtggagaagctcacactctgtggatctggcatcttccctggaaaacagaaaactgtctcactttctctggccctgcccacacccatctccccagatagctccactgctaaccccagccagcaacctgtgagtcacccctgaaagtccaacgtcgtcattagactstacctgcatgctggatacaccacttatg

SEQ ID NO: 438411 - DNA, 575 bp, Homo sapiens
tggatgagattgcccagggaaagagtgaggagtctgcaggtgggttagagaaggacacacctgcaaaggatttacagaaggcattattagagaggtagtagggaacacagttctttagttttatattctaaatgctgctgagagccaagtaaaatagagactggagaacatccatttgatttagcaacatggcagwcaaggtgaccttagtaagccatctcggtgcatgttgggagtagaagccagatggcagtgggctgagaagagtaggaggtgagtaaaggagatagtgagtatgatcaggcagttttctgagaggttttgctattaagggaaggggttggggagtatagggaggtatgtgcttggttttgttttttaaagatggaatctacttgagcacgtttaaatgctgatgcctacaaacctcttagagagggctgaaggtaataaggcaggagaagggagaatccatagtataagctttctcagattccaggaaggtgtgcataggctcagaaaagaggagggccatttcctctgttgcaaagaggaagaatagaggatggacatgg

SEQ ID NO: 438412 - DNA, 242 bp, Homo sapiens
gcaggcggtggccgccaggctttaagcaagatctggggcactgatcctgctgtgatcacagcaagcgacagaccctcrgagcggggccaggcccagctggataagcccaggctcaggccacgtcttgcctgctattgtttccagggctgaggtcggcccgagtttttagcaggttttatgtgatggatcataccacccaggacggttttgaccctgtagctgctgacagccctcagccaaag

SEQ ID NO: 438413 - DNA, 582 bp, Homo sapiens
aagcaatatcagtcccatttacagatgagaaaactgaggctcagagaagggtagccacttgcccagggtcatgcacaggttgctggcaaagctgaagctggtacagagctgcttctgactccaaagcacataatctttcctgatttgtagtttgaggttctttcccaagtggtaaaatggaggcttagagagaagaggccaccgatgactgtggcctgcacggcacagggcaaaagactggtgtcaaggccamcacccaagctgtgcagcccagtggccacccagtaacccactccttccccccttccccttttctccctcaccctctgctataggcattgtaagcagactagccagattcccagagactgcagagaaaccaaactgggctttggagtcaaacagaccgggggccatctcagtctcttcacctggaaaatagggatacatttacaaaccccacaaagtcaagttggatttctgcagatggcctgcaacacatgtctgacacatagtaggttctcaataaatgagagcaccatcttccagcctccactcgcagctgagagtcctgagaaatat

SEQ ID NO: 438414 - DNA, 528 bp, Homo sapiens
atagccttaacttttatagggagatacacctcaaaacatcttgaaatcctcattccagattacctttatctgaaaacctggtctcgccacacagagctctacccacttttaggtaaatgaggactaagtgtgtcatagagttggccagtgggtctccaccaccatctktggcaggtccagcctgccaaaatcaggatccccaccacatcctggggtggacagaagaaggggctattcgcagcaggcctgagaaggcttgaacacatttctagatgtatagtgtgggttccaagagactgcttggttcagaagtataacagcctgttgtgaagaatccttctgaagccttcccagaaccaaaatgagaactcagacatttcattcaactcttagatgagaagtgatatatacctatagtagcatattttcaaatagtaaaatattattgcttccctgacatacaccctaaatgttcatggtgttttagtcttgtaattttctaccacattaaatttgctattttaaatt

SEQ ID NO: 438415 - DNA, 528 bp, Homo sapiens
atagccttaacttttatagggagatacacctcaaaacatcttgaaatcctcattccagattacctttatctgaaaacctggtctcgccacacagagctctacccacttttaggtaaatgaggactaagtgtgtcatagagttggccagtgggtctccaccaccatctgtggcaggtccagcctgccaaaatcaggatccccaccacatcctggggtggacagaagaagsggctattcgcagcaggcctgagaaggcttgaacacatttctagatgtatagtgtgggttccaagagactgcttggttcagaagtataacagcctgttgtgaagaatccttctgaagccttcccagaaccaaaatgagaactcagacatttcattcaactcttagatgagaagtgatatatacctatagtagcatattttcaaatagtaaaatattattgcttccctgacatacaccctaaatgttcatggtgttttagtcttgtaattttctaccacattaaatttgctattttaaatt

SEQ ID NO: 438416 - DNA, 572 bp, Homo sapiens
tcccacagctagcaaatgacaaggctgggattcaggcacagagccagtgtttttaaaccagtagccctgctactctccactgccttaatttctctggctcttaaatgggactaataacctactctcctccgttagcacagagcctggcgggaatgacctggtctacaaaggattgagagtggggttctctctggccacacttgtcaactgagggcttgaggctaccattttctaccagcaccaataaaccccacatggctggaattcgccaagctggaaactccacatagctggaattcactactcttctctatccgttgtcttgcctactgcccttggcctcctctgggcctaccactaaccatgaggctgcagagaacatkctctcatgcccatgggtgagtctttggctcttctcacctattcctgagaatgaatctaaaatccctggtccttccccgaggaaggtgaataaagccattcaacatgcagtttctgggctccaatgctgtgtcaggccgagaaggaggcagcataaggcaccacaaattctggtgccagacagtgctggt

SEQ ID NO: 438417 - DNA, 537 bp, Homo sapiens
ctaccactaaccatgaggctgcagagaacattctctcatgcccatgggtgagtctttggctcttctcayctattcctgagaatgaatctaaaatccctggtccttccccgaggaaggtgaataaagccattcaacatgcagtttctgggctccaatgctgtgtcaggccgagaaggaggcagcataaggcaccacaaattctggtgccagacagtgctggttcccaacccctcctcaggacctacagtctccgtgaccctgagaggctacagcaccctcagagcctcagggccccctcaatttttttttctttttttctttaataacgcttctctttagaagactgttacaagattagagagaaaactgcctttgctctccattgtctctgcctagacagctctgcccgctatctccagtcttcttgttattcatgtctcagcttaaatgtcccctcctcagggaagccctccctgaccagtctctgtaaagagtcagacagtaaatactgaaggctttgtgggccttactatctct

SEQ ID NO: 438418 - DNA, 572 bp, Homo sapiens
tcccacagctagcaaatgacaaggctgggattcaggcacagagccagtgtttttaaaccagtagccctgctactctccactgccttaatttctctggctcttaaatgggactaataacctactctcctccgttagcacagagcctggcgggaatgacctggtctacaaaggattgagagtggggttctctctggccacacttgtcaactgagggcttgaggctaccattttctaccagcaccaataaaccccacatggctggaattcgccaagctggaaactccacatagctggaattcactactcttctctatccgttgtcttgcctactgcccttggcctcctctgggcctaccactaaccatgaggctgcagagaacattctctcatgcccatgggtgagtctttggctcttctcacctattcctgagaatgaatctaaaatccctggtccttccccgaggaaggtraataaagccattcaacatgcagtttctgggctccaatgctgtgtcaggccgagaaggaggcagcataaggcaccacaaattctggtgccagacagtgctggt

SEQ ID NO: 438419 - DNA, 278 bp, Homo sapiens
tacccagaataacactgattaacactaagaggtgacattttttggtggtgtggtggtgcaaacgttggcaaataattttaaaaatcaaaaagataagtcctgattttttctcactttaaaataatgtttatgatagtaaaattagwgaacaaaagaaaatataataaacaaatttttaccctatggcatagctaagaaatagctagcaatatgagttgtaagccctttatttgtatagtcatttaattcttaatgtaattccatgaactatatattat

SEQ ID NO: 438420 - DNA, 278 bp, Homo sapiens
tacccagaataacactgattaacactaagaggtgacattttttggtggtgtggtggtgcaaacgttggcaaataattttaaaaatcaaaaagataagtcctgattttttctcactttaaaataatgtttatgatagtaaaattagasaacaaaagaaaatataataaacaaatttttaccctatggcatagctaagaaatagctagcaatatgagttgtaagccctttatttgtatagtcatttaattcttaatgtaattccatgaactatatattat

SEQ ID NO: 438421 - DNA, 536 bp, Homo sapiens
gaggcctgggtggggcgttggggcacaatctcctacagtttgctgccctctccggtttcctgactacaatgcaaacagaatttaatcaattacctctcattaaattgaacaactatgaaaagaacagggaaaaaagagcatttgttayataatgatattaatctattgtaacctgatcaacaaaacaccattactatgggctatcatgtgaaaataaataatccttcttcataactatattataataaggttttccacagttcatttttatcttgagtcaaaagaaataccctgtgcaatggcttagagtagcagctaactcagaaactaagaactgaccaacaaaccacttcacttcaaagatgtcaactaagtttccatcagaggtaaatggggaagggggagagaaataacacatatttaaaacctactgtgctagggaggagccataatttcattatctcttttagttcttacacaatactttgtagcagatttaattatcccaattttacagaagagatacttgctctaag

SEQ ID NO: 438422 - DNA, 577 bp, Homo sapiens
tgattcctttttatgacagccctagcataccatacactaggggtacaccttcatcctttagcacatggctatctacttgtccccataccatttgttgaaaagactcttctttctcctttggatggtcttggcatccttgtcaaaaatcagttgaccatggacagttttatttctggastctctattcccttatctgtgtgtctgttcttacaccagtaccacagtcttgattactctagctttgtaataagttttgagataaggaagtgtgcattctccagttttgttcttctctttcaagattgttttggctattccaggtcccttgcattttcatatgaattttaggatcagtttgtcagtttctgccaaaaaggcaataggattttaatagggattgctttgaatctctgtatccattgaggagtaatgccatctgaatgtaaaccaaaaatgaaatcctaagccccctgaccattcttttacctcagtcccttgacaagggcatctcagaggtaacctgaaaaaacaaattcagcccatgatgggggaaggtgggagtctgacatgcctcatt

SEQ ID NO: 438423 - DNA, 581 bp, Homo sapiens
aggataacatctttgtgaccacaggtaagacaaagattcttttcaagatagaaaaagaacatggtttaaaagaaaaattttataaataggaatgggagtccaaggcaggaagatcacttgagcccaggaggtaaaggctgcaagggagccatgatcacaccactccagcctgggcarcaaagcaagaccttgtctcaaaagaaaaaaattaaagtaaaaacttttactctttgagacagatttagaaaattaaagacaagccacagatgacaaggaaataaatatttgtaaaacataaatctgacaaaggacttctgcctagaatttaaagaacataataaacttcaaactcatcaacaagcagacaatcagacttttttaataggcaaaagatctgagcagacatttactcaaagatgacatatgaatggctcataagctcaggaagagttgctctacatcactagtcatcagggaaatgcaaatactactatacctattagaatggctgacattttaaaaactggcattaccaagattggtgaggatttggagaaaatggaattttcatacattgctga

SEQ ID NO: 438424 - DNA, 382 bp, Homo sapiens
caggctatatgattcaactaagccaatttaacttaactgcattgatatttgccagattgctatcctcctctgcagaggaaggccctgaaaacactaatgttcatcacaaattctcctaaagtcacattaggatctgataaaatcaataattctttggcacattaaaaattgatctcaaggagatattgccttataattattcctttgccagatacccmtacaaaaacactttcataaattgttaaggttttacttaatattctgcatccttgaagttctcaaaaatatcagtaactatcacgttagttattcagcagcaacgctgtgctagtatttcatatagtaacagaatacatgccaactaattccaagaactgcttgt

SEQ ID NO: 438425 - DNA, 590 bp, Homo sapiens
gcggcatacctagatcagaaggagcttaatgtaccagattttaagaggctgttaagtgagaagggaaaccgggacccaaatgaggtatagatattgaatgaatasaagtttgtagagtaatagcaggtagaacgaattatttacattttctttttctttggtgtctcctgttttcttcttcctccttgattatctaactctaatctccttataaaaaacatactcttgtcctttttctttcatcctccagtcagcagaaaaacataccaatgaacattttatttcttttttttattatactttaagttctagggtacatgtgcacaacgtgcaggtctcttatgtattagactttatgttcgttgttctccatacagattaattgaacattaaaatttttctttctcaagaagagttaactgctcttttaacatgtatcatggccctcaattaacattctttcatagggtcatagggtcaatggtaagaagagggtacacttttcactttcatcagaggtattttcataggaaaatactggctaacaagatttatcctataaaattaaaacactagtgaaaatcaaattc

SEQ ID NO: 438426 - DNA, 539 bp, Homo sapiens
  misc_feature (1)...(539): n = A,T,C or G
ttatgtattagactttatgttcgttgttctccatacagattaattgaacattaaaatttttctttctcaagaagagttaactgctcttttaacatgtatcatggccctcaattaacattctttcatagggtcataggstcaatggtaagaagagggtacacttttcactttcatcagaggtattttcataggaaaatactggctaacaagatttatcctataaaattaaaacactagtgaaaatcaaattcacttagaaaatatctatatacaattnnnnnnnnnnnnnnnnnnnnnnnnnnnnnnnnnnnnnnnnnnnnnnnnnnnnnnnnnnnnnnnnnnnnnnnnnnnnnnnnnnnnnnnnnnnnnnnnnnnncagtcattagcctgaattggtacccaagtcatgttacgagaaaataaagacttacacagaccattttaaattctgtagtctcaattaccatatatgctcttattaattgtttctaagaattcctcttcaaaatgtgtgcaagtaacgcatcatatggaaaggc

SEQ ID NO: 438427 - DNA, 539 bp, Homo sapiens
  misc_feature (1)...(539): n = A,T,C or G
ttatgtattagactttatgttcgttgttctccatacagattaattgaacattaaaatttttctttctcaagaagagttaactgctcttttaacatgtatcatggccctcaattaacattctttcatagggtcatagggtcaatggtaagaagagggtacacttttcactttcatcagaggtattttcataggaaaatactggctaacaagatttatcctataaaattaaaacactagtgaaaatcaaattcacttagaaaatatmtatatacaattnnnnnnnnnnnnnnnnnnnnnnnnnnnnnnnnnnnnnnnnnnnnnnnnnnnnnnnnnnnnnnnnnnnnnnnnnnnnnnnnnnnnnnnnnnnnnnnnnnnncagtcattagcctgaattggtacccaagtcatgttacgagaaaataaagacttacacagaccattttaaattctgtagtctcaattaccatatatgctcttattaattgtttctaagaattcctcttcaaaatgtgtgcaagtaacgcatcatatggaaaggc

SEQ ID NO: 438428 - DNA, 539 bp, Homo sapiens
  misc_feature (1)...(539): n = A,T,C or G
ttatgtattagactttatgttcgttgttctccatacagattaattgaacattaaaatttttctttctcaagaagagttaactgctcttttaacatgtatcatggccctcaattaacattctttcatagggtcatagggtcaatggtaagaagagggtacacttttcactttcatcagaggtattttcataggaaaatactggctaacaagatttatcctataaaattaaaacactagtgaaaatcaaattcacttagaaaatatctatatacaattnnnnnnnnnnnnnnnnnnnnnnnnnnnnnnnnnnnnnnnnnnnnnnnnnnnnnnnnnnnnnnnnnnnnnnnnnnnnnnnnnnnnnnnnnnnnnnnnnnnncagtcattagcctgaattggtacccaagtcatgttaygagaaaataaagacttacacagaccattttaaattctgtagtctcaattaccatatatgctcttattaattgtttctaagaattcctcttcaaaatgtgtgcaagtaacgcatcatatggaaaggc

SEQ ID NO: 438429 - DNA, 604 bp, Homo sapiens
gctcttaatgacaaagtcttaatggaaatggtgaaaataacctagcattatttttttctataaagcagcatcctttctgtgtgttcaaaatttaaccaacattctaaagagcatagaatatgggcaataaaaattataggtttcatgtgttaatgttttctgaatggcagatgtacaacatactttagacatactatttttcatttattcttcaaaactacctgtagttagtaktattactttggaaaattaaactatggagagaggtacaacattcacacaaccatgtattaagtgcctatgcttgggcaagtgctgtgctaggcaacaggaatgtaatggtaaaaattacagcatgccccaccctcatggagtgtatcagtctgttctcacacggctctaaagaactacctgagactgagtaatttatgaagaaaagaagtttaattgcctcacagttccacacgcttaacaggaagcatggctgggagacctcaggaaacttacaatcacgtcagaaggcgaaggggaagaaagcatgtcttaccatggcagaacaggagacagagagagagagtgggggaagagctatacacttatcaga

SEQ ID NO: 438430 - DNA, 604 bp, Homo sapiens
gctcttaatgacaaagtcttaatggaaatggtgaaaataacctagcattatttttttctataaagcagcatcctttctgtgtgttcaaaatttaaccaacattctaaagagcatagaatatgggcaataaaaattataggtttcatgtgttaatgttttctgaatggcagatgtacaacatactttagacatactatttttcatttattcttcaaaactacctgtagttagtattattactttggaaaattaaactatggagagaggtacaacattcacacaaccatgtattaagtgcctatgctygggcaagtgctgtgctaggcaacaggaatgtaatggtaaaaattacagcatgccccaccctcatggagtgtatcagtctgttctcacacggctctaaagaactacctgagactgagtaatttatgaagaaaagaagtttaattgcctcacagttccacacgcttaacaggaagcatggctgggagacctcaggaaacttacaatcacgtcagaaggcgaaggggaagaaagcatgtcttaccatggcagaacaggagacagagagagagagtgggggaagagctatacacttatcaga

SEQ ID NO: 438431 - DNA, 602 bp, Homo sapiens
caaagtgtcatttctggttgaatttcctgagaataagaacaccggactttaaacaatatgatatgactttttccccgaaactgaagttatttctatcctatttaatgtcacatatattttaactattatgtaaaaaacattgtgttagatgtcaaaggatataaagatgactgagatcatttcttccctcaaggaatcgccaatccaatgaaaagatgaaactcatctttctagaatacattttcccgtgtttatctttgaaagagtacactgaatattatacaacttctycttgatgactgagggacatcattccaagccagctgatgttctgggccacaacaataagcacagctgcagctagaaatgagtgtgacaggagctcagggctactggtcataggagttaaccaagaactgccttctgccatctcaaattgggtggatgaggggctggatagataacagatataaataccctgatgtcatgattgctttttggtcttttccctttttcctcccatcctatatatgaaccaaagacctgcttcatgactaatgtgctttgaaccagcacaaaaccgccattagccatcagtgagg

SEQ ID NO: 438432 - DNA, 575 bp, Homo sapiens
gactgagggacatcattccaagccagctgatgttctgggccacaacaataagcacagctgcagctagaaatgagtgtgacaggagctcagggctaytggtcataggagttaaccaagaactgccttctgccatctcaaattgggtggatgaggggctggatagataacagatataaataccctgatgtcatgattgctttttggtcttttccctttttcctcccatcctatatatgaaccaaagacctgcttcatgactaatgtgctttgaaccagcacaaaaccgccattagccatcagtgaggtatacaggtagcaacagctgaagacctttcctgtcgggcaccctgcagagtgtccaggtctgacctaaatgttactccttattgctgggcctcctctaacgtcagtgtcagctacccacctcctttcatcacttgaatttctaaaccaactggcatcaccccttctaagctctgccagttattctgctattcagaactctccgttctcaaattacaatgtgtataaaatgtccagcacagtgcctgacacagagcaggcactcagtaagt

SEQ ID NO: 438433 - DNA, 670 bp, Homo sapiens
catattcaggagggcagaggtaactctcacagatatggttacaaagttacaaaatagatttcaaagttcttttatttactttcatgttgttaaaacatttcccatagttttttttttttttcagttcagttttatgacttaccgatccaggaaaatgcttggaaagcacagtaacaacttttaaacttaatattaaaaacaaataaaattgctcattgccaataaayatacctatgtaaaatactactcagtgtaagaatttcaactgacagtgacctgtcaaattcaggcaattctaaaataggatggtggtggttacactgtgcaaaatattcaatagagagagttcaggaatgccaataattttttgttattattatcaaaacattcaataaagatagttcaataatggcagcaactcttactgttatctccctcctatcccaccttgggggccttgtaataaattttgcttgcaaattgcctaagtgttatatgtggaaagctaagttaacaggtgtcatgtttcccatttataccactgatgttccaatgcaaggtgcccggggaaactgccatcccttaatccagctctgctcacccagacatacacatatacccatcaatccatctgttaggcattaagaattacaatagtataaagaacaat

SEQ ID NO: 438434 - DNA, 535 bp, Homo sapiens
  misc_feature (1)...(535): n = A,T,C or G
caaagttcattatatttattacagtcaaaaacagtttctaggaagtctattgtatttatacaattaaaaatgactcaactattgggtacaaggtttcttttaggatggtgaaaatgttctaaaatgatggttgtacaacctgaacgtaaatgaaaaaattatgtactgctgaactgtacactttaaatgagtgaattttatggtatgtaaattatatcccaataaagctatttttaaaatgggtcaatcaaggacactaagagttgtttatttgaaaagttcaaaaaaattgacaaaccattagctagatcaagaaaaaactcaaatcaaatcagaaatgaaagaggagggattataactgatgccacagaaattaaaaggataagaggctactatgaaaaattatatgccaacaaattagataatccaaaagaaatggattaattcctagaaacatacaacctaccaagactgaaccataaatagaaggtctyaacagacctataagtagtaagaagattaaatctactannnn

SEQ ID NO: 438435 - DNA, 535 bp, Homo sapiens
ttttgttaagccaccattcttcctcatttactacttcaacccattatggaatttacatttaatgtgtgcttagtaggtcccagacactattctctacactttgagtcttcaagcaaccctatgacatagctaatattaatattaatcccttgattttaatgatgagactaagtcataagaaggttaagtagcttacccaaggccacacaagyagaaggaaaaaaaaaatgaaggaacaagaattcctatctaggaatatgatttctggtcccacttgcttaattaactctataatacctattaaatctagtaagacttctagaatagaaataaaattaacaaattttccagttataaagttttatatatcattgggggaggagatcaaaggtggaattaagtcaagcaataatattttgattttgtgttcattgattcattctacaaagatacctactaagggttggcactctgctaagggtggttgcagacaaagcagtgaataagaccatatcagctgtgctctaacagagct

SEQ ID NO: 438436 - DNA, 586 bp, Homo sapiens
aaggtgccatcttggaagtggagacagccctctccagacactggtcctgctatctagtttgaaaatattgaggccgggcatggtggctcatgcctgtaatcctagcactttgggaggctaaggcaggcagatcacctgaggtcaggagttygagatcagcctggccaacatggcgaaactccatctctactaaaaatacaaaaattagtcgggtgtggtggagcatgcctgtgatcccagctactcaggagagtgaggcaggagaatcacttgaacccaggaggcagaggttgcagtgagccgacatcgcaccattgcactccagcctgggcgactgagcgagactctgtctcaaaaaaaaagaaaaaaaaaaatatttttatcactctaaaaggaacatccatacccattaagcagttactacttattcccttctctcccattctctggcaaccacttcttattatacttgtatcttcagtgccttacacaatgtgtggttcatagtaaacgcttaataattttttattggaatagtgattgaattacgaattataaagggggtaaaaccttctttaaatttctt

SEQ ID NO: 438437 - DNA, 422 bp, Homo sapiens
taagtgagcggatggctgcatttctatctaagggtatacagccattgattttctattacttttgtttttaaagcttcttttccaaagagacctcagccattttgcataaaaccaaagwttcaacaaacatttttttgattacctacacatgctgcaagccctggggatctgaccctatccccgtagctagcagatatcatgaaatcattaagttgtactttctcaccatgctcagcctcagaattctgctcaaatcagaccccaaagacagccactagtaatagataaaaattggcttttgaaatgaaatccatttgccttcttctgtttagtctcatagaatgagtttcaaatgtggggatgaaaataataattatactaatagacccaaatcaacaaattagtgtaggaacttgaatttt

SEQ ID NO: 438438 - DNA, 422 bp, Homo sapiens
taagtgagcggatggctgcatttctatctaagggtatacagccattgattttctattacttttgtttttaaagcttcttttccaaagagacctcagccattttgcataaaaccaaagattcaacaaacatttttttgattacctacacatgctgcaagccctggggatctgaccctatccccgtagctagcagatatcatgaaatcattargttgtactttctcaccatgctcagcctcagaattctgctcaaatcagaccccaaagacagccactagtaatagataaaaattggcttttgaaatgaaatccatttgccttcttctgtttagtctcatagaatgagtttcaaatgtggggatgaaaataataattatactaatagacccaaatcaacaaattagtgtaggaacttgaatttt

SEQ ID NO: 438439 - DNA, 422 bp, Homo sapiens
taagtgagcggatggctgcatttctatctaagggtatacagccattgattttctattacttttgtttttaaagcttcttttccaaagagacctcagccattttgcataaaaccaaagattcaacaaacatttttttgattacctacacatgctgcaagccctggggatctgaccctatccccgtagctagcagatatcatgaaatcattaagttgtactttctcaccatgctcagcctcagaattctgctcaaatcagaccccwaagacagccactagtaatagataaaaattggcttttgaaatgaaatccatttgccttcttctgtttagtctcatagaatgagtttcaaatgtggggatgaaaataataattatactaatagacccaaatcaacaaattagtgtaggaacttgaatttt

SEQ ID NO: 438440 - DNA, 605 bp, Homo sapiens
ttcacacaaacattggtttttgtctttctccattcttattaaacagtagaaataattatattgttcataataattttaattataaaagtatacatgctctttgaaaaaaaatcagataattcaaaaatctatgtataggaaagaaggtataaagaaggaattcatagttccacctcttagagatgatgatttacattttgagaaatatccttctaagtttttttcttgttgtacatgtaagcacacctatttaaaaacacaactgtgttataaattgttttcaaatatagtttttaaaataaatttataacataggtgtagctttttttgtaaatatgcatgttattgattttgatggtacatgatactgtaatataaagagctactataatttaagaacacctcattgatagatgtttaggttgttatttaggatacattctggtgaaaattctgggtcataatttttaatatgtactcttaaactacttcctgcaaatttttatcagtttactctcagcagtatttaacagtgcccattttcccacrtcttcaataactcagagtattttttaaaatctttgttattctgttatacaaaacat

SEQ ID NO: 438441 - DNA, 547 bp, Homo sapiens
aactttcgctgtctatggttgactatggctactatgcagaaagaagcattggcttagtttagctcttacttgttccttccctccaaagaggtcatatcagtckctgtggtaaatgtaaacatgggaattcaagtgcttctgaagattacctgttctctgtagggcgatagtcctcagagatgttccagggcctcaaaaacaaatatattattattctccagttgttactgtcactagtgtggattagaggtgctatcatgggactgatgaatctgctataaaaggactttggatcacccttcatggccactcagaaggttgtcagaacttcctacattttaaatatctgtgctaggagacatcctgggacatctgacttttgctcatcttcttacttaatttaaaaccttcctctagacaattcaattttagtgtcccatcaaatatagctgagtgaaatcctttctgaccactttgtttcctcaataattgagatacctatgtctaccacatagtcaagaacttgacatcttctgacatattgctc

SEQ ID NO: 438442 - DNA, 543 bp, Homo sapiens
attaccctatgcactcagtcttgctgcatcttctccaaggcagagatgatgtattttttcattttttatcccctttagaattggtatagtgcttgaggaaggtatactttgaattgaactgaaggaacaccatcctatctggaatagagagttgtccatgacttctcttgccctgggcctctaggggcaaagctgttctcagaatgccttcccaaggtacttgttgaaaaatatttgacttgttatttgaaagcatctacttcttttctgtgtacacttatgaaacttcttttaatttagaagttttagttttaatacagttaaaccatactttaagaaagttggatttcatttctgtrtaaagagtaaaactggaacactaaacaaatatgtgaataaattagtatatgaaccaagtggtgtttgaggaaataactatgaacaaaaggtagtgaagcattgcattactgcatttagttatgagaaaaacccctttagggttgtatttgcctgaatgcagttgacttcttttgagatatgtta

SEQ ID NO: 438443 - DNA, 542 bp, Homo sapiens
acatgtaaaaaaacgctttgcaaagaaagttatagtgtgaaattgtgtactttatagaatcatcactatgataattggcacctcaaggtatcaagtgtcaaacattgggctcaagatttgaaggaaagaagagaaagagcgctctagagagaggttgttttgagtatgaagggagaaaattgtcagtatttgtcctatttttgagggctcagtttcttgccctttccagtttaggtggcattggcactctacagcctcctgcttccagcctcagagccacytgtacgatgtctcatagtggcaccaaaagccctcatcttgaatctttgcttgttcctgacccattgcttccttttggccactctcactcatgtgctctttgctctccctgcctcccattggcagtccatctccatggctgactgactcgggcttttcctgggagcaggctctctgaacccaggcccctccaaattactcccagtttgccttcatgcttgccatctgcctttcctgtattctctgccaatctcattgactac

SEQ ID NO: 438444 - DNA, 620 bp, Homo sapiens
attggacttgcttattttgtgacccagtctgtattagtctcatctgactgccttaacaaagcaccacaaactggctggtttatacaatagaaatttattgtttcacagttctggattctagaagtccaaagtccaggtgtcagcagggttgcttccttctaggccgtgagggagaatctgtcgcaggcctttcttctaccttctggcagcctcaggcattccttgacttatagatggcattctccctgtgtctttacactgtcttccctacatgtgtgtctgtgtctatgtccaggtttcctttttgtaaggacaccagtcatattggattagggttcaccctaatgaccttatcttaactcgatcatctgcaaggactctatttctaaaaatgtcacattcatatgtatgagagatttggattgcagcatctttttggggtacacaattcagccaatagcactataggggtacaggcatacctcawtttatttcacttggttttattgagctttgcagatactatgtttttttacaaattgaaggtttgtggcaaccctgcatccagcaagtctatcagcatcatttttccaacagcacatgcttacactgtgttcctg

SEQ ID NO: 438445 - DNA, 653 bp, Homo sapiens
tcttgccttcagtttagtccaggctaaacaacctcataaatgagataagagttttcctttaaaattagtagcagatggggtttttataaaatatagccctttgtgtgagccggtactgctgtctgtgttggcatcgcaggttgaactgccaatttacatgccgcctctatcagtatatcaagatatctttccagctaattcaataccgtttaaatcatacttagccaggctattctttctttccagctgcatctctttgcacttattaaatttaacattctcttctctggctttaatctctaaatgctatcctgaaatagatctgccctaatcgcgtcttcttccttctttatgcatccttarctcaacattattacaagttatcttttgagtgttcagatttgggtgttgataaattattaggatactggtctcaaggtagcacttaaatgatctgttctttagagttgcttatttgggaaaccctttatttcctcttggggtagtgctttctagccatgtctactgttacttccaggaaaggattacctttttaatagcaaaagggagcctcctgctgagaagagtgaaagtccagggtcagatctcctcctaggagtgaggtaggcatctttaggagccctgcaaattca

SEQ ID NO: 438446 - DNA, 647 bp, Homo sapiens
gaattaaagtaattgaggcaatatcgggcctaatggaccttgttctcttaatgcctttcttctgcttttgtattgagtyggccccaaagtcgataggactatgtgcacagaaagagaaggacatgatggaagaattagtattgctgtctataaaaaaaaatcaatctgttgttcttgcagaagaacatcaatcagtctgtgaaattaattaactggatttttttacatttggcttctaagataatgagacaaatgatgagaaaagactgcatgccttgcatatagtagatactcggtaaatgtttcttgaattgaaaaccaaatgatatcacagatttagtttaaaaactacttcactgtaagtccttttatcagtcctaattcagtcccgtttcttttactgggctgcctgtatctatagtactgtaaatgtagatccctcatttttattgattcttgctctgaagtgagttctctcacatttttactgccaaggaatccaggccagcttcacatgactttggatctctgtattatttagtgtcttaactgttttctgtgaccagacttcctgccctatacagtattggcagattacattttttgaaatatcattttaacaacattactctttattcagaaaacat

SEQ ID NO: 438447 - DNA, 587 bp, Homo sapiens
tgtaacttgattgaaatctcaaggtgagctatgacaggacttatgttccaaacctttcattcatggtcctgttttcccyagtgcactatggaacatagaatatgcgcttgcctgcctaccgtctcttcttccctccctcccttttccttagtgtattctcaaagctgcaccttctttgctagtgattgattgctgtgtcccagaatttcttcagtggctgatttcctcctctccttagcactgttccttcctgacttgtcttcctggatctctgccacccgtgccgttggttatgctgttgccatgtctactttccacaggatttctgtgaaacaaggtggaatgttctggacatctattttgtaatgtgattatttcctctagatttgttgaataattgaaagtgtcaaatataggataatttttgctaagagaatatttgtaagaagagcttcctgacaaaagttcgtgggccacagagttttccagggaggccagggagactattgggatgagaaaatcaagaccctgtaaggtttaatgataatgctcaaagacaaacagcaagttacactggaacctgggca

SEQ ID NO: 438448 - DNA, 602 bp, Homo sapiens
atcttttttttttttagtttgagaagttgcagtatatctgtacacacaccctctattctacattgaggctcacaaggtaatccttttacttcatgtgtatatgtttctttgtagtaaagggcaggagcttcagcttttgaagtaaaaccaacaaaaacccttctggggactgtgtattaatggcaataagctttaattgaggggagagtgttttaattgtatttctrtcttaaatgatagggattcctagttactgctgtcttattcttggaatactcttttcacaccagtgttgaaagtagggtttaaggactaccatacaaacaagcccagaaaataaagatgtggtgtaatcaagtgtgagggactaaacagcgaaagtggatactcatctggcaaaattgctgttgctcaaccttagttcttacacatgcaatggcttatttccgcccctgaaaagaagctgcctataaagggtgtccacttaatgcttatttgaatgatagcagtccaccacattctcccaaaatactgactaaaacatacaaaaataagcatacatggtgagaatggtgggattagggaatagtcccaataaaata

SEQ ID NO: 438449 - DNA, 602 bp, Homo sapiens
atcttttttttttttagtttgagaagttgcagtatatctgtacacacaccctctattctacattgaggctcacaaggtaatccttttacttcatgtgtatatgtttctttgtagtaaagggcaggagcttcagcttttgaagtaaaaccaacaaaaacccttctggggactgtgtattaatggcaataagctttaattgaggggagagtgttttaattgtatttctatcttaaatgatagggattcctagttaytgctgtcttattcttggaatactcttttcacaccagtgttgaaagtagggtttaaggactaccatacaaacaagcccagaaaataaagatgtggtgtaatcaagtgtgagggactaaacagcgaaagtggatactcatctggcaaaattgctgttgctcaaccttagttcttacacatgcaatggcttatttccgcccctgaaaagaagctgcctataaagggtgtccacttaatgcttatttgaatgatagcagtccaccacattctcccaaaatactgactaaaacatacaaaaataagcatacatggtgagaatggtgggattagggaatagtcccaataaaata

SEQ ID NO: 438450 - DNA, 578 bp, Homo sapiens
catcaccagcactttgcttgtaggctaatctagtagtgacttttgatttcctgctccccctgttgatccatccatccacagctttaagaccagcctgactacaatcattcttcatgtcaccaaaatctccatccgcaggcaagaaggagatacccagctgtcccagtttgttaccccatcgcaagcacaaactgggatcactttctccaccccaactgtggtaggctgaataaaggcctcccaaagatgtraacgtcctaatccccataatctttgaatatgctatctcataaggcaaaaaggattatgcagatgtgattaggttacagatcttgagatggggagattatcctggatgatcctatggactctatgtaatcacaagggtcctataaagagggaggcagaaaaatcagtgttacagtggcttaatgtgagaaagacttgactggcaattgcaagttttgaagatggaagggggccatgaagcaaagaatgtgaacagcctttaggagctagaagaggaaagaaaaggttctgccctagaagattgggaggcagggcagccctgctgacac

SEQ ID NO: 438451 - DNA, 560 bp, Homo sapiens
ttttgttcttggaggtgaaattctgctcagatcctcaataaacaaatgatgaaaacagggctgctctggtgatgccaatgtggcagatgtggggcacttcgcatcctaacccttcattctatggccccagcaaaagttgcatggaacaaaattttaaaaccaatggaagmgatttagatatgattgttttcaattatcaagtcttggtgtctcttaaccatatgcacttgccagaggtggggtgagggagaagtggtattttaatggcaaagagcactggtacagatttggacttctaatccttggtaggctaaatattcaggaaagctctcctttcataaaacatttgcatgatggataaacagctaacttacagataaacacattgctgagctctccagaaaacaagggaagctaacaaaagatgaaacctacaaactaaaacaagaatgctaagcaaaccctgaagttgggccttccatgcaggaaaaaaatgaccaaaccaggaacccagagctttggacattaatggaaaaaaaaaaaaaaaaaaaaaaagcaaa

SEQ ID NO: 438452 - DNA, 560 bp, Homo sapiens
ttttgttcttggaggtgaaattctgctcagatcctcaataaacaaatgatgaaaacagggctgctctggtgatgccaatgtggcagatgtggggcacttcgcatcctaacccttcattctatggccccagcaaaagttgcatggaacaaaattttaaaaccaatggaagcgatttagatatgattgttttcaattatcaagtcttggtgtctcttaaccatatgcacttgccagaggtggggtgagggagaagtggtattttaatggcaaagagcactggtacagatttggacttctaatccttggtaggctaaatattcaggaaagctctcctttcataaaacatttgcatgatggataaacagctaacttacagataaacacattgctgagctctccagaaaacaagggaagctaacaaaagatgaaacctacaaactaaaacaagaatgctaagcaaaccctgaagttgggccttccatgcaggaaaaaaatgaccaaaccaggwacccagagctttggacattaatggaaaaaaaaaaaaaaaaaaaaaaagcaaa

SEQ ID NO: 438453 - DNA, 455 bp, Homo sapiens
atgctgcagccatcagaagctggaaatgacaaggcatcagaagcttggaaatgacaagccatcagaagctggaaatgactcttccctggagccccagaaggaaccacccctcccgacatttggcctgtaactccctaagactcatttaggacttgtggcctccagagctttaagacaatcaatttctgttgttttcatcagcaacaggaattgtatgttcttccctcaactggcctggacagagargcccaatcattaaagaaaagacccctctcgccatgtcaatattgatccaaaggggcaccatctttcacattttcctcaagaacccaaagtaatgcatatatttacctattttgaacagggccctgaataatcttaatcttacaagctttctttcatccctcctattccccaaccccaagtactcaactgtctagaatccccacccccca

SEQ ID NO: 438454 - DNA, 551 bp, Homo sapiens
ctcgtctctcaccttatatacaaaaatcagctcaagatggattaaggacttaaacctaagacctgaaactataaaaattctagaacataacactagaaaaacccttctagacattggcttaggcaaggatttcatgaccaagaacccaaaagcaaatgcaattaaaaaaaaaggtaaatagctgggacctaattaaactaaagagcttttggacrgcaaaaggaacagtcagcagagtaaacagacaacccacagagtgggagaaaatcttcacaatctatacatctgacaaaggactaatatccagaatctacaatgaactcaaacaaattagtatgaaaaaaaaaacaattccatcaaaaagtgggctaaggacatgaatagacaattctcaaaagaagatatacaaatggccaacaacataagaaaaaatgatcaacatcactaatgatcatggaaatgcaaatcaaaaccacaatgccataccacctcactcctgcaagaatggccgtaatcaaaaaacagtagatttggatgcagtgaacagggaa

SEQ ID NO: 438455 - DNA, 571 bp, Homo sapiens
aacacaatgctttgcctggaagacttttgataaacatgattgaatcagcaaatatttttaaataaatgaatatgaatggtttttgcacccatccatggtttgggttatctgtcacatttgattattctcaccatttctcccttccattkgttaggtcattggaaaggtagagtaatctgaatttccctaagagcacgcaaaacgagaatgagaatgtcagaaaggaaaatgcattctccacttcacaaaatctgtgcatcttgtaggggcttgttcacatgcaaggatagataaccctgcaggacaatcaaccttaatattcaggaggatccgtacttcttagtggaaagggtggaaaggaataacttttattaaatgcctctaatgtgtctttgctttcacatacatgatcttacttgtatgcaatccaatcttgggaagcatataatatttccattttaaacattaaaaaagaacaacctgagactcagaaaagttaagtaagtggaggaaccattctataaatagcccaggaaagagcaaagctggcaatattcagtgtttgtgaaaa

SEQ ID NO: 438456 - DNA, 600 bp, Homo sapiens
ccaataacacaaaccagaaaactaactaaatgttcatcttttaacatttttattttcttttctctatttttacaagcccacaagtaacatcatgtatgtttctaaaatttttatgtcaaaaactcacactttcaaattcttatgacaaaatgtgattttatattctcaatatctgatttaaacagagagctctatgtgcaaccacttttttttttttttgcatttcctactcttcttttgtaacagatgattcacaattataattgctcaacaaggattcaagttctacaatgccctaaatgctggatatgaaaggcaattccaagggttgtgaaagagacaggtaatctggcaggcatctcaccaggcccggggctgcttgtgggatgaggttttggtgcagaaaccccagcatcctatggtgctccttgatcatagaactataactattatttccctgagctytaaaagaatctgttttctcaaagtctggggatatggctgattagacctcacattccttcccttgcagtaatgatctctcaatgatgtggccactttctcctaaattttcattaatttcctatatgatcagaagta

SEQ ID NO: 438457 - DNA, 595 bp, Homo sapiens
acctgtgaatttgaccttatttgaaactaggtctttgcagatgatcaatttaagatgaggtaattgatcttagagagtgggccctaatctagtacaactgtgctcttattaagaggggaaatttggacacaaacatgcacagccaggagaacagtgtgttaagatgaaggcagagattagcatgatccatccacaagccaaggaatgccaaagattgccagcaaaccaccagaagctaaaagctgggaaaagaggcatgggtcaaactctccctcacagtctcagaagtaaccaacctaccaatgtcttgttttcrgatttccagcctccagagtggtgagacaagaaacttctattgtttaagccacttggtccataatacttagttacagcagcccaggaaactaatgtgtggtacttcagacatactggttatagtttgtgtcactttttactttagttaaatgtttatgtatccatctccacttgtgattgtgaggcctttgaaatcatatatgatgtcttagtcatcttcatatccccctgcacaagcacactattgatttgaattaattacatcctcgataccccttgc

SEQ ID NO: 438458 - DNA, 589 bp, Homo sapiens
gtttaagccacttggtccataatacttagttacagcagcccaggaaactaatgtgtggtacttcagacatactggttatagtttgtgtcactttttactttagttaaatgtttatgtatccatctccacttgtgattgtgaggcctttgaaatcatatatgatgtcttagtcatcttcatatccccctgcacaagcacactattgatttgaattaattacatcctcgataccccttgctatcccgcaagcccacatcaagtctatttccctggaacagggtgtatgtactcctctattattttggttcactgaaacttagtgatagttgtatcrtttctgcttccttgtattaacatttcaagcaccttttgctttttctctcttttgcacttaaatgtttacaagttcagccataagttactgtttttgaccagtgttcctgttgttttcttatgagaatgattaagctctttttgtacttctgcttgcaattgttgatgtttggtggcgggggcgggggggcttggtcatatatataattccttatataattgtgatttacggcttattttgcttaatattttcttc

SEQ ID NO: 438459 - DNA, 589 bp, Homo sapiens
gtttaagccacttggtccataatacttagttacagcagcccaggaaactaatgtgtggtacttcagacatactggttatagtttgtgtcactttttactttagttaaatgtttatgtatccatctccacttgtgattgtgaggcctttgaaatcatatatgatgtcttagtcatcttcatatccccctgcacaagcacactattgatttgaattaattacatcctcgataccccttgctatcccgcaagcccacatcaagtctatttccctggaacagggtgtatgtactcctctattattttggttcactgaaacttagtgatagttgtatcgtttctgcttccttgtattaacatttcaagcaccttttgctttttctctcttttgcacttaaatgtttacaagttcagccataagttactgtttttgaccagtgttcctgttgttttcttatgagaatgattaagctctttttgtacttctgcttgyaattgttgatgtttggtggcgggggcgggggggcttggtcatatatataattccttatataattgtgatttacggcttattttgcttaatattttcttc

SEQ ID NO: 438460 - DNA, 642 bp, Homo sapiens
tgtttctgtgtaggcacacatagaaaaagttctgcaagcaccaaacacatagtcactagcaatacacttttgctttattcttccttagaagaaactgtcagtgagcattcaaatacttttgttaacatttctttttaatcttctaagaaaatagtactcttggtatttaaaatacaaggcccatttaggtactttgaaatgatgggaatagtatgtttcctcttgggccaactctaccagggattcaggaacacatgttcgtctttcaacccctcatccttgggtccatctgtctactctcagatttggttagcacctgaggtttgacagagatcagttgggatcaacattggtgatgaatcctcaccctgccactatcttgggcaaatttgcttcttagctgcagccaacatttgggacccctttgagagtsaagttttggtcagattgtcctctagcatccccaaaatcacgaagttcagctagtggggaaaggttgtgggtaaagagtaggctgcgagaggattctagaacttcctctcctgcccccaggctttcaaagcagagatatataagagtagagatggccaaatgagtccaaggtaaatctgatttgcttttctcaggagattcaatgagatg

SEQ ID NO: 438461 - DNA, 579 bp, Homo sapiens
ccttgctttgcagctggtacaacataattggtgttagacaggctgacagcagccaggcagtcatgcatcaagggagtttggaaagtaaaagaaaagcatgtaaggttaagcagggaaagagagttctgcacttttgtcttttggtctgagaaggcatcttcttagcatctgtgtagaggagtcagtaattttctattcaaaagacacagaatccattatctaaggtttcacagcagtttttaatttagtaacctcctcttccttctctccttcccctcttcctaagccatgttatattttctttgcacaaattttcatgagctctgccttcatcaagggaactgtaatgagaaccctcraaaaaaggattatcaacttggaggctgagtatgaaaagaatacatttttaagtaacttttgcttgacatctcaatttgtaattcagtttttttaaaaataaataaataaacctagaaggattgaagcactttgtttggtagaaatgagccatgcaaaaattatagtgaatcagagtattttatcatcagtagagtgccttgatcaacctaagatgaaggt

SEQ ID NO: 438462 - DNA, 618 bp, Homo sapiens
tagtctaggcttatgctgcagtaacaaacaacctcagaatttcaggggcttaacacacagagcttacttttcactcatgcaaagtttgctgcagtctccaagttgcttgtcctctatggggtgactcagtgatccaggctgctttgttcctgtggctggaatgtgtcaatgttctaccctcacagcttccactgtctctgaggaaggggaggtatggcccatagacaactcacacctgctctcatgtcacttctgctcacagctgcattgggcagaaccagtcatggggccctgcctgctgcaagatgcrtggaaactgtgctcttcctgtgagcctaggaagagaactggagattggtgatcacgaataacgtttatcacaatgataacaaaaggaggaatgtggtcaaataagtttgaaaaacactgggttgaccaaagttctacaagtctcctcatgttataaattctcagtggctttgctgtgctcacattgttatgaatgaccaaaatacagatactataggccatctgtctttcctgtactgtataaatctttctcacacaggaattacaactttgcagagcacacttgggagatgctcttctctctctcta

SEQ ID NO: 438463 - DNA, 547 bp, Homo sapiens
ccattgctgtggccactagccagctgtaatgtaagagggaatatataaatgtgcaacggctagactaaaataaaaatagagttttgccccataatatgcagcaactagcccaggaaaccaactaatcatctatagtaaccagcccaggaggccagcctactrcctataagtcagatttgtaggaagtcagactgatatctctagcaacaatccagaaagccaaacaataacctctgtaacaatcagccccaaacagccaggacttgattcataactgatagcttctgtaacttttgtttccagttccaacttaagaccaaccagaaaaagccaaaaatgtacccctaaccaataacataggatgctgtgttctagttagcctgcctacagcttccacacgccaacagcctctgcatagggcacacctaaagccttcccttttttctactctaaagctctcccactcctctgcctgcatttgagtctctgccaaaacacagatgattctgcctgactccctgctgcagcaagctctaagtaaataggc

SEQ ID NO: 438464 - DNA, 629 bp, Homo sapiens
tgctcagatgttgctacagtttctcctgtggttcttctggggtctaagtgtcagcactatgactcttcctgttacatttggggtcttgtggttgctctgaccagccaggtcatgcttggcattccttctcaggaagccatcccagccagagctccaggggaaaagacagaccctagatcctggcccccagttatcttgtgtcctggctcaaaagactgagttctaatttcttgtttaagctgtggaagacctgtaactgccaaggttctccttgccctcttcccagatagtgccaacttatcaagayaggagaaagagtttaattcatgcagaaccagcaaatggaagattagttttattacttaaattagtctctccaaaaatttggagagctagggtttttccaggatagtttcataggcaggggaatgggtgctgctgatttgttggggatgccattatagggaggtggaatatgctcctcatgcgctgagtccacttctgggtgggggccacaggaccagttgagtcaagagtcatgggtttacgtggggccatctgtttggcagaaatgcaaaaacctgaaaagacatctcaaaaggttaatcttgggttctacaatagtgata

SEQ ID NO: 438465 - DNA, 497 bp, Homo sapiens
aattccaaaggggggagggtataatgaggcatgtctgaccacccattcccaacacggcctcagctagtgtttcaggtttactttagaaygcccttggccaagagaaggagtccattcagttggctggggggcttagaattttatttttggtttacatttggagggaaaggatcaataaccaatgaatactcagaaccaaattcatgacagtcacaatccaaagaaggaattcttatgtgtttttctcctgttactataagtttggaaaggaaaatacaaacttttaccccttcatttgattgatccctgcagacagaagccccaaaccccttttcctttagcaagagggttaagaaagccaaggttctgaatgccccttgagttactgatccctgagtactccaatgtgttacatgcaccatgcacacattaataaacttctgtttgcttttctcctgttaatctgtctttgggcagtctaatttacagggccccag

SEQ ID NO: 438466 - DNA, 535 bp, Homo sapiens
cagtttttgcttcgtaagccatttctgagcaccccacttgctggcaagggggttaacagttgctaggtgaggagaaggagccatttttcccagtgttctcactatgctgtgtacatagtctctcatgtgaagggcagcaaacatggtggtcggtcatcatacattgtgaatctagctctttccaagtctctgggtagatcagcatattgttagttactagaaatctgatagccctcctaagtgtttattaattatttgtaaacgttattaaggcttccctcaatgagtaaaaggctctttataacatgtttaaatttaattcaaaccaatctttatagaaatgtttgatgtaattcaaatccattaatacaatgacatgccatttacaaataagatactcatatcagctgaagtctacctcattctcatcwtacctcttcccgtcttcttctccttttagtgtcctctttaaatattattcaaaaagtatgacttattgggttgactaaaaatgttgcatctccccaccttgttt

SEQ ID NO: 438467 - DNA, 614 bp, Homo sapiens
tcagttaaaatgtctgactagatcgtcttcacacgaggtattgctctgcttttgcagagctgtctgctgtaacagatgcagggtatacttttgactgcatgtggttctcattaaatcttcacatgagattgaggcctgccacataaattggtggagcttctcttaaggattatgaatcacttaaggattatgtcctttttatcgctgcagtctaaaggcaggttcattgcaaatatgagccagacaagagaccctacaggacactcccatcaatagccttaaggctatttctccaacctgtaagaaaatgtagtacttaggccrtgtcagagggtgagaaatgacatccctgaatccccaacacacacgtttacagcaccaaaatacttagatatactagtgacactaaaaaaatcactctcagatagaaaaatcttttgagggttgataaagtgttacagtctccacaaataaggattaaggggcaccccaggttgtaagaacaggatgttgtgataggaaaaagagaaatcaatagttaatatctcatatggaaaacaaaatgagtttctggatggcagctcgcattttttggcacatgattctttctagtt

SEQ ID NO: 438468 - DNA, 614 bp, Homo sapiens
tcagttaaaatgtctgactagatcgtcttcacacgaggtattgctctgcttttgcagagctgtctgctgtaacagatgcagggtatacttttgactgcatgtggttctcattaaatcttcacatgagattgaggcctgccacataaattggtggagcttctcttaaggattatgaatcacttaaggattatgtcctttttatcgctgcagtctaaaggcaggttcattgcaaatatgagccagacaagagaccctacaggacactcccatcaatagccttaaggctatttctccaacctgtaagaaaatgtagtacttaggccgtgtcagagggtgagaaatgacatccctgaatccccaacacacacgtttacagcaccaaaatacttagatatactagtgacactaaaaaaatcactctcagatagaaaaatcttttgagggttgataaagtgttacagtctccacaaataaggattaaggggcaccccaggttgtaagaacaggatgttgtgataggaaaaagaraaatcaatagttaatatctcatatggaaaacaaaatgagtttctggatggcagctcgcattttttggcacatgattctttctagtt

SEQ ID NO: 438469 - DNA, 608 bp, Homo sapiens
gccatgtgtgatattcagttgtattatgtgctgggtattctctgatgtcctcctctcctgtcctactgggctttgggaggctgacttctatcaaccacttcaccagccttgccaactggcttgggttggctaattgaaggcactgatagaagactgagccatggtttggggctggactcctctgcctgggatcacacagcctgtgggtgagcactctcctttggctacagctctcataaggtccaacagcagtggtcccctttgcccttcaggtctaggggaaggaatagatttctgctcctgctagcacctgagcacttcagcatttcatactggttcccttaaccttmtctctgaaaataatccttcttaaatggtctccagttaaatcagggtttgaatcagggttaattgggttaattcaccctgccaggacctgactgatacatactgacttttctacgaataaatccaccctgtgtagccctaattggctgcaggcattgaagacctttacaagctcagctcctgagacaagtataatcaggtgtgacagaataagagctccattagggacaagggttgggacttagttccgcaagtctaag

SEQ ID NO: 438470 - DNA, 608 bp, Homo sapiens
gccatgtgtgatattcagttgtattatgtgctgggtattctctgatgtcctcctctcctgtcctactgggctttgggaggctgacttctatcaaccacttcaccagccttgccaactggcttgggttggctaattgaaggcactgatagaagactgagccatggtttggggctggactcctctgcctgggatcacacagcctgtgggtgagcactctcctttggctacagctctcataaggtccaacagcagtggtcccctttgcccttcaggtctaggggaaggaatagatttctgctcctgctagcacctgagcacttcagcatttcatactggttcccttaaccttatctctgaaaataatccttcttaaatggtctccagttaaatcagggtttgaatcagggttaattgggttaattcaccctgccaggacctgactgatacatactgacttttctackaataaatccaccctgtgtagccctaattggctgcaggcattgaagacctttacaagctcagctcctgagacaagtataatcaggtgtgacagaataagagctccattagggacaagggttgggacttagttccgcaagtctaag

SEQ ID NO: 438471 - DNA, 449 bp, Homo sapiens
gtggctaacagaggggtctggggaagcagaagggatagaatgcacagtacagagctggaaaggaggagagccccttaatcctcttacattttggtgtaggaggcagaggagcttgaaggcagcaagggaggaatctgagaatacactcacccaatggctttaacctaaccaacgtcaggttttgaaaggmgtgaagggatctgagacagaagattgggtttcagaggagaattagttcatcacctgaatcacaagaaaaggaagattctggcaatgtcaaatctgcatttaaagcttctgaaattaaaatcaactcaatatagaaaaatgtcaatattagtgttaaaatagatgagcacaattatcaaggtaaagttcatcagatttaaatatgtgcctatttatgtcatgcatatgcattttctatgcacctttttaaaataggaact

SEQ ID NO: 438472 - DNA, 534 bp, Homo sapiens
aatttcatattctgaaaatgaggagattagcttacatatgcttgcttaaatctcttatggctctaaaatgtcatgggtttagattaatatatacacatacrtatatatattatatatacacatatatattaaatatatatacacatatatatcaaatatatacacataaatatatacacatatatacatatatattttttattttttatatatacacacacacacacacgtcaacttatgctaggtgttgaataactacagatactgaggactacagagattcagagtaaagagaagtcaccacagcctggccagattcccaggaagaacacaggctgggttgaatgattgcagctggatggggaagacacaggacctaaacttgcctagtgagatgggctggtgcagagtctaggtgcagattctgggtgaccaagaacaaggccagctgagcagcaagagtgacttgatgctgacccagaagcccttaaacccaacttggtcaggctgtgcccaggtgctgagcccaggatc

SEQ ID NO: 438473 - DNA, 534 bp, Homo sapiens
aatttcatattctgaaaatgaggagattagcttacatatgcttgcttaaatctcttatggctctaaaatgtcatgggtttagattaatatatacacatacatatatatattatatatacacatatatattaaatatatatacacatatatatcaaatatatacacataaatatatacacatatatacatatatattttttattttttatatatacacacacacacacacrtcaacttatgctaggtgttgaataactacagatactgaggactacagagattcagagtaaagagaagtcaccacagcctggccagattcccaggaagaacacaggctgggttgaatgattgcagctggatggggaagacacaggacctaaacttgcctagtgagatgggctggtgcagagtctaggtgcagattctgggtgaccaagaacaaggccagctgagcagcaagagtgacttgatgctgacccagaagcccttaaacccaacttggtcaggctgtgcccaggtgctgagcccaggatc

SEQ ID NO: 438474 - DNA, 587 bp, Homo sapiens
gccttcaatggactcatcagtcactggacatggccagtgaaagaatcagttagctttcagatatatcaatataatgaaaacacaggaaaatatccaaggactatgaagcgatataaaaaggtgtaacttacacataactggaatcctaaaagaaggagagagaaagaagcagaagaaatatttgaagtaacacataatattggtataaatatttttgtgcctatctcttcacatacaggcacatgcatatctaccttttggaattgcatgacttcaattttgaaagataatgctaaactttgtcccaaagttgtatcaatttacagttccaccagccatatgggagttcctttccctccatgtcctcaccaacacttsgtattctcattctccttgattttacccttcctggtggttgggtaatattactcattttgaacattctctttggtgaagtaactgttcaagtcttttgctttctatttcgctgtctttattgatttgtagctctttatatatcctacatataaatacattttcagactatttcttattcacccttactttgatgacagttttgtcctttt

SEQ ID NO: 438475 - DNA, 627 bp, Homo sapiens
gcccactcaacaataactgtttattaaggggccagtccccagggcactggacacacagcaatgagcaaaatagacaaagctcttttttactcctgagcttacattctagtgagaggagacagaaaatgagcaaacaaataaataaatrttatctcatattgtgataagtactgtgaagaaaagtaaggtgggctaaagctacacgatggtgagggaagggtgctgggggcaggggtttctaataaggtgacgattgagcgaggcctgtatgaaatgaggggggaagccacacaagggtgcacatgcctttgctcttcaactagaatttatgccccttgagggcagagacatacagtgaatttttttgggctccctttccctcctcttagggccttgcacacaatagaggctttaaaatcttttaattgctttgaaagcaacttcactggtatcctatacaatcattaacatctctttctagctcataaggcataaatacaacgacgaacctcatgagttggcaatacagatgctatcagaccacagtgatttcccacctcttctacttagtttaacctatgtgagaaatttcatggaaccatgttgcaaatccacattgacaattgg

SEQ ID NO: 438476 - DNA, 627 bp, Homo sapiens
gcccactcaacaataactgtttattaaggggccagtccccagggcactggacacacagcaatgagcaaaatagacaaagctcttttttactcctgagcttacattctagtgagaggagacagaaaatgagcaaacaaataaataaatgttatctcatattgtgataagtactgtgaagaaaagtaaggtgggctaaagctacacgatggtgagggaagggtgctgggggcaggggtttctaataaggtgacgattgagcgaggcctgtatgaaatgaggggggaagccacacaagggtgcacatgcctttgctcttcaactagaatttatgccccttgagggcagagacatacagtraatttttttgggctccctttccctcctcttagggccttgcacacaatagaggctttaaaatcttttaattgctttgaaagcaacttcactggtatcctatacaatcattaacatctctttctagctcataaggcataaatacaacgacgaacctcatgagttggcaatacagatgctatcagaccacagtgatttcccacctcttctacttagtttaacctatgtgagaaatttcatggaaccatgttgcaaatccacattgacaattgg

SEQ ID NO: 438477 - DNA, 583 bp, Homo sapiens
aaaataaattttaggtagattgaagatttcaatgagaaacaccaaagttcctagacaagaatgtttgcataattctttgggaccttgaagtagtttcaacaraatgtaaaaagttctgttgataatgaaaaagaatgaggccgggcacggtggctcacacctgtaatcccagcacattgggaagccgaggcaggtagatcacttgaggtcaggagttcgagaccagcctggccaacatggtgaaaccctgtctctactaaaaatacaaaaattagctgggtgtggtggcacatgcctgtagtcccagctacttgggaggctgaggcaggagaatcgcttaaatcaggaggcggaggttgcagcaagcagagatcatgccactgtgctccagcctgggtgacagagtgagactctgtctcaaaaaaaaaaaaaaaaaaaaaaaaaaaattaagagactcataagctagattatagtgaaatcaagactctctattgaaatacctatattgacaaaaaagaacaagaagcaagttacagaattggagacagtatctgcaacacttataaccagcaaaagactcat

SEQ ID NO: 438478 - DNA, 580 bp, Homo sapiens
caaacaataccgctatatgtatatctgtttgcttgcataagcactgagaaagtcatagaagttttaacatccaatatgcatattagtttggaacaacttggaatagaggaatgaggaaaaattatcttttaagtacatctctttgcattgttttaccaaytacaatgagcacatatttcttaattattgtactaaagtactttttatagaatgcttgattgaaaatatacttctcatctatggctgttccacccttaacacacctgatctcatctgaaaatgggtatttgaccctattaacttgacatacattctaatataaaccctttctctaacttctgtatcaatcttctttcctggatttccttttgtcctctttctattccttctctgtctctcttgttagcaccatgtcctcattcattcttggggggagaaaaaaatctctgcaaattccttctcatagttatttccttcccttgcattcatgggaaagaattcacttattcacctgctcatggtactgaatccccatacaaattcagacaaatgtaggagacagagatggaaatcaaaaaat

SEQ ID NO: 438479 - DNA, 602 bp, Homo sapiens
tttcatctatgcttataggtaactggtttgaaaaagtccttattttatactgaaaaggagaaaatctaacacgatctgtgttcgctttgttgtatactggctcttgtatttctgagatcacccttaagttaaaacagggctgaggctggtctcttgtttttacaacctccctggtttgagggaagagcatttgattgactgatcatatttttcatctcatttgtcctttttgccctttccctgactgttttcttgaggcaaccaacatttttttttagtgccttctcaacttgacacttcatgtgtacagatgtgtcaagttgctatctgatcttgccacagtcatgtgcttttcytgtccagttctgatggggaaatttgacacacactgtgatcttgctgtaattttgacaagggaaatctggctgaaaagaccaccgtctccacacaaataacctagaattctaccctcccccactaccatctataaaacaaatagttatgccaacttgagatgtagagccatgaagaaagtgacaccttttgctgtcaactaaagcaatagaaacttgtactctttctgcccaaggatagtgagtctt

SEQ ID NO: 438480 - DNA, 586 bp, Homo sapiens
tgtttcatatgttaacaatggtaagtattgggtgctgtggaagcacttggaatagacacattacctaggcctgggaattgggaacaacttcccagaagtaccatatgacttagaatgaataagtaggagctatccaggaaattggtatccgtgatggaggaagggaatgggtaaaagtattcaaaacagagggaaaaacaggtttacacttctaggagcaagagaaaatgtggcatagtcatcgatcagaccttgtaatcccaaggtgctatgcccagggcctcaaatgtactatgcaaagcagctgagattataagtccagctcagagaccccttcaggtctactataccctctgtgagagactgacttttgtcaggttttgtccacttatatatccccagtgtctagtatacctagcacatagggatgcaataagtatttgtggcttcatacttggattcctgtctctgaatattgactttgaatgaaaacgctactggacagtcttgytattcattattttccatcctagatgcagccttttggctcaggctcagctccataaattgtggcctgaagaaaaga

SEQ ID NO: 438481 - DNA, 575 bp, Homo sapiens
atgtcactgactttttgtgttgacaagatatggtagcaatctaccttattaaaagcacataagctgggatgccggaaatgaagtaaaccttaagttatttggttttccaagggttaaaacggaagcctcagaggatatgtgaaccgaacactgtggcccacgttgcccagtggtgcacttaggagatcgaagggaaatcccatttcctagcacggtcagcaggccagtgtaacaagacacacaggattgaaaaccgcagctttaggattggttagatacctttcccaaagattctcttcatattctagctctcaggcaaccgtggcttcaggctttgacaaatatataaaactgtattcatgtgaaaggtaattcctttgtagtagctattttactgyaccttccacattcgtaggtaggctcactcccctctcatggttgattacataaaatgtataatctgaaactgtagatgaagaagaacccttctcttgacacgctcaggtttccaagtgtcagttttttacatggtcacggtaccaaatttgtctttactgtttaataattcgcgaact

SEQ ID NO: 438482 - DNA, 559 bp, Homo sapiens
actactattctcatatttcatctcgcttgtgttttagacatggtagagcagatttggtaaagtataaaaggaactaaatgttttaaatttttgcatgaaaattttttgagggagtagggcggtatttgtacttttaagactgctttcagatttctgtcaaatgtggcttcaagactatacagagaaatgaacaagactggaaaaatgagaagtgagaccctattaacttagtgataaactaccctctatcaccatgttagggcacattggctgctagcaacagagaccaactctttccaccttaagcatatgaggactttgttggaggcattctggatagtgaacagattccaaagaattgctgaatcactgtgctgctggaaggagagctccagggarctgtcaggaattcactgacaatcatgtcttctttggactctgcccctggaaacactcagccctaatggcatctgtctgtttttcatcctgctatggatagatgcagtctgccaggaaagaaagtccgattggtctagcctgggtcacatgcccttccttc

SEQ ID NO: 438483 - DNA, 585 bp, Homo sapiens
tagctattattattattattattattattattattattattattattgtatttcttgtagagactgggttttgccatgttgcccaagctggtctcgaactcctgggctcaagcgatccacctgccttggcctcccaaagtgctgggattacaggcatgcaccactgtgcctggcctgattcttaagagatcagaattccaatgtttgccaaaaggttagtcatcaagcataatgaaatttgtaattatgagaattaatccacctagactattaaaattttgggtgtcataagtagaaaactaagaatagaagtaatactcctttaatatttatgtattctcaacatatttcaacaaataagtatgtaaaaagccaaaagaaaaagttaagaaaaactttggagaatgcctttttaaaattktatttttatgaactgtaactatttgccagtgctatagctatctctgcaataaagagcatcttacatttaatgtgagtcacgtgaaaggcctatatctattttacaaaaaattaattattaatagccgtttgataaagctttacctcaagctaagaaaacagcat

SEQ ID NO: 438484 - DNA, 459 bp, Homo sapiens
gcattctactttgcagcttctttttctatataaagtttcattttattttgtttcttattaagttgcagctatttatctaccatgccccatcttccttctgtacattgtatattracaattaggctatttgtcattcttgctcaagactgtagaaagccacataattttaaaaggctttaaaaacccttcaagattaaagcctagcagaaaaatcctctctccatatttgcattttacaatccataatttactattgttgcttgccctcccagaacactgttctttatgtactgctgggagcaatatatatagtccaaactcactatcttttcctctttgtctacccaaacgtaacacccaagagaagactctcattttccatactgcagacaatgctgacatgaccagcagtacagcagactaggtgcccaacttacgagcttgaaatgcctaggtgca

SEQ ID NO: 438485 - DNA, 583 bp, Homo sapiens
caggagcgatcctactaacatcagcttagtccccctcaagggcagaggtcccagaagaagkagcaggcacccatctttgctgctcttcagcctccttgaatcatatctgcaggcacaggagtgaatcagatgaataaggcctgaagtgaacccccggcaaactgcagcagccctatggaagagggacctgactattgaaagaaaacaaacaaggacaaagtgacaaaaatagcatcaacaacaaaaacaaaaaggcccccagaaaaaccccatccaaaggtcagcagcctcaaataccaaaactagacaaactcacaaagatgaaaaagaattaatgaaaaaatgctgaaaaccaaaaaggccagagtgcctcctctcccccaaataattgcagcatctttccatcaagggcacagaactggatggaggatcagatggatgaattgactgaagtaggcttcagaagatgggtaataaaaaactatgatgagctaaaggagcatgttctaacccaatgcaaagaagctaagaaccttgataaaaggttagagaaattactaactagaatatccagtttagagag

SEQ ID NO: 438486 - DNA, 583 bp, Homo sapiens
caggagcgatcctactaacatcagcttagtccccctcaagggcagaggtcccagaagaaggagcaggcacccatctttgctgctcttcagcctccttgaatcatatctgcaggcacaggagtgaatcagatgaataaggcctgaagygaacccccggcaaactgcagcagccctatggaagagggacctgactattgaaagaaaacaaacaaggacaaagtgacaaaaatagcatcaacaacaaaaacaaaaaggcccccagaaaaaccccatccaaaggtcagcagcctcaaataccaaaactagacaaactcacaaagatgaaaaagaattaatgaaaaaatgctgaaaaccaaaaaggccagagtgcctcctctcccccaaataattgcagcatctttccatcaagggcacagaactggatggaggatcagatggatgaattgactgaagtaggcttcagaagatgggtaataaaaaactatgatgagctaaaggagcatgttctaacccaatgcaaagaagctaagaaccttgataaaaggttagagaaattactaactagaatatccagtttagagag

SEQ ID NO: 438487 - DNA, 583 bp, Homo sapiens
caggagcgatcctactaacatcagcttagtccccctcaagggcagaggtcccagaagaaggagcaggcacccatctttgctgctcttcagcctccttgaatcatatctgcaggcacaggagtgaatcagatgaataaggcctgaagtgaacccccggcaaactgcagcagccctatggaagagggacctgactattgaaagaaaacaaacaaggacaaagtgacaaaaatagcatcaacaacaaaaacaaaaaggcccccagaaaaaccccatccaaaggtcagcagcctcaaataccaaaactagacaaactcacaaagatgaaaaagaatyaatgaaaaaatgctgaaaaccaaaaaggccagagtgcctcctctcccccaaataattgcagcatctttccatcaagggcacagaactggatggaggatcagatggatgaattgactgaagtaggcttcagaagatgggtaataaaaaactatgatgagctaaaggagcatgttctaacccaatgcaaagaagctaagaaccttgataaaaggttagagaaattactaactagaatatccagtttagagag

SEQ ID NO: 438488 - DNA, 567 bp, Homo sapiens
gggtgtgatttatagactatttatagtctgaagagacctgttaataaaaaatattcccttaatgctctctgagattcttatcttagggtccaaagactgaccaatgaaaacttcatttgagtagcatactctattcaaagacaggctacagtaatagactaatcccattttcttccctacagaaatgaagtaaaggcatttggaaggaggagtgaagcagtaagtcaatgtgcagggagccttctgggctggggaggaacagtgagggtggatggccaatgggagcagcctaccttcccgccagggtcatggcagagggagaaggggacagatgcaaacagaagaggcctggagaatgggttttagagtcaggcaaacctcactttgaaacccccttatcacttctcaggctagttccttcacctctcgaagtttcacttttctcctctattatcgcctggggtggtttaaaacatttaataacatsctgagagtaacatacagtatgttacccccagacatgagggtacagacattagcacacaatgaagggacaaaagagcccaa

SEQ ID NO: 438489 - DNA, 640 bp, Homo sapiens
tattttgtcttcataaatacctatttgatatatgagaaaactgagtcttagaaaggttaagtaacttactcaataccacacagtaaatggtagagttaggatttaaccccaaatccaactccagaatcccagcccttaagaagtctgctattctgcccttcagaatgattttcttgagaaggttcaaaagaagctcaggcgaaagcagcaaatgttattttttatcaaggcaataaacagtgattttcttgcagctgtggtagccattatagcaaacaggtgtcttttactcagcgccccagagagaacctaccaactcaaattgcaactcccaattgcaactgaactatctgggaagaacaacaagttcctaacacaccggaaataaagactggggaagagtacagaatgagaggrgagggaactgccattaacctcacttattttaaatagcacttagatgaacaaaaacaatcaggaaattaaaataaacccaattctaatctgtatgtgtgctttgtgcatttgcatgcttatgtgtatgtatgtactcacaaagaatgcgagggaaatactggaaaaccaaacaactaaattcaacaaaaagcagtggccttacctgttaacttctgagctattt

SEQ ID NO: 438490 - DNA, 588 bp, Homo sapiens
agaactaagaagttacacagtataatataccatgaaagtaaatgtatttaataagagaagaaatggaaaataccaaataaagcaacgtaataatttcaataatgcactgactcttaaaatgttgtaagtctacatgaagacttgagggcagctggttccagaatatccaaacctgaaacaaaattatttattgacatgacagaattatctgagatcatatgaacattgtttatcatatattttataagtgagacaaaggtctttaacagaaaaatgaatttttagactcagtaagtcaaacaagttgttgaagaaaataaaaaaggcataggtctaggataaccaacaatattaccagaaatcatttataataactctcatttcctgatttttctagaaatagtagttttacactagaaaacttgtaaggatttacctcaaacaattgtgtaaaaatccrcatttctccagatagtagtgatttcaaaccaagcaaaacttattcccgtttaactttttttttaccaggctcagaaaaggagatgctatgatccatcttgaaaacgcccatgagtcaattctaaacaa

SEQ ID NO: 438491 - DNA, 633 bp, Homo sapiens
ctgtgtatctactacgtgcctgggaataggctgtcactgaatatagtataaaagcatttttgctcagcttgccacataaaaactcaccaaaaaaatctaaaactgtacagatagaacgtctcctacttcagtgaaatacagaaactgtcacaaccacaagccgcacactataaggccaacctaggaggtactgtgcgaggattgatttaagaagcctacctaggggccagctcctcagaccctaggcagaatgaagacatctcctacaataagggagccagtaatctttgaactgaaaccttgaattcttgtcgtgaggacgatcatgggagaggcagaaaatgttcttgaacagtcacaatgcaacatcacaaaaccaargagagcagagtgagctataggagaaagcaggacatcttatcttttcttgggatgatccagcctcttatctaagggaaaaagccaggggaagaactgagtggagggaggaaatgaaacagcggtgagcagagaacaacaagcctgtgatcccaatggctttgctgttagctatgctatcttctggttcctgaaaagcaaagggatattgttcccccaggcaaaaggaggatagatttgatgaagggagaaagt

SEQ ID NO: 438492 - DNA, 569 bp, Homo sapiens
tagcaacctccacctagcaacctccatttaacccaaaacaagggcctcccaatcccctgtatgacctatattccaaagaatgggcaaggggttcaattgtccttcatagataagatcaatgtctggattggccactcccagattccttagctcagaattctgaaccaacgctctgcttagaccatagggtcgtcctcatggtatscttcagttacagctgtcaggtgcctctgccatacattttattggacaatttcatacaactaaaaaatagtggcactgaaatttgaattcaggtcacaaattcttaataattaaaagattaaggattcagggtagggtttggagcccatatcctgtctgtcttttggaaagtaagaaacctacaaggtcctaaaaaatggcacaaacacccaaatgaaaacctaaatggagattagcatcaccctccttagaggctggcaagtggagccagaggagaatcttttgcaaacatgtgggagaactaaactgaagtctgaaggtcactggggtttcctctccttctctgaatcaagactttggagtct

SEQ ID NO: 438493 - DNA, 569 bp, Homo sapiens
tagcaacctccacctagcaacctccatttaacccaaaacaagggcctcccaatcccctgtatgacctatattccaaagaatgggcaaggggttcaattgtccttcatagataagatcaatgtctggattggccactcccagattccttagctcagaattctgaaccaacgctctgcttagaccatagggtcgtcctcatggtatccttcagttacagctgtcagrtgcctctgccatacattttattggacaatttcatacaactaaaaaatagtggcactgaaatttgaattcaggtcacaaattcttaataattaaaagattaaggattcagggtagggtttggagcccatatcctgtctgtcttttggaaagtaagaaacctacaaggtcctaaaaaatggcacaaacacccaaatgaaaacctaaatggagattagcatcaccctccttagaggctggcaagtggagccagaggagaatcttttgcaaacatgtgggagaactaaactgaagtctgaaggtcactggggtttcctctccttctctgaatcaagactttggagtct

SEQ ID NO: 438494 - DNA, 569 bp, Homo sapiens
tagcaacctccacctagcaacctccatttaacccaaaacaagggcctcccaatcccctgtatgacctatattccaaagaatgggcaaggggttcaattgtccttcatagataagatcaatgtctggattggccactcccagattccttagctcagaattctgaaccaacgctctgcttagaccatagggtcgtcctcatggtatccttcagttacagctgtcaggtgcctctgccatacattttattggacaatttcatacaactaaaaaatagtggcactgaaatttgaattcaggtcacaaattcttaataattaaaagattaaggattcagggtagggtttggagcccatatcctgtctstcttttggaaagtaagaaacctacaaggtcctaaaaaatggcacaaacacccaaatgaaaacctaaatggagattagcatcaccctccttagaggctggcaagtggagccagaggagaatcttttgcaaacatgtgggagaactaaactgaagtctgaaggtcactggggtttcctctccttctctgaatcaagactttggagtct

SEQ ID NO: 438495 - DNA, 537 bp, Homo sapiens
ccaatattttcagatgcactataaactttgcttcaaaatcatagtgggatggaggacttttagagaaatgacctgaagagcagggttgtttggaacatcctgtggaatttctaatttgttccaagtaacctgagagaatgtaacttttagaggccctcctgagtcctgaggccaatctttaacttgtgacctaatctgatctctagatcaagcctgaagctggatttatgagctacaatggggcttgcttctgtccctkccccttcaggggtaataccaggtgtccactggccaagctgccaggatagccccagtagcttattacactagtttgttaagtggcacaaggatgactactgtgcagtcatattgacaatatggatgccagaaagtttaatatacaccatgcatcacaggcaaaggggacaaaagaaccaggtgacataactgatggatcaaacagactcatcacctgtgcataactggtttgcatgtccctttttgaagcaatggagactacattaattatacttcttt

SEQ ID NO: 438496 - DNA, 572 bp, Homo sapiens
gaaatattttatggaaatatactggccgaaaagtaacttgtcagggtcattggyagttaattggactagagccgctgtcaattaaaacggggctgccatgctttactaaaccaaaacagcaaagaggcttacaaacaattcagcacatcattaaaactcagtgactatcaggcttggaagtagctttaataaataagaagacaaggccaagatgagtgtctgaaagatatttcaaacaagagaattccatttagccatcacagttagttcacttttttaagaggcaggatctcactctgcgcccaggctggagtgtggtggcatgatcatagctcagtgcaaccgggaacacctgggctcacggaatcctctcaccttagcctcctgagtagctggaattacaggcatgcgccaccatgcctggttcattctttttttttttttttttaacttcgctggtgaagtgactaaaatgcaggccagtttttaaaaggagagaatataaaggaactagataatctaagaactcagggtgcatctgttgaaaagtgcaacatttaccataatactga

SEQ ID NO: 438497 - DNA, 572 bp, Homo sapiens
gaaatattttatggaaatatactggccgaaaagtaacttgtcagggtcattggcagttaattggactagagccgctgtcaattaaaacggggctgccatgctttactaaaccaaaacagcaaagaggcttacaaacaattcagcacatcattaaaactcagtgactatcaggcttggaagtagctttaataaataagaagacaaggccaagatgagtgtctgaaagatatttcaaacaagagaattccatttagccatcacagttagttcacttttttaagaggcaggatctcactctgcgcccaggctggagtgtggtggcatgatcatagctcagtgcaaccgggaacacctgggctcacggaatcctctcaccttagcctcctgagtagctggaattacaggcatgcgccaccatgcctggttcattctttttttttttttttttaacttcgctggtgaagtgactaaaatgcaggccagtttttaaaaggagagaayataaaggaactagataatctaagaactcagggtgcatctgttgaaaagtgcaacatttaccataatactga

SEQ ID NO: 438498 - DNA, 369 bp, Homo sapiens
ttttaatcttctagttaactaactatagcttcataattaytgatttgtacatatccactttggatcatttctagtgtagttactagatgaggtctgtctagcactgaaatttgctggagggacaattggaatgatgcatatttgaggaaaacttaggaaaattggcttacccaagtagatggaggtgtatggacttattttgttgataagagaaagtgatttttccagcttcataactgatcccctgattccagtattctctacctgaaaaataatgggctgcattctataatatcataggtgagtgaaagaatccacaatctatatggggtagccaaataaaaaaaaattaaaccgacgaattatcta

SEQ ID NO: 438499 - DNA, 547 bp, Homo sapiens
agtatggggaaactgcccccatgattcaattatgtccagttatgtccctctcacaacacgtgggaattataggagctataattcaagatgagatttgggtgggaacacagccaaaacatatcacagggtaatagatgtgaagagttttcctggggcctgaacagtattggtaacaagagcaaatatttaggattatggattgtgctaaaatcccatgagacagagatgcccaagtgttctttaaggaacttcttttgcctccgtctagggcatggggactaccaagagacagagttataaggggtaaggtgtctgtgcatagctttgcactgtacctgctaacattttgtctttggatgctcaggtcctgtgctacttctcactcaccatgccagattatctcckcattcacaaagcttttctcttagggacttagctgtctctccctgatatctggcttccttcggatttttccagcagatatatctgtaatgtgtctgaatatcattgccatcaagattcaagttctttcctattgacctgtggc

SEQ ID NO: 438500 - DNA, 598 bp, Homo sapiens
agtcaatatgtaatgtaaaaactgtattatttaaatttctttagtagatatttgacggttataaaggacttatatcacatgtagagattaaacatatgaccatgatagcacaaaaacttggggaatagaattacattttcataaggttttttatattataaatgaagtggtgtaatattaattcaagacagtgtgtgatatagtgaggatatgtattgtaattcctagacagagcccataagtttcattgagttgaaagattgttggaagatctttaagtagagagttggaactctcttcttagttcttatcttatctaccaaggaaggtagaattggtgaggagaaatactgaaaagtagatcacttcasaaaggactcctgttaggtgtttggcagaatactaatcagagcactcatataaggaaactagtaaagctggaaaaaggactaccagaaaggagcagaaacaaaaatcctggagttcattcagagttagaagacgtttgtttccccaaaacaaagtagaaggcctaacacacaaagcatgtagtaaagacctagactaaaggctgttgtagatctacctgacaaacctt

SEQ ID NO: 438501 - DNA, 589 bp, Homo sapiens
ttgttacagcagcagtaggatactaatgtgcatgatctaaagaaattcgaaggggaaaaagttgtggcttaagcctgttttatccagtaaattgtttaaatatatattttaaaggaaatgtcatcagaaagccaaggatttagtaaatataaatatatatgtcaattttattgactaaatctctgtttaggtggttgctatgaataacatcacttcattttttataatactaccttctrggccaggcacagtggctcagacctgtagtctcagcaggcctatatgggcagataacctgaggttaggagtttgagaccagtctggccaacatggtaaaaccctgtctgtactaaaaatactaaaattacccgggtgtggtcgtgtgtgcccgtaatcccagctacttgggaggctgagacacgagaatcacctgaaccccggaggtggaagttgcagtgagccaagatcgtgccactccactccagactgggaaacagagtgagactctgtctcaaaaataataataatactttcttactactgacatttttattttgataaaattttggattgactttaataggtcttc

SEQ ID NO: 438502 - DNA, 539 bp, Homo sapiens
tgaaatgcaaactccatgatgaggtatacctgaccttgcaggtctgggccagtgaggacctctctaggattccctctgccacccccctctgtactctagccacactgagtaacttttagtttcaccaattttcaatgccttctttgaccttcaggactcagattcttgtgcttctccacctagaatactctacccttccccatacatgccagtcaaagggccaccatttcccaagactcaacttcctttttggagacttccctgaccaacctccctaccttcaaacccacatctcatggaccagccaccccttttcagtacctttytcatttttttttttgagactatagagactagggagaaggtgcaaagggttggttggggcagcttttatactttctcaaatttgattagcttttccactttacaccaatcaaaattagcgtgcatttgcagaaaccacaagttgcttgccatacaaatggtttctcaagatgtttcgtagtacctctcacttccaacaaattcctttccctaaa

SEQ ID NO: 438503 - DNA, 562 bp, Homo sapiens
actaaataacttcccccaagatgcacaggtaatgttactggcaaagccaagaggcacacaaaggcagcctgactttagaaccctcttcagcatggtcctgcgcaggtgcctttagctctttagccacattactagwttggactttatgacatttagccaagattctcaaagtcctttgtattgtaagtctaccctgagtcgatgagaaggcccatttttacatcaggaacttcatgagaccgcaacacaaagggcagtagaggagaaataaaagcaagggattctgtgtcctagcacttttatggagaatgtctaaagtgagtacagtatgtgccaacacctgggaaaagcattttggaagctctttattaggaagaaaccattgtttacttttaagcacagctgttagaatgtagtaaacagtgttcttttgagacatggccagatattgctacttaacaaaacagggctcccaaatccatttacttggtaataaatggagacagaacactgcaacctaccaatttactttctggcaggaagtacagcttgtggttgtatt

SEQ ID NO: 438504 - DNA, 562 bp, Homo sapiens
actaaataacttcccccaagatgcacaggtaatgttactggcaaagccaagaggcacacaaaggcagcctgactttagaaccctcttcagcatggtcctgcgcaggtgcctttagctctttagccacattactagattggactttatgacatttagccaagattctcaaagtcctttgtattgtaagtctaccctgagtcgatgagaaggcccatttttacatcaggaacttcatgagaccgcaacacaaagggcagtagaggagaaataaaagcaagggattctgtgtcctagcacttttatggagaatgtctaragtgagtacagtatgtgccaacacctgggaaaagcattttggaagctctttattaggaagaaaccattgtttacttttaagcacagctgttagaatgtagtaaacagtgttcttttgagacatggccagatattgctacttaacaaaacagggctcccaaatccatttacttggtaataaatggagacagaacactgcaacctaccaatttactttctggcaggaagtacagcttgtggttgtatt

SEQ ID NO: 438505 - DNA, 612 bp, Homo sapiens
tgagtatttgtagcctcagtttgaaatcagatgctcttccagatatgaaccaactgactaacttccaggagatatcagggaatcattatccaatatgtgatttcatagtttgttctcagctgtgatttattaagctggtggctattgtcattaaggattgcttgtgtatggtaatagtatagattcagcatagagaattgaaaaattatatttgtttcactttgtttcaaaggctaattgtttggtgttttcatcatttctatgataggcgaaacgccccaagtgaaagggttaaatcatcaaattatatttttatccttataaaaagtattaaatacttattctaacacactccattatgtcatggtttaagtctcgtacccacaatatatatggtatagttgaaatgtcatcaatacacacacatgcatgttatatatatttagtgattcataatgattatacatatttatggggtacgtgtgatgttttgatatatgcatacaatgcttaatgatcaaatcagggcatttaggacatttatcacctcaaayatttatcatttctttgtgttgggaacattccaaatcttctgccaaatttgaaacatat

SEQ ID NO: 438506 - DNA, 535 bp, Homo sapiens
ctaagccatattagatagaaagggtatcatctctatacctcaggaggaattctatggtctgattcatccaagttagttcctgaaattctaaaagggattttgaaaattcctcctgtcatctaagcctggttttcaagcccattattttctcamgggacaagggggtttcatggcttaacctacaaagaatatgatttggaagggaaaagaaaatacattcaggaaaaaggtggaaaggtggaaaattgcaaagaataggatttgagggggaaagaaaatacattcatttaacattcatttaatatttgcaaagtattcattcattacctatcaagaatggaaaatatatttataaagggtagggaatttgtcagaagtgagaggactgctgttcagacacatggagcggagttaaggctgtgattggtagggactaaaatgaaacagcaaacatcttactagagccgtttaggttacagaggactctctggttaccgtctctctggagcctccttttgttagtttatttggcttt

SEQ ID NO: 438507 - DNA, 535 bp, Homo sapiens
ctaagccatattagatagaaagggtatcatctctatacctcaggaggaattctatggtctgattcatccaagttagttcctgaaattctaaaagggattttgaaaattcctcctgtcatctaagcctggttttcaagcccattattttctcaarggacaagggggtttcatggcttaacctacaaagaatatgatttggaagggaaaagaaaatacattcaggaaaaaggtggaaaggtggaaaattgcaaagaataggatttgagggggaaagaaaatacattcatttaacattcatttaatatttgcaaagtattcattcattacctatcaagaatggaaaatatatttataaagggtagggaatttgtcagaagtgagaggactgctgttcagacacatggagcggagttaaggctgtgattggtagggactaaaatgaaacagcaaacatcttactagagccgtttaggttacagaggactctctggttaccgtctctctggagcctccttttgttagtttatttggcttt

SEQ ID NO: 438508 - DNA, 535 bp, Homo sapiens
ctaagccatattagatagaaagggtatcatctctatacctcaggaggaattctatggtctgattcatccaagttagttcctgaaattctaaaagggattttgaaaattcctcctgtcatctaagcctggttttcaagcccattattttctcaagggacaagggggtttcatggcttaacctrcaaagaatatgatttggaagggaaaagaaaatacattcaggaaaaaggtggaaaggtggaaaattgcaaagaataggatttgagggggaaagaaaatacattcatttaacattcatttaatatttgcaaagtattcattcattacctatcaagaatggaaaatatatttataaagggtagggaatttgtcagaagtgagaggactgctgttcagacacatggagcggagttaaggctgtgattggtagggactaaaatgaaacagcaaacatcttactagagccgtttaggttacagaggactctctggttaccgtctctctggagcctccttttgttagtttatttggcttt

SEQ ID NO: 438509 - DNA, 660 bp, Homo sapiens
atacaaattatattagctcagggctgcgtgtggtgactgatgcctgtaaacccaggactttaggaggttgagacaagagatcccttgaggccaggcgtttgagatcagcctgggtaacatagcgagacctcatctctacaaaaataaagaaaaaaaagttggccagccatggtggcacaccctacggtctcagctacatcggagactgaagctggaggatggcttgagcccaggagtttgaggttgcagtgagctatgattatgtcactgtacttcagcctgggtgacagaggagactgcatctcaaaaaaaaaaagagtatrtatatatatatatgtatatatatatatgtatatatatatatatacacacacacacacatgtatctgtatattgtgtgtgtgtatatatatatatatatataatattagcttagctggggaaaactttgatatgtgtttaaacttcatcatgttttgaatgttctctggaggttcattacacaaactactttgttgagatataggacaaatctactacctgaagaataaatgtcaaagacaactttcagtctatgctaggctctgacattcagccaatttcatttatatttgggaccaaaaactagtgttacattacttatggcttttggatattaat

SEQ ID NO: 438510 - DNA, 614 bp, Homo sapiens
ctaaagtaagttttagttttcttacatatgcccctggtgtgagtgtcctgccctgttcatacggtgtaattcaccaaggtaaaaacagcactgtgttcacaaattatctatttttcttgtttgttttttcaaacttaacattagcatkaactagtgtttcattacaacatgagaaaatttgtaatgagaacatatatagttgttaatatttataaaattagaaaaaaatgctcttgctgaaggtaaaacggttagtccattgtaaccatggcagtggattgtacatacttcaattcatctcttcatttttagtaaaaacttatgctgcaaatgcaaatctccttgaactatgtttaaaagtctccctgtcgggttagtctgtctcccactgttcggagatccagaaaagaggcataagagtgggaatcacatctagaaaacatcagctactaatattcaatccactttgtttcgaaaattgcctttgttctaccaagctcaaaataatatacagagttttgttgttgttgttgcattttggggtatatttttaatgaggaaaaaattgaccaaccttttctatagacgttttacaacttttcattatatttata

SEQ ID NO: 438511 - DNA, 367 bp, Homo sapiens
tgttcctgctgttaagcaacacatgactgtatatgatttgagttctgatacacattaagcatctttcatctggcggctttgctgtcaacagcatttgcctttttcccwggaatggggcagtcctccctctcacctcagcttatccagtgtcacattttaagaactgtcatttacaacactccacttccagctatcaaatactgtattggttagggttcgcttcagtgcaaataatataaattcagcttataaaagtttaaatagaaggaatttcttggcttctctgactagaaaggccaaagatgcaattgtcttcaagcatgttggttacagagttcagtattatcagtatacatttttttccact

SEQ ID NO: 438512 - DNA, 367 bp, Homo sapiens
tgttcctgctgttaagcaacacatgactgtatatgatttgagttctgatacacattaagcatctttcatctggcggctttgctgtcaacagcatttgcctttttcccaggaatggggsagtcctccctctcacctcagcttatccagtgtcacattttaagaactgtcatttacaacactccacttccagctatcaaatactgtattggttagggttcgcttcagtgcaaataatataaattcagcttataaaagtttaaatagaaggaatttcttggcttctctgactagaaaggccaaagatgcaattgtcttcaagcatgttggttacagagttcagtattatcagtatacatttttttccact

SEQ ID NO: 438513 - DNA, 629 bp, Homo sapiens
aggagtgactgcgtgatttagctgtgatttagaactaaaggctcatactaccacctgtttactaaatatttttatgatcttggaaaacctttctcacttctttatcaaaatagagacttcccaaggttgacataatcatagcttcaactctgtttkctgatagaggaaatgaaatttcaggctgagtacagccttatacacagtcctttagatgactaatattactcagagaacaaaataaacattcagtcttcatggaaaagaagtagactgtgtatttttggttacatcttaatatttagcacataacgtcaacaacatacatttgcacatggaggagcccagcagatcatttttttcaggatggtaattagattaatgatttgggaaacttaaaggtcttgggatgtgatgggactcattctgaggtcgtgctaattaagctaagcctgtcttttattcttctcaaaatttgggaggatacccaaggtctattttccttgccataaagaataaccacaaagctgtgaaaataagacaaaacagagttctcttacaaaattatctgtttgttatatacttgaggttcagttgagaaaaacggtacttgtaggataattgcaacaaaa

SEQ ID NO: 438514 - DNA, 537 bp, Homo sapiens
tttttatagtttgggataatttcaaagtatcagttaatatatgtgggtacaaattcagttctgtcagttactagtgggtagctaattaatatcactaaacctcttttctcttctataatatggttataacagttctcaccctctgtagttgttgtgatgttaagtagtagtataaagtgcctagggttaaactgrtaagtggctgtcaattaataattttattataacttagatgtgctaataaccattagtaaacaaatagttgcttctatgggttaaatgttatgacagatgtaatgtgtccagtgatgtactggttcaaagagcaggaaactgcttaggtaagtcaggaaagaattcatagagaaggtaacattggacagcattatattgtgttttgaatgtttcaaagacagaggtgttatatttatgtccattttacaagagaaattttaaaaagctggataactttataaaaatcaagagtactttgcaaatgtatcagctgtgtaaataggtaattcagattacctggga

SEQ ID NO: 438515 - DNA, 550 bp, Homo sapiens
ccatgtctaaatgggagccatatatggaaatcattacaaggtgctaatcaagatatgtacacagactgtggaagcactgaacaaagtgcagtccattttacttatttgggtatgaaatctattcagggtcttaaaaataatcttgaagttaccaaatgtctaggaattttctagaccattaagacttaagcaaaaacatagggtggaaagaaattacatgacatatgtaggaaaagcgtaagatacatgagagtgagtggaaaaggattggaggctgaattgggggacttcagttgtctaattgaggggtcaaaaaacaatggccgaggggctggcccatcacctgttttattacataaggttttattgaacacagacacacccattagtttaggtattatccacgaatgctttcaagctgcaacagtagaattgagtagctgtgaaagagttgcataacatatttatgatatgaccctttacatgaaaagtttgctgaattctggtctagsttataaatgacaaagacctgaactaaggaagtagtatg

SEQ ID NO: 438516 - DNA, 590 bp, Homo sapiens
ttgttatacaggtacattgcatgtcattggtatttggtgtacagattatttcattacctaagtagcaagtgtagtattcaataggtagtttctcaatccttaccctccttccaccccgtaccctcaagtaggtcctggtatctattgttcccttctttgtgtccatgtgtactcaatgtttagctcccacttataagtgagagcttgtgatatttggttttctgttcctgcattagttcacttaggataatggccatcagcttcagccatatggctccaaaggacatgatctcattgttgtgtagtattccatggtgcatatgtaccaccaattgttgtgcatttaggttgattccatgtctctgccattgtgaatagtgctgtgaggaacacagacgtgcatgtgtctttatggtagaatgactgatattcctttgggcatatatccaataaagggattgctgggttgaacrgtatttctgttttaagttttttaaagaattgccacactgcttttcacaatgactaaactaatttacaccctaaccaacagtgtatgaacattctcttttctctgcaacttcaccagc

SEQ ID NO: 438517 - DNA, 603 bp, Homo sapiens
atgttttgttttttggttttcttttagacttctgagaagctcaaagcagctcaaaagaattttatttaacttgtcctcataatatccatggaaaccttcacaactttctcataaatcaggaggcattttgcatacagaaaaatatacaccgaagttttgtctaagacctttccagcacttatttgtagagctagtgccaacattcagaatccaaaacatcagtctagaataccacactggttttgactgtttaattttcaaccatattgagatacagatggaaacactcttacaaaaaccaatgatcactcaaaattataaagaagtcctatatattttttaaaatgaaaaaaaaaaagtgaggaggtgttgtatccatctactagagagcaattccaaaagtacagagctagtcacaacactagcacctgagaggaaatgaatgcagagccagygctcagatgcactacagacggagatgagctccttcatgtccagagctgactctacctgccacatgcttagaacggcttgaccacaccctgggcccacagcttgactctgcacgggttttctgcagtgcttccagatgaaagaggctcg

SEQ ID NO: 438518 - DNA, 603 bp, Homo sapiens
atgttttgttttttggttttcttttagacttctgagaagctcaaagcagctcaaaagaattttatttaacttgtcctcataatatccatggaaaccttcacaactttctcataaatcaggaggcattttgcatacagaaaaatatacaccgaagttttgtctaagacctttccagcacttatttgtagagctagtgccaacattcagaatccaaaacatcagtctagaataccacactggttttgactgtttaattttcaaccatattgagatacagatggaaacactcttacaaaaaccaatgatcactcaaaattataaagaagtcctatatattttttaaaatgaaaaaaaaaaagtgaggaggtgttgtatccatctactagagagcaattccaaaagtacagagctagtcacaacactagcacctgagaggaaatgaatgcagagccagtgctcagatgcactacagacggagatgagctccttcatgtccagagctgactctacctgccayatgcttagaacggcttgaccacaccctgggcccacagcttgactctgcacgggttttctgcagtgcttccagatgaaagaggctcg

SEQ ID NO: 438519 - DNA, 596 bp, Homo sapiens
actgagaggtcacattggttttgtaattttgtcaaggcatttaaagataagaaaattctattratggaaaacagttttattgaatctatagtggtggttcttacagaagaacaattgaattttgtacaaattgcctttccaccttaactaattatactaagctgctgtctcctatgaccacctcctccacctcagaaagtcttttttaaaaattagtaagaagggaaaggctggcatttgcagcaatgcaggccagtgctaaacagaagcatcctctgacttcatcgtgaggtggaggccttcaaaaccccagtggacagagtaagtgcccatgctccttcctcatagggctcactccttaagggtagtgaactgggtgagggctggagcttactccagagatcacagtgggtgggtgaggaggagggggaaaggggggacattgtgaactagccaacaggagcctgcttgctctggttggtagcttggtttggagaactgctaaatctcttcccacaccttgtatgtactaggggatttatagtacacagatagactaatgactgtgggttccaaaagtatcagccacagtaccc

SEQ ID NO: 438520 - DNA, 534 bp, Homo sapiens
tgtaatttaaataacagaatggaattgaaatccacaatgttggagtgccttttcatttcactgtgacttttttattattattctttaaatgtttgtaaaattttttgagtacatagtaggtaaatayatttatggggtacatgagatgttttgatgcaggcatgcaatgtgaaataaacacatcatggagaatggggtatccatcccctcaaacatttatcctgtgagttacaaacaatccagttacattctttatgttattttaaaatgtagaattaagttattactgaccatagtcaccccgattgtgctgtcaaatagtaggtcttattcattctttcttatttttttggacccattaaccatctccacctgccccccaaacaactacacttcccagcctctggtaactttaatattgaatacttttatttatttatttacttttttattttttgagatggagtttcactcttgttgcccagcctggagtgtaatggttgtgatctcagctcactgcaacgtccacctccc

SEQ ID NO: 438521 - DNA, 613 bp, Homo sapiens
gatgtttcttttaatagaagtttaggtagtttccagatctcttaagttttgaataatattggtcatccatttaatgtttttcatgaggtttagtggcatatgttttgctgattttgtaaaacagattgggaaaccatctatattgtgttctgatataggatgacatgacattactaagaactctgcttttaaatatccgtttaatgttttgcatgcagtttagtagcaaargttttgttaattttgtaaaacagattagaaaaccatccatctatattgtgttctagtatagcatgacatgacattgctaagaactttgctttaaaatatttggaataaaaaatagataaaagatgatcaatgtatttcttactgaataccttttagttttttgttttgtaaaattaaatgatatatgcattaatttgcttaacttagaaatatccgagaaatagatctccataaattgcacaggatcctcactatctcttttattccccaaaccttagttaagcatttgctctttagtaataatcagaataatactggaatgctaggatgaacaaagcctaggacctctccttataattctaacttataggaacagaaatct

SEQ ID NO: 438522 - DNA, 613 bp, Homo sapiens
gatgtttcttttaatagaagtttaggtagtttccagatctcttaagttttgaataatattggtcatccatttaatgtttttcatgaggtttagtggcatatgttttgctgattttgtaaaacagattgggaaaccatctatattgtgttctgatataggatgacatgacattactaagaactctgcttttaaatatccgtttaatgttttgcatgcagtttagtagcaaaggttttgttaattttgtaaaacagatkagaaaaccatccatctatattgtgttctagtatagcatgacatgacattgctaagaactttgctttaaaatatttggaataaaaaatagataaaagatgatcaatgtatttcttactgaataccttttagttttttgttttgtaaaattaaatgatatatgcattaatttgcttaacttagaaatatccgagaaatagatctccataaattgcacaggatcctcactatctcttttattccccaaaccttagttaagcatttgctctttagtaataatcagaataatactggaatgctaggatgaacaaagcctaggacctctccttataattctaacttataggaacagaaatct

SEQ ID NO: 438523 - DNA, 614 bp, Homo sapiens
cttatccgtatgtcactgaacatagttcataattaagtcttgttacatgcattgtctcaaggagtttctgagagataccagtgacactttcttgagatgaaatacacaaaagccactgggttggtagtcattaccctgggtaagaagaaccaagtaccactccacttaagggatatttagaataggttatcttcaatatattttaattacttactctaaagaatgtttatatttttggtgggggtgaaataaatgaaaacacgggtagtttggatggaggcgaggtgttggtccttgttaactgttctaggagttgcatcagctaaagaagaaactctcgccctcatgattgaaggacataacttccgaatggaaaaamatggctgagatttacttttcaaacagcatttggttgatgtgatatttcattttctatagcacttcttgttctcctctgagacatactagcttggaaaacatcactagtggcaggtagggtcagtgatgaaaataatcacggtaataactgcctttcattaaagacccaagatatgccaagcattgcgcctgatgcttttcatacattgcattctttccaacagttttttatcaca

SEQ ID NO: 438524 - DNA, 314 bp, Homo sapiens
ctgtaacaaaagctgagtgttggctaatcccagcagccatacttcaaccactcatagactgcagaatgttcaaactgcattcaaataagccaaatgccgagttgtaaccaatctcactgtttctgtaccttacttctgattcctatacgtcactttacctttttgtctataaatttgttctgaccatgaggcatccctggagtctctgtgaatctgctgtgattctgcgggctrcccaattcgtgaatcattcattactcagttaaactcctttacatttaattcgactgaagtttttcttttatcacactgca

SEQ ID NO: 438525 - DNA, 314 bp, Homo sapiens
ctgtaacaaaagctgagtgttggctaatcccagcagccatacttcaaccactcatagactgcagaatgttcaaactgcattcaaataagccaaatgccgagttgtaaccaatctcactgtttctgtaccttacttctgattcctatacgtcactttacctttttgtctataaatttgttctgaccatgaggcatccctggagtctctgtgaatctgctgtgattctgcgggctgcccaattcgtgaatcattcattactcagttaaactcctttamatttaattcgactgaagtttttcttttatcacactgca

SEQ ID NO: 438526 - DNA, 538 bp, Homo sapiens
ggagggtccagggcaactcaaatgactaggtttggggaatctgaatcaccagtaatagctagatgtggtatggttatgagagtggacaggtctactggatgacaaaaaacagaggcattgcagacacccatcatcctttagaatgtctctgtctactgtcaggcaaagtatagttgtctcttctgcaatatccagtaatgttattggtcatttctaggaaagctacatgtcttgacttctctgtttgaacacttgccagtttttcaggacttggacctgtcttgattcatgctgaaaatggatatttcatcctttgtacagtagaccctctccactgtgatcagagatatgaaaatggtagtgagtaatgaaagacatttgagacacatcaaaaataccaatgagcagtggaaggcagtatccaactgcaaggaggaaattagaaagkatttaccctagtagtaatgttttcagtttctttgtagatactgggcttggtatggacatgtctcttaaaacaatccagacagagttagac

SEQ ID NO: 438527 - DNA, 586 bp, Homo sapiens
gaaaggaaagagctatatgctcactttggcatcacataaactagaattgaaataaacagactagaggtagtgggggaaaattattamctgcaaagtattaacattgctgtgaggcaggaatacagagatgtatacattgccaccaattcagccaccaactctgtcattttcaaagtacaaggagttctctgcactccatgaaatgaagatctactatgtcttaatgacacataatccacttgccaaaaagagtccgggtctgaccttgaaaacccaaatagtgtgagagccaagcagaccaaaagaagtgtcatgtggaaataatacacttgactgtgatatttggcatcaattaatggaaaataatgttctctctgataatctgcggatctacacttcctcatatactcttcttctgcagaagaagagaagggtatattcattcttgttttattaataggaagtaaagcttaccaaaggaagaaggaggttgttagcaagaaaataggaaagtgacctgttctaatagagaggaaagcagactgggtatgatttgaagaaaatggggacacacctaatgccaaag

SEQ ID NO: 438528 - DNA, 586 bp, Homo sapiens
gaaaggaaagagctatatgctcactttggcatcacataaactagaattgaaataaacagactagaggtagtgggggaaaattattacctgcaaagtattaacattgctgtgaggcaggaatacagagatgtatacattgccaccaattcagccaccaactctgtcattttcaaagtacaaggagttctctgcactccatgaaatgaagatctactatgtcttaatgacacataatccacttgccaaaaagagtccgggtctgaccttgaaaacccaratagtgtgagagccaagcagaccaaaagaagtgtcatgtggaaataatacacttgactgtgatatttggcatcaattaatggaaaataatgttctctctgataatctgcggatctacacttcctcatatactcttcttctgcagaagaagagaagggtatattcattcttgttttattaataggaagtaaagcttaccaaaggaagaaggaggttgttagcaagaaaataggaaagtgacctgttctaatagagaggaaagcagactgggtatgatttgaagaaaatggggacacacctaatgccaaag

SEQ ID NO: 438529 - DNA, 586 bp, Homo sapiens
gaaaggaaagagctatatgctcactttggcatcacataaactagaattgaaataaacagactagaggtagtgggggaaaattattacctgcaaagtattaacattgctgtgaggcaggaatacagagatgtatacattgccaccaattcagccaccaactctgtcattttcaaagtacaaggagttctctgcactccatgaaatgaagatctactatgtcttaatgacacataatccacttgccaaaaagagtccgggtctgaccttgaaaacccaaatagtgtgagagccaagcagaccaaaagaagtgtcatgtggaaataatacacttgactgtgatatttggcatcaattaatggaaaataatgttctctctgataatctgcggatctacacttcctcatatactcttcttctgcrgaagaagagaagggtatattcattcttgttttattaataggaagtaaagcttaccaaaggaagaaggaggttgttagcaagaaaataggaaagtgacctgttctaatagagaggaaagcagactgggtatgatttgaagaaaatggggacacacctaatgccaaag

SEQ ID NO: 438530 - DNA, 586 bp, Homo sapiens
gaaaggaaagagctatatgctcactttggcatcacataaactagaattgaaataaacagactagaggtagtgggggaaaattattacctgcaaagtattaacattgctgtgaggcaggaatacagagatgtatacattgccaccaattcagccaccaactctgtcattttcaaagtacaaggagttctctgcactccatgaaatgaagatctactatgtcttaatgacacataatccacttgccaaaaagagtccgggtctgaccttgaaaacccaaatagtgtgagagccaagcagaccaaaagaagtgtcatgtggaaataatacacttgactgtgatatttggcatcaattaatggaaaataatgttctctctgataatctgcggatctacacttcctcatatactcttcttctgcagaagaagagaagggyatattcattcttgttttattaataggaagtaaagcttaccaaaggaagaaggaggttgttagcaagaaaataggaaagtgacctgttctaatagagaggaaagcagactgggtatgatttgaagaaaatggggacacacctaatgccaaag

SEQ ID NO: 438531 - DNA, 413 bp, Homo sapiens
tcctgagatacccctgagaacttgtagatgaactcaagtgaacttgcctcattactatgctaaagtcttcatcttgggaggagctataactttatgactgtaacatgcaacctatgtgctgacatgatgattcacagcatctgcaccactggggctcctcttttacatgcattgacatacgctttcacctctcaatcaccccatgagatcctcctgtcactttcctggsgggcactgttaatgaagaatatttccagtatcctctttacttgaaccaagtaataaaactcttactgatcaaaatctgcattcctgtagacagtcccttgttactcaccaggtgaatgaagcccagtatttttcaggtaacaataaccttccttatgaaaaatacatctttatattcataagtt

SEQ ID NO: 438532 - DNA, 557 bp, Homo sapiens
ccaccagtaacagcactgcagttcaaagacccgtggaaagttcaaacctcctcagactccaaagaacactggggccaaatagcattacataagaatagcattttcctttgttcctttgtctcataactatatgcagaacaattttgaagaatgcacccaagagggtggcattctaggattraattctgatttcccacgactatagtgacacacacacataaagaaacaataatcagggtggggcacagtgatgcatgcctgtaatcccagcactttgggaggctgaggcaggtggatcacgaggtcaggagatcgagaccagcctggccaacatggtgaaaccccgtctctactaaaaatacaaaaattagccaagcatggtggcatgcgcctataatcccagctactcaggaggctgaggcaggagaatcgcttgaacctgggaggctgaggttgcagtgagccaagattgcaccactgcactccagcctgggtgtcagagcaagactccgtctcaaaaaaaggaaataataatataacaaaaaaaaagaaaccta

SEQ ID NO: 438533 - DNA, 640 bp, Homo sapiens
tctttgtgtagcctcaagatggtataaaagtgtcaaccatctggttgaattcttatgctttgtatgactcccagggacattgtaaaagaaaataaacctcagaaccccaaaattactaagccaaagggaaaagtcaagttgaggactgcttcaggcaaaactgcctcccattttatttctgaatatgatagctaagaagataaaaaaaagtgtaaaccaaaaataaaatttgaaggccccctggatccatctgaatggactctctcctcagtcagagcaccctaaaatttaacctgtaagactagttcaggccatgacaggaagtgggggttggacatgcctcattatatccctccagcattaacatcaacacagaccttaagtctgataagaaacatttacaccttaggtctgataagaaacatttacacctcaagtctgataagaaacatttacaatctattctttctaaagcctgctacttggaggcttcatcagcatgataaaacctaggtctccacaacccyttaccataaggcagacattctttttgtagataataactctttcagccaattgccaataagaatatgcttaaatctgtgaatgagctggaattcaccacttcgatttgtcccat

SEQ ID NO: 438534 - DNA, 418 bp, Homo sapiens
gaggaaagcaatgactccaaaatttcatacacagtcatgatgaattcatatatgaagtaaataaaactgcctttgcaaaaattgtaacagtaaaagaaatctaacctaactgwctccaccttgcttctaacttcacaagctatctgcctttgtttactttaaaaacaaaaatgaactaatccccttcttgcttggggaccaaaataatcattataggactagtgaaaaggccacaagtttaggattgggaggggcctgaattctgttaagatgtaggcatagttaaacaataaccagtcattgttctggaggtcacaggatttgtaatttccccaaaggctcctatagaaaacatcagtattgttaaaacctaattggtctttgagattactttcagacttttgaattctcgcaatca

SEQ ID NO: 438535 - DNA, 418 bp, Homo sapiens
gaggaaagcaatgactccaaaatttcatacacagtcatgatgaattcatatatgaagtaaataaaactgcctttgcaaaaattgtaacagtaaaagaaatctaacctaactgtctccaccttgcttctaacttcacaagctatctgcctttgtttactttaaaaacaaaartgaactaatccccttcttgcttggggaccaaaataatcattataggactagtgaaaaggccacaagtttaggattgggaggggcctgaattctgttaagatgtaggcatagttaaacaataaccagtcattgttctggaggtcacaggatttgtaatttccccaaaggctcctatagaaaacatcagtattgttaaaacctaattggtctttgagattactttcagacttttgaattctcgcaatca

SEQ ID NO: 438536 - DNA, 422 bp, Homo sapiens
tattttagtcagcaatcagtgctgctgccagactaaatgcatattttattatactgtcccaggctcattcatctcccatgactctccaaggcctacagaatgaagttgtaaaacatctgcttggctttcacagccctggatagttgggccatgtagccaactatttccaactttactacttactactgtccaacaggcctcctgctatcaagctagtccctcgcttgtgatccttccgcattacatcattgctaagaaactctaatgagagaaatatagtagatctgttatrtaatgtagaaagagcttatcatgttgactctactgctaaactctcaaggttttgggaaaatccaaaaagaacttaaaatactttattaatgccccatttggcctattttagaatagaatatacagaaaga

SEQ ID NO: 438537 - DNA, 610 bp, Homo sapiens
ataaactgtggtacatccagacaatgaaatgttattcagcactaaatagaaatgagctatcgagtcataaaaaggcctagagaaacaaaccttcaatgcattattacttagtggaaaaagtcaatctgaagaggctacatactggatgattccaagtccgtgacattcttgaaaaggtagaactatgaaaatagtaaaaagattaggggttgggagtgggggatgaataggtggagcacggaaggattttaaggaggtgaaaaaactctcctatgaaactgtaaccatggatacatgtcattatacatttstcaaaacccacatgatatacaaacaagagtaaccctggaggacagagcagcatggtagaacagaagcgtccaccgtttgtcccccatctgcaagaacaccaaattttaacaactatctgcacacagaaaaggaccttcataagatccttcataagatccataagcccttcataagatccttcataagatccaaaaatctggcgagcaaacatagcacctggttttaactttacatcactagaagaggcactgaagagggtaagaaagacagtcttgaatgactgatgccactcatcccc

SEQ ID NO: 438538 - DNA, 517 bp, Homo sapiens
cataataacttcaacaattaggaagggctcttcagctagtctgtttgtagcagtggactgatcctttgctaagagagacatagaactaaactttctcacagaaatttcaatgaacctatggctcaggaactgtacagtagataacaatcttcaaggaaaagctgtgttggctgcctttctcgattctttctgttgagcaaccatgaagatgtctaaccctggcatataccaatgacctctcacttacatttttctcacagcagtctttcgaggccctttcttctgtggaattcaatcacgcagaatatatgttttgcttcagccacatgggattggatatggactcacagtatgaaaggttatgtgtgcaggagctaatatggcctgtaactcctgttcccaattgttatagctctctgcatgtcayagtatgaagtgagtatggcatcaatacaccacaaggatgataagactgtggaatgggttcaaaccaccagcctgaggagcataagaacac

SEQ ID NO: 438539 - DNA, 565 bp, Homo sapiens
ttagaatatcagacaatcataaacttggtgagaatacgaaacaattcacattgcttatggaaggcaagttggcataattacttaggaaaatattttagtattatcttgtaaaatggaagatgtttacaaggaaggcctcaggaatatcactgctaagtaattgatctagaaaaactcttgtgcacgtttaccagaagacatgtataacatgtttatagcagtgtgttaggtcattcttgcatggctgtgaaaaaatacctgagactgggcaatttttaagaaaagaggtttaattggctaatggttttgcaggctctacagaaagcatggcaccaacrtctgcttggcttgtggtgaggcctcaggaagcttacaatcatggcagaagacaaaggggcagccgacatatcacatggctagagcaggagcaagagaaagagggagtgagggtgtgccacacaccctaaaacaaccagatctcaccagagctcaccatcataaggacagcaccaagacatgagggatctacccccatgatctgaacactttccaccaggcctcacct

SEQ ID NO: 438540 - DNA, 565 bp, Homo sapiens
ttagaatatcagacaatcataaacttggtgagaatacgaaacaattcacattgcttatggaaggcaagttggcataattacttaggaaaatattttagtattatcttgtaaaatggaagatgtttacaaggaaggcctcaggaatatcactgctaagtaattgatctagaaaaactcttgtgcacgtttaccagaagacatgtataacatgtttatagcagtgtgttaggtcattcttgcatggctgtgaaaaaatacctgagactgggcaatttttaagaaaagaggtttaattggctaatggttttgcaggctctacagaaagcatggcaccaacatctgcttggcttgtggtgaggcctcaggaagcttacaatcatggcagaagacaaaggggcagccgacatatcacatggctagagcaggagcaagagaaagagggagtgagggtgtgccacacaccctaaaacaaccagatctcaccagagctcaccatcayaaggacagcaccaagacatgagggatctacccccatgatctgaacactttccaccaggcctcacct

SEQ ID NO: 438541 - DNA, 557 bp, Homo sapiens
atgcccatttgttctgcttctcaggccttcagtctcagactgaactatatcaccagtcatcagttctcctaggtctccagcttgctgactgaagatgggacttctcagcctccataattgtgtgagctaattcttctgtctgtctatgtctctctctctctctctctcccccccagctttggttctgtttctctggagaatcctgactaacagagatagaacagagggttgtttttttttttttttttttttttttggkgtatgtgttaattggaattctctactggagagggttaatacatgatcgggagagaaaccattgctggtacgatatttttgaataacagagagggagtggtatctagtgcatcaaaagagaagttatgtgtagaaagttcatgtaagaacaggaagtaaagaaaaacaggtaaaggtccaagtatgtgtatgtttgaaatccagtggtgaaaccttgtggaaggtctttttaaattgccataattccttcaacaaaatagaaagcaagttccacagctgagagtgagcgtgaattcagg

SEQ ID NO: 438542 - DNA, 557 bp, Homo sapiens
atgcccatttgttctgcttctcaggccttcagtctcagactgaactatatcaccagtcatcagttctcctaggtctccagcttgctgactgaagatgggacttctcagcctccataattgtgtgagctaattcttctgtctgtctatgtctctctctctctctctctcccccccagctttggttctgtttctctggagaatcctgactaacagagatagaacagagggttgtttttttttttttttttttttttttggtgkatgtgttaattggaattctctactggagagggttaatacatgatcgggagagaaaccattgctggtacgatatttttgaataacagagagggagtggtatctagtgcatcaaaagagaagttatgtgtagaaagttcatgtaagaacaggaagtaaagaaaaacaggtaaaggtccaagtatgtgtatgtttgaaatccagtggtgaaaccttgtggaaggtctttttaaattgccataattccttcaacaaaatagaaagcaagttccacagctgagagtgagcgtgaattcagg

SEQ ID NO: 438543 - DNA, 527 bp, Homo sapiens
gtcatcagttctcctaggtctccagcttgctgactgaagatgggacttctcagcctccataattgtgtgagctaattcttctgtctgtctatgtctctctctctctctctctcccccccagctttggttctgtttctctggagaatcctgactaacagagatagaacagagggttgtttttttttttttttttttttttttggtgtatgtgttaattggaattctctactggagagggttaatacatgatcgggagagaaaccattgctggtacgatatttttgaataacagagagggagtggtatctagtgcatcaaaagagaagttatgtgtagaaagttcatgtaagaacaggaagtaaagaaaaacaggtaaaggtccaagtatgtgtatgtttgaaatccagtggtgaaaccttgtggaaggkctttttaaattgccataattccttcaacaaaatagaaagcaagttccacagctgagagtgagcgtgaattcaggtgttgaaagtctgataatggatgca

SEQ ID NO: 438544 - DNA, 527 bp, Homo sapiens
gtcatcagttctcctaggtctccagcttgctgactgaagatgggacttctcagcctccataattgtgtgagctaattcttctgtctgtctatgtctctctctctctctctctcccccccagctttggttctgtttctctggagaatcctgactaacagagatagaacagagggttgtttttttttttttttttttttttttggtgtatgtgttaattggaattctctactggagagggttaatacatgatcgggagagaaaccattgctggtacgatatttttgaataacagagagggagtggtatctagtgcatcaaaagagaagttatgtgtagaaagttcatgtaagaacaggaagtaaagaaaaacaggtaaaggtccaagtatgtgtatgtttgaaatccagtggtgaaaccttgtggaaggtctttttaaattgccataattccttcaacaaaataraaagcaagttccacagctgagagtgagcgtgaattcaggtgttgaaagtctgataatggatgca

SEQ ID NO: 438545 - DNA, 564 bp, Homo sapiens
aaggagaagttatactcgtctgtaattatggctgtttgatcaatgattctgacatttttacatgttcactattgtgaacaagaaaatcaatttttaagatttgctgtttaataaattacaaaattaaaaattaatctgattgaatattgcatatctayaataaagaaaattttagatgccattttatccagtaagggacagttgttcctttcccaagtcttgccacacacagtgagtaccagatttaatattttgataacactttgataatgtcttgggataaaaagttaaaaatgttgtcaagtatttccacataacctcattcagctaatggggttgaaaaaccagtccatctctaataaatggatattgccaattaaaaagatttccccaaagggctctaggtttcatgaaactttcattggcaagttatatattaagcagtgaatcctaattttcaaatatagtatttgaattataatgtttacatatggaatattttataatttataaagagtctatttagtaaatagtgtttaggctgagatttagaacaaactaccc

SEQ ID NO: 438546 - DNA, 548 bp, Homo sapiens
agagtgtaagaactaagtagttttcaaggagatttatcctgactcagtaagcaaatttatagatagtttagaagcaaattttaatgatgtattgcccaacagggacttacaggtgccaccaaacttttgggatgctatgtagttttgctgggctgtcattttaaaaaatgttgcatccctagtggaaaatatttctagaaatactatgacctttccrttttttaccatgaaagtgaggtgatctaagagtagccatcttccaagtaaatgtggtgaaactttagtttgaaatattcatcatgcttctgttttgaacagccaaaactctactaaaattcagtttgctggtttattcagcttattcattttatgcaaatctcaatgtgcatgaaatgaacaaaagacttcatttctattcatatgcattgttagttttctattccatttttattcccaaacttgtttttctctttttcagtattagcactttattcattctttcaacaaatatttgtggcatccctagcatgatgaggcaccaaaaagaa

SEQ ID NO: 438547 - DNA, 548 bp, Homo sapiens
agagtgtaagaactaagtagttttcaaggagatttatcctgactcagtaagcaaatttatagatagtttagaagcaaattttaatgatgtattgcccaacagggacttacaggtgccaccaaacttttgggatgctatgtagttttgctgggctgtcattttaaaaaatgttgcatccctagtggaaaatatttctagaaatactatgacctttccattttttaccatgaaagygaggtgatctaagagtagccatcttccaagtaaatgtggtgaaactttagtttgaaatattcatcatgcttctgttttgaacagccaaaactctactaaaattcagtttgctggtttattcagcttattcattttatgcaaatctcaatgtgcatgaaatgaacaaaagacttcatttctattcatatgcattgttagttttctattccatttttattcccaaacttgtttttctctttttcagtattagcactttattcattctttcaacaaatatttgtggcatccctagcatgatgaggcaccaaaaagaa

SEQ ID NO: 438548 - DNA, 306 bp, Homo sapiens
aacactctaggcagcagaaatagcatttgaagagtcaggaaggctgagaaagcatgtcccactaagtaaaatattactgagctcatgtgtataattggggagtagagtatagggcaaagggtaaggtcacaaaaaggtstgggtgatatactaagaatttaggacttcatcatgttgacattggaagccacgaaaggatttttttaaaaatggaactaatataatcagatttacattatagacagatgatcctatctccattacagaggatggatcagaaagaacactagctggaggaaggtaaga

SEQ ID NO: 438549 - DNA, 607 bp, Homo sapiens
gtccaaccctgaaaacagtggttctgaggtttatgcatcagcatcacctgggcttgttaaaagacattactgggttccatcccagagtttttgattcagtatgtctgtgtcaaggcttgagaataatatatgtctaagaaaatctccaaagatgttggtgctgcagatctgaatgtctcaatttgagaaccacttatttacggaaaaagcaaggagcaggcagggatggtggagactgcccgttgtttttgatgccccttgctaatgatagctgtgcccaacttccctaatatggttgtgagcaagtcagctatagccccaaatgtactgtctcaaaggttctgcagttagccagaccctyactctttggaaggcagtttggtttccttgatggtattattcctttttccttgggtggcttattcctactggtggcatgcagtactcttcctgaaaagaattctcattcatcagtattcaattaaattttcagaacaattatgatcctagtgatattttattgtccttgattagctagttcctcaatccaatactgagtttagtcacatgatgtagaataaattggaaaatacagagttccagtggt

SEQ ID NO: 438550 - DNA, 619 bp, Homo sapiens
tggcgggggccacagggatgcttgtgtcaccagtatcccaactccaggcggcccagcamagggactttgtttagggaaagtaaaaaggagaaaaacaatatctgcctggtaatctagaaaattctcttagatcttacccaagaccaccaaggcagtacctcttcgagtctgtaacagccaaaatattactggaattggggtgtgccctaatgcagatatagctgtattgacaaaagatgtagattataacacccaagtccctttgaatgcctggaaagccttcccaaaaagagtgggtgcaaacaaacccagactgcaatgactacaataaatacctgactcttcaatgaccagacactgacaaacatctggaagcataaagacaatccaggaaaacatggcctcaccaaaataactaaataatataccagtaaccaatcctgaagagatagagatatgcgacctttcagataattcgaaataactattttgaggaagcccaatgaaatacaagattacacagagaaggaagttaggattctatcagataaactcaaccaagagattgaaataattgaaaagaatcaggcagaaaatttggagctgaaaaatgcaattg

SEQ ID NO: 438551 - DNA, 619 bp, Homo sapiens
tggcgggggccacagggatgcttgtgtcaccagtatcccaactccaggcggcccagcaaagggactttgtttagggaaagtaaaaaggagaaaaacaatatctgcctggtaatctagaaaattctcttagatcttacccragaccaccaaggcagtacctcttcgagtctgtaacagccaaaatattactggaattggggtgtgccctaatgcagatatagctgtattgacaaaagatgtagattataacacccaagtccctttgaatgcctggaaagccttcccaaaaagagtgggtgcaaacaaacccagactgcaatgactacaataaatacctgactcttcaatgaccagacactgacaaacatctggaagcataaagacaatccaggaaaacatggcctcaccaaaataactaaataatataccagtaaccaatcctgaagagatagagatatgcgacctttcagataattcgaaataactattttgaggaagcccaatgaaatacaagattacacagagaaggaagttaggattctatcagataaactcaaccaagagattgaaataattgaaaagaatcaggcagaaaatttggagctgaaaaatgcaattg

SEQ ID NO: 438552 - DNA, 619 bp, Homo sapiens
tggcgggggccacagggatgcttgtgtcaccagtatcccaactccaggcggcccagcaaagggactttgtttagggaaagtaaaaaggagaaaaacaatatctgcctggtaatctagaaaattctcttagatcttacccaagaccaccaaggcagtacctcttcgagtctgtaacagccaaaatattactggaattggggtgtgccctaatgcagatatagctgtattgacaaaagatgtagattataacacccaagtccctttgaatgcctggaaagccttcccaaaaagagtgggtgcaaacaaacccagactgcaatgactacaataaatacctgactcttcaatgaccagayactgacaaacatctggaagcataaagacaatccaggaaaacatggcctcaccaaaataactaaataatataccagtaaccaatcctgaagagatagagatatgcgacctttcagataattcgaaataactattttgaggaagcccaatgaaatacaagattacacagagaaggaagttaggattctatcagataaactcaaccaagagattgaaataattgaaaagaatcaggcagaaaatttggagctgaaaaatgcaattg

SEQ ID NO: 438553 - DNA, 569 bp, Homo sapiens
tgttggtgatatgttgggggaaatttccagctgtagtctatctcagcactcacaagaggaactgtttggcttgattgtagaaagaaaagtcctgtgacacttttataacatcttactgagaacacagagtacatgaccacccctcacccaggtagggctgtctgattctatgttaaatttgagcacctcagttagccatggggagtcccttttgtctgtcagccaggcacgtactgtaataccatatttgtctttctgatgcatatcatctttaactaccttgagttttccttgaagataatggtttgcaaactctttcaatatcctggcatcctctgtgaataaactttagttcttagtcttagggaagctctcataaaataaaaataacatgaaattctagctgagattgagttttgttctgacaaattccaggatttgaaacctgaacaggacacttagtctctgcatctcttttattcatttgcagatgaaaatggcacytaagccagcacaaggtttttctttttaaacaggtttattagtgtattataaagtgcaacatttca

SEQ ID NO: 438554 - DNA, 612 bp, Homo sapiens
acttagtctctgcatctcttttattcatttgcagatgaaaatggcacctaagccagcacaaggtttttctttttaaacaggtttattagtgtattataaagtgcaacatttcaaagtatacagttcaatgttttttagtacacagttggctctccatgttcccaggttctctgtatccacagattcaaccaacyatggatcatttacagtgttgtgcaaagaacaccatgatctaattttagaacattttcattctccctacaagaaacactgtagccattagcagtcactactcaccacccccagcttccttccccaccccaccttatcctcagtgctaggtaaataccaatctgctatcttttgaaatatatttgtctgttgtgtgcatttcagaatagataaaatcatataatttttcttcttttctaactggtttcttttacatagcctaatgttttcagagttactccatgttatagcatgcatcagtaattcattttatagccaaccaatatacattgaatggatatgatacaatttgttcatcagttgatggacatttggattgtttccatttttcagctctaatgaataatgcaactctaaaca

SEQ ID NO: 438555 - DNA, 561 bp, Homo sapiens
gagcaagggagatgatagtatattcattttacagaaaagaaggctaagaatttatatcaattttgtaaacttaattaggtacttaagtaattttatgaagatttatttattatttatcagtaacatatatgttgctaaacactggactgggagatttccatttcataacatgaaggtgatacattcaatttcatagcattaggatgctttcctttttatacacaaacttgaccctcaatggatacaaaccatagcttatgttttcctattttttgtaaccagtattagttttaaaacatttcaggcacagtttgcatttatcatccttgtttattttgactcattcatcacattcatgatgtttacagtactttcctaactttggggccattattaagctgagaagtgacattaaccttcccagagagaattgtcgacacaggaaagctgacagcctgatcttctaatatgaaatcacaggtttgaaaggtgaggaaattgaccttgaaatcttccctttgccayctactggactctgagcagtcaaagtcattctgactg

SEQ ID NO: 438556 - DNA, 584 bp, Homo sapiens
ctgccatggcttcagccagtctctccgttcggggttcctgacttcccgcaacacttattaaaatgcagattctgattcagcaagtctgggtgggctctgggattctgcatttctaagttgtttctcaggtgatgctgaagctcttggtacattgaccatactctgaacaataaggcaattgctataatagttaaaatacttgcatttcaaaagagggcatcaatattttgaactaaaaatgacaacatgagaatttcaagcagaagtgtktttgacaatctttgtatcactacatatagtcaggtggttattatatctctgtatcagatccatttgggaaagcccttttgagctcattatatggaagagtacagaagattggacaaatttttctttactgatgacaaatttcaaccataagctgatgatttattctcactcttctagtactttcctgtcttcctccttcctttacaaataaatttttagagcttcccgtgtacaagattctggttttgttttatctgccttccaaaggaaaaactttagaaatatttattgaatgttcattatttcttagttgg

SEQ ID NO: 438557 - DNA, 584 bp, Homo sapiens
ctgccatggcttcagccagtctctccgttcggggttcctgacttcccgcaacacttattaaaatgcagattctgattcagcaagtctgggtgggctctgggattctgcatttctaagttgtttctcaggtgatgctgaagctcttggtacattgaccatactctgaacaataaggcaattgctataatagttaaaatacttgcatttcaaaagagggcatcaatattttgaactaaaaatgacaacatgagaatttcaagcagaagtgtttttgacaatctttgtatcactacatatagtcaggtggttattatatctctgtatcagatccatttgggaaagcccttttgagctcattatatggaagagtacagaagattggacaaatttttctttactgatgacaaatttcaaccataagctgatgatttattctcactcttctagtactttcctgtcttcctccttcctttacaaataaatttttagagcttcccgtgtacaagattctgsttttgttttatctgccttccaaaggaaaaactttagaaatatttattgaatgttcattatttcttagttgg

SEQ ID NO: 438558 - DNA, 550 bp, Homo sapiens
attctaattcttacagtgcagctccagctataaggaaatgctttcctctttatttgttccaagctgtcccagattaccaagctttgccagttgttcaatacttgatatgaagtgagctagaaactagccccatggagtgtgctttgagataccaggaggacagttgtccaagtgcacattctaattccactttccccawgtgggaaaaatcatgagctgaggcaatattcttggcactgagataagccagtttaggggagggttgatgcaggtaaaatgaaattgttcttcttatctataaatgtgactgttttccaattatgttcctctgaggtacttctacttacctggatcctgaattggacttcaaggtgtttgttaccaatatcattgttatactggtatttctgtagaggaagaagagttagggctttctactctgccatcttgccgatgtcattcacccagacattttatttcagaacagttttagacttacagaaaaattgcaagaatagtacagatagtacttaggtgcccctgttattga

SEQ ID NO: 438559 - DNA, 523 bp, Homo sapiens
tttttgaaatcttaagacgttagggatctaaaagctgccttttcaaagctacaagcagtttggagctttcagcactgaagcctgcaattgatcctgagtggaaagtaccataagccaatacctccatttcagaggttgagctatgaggttgggagtgcaaatgtggtatttatgagtttaattctcargattctttctttctttctttctttcttttggtggaaaggaaaaaaaaggcttgttggctttttatgtatttagagtgcactcttccatatgcaaaccatgcttgtccaaatagagttgtggatgattttcatttgtcccaaattagtggaagatgagtacagataatgagtatgtcatttttagtggaagatgatgagaactgaaggttcaactcactcatgctgcagtgaaaactatagtaaaggaattggactatcaatgggctacatacagattataatagtgaataataaatattttagagcagagtgatgatggactatggtttgcatat

SEQ ID NO: 438560 - DNA, 511 bp, Homo sapiens
gaagaacgacggttaccaccccatacgcaaactcagaaagctgaactgcccagtgtcttgcttttgctaaatttttgaattaatatacagctctttaggcattcctcccttataaaccatgtatgatagaagaaagccatggggattttaattatgtgttaattgtatgccattttctttttcttgcatttcgtcttccatcttttggtaaagtgagggagtcagaaatggaaaatatggagtcaaacaactttgcatgaagggaaacacaggatgactacaaaaactccctaccaatccccctgaagctattacaaaagtactttgggtgcytagaaaaaagtactatataaatccatggttcttgttattaccgtggaggtatactgtagcgtagttagcctgttgaaagggtagtgattccatggaagatgatgggatggaaataggaaggttggggaaaatattactggaataatagggagtgtccagtagatttattttaatatac

SEQ ID NO: 438561 - DNA, 577 bp, Homo sapiens
aagttctaaattgtccttggtaatgtgctaatatacctactgttctattcctagtatttttgatttttaaaactgcgtattctcattaactcatagaatcccagatctattttccttattttgcattataaagagcaaaatttattaaaatatgtcatattagtaatatttgttattaaatamtatccataaaaatagagtactttctagaaatttgaaattcttaatctatattatctatatttaccctctctactttttcttgcagtgattattggtataatttcaagctcttttgagtttctctacaacctcatcaataacaatacaaattttaacccagtctttccatacccattctcagattaagctagtatttttgttactactcattactatttttatagtaaaacaaccttaaggactatttcaaataaatagcaacctaacatagatttgaagtgtcaaaactgtgctcttgaaatgaagcccgactatttgcatttacaaagaggttactgcaaaagttgctagtagtcaacaaagaagtaaatttatacagttgttactcccagac

SEQ ID NO: 438562 - DNA, 493 bp, Homo sapiens
gaatggggtgtggcacaaataccccaatttctttatmctgccaccctcagatctcctcatcatgcttccctgtgtccaaaaccaaccagaagccagagtacatgggagtctggatgatgtagtcaattaggggtcagtgaacctaaagcaaagagcagagaagagaagggcagaaatatatagattaagtacagtggatatgtttttcttctaagctccttgctaaggccaaggcttgagtttctcttggacgcctcagtaacccattgggttatactccaacaactcattgtctaggtggatccctctagctcaggacccagagaggtggtgactcaccagagtgtgccatcttggtgggcactgtacttcacctgctgctcactgagtccgctgaaagcaaagcatgacctttcagctgcctccagtcaatctgtaaaatttccagggcagaagcagtgctcatctctaatgttctctgatctccacttgg

SEQ ID NO: 438563 - DNA, 493 bp, Homo sapiens
gaatggggtgtggcacaaataccccaatttctttatactgccaccctcagatctcctcatcatgcttccctgtgtccaaaaccaaccagaagccagagtacatgggagtctggatgatgtwgtcaattaggggtcagtgaacctaaagcaaagagcagagaagagaagggcagaaatatatagattaagtacagtggatatgtttttcttctaagctccttgctaaggccaaggcttgagtttctcttggacgcctcagtaacccattgggttatactccaacaactcattgtctaggtggatccctctagctcaggacccagagaggtggtgactcaccagagtgtgccatcttggtgggcactgtacttcacctgctgctcactgagtccgctgaaagcaaagcatgacctttcagctgcctccagtcaatctgtaaaatttccagggcagaagcagtgctcatctctaatgttctctgatctccacttgg

SEQ ID NO: 438564 - DNA, 607 bp, Homo sapiens
taaatgtacatgttcacatgtagtagatgctggcagttatctgggggtttgtatcaagtcattctcagtaacatgagagtactaattctccacatctttgtcaacatttggtgaggtcatgatcgttatttaaaaaaatagctcttctgatagatttagtggtacttaattgtgggtttcattcactttttcctggtgaataacgatgtagaatacattttcatttgcttgtcatcttgataccctcgttgatgaagtacatgttcaagtcatttttcaatttctgagcctactcaatacacttttttccaatagaaaaagtaagtctttttctaactgatttgtagaaatcttttccttattggtttgtagagattctcaggatatattctttgtctakacttttgtttgtattgcacatatctataacttgtgcacggcttcctttttcattctcttaatgatgtctttgagtcacaaaacttttcaatttcaatgaaatctaatttatcaacattttcctttattgttagtactttttactacttgaataatctttgtttaacccaagggtatgcatatattctgttttgttttgttctagatg

SEQ ID NO: 438565 - DNA, 586 bp, Homo sapiens
ttgggacaatttatgtcataattctataataatatttcaagtttaattttctaatagcctttgtcacatgtatttttatttttaaagtatggatggcacatgaattatgctatagtcatacacacacatacacacattcattcatatatatgtatgtatatgtgtgtgtgtgtatatatatacatatatatacacatatatgtgtgtgtatatatatacattttataccccacaaagaggtgaattctttaaaggaaatgaaaataaaaatttcacagggtgtagggcagagcaaatgctcatcacagactcatctgacaagtctctttcaaggtcctgtccgcacaytgaagattcactctttgctcaatttgcatccttggcccaataaatgttttatgacctccctctatgagcactcacagccggaaggaggtaatgcaaaattgatctgtatattaaaactgctgagccaagcgggcttgctcctggaattacactgattatgtgtatgtgattcaacaggccctactgaaacaccgtagtatttgaaaaagatacccatcagctgcattttttatataca

SEQ ID NO: 438566 - DNA, 547 bp, Homo sapiens
gctcaatttgcatccttggcccaataaatgttttatgacctccctctatgagcactcacagccggaaggaggtaatgcaaaattgatctgtatattaaaactgctgagccaagcgggcttgctcctggaattacactgattatgtgtatgtgattcaacaggccctactgaaacaccgtagtatttgaaaaagatacccatcagctgcattttttatatacacagttttcttcttttcytcctccctttaaccctgggggccaactcccatattcacatctcttaactcccatttggactcatgaataaaaatacatgctttcaggagaaaagatgcttcactattatgctcagcagtctattatttctggagtacagtgaggagcatggaacttgaagtcaaacacacagtggttagaatcccagcttcaccatttatttgctacatggatttgggcaaattattatatctctctgggcctgatattactatttgaaagtgcagataatggcgttcaactgcctgacttgttacaatgtaactagt

SEQ ID NO: 438567 - DNA, 570 bp, Homo sapiens
atttgtgccaatatcttttctagcatgtgggttgtgtaataaataggatagatgaggtccctgttttcatcaagcttatagatggtggcaggtgggagtgtgatagttgagtaagatagataaataattatgtagaaggacaaatactctgaagaaaataaaacagcaatcctgtagaaattgactggcaacattagagatagtagtctggaaagtgttctctgaggaggtaacatttgagttaatacctaggtggtggagatggaactcactaagtgaagatcggaggtggatgaagaacatttcagattgaaggagcaacaagtgcaaaattytgagaaagatttactaacttagagcaaccgaggaaaggagagtatagctgaaatatagtgagaaagggataaggtgtacaagtgtagtctgagatttgtgcaagaaccttatgtttggccttgtagagcttcaaaggacaatcagactggaagatgttgacatgttttaaacaggtaatccacgtactttttgaaaatgatttatgaatatatgatgttctgaaattcagaaaaa

SEQ ID NO: 438568 - DNA, 552 bp, Homo sapiens
aaagtttaaataaagtcccaagaagaaactcttggcacraaaggatatactgtattcttggacccaactttataagaatcttccagcttgcagcacaaaggcagcccagtcctcaatgaaaatttaaagggagcctgacagatttatgtgagagcaatgtccatttaaaccatttaaacaacaatatgaatgttgtgcaaagtgtagctcccatttcattgagagaagaggaaataattaagacggggcaaaggaaacactgaggagttgtttgtgtctggccatgctgctttcagttatctactgctaagtgtgtcttatttacttcatcttttttttttttttcactgatgcagaattttgcaagagtaaagatgcaagtaaccatgtccctggcatctttggtgggaagagcaccagactttaatgaagagcacctgagaagatccttgaggacaattttggcctattcagaagaggacacagccatgcagatgactccttttcccacccaggtacaccgaagcacataccttgtctcatgcatgagtt

SEQ ID NO: 438569 - DNA, 552 bp, Homo sapiens
aaagtttaaataaagtcccaagaagaaactcttggcacaaaaggatatacygtattcttggacccaactttataagaatcttccagcttgcagcacaaaggcagcccagtcctcaatgaaaatttaaagggagcctgacagatttatgtgagagcaatgtccatttaaaccatttaaacaacaatatgaatgttgtgcaaagtgtagctcccatttcattgagagaagaggaaataattaagacggggcaaaggaaacactgaggagttgtttgtgtctggccatgctgctttcagttatctactgctaagtgtgtcttatttacttcatcttttttttttttttcactgatgcagaattttgcaagagtaaagatgcaagtaaccatgtccctggcatctttggtgggaagagcaccagactttaatgaagagcacctgagaagatccttgaggacaattttggcctattcagaagaggacacagccatgcagatgactccttttcccacccaggtacaccgaagcacataccttgtctcatgcatgagtt

SEQ ID NO: 438570 - DNA, 552 bp, Homo sapiens
aaagtttaaataaagtcccaagaagaaactcttggcacaaaaggatatactgtattcttggacccaactttataagaatcttccagcttgcagcacaaaggcagcccagtcctcaatgaaaatttaaagggagcctgacagatttatgtgagagcaatgtccatttaaaccatttaaacaacaatatgaatgttgtgcaaagtgtagctcccatttcattgagagaagaggaaataattaagacggggcaaaggaaacactgaggagttgtytgtgtctggccatgctgctttcagttatctactgctaagtgtgtcttatttacttcatcttttttttttttttcactgatgcagaattttgcaagagtaaagatgcaagtaaccatgtccctggcatctttggtgggaagagcaccagactttaatgaagagcacctgagaagatccttgaggacaattttggcctattcagaagaggacacagccatgcagatgactccttttcccacccaggtacaccgaagcacataccttgtctcatgcatgagtt

SEQ ID NO: 438571 - DNA, 551 bp, Homo sapiens
atatttgttctaagaaaatacttgtgttcggtgaatttaccaacaaagggagcatcagaggatgtgagggaagtctggaatggttgtatcactaagtgagagcagcacagatgtttgtggacctattgagaatgttacagataagaccatttttgaaaagttgtttgcagtgtcattttatgatcttgtgtacattttccaagcgatgtggctattctctaggagggatagtagaaattatttcaattttaatcaaataacctagagaatataacccaaatgactgaaaggaagaaatgtagaaaaagtatataaaataattttttgcattataaaagtttaaagacataaagtaatattactacataaaatctaagttttttactccagctattaatatgtttttstttataaaacatcacatttattaattgctgtgtaacaaactacctcacaatttagtggcttaaaagaaaatttaattattatgcatgtggtacataataatttttgctttcctcatttctactcctgatacttgcctatgatgt

SEQ ID NO: 438572 - DNA, 540 bp, Homo sapiens
tcttagatccatcacttcctcacagtgttatcttgggcaagcatcctaacatttctgagtttcagaaacaaaatagagataaatgctgactttttagggttgttgggaaaattaaacagataatgcatgtaaaacttcttgaaacttcttctggcacatagcaagtcagaggttctcaattctggctaggttggcttcagtatcccctgggcaactttttaamattagacatttctgggccagaagcaatggcccacacttgtagtcccagctacccaggaggctgaggtaggaggatcactggggcccaggaggtcgaagtttgccatgagctgtgatcatgccactgcactccagcctgggtgatagagtgagccccgtctcaaaaaataataaaataaggtaaaaaaaaaaaacaaacacagagatttctgggtgctacccctcagcagttatgattcattaagtctgagatagatcccagaaatctgcattttgaaaagctccacaggtgatcccgatatgccacccagtttgaaa

SEQ ID NO: 438573 - DNA, 489 bp, Homo sapiens
tttatccaactctcaaattgagttttgctttgcaattgttgacctatttaattgctttttctcttcctcaagcctgaatgttctgatttgtaagccgatcttgatcccaaattaagtactactttatttttacttttttgagacagggtctcactctgtcacccaggatggagygtaggggtacaattacagctcactgcagcctccacctcctgggtttaagcaaccctcgcacctcagtctcctcagtagctgggactataggcacgcaccaccacatctgggtattttttatagagggaaggttcttgctttgttgcccaggctggtctcaaactcctggcctcaagtgatcctcctgcatgggcttcccaaagtcctgggattataggcatgaaccactacacccagccaattaagtacttctcactattgttttagcatctgtttccccctcattggagggatttaaaaaaaaaaggaagcaaa

SEQ ID NO: 438574 - DNA, 567 bp, Homo sapiens
gtaagtcaggcctctgtcctgcctgcacctttggcctgattttgattaacgttgtcagaagcggatgcmatgtgtgggggtgctggctaaactttctggaagtgtcaattgtaaacagtgttaccttacattttgggcagcacttttgagtttccaaaacatgttcccatgcattatctcattgggtttcctcagtagattggaagaatgtggaggaacttgcaccctctttcacagtgaaaaaaaccctgaagctcagagcagtatagtatcttcgccagaattgcaggactagaaagtgaaagaacaagaaaccaggtcttctggtccttagtctggagacttttggcagtcacatatacttttttattatctcactaataactcttgataatcttgttggataacagaacagtttgttcatccgtgtcgtgttctctcattgcattaaggaagtgatgagggagctgatttctcaattgttttttagagctataatgccttgaaaatcattcccttatcctggctatcagtaatttgccatctcctaatatgtagtaaaaatag

SEQ ID NO: 438575 - DNA, 616 bp, Homo sapiens
tggtggaaggggtgagaagtctctctggggtctcccttatacgggcactaatcccatccacaagggcccctgccttgtgacctcatcacctcccaaaggtcccatctaacaccatygtcttggggattagattttaacatatgaattttgggatgacacattcagaccatagcaaccactatgggcccagtttttgcagcaaacacttttcctggaagcgcaccagctccagctgcagtttcagttttcctcaagtgggactgtgccagcgcccccaaagctctctgccagtctgtgatgcgctagcaacgcccactcccctttcccaaaattctccaattctcccatccttgatgcttagaacgaagtctctcccaagaatcacagaactagttataaccaaagactgaaataaagtcctaaggagaatgagatattgagaagcctcttgtttacattgcggcaattgacattttcctgaaattcatacgtctcttcccagactcattaaatgtcctatgttgctaatgtactgcgttctagcaatttgcactgtgtttcctgcactttgcactcatttttccagaaatacttggtaaatattaccattgtttgc

SEQ ID NO: 438576 - DNA, 616 bp, Homo sapiens
tggtggaaggggtgagaagtctctctggggtctcccttatacgggcactaatcccatccacaagggcccctgccttgtgacctcatcacctcccaaaggtcccatctaacaccatcgtcttggggattagattttaacatatgaattttgggatgacacattcagaccatagcaaccactatgggcccagtttttgcagcaaacacttttcctggaagcgcaccagctccagctgcagtttcagttttcctcaagtgggactgtgccagcgcccccaaagctctctgccagtctgtgatgcgctagcaaygcccactcccctttcccaaaattctccaattctcccatccttgatgcttagaacgaagtctctcccaagaatcacagaactagttataaccaaagactgaaataaagtcctaaggagaatgagatattgagaagcctcttgtttacattgcggcaattgacattttcctgaaattcatacgtctcttcccagactcattaaatgtcctatgttgctaatgtactgcgttctagcaatttgcactgtgtttcctgcactttgcactcatttttccagaaatacttggtaaatattaccattgtttgc

SEQ ID NO: 438577 - DNA, 604 bp, Homo sapiens
tatttttccaaaagcccagaatcgtttttacttgttttgtactagtgtaaaagtgacaggagctccctggcaactaaggctgcatgatttaagctcgaccctgtttatcgtatgcagagcaaactcctggtgactttaatggaggttgcctgcataaagaactccacgtgcggagccctggggaataaatttgttctgttcactgcagctcaagtcagaacgagtttagggggtcagacctatatatttcaaagtccaggcacagaataagcatctccccagtcctctgtccacagtgccatcaccaagagcctgggatcaagggactgaagatgcgctaagatggggccctggggtcctttgcccagtaaatgtggaaagatgggaaaacagtacagttattaattttgctgctgattcgaaagaaggaggtgttggcagcacctgtgaggacaaaaaaagaacataactaagtctgcagaggtcacggctgggacataacatcatgaggcctggagtggggataagagcaagaggctccayggggaaaagatgacatctggctctatttggctgagccagtgatggtggtgatggtgactgt

SEQ ID NO: 438578 - DNA, 614 bp, Homo sapiens
acacactcaaccctgacaaagtctatatgacagagtaggtgcaatgcagccatttcagccattcacatacccagtgggggtctttgcaagatcagttcagatgtggtcatcaaaaactatggaaagactggaggaaagaacaacaaattcaactaaggcctggccctgccctgccctgccctgccctgggatgggagagggctttcccctctactctttcctttcttttcattttgtagtgcttttcactccatcaagtcattyttcctttcaggttggggagtgcctgataaagaaagcattataaggctggattgccaaagcactgaatttttaaaccctctaaataggacattagttcatagcttgaatgttttgaaatctgatcaacgtgccgtttctcaatacattaagcaaagcaagcaaaattagtctgctttatgtcaggtgcttagcacaaatcccttaataatgtgcttgagtgcagaaaccattaataaatgcataattccctaagacaggcttgattaattaagtcatatgtgtatccttctaattaaaaaaaaaaaagaacattaggcagatgagtggaatttctgagtacaaaattcaaa

SEQ ID NO: 438579 - DNA, 507 bp, Homo sapiens
aaaggcccttctgtcaggagctagcactgtcagtggatgtaatactcagtgtccctgatttttgcatccattactttaaacttcccacctgcacaagtgcactcatatcgatagcccatgtgacttatgcttgggttggagaattaacttagttggtggtgaccaaagaaactgagaatctacagggaagggggcagcccagagccagccccaggaccygttcagaaagctgggagctcttctgttgctacaaaagccttttctgaacagtacatttggtttctggcctctcaccaaggtggcaggatgctttctcagggagttatgtctatcactccctttctagggcctcaaagtactgcagtatggcttctacccccatgaatccatcagaacagctctatggagggccaccactgacattcatatccacagagacagcagactctttattctcccgcttgaccctgtgtggcagcatttggcactgttgacttctttttttaa

SEQ ID NO: 438580 - DNA, 507 bp, Homo sapiens
aaaggcccttctgtcaggagctagcactgtcagtggatgtaatactcagtgtccctgatttttgcatccattactttaaacttcccacctgcacaagtgcactcatatcgatagcccatgtgacttatgcttgggttggagaattaacttagttggtggtgaccaaagaaactgagaatctacagggaagggggcagcccagagccagccccaggacccgttcagaaagctgggagctcttctgttgctacaaaagccttttctgaacagtacatttggtttctggcctctcaccaaggtggcaggatgcyttctcagggagttatgtctatcactccctttctagggcctcaaagtactgcagtatggcttctacccccatgaatccatcagaacagctctatggagggccaccactgacattcatatccacagagacagcagactctttattctcccgcttgaccctgtgtggcagcatttggcactgttgacttctttttttaa

SEQ ID NO: 438581 - DNA, 507 bp, Homo sapiens
aaaggcccttctgtcaggagctagcactgtcagtggatgtaatactcagtgtccctgatttttgcatccattactttaaacttcccacctgcacaagtgcactcatatcgatagcccatgtgacttatgcttgggttggagaattaacttagttggtggtgaccaaagaaactgagaatctacagggaagggggcagcccagagccagccccaggacccgttcagaaagctgggagctcttctgttgctacaaaagccttttctgaacagtacatttggtttctggcctctcaccaaggtggcaggatgctttctcagggagttatgtctatcactccctttctagggcctcaaagtactgcagtmtggcttctacccccatgaatccatcagaacagctctatggagggccaccactgacattcatatccacagagacagcagactctttattctcccgcttgaccctgtgtggcagcatttggcactgttgacttctttttttaa

SEQ ID NO: 438582 - DNA, 567 bp, Homo sapiens
aaagatagcatagatagcaaagatagaccagtacctagtctaagtgctttgtatatagtagctcccttaatccctcaaacctaatgaggtaggtgttatcttcaatttagagatggagaaactgagacacaggattaatgtaatttacccagagtaacacaactaggtaagtggatgagtcagcttttaaactggtactgtctagcttcaggctctatgtcttaactattgtacttgcctaccccaatatggtatatgataatttccaagttggtgctgagactgtggaagatatatttgtgaatacttccaaccacaccatttggcaaatagacattattcccctatgtgatactgcccttgatgtgcttcagattggataaataagtagatctttttgtcacttttggtacatttaaccataaaaaccattgtcaagtaaagggaataacctcttaaatggcaggtgaaactgaggcattgcttacctagcrtggtaaaatgattcacacgaactttgagacctttagtcacagcaataatagtaacggtagtagtagtagtgct

SEQ ID NO: 438583 - DNA, 451 bp, Homo sapiens
tgggttggaactagtaacttacatatgattccttaggcattctaagtacttactatgcactgtatgtayggactagcagcattgctaaaaatggagaaagctcaggccccacccacactactgaatcagaatctgtgtttgaacaagatgtccaagtaatataagtagacactgaatttcaagaaccactgctgtaatttgttagcacgtatattaaatcacttgaagttatctacctggtattcactggattgctactgccttgattcacaatgcaaagaaatgctttcactaagttatgctatcaaattttaagggtctcatgaagaatatttttgtgttttagtaaagccattgttcaagccatcgatattaggttgtcaaatgtctcttgcattaaaggcccacggaggatattattcttttaaaactgggaaaaaacccacaaaaa

SEQ ID NO: 438584 - DNA, 507 bp, Homo sapiens
tggaaaaatgttcaacatcattagtcattaggattaaaaccaaattaaaaccatgatacattaccactctacacccattagaatgactaaaatataaaatacagagaatacgaagtcttggcaaggatgctgaacaactggaactcwcatgtgttgctgatggaaatgcagaatgacacagctcctctggaaaacaatttggcagtgtttcacaaagttaaacatacacttacctatagccctgtcgtcccacatcggtatttacctgagagaaattaaaacttaaattcacacaaaaacctgtacaggagtgtttataacagctctattcataatcaccaacaattggaaacaatccaaaagtccttcaacagctgaatgaataaacaagcaaactattgattcatgcaacaacatggatgaatttcaaaggcattatatggagtaaaagaagccagtctcaaaggagccagtcgcaaaatgttatgtattctggttctacttata

SEQ ID NO: 438585 - DNA, 507 bp, Homo sapiens
tggaaaaatgttcaacatcattagtcattaggattaaaaccaaattaaaaccatgatacattaccactctacacccattagaatgactaaaatataaaatacagagaatacgaagtcttggcaaggatgctgaacaactggaactctcatgtgttgctgatggaaaygcagaatgacacagctcctctggaaaacaatttggcagtgtttcacaaagttaaacatacacttacctatagccctgtcgtcccacatcggtatttacctgagagaaattaaaacttaaattcacacaaaaacctgtacaggagtgtttataacagctctattcataatcaccaacaattggaaacaatccaaaagtccttcaacagctgaatgaataaacaagcaaactattgattcatgcaacaacatggatgaatttcaaaggcattatatggagtaaaagaagccagtctcaaaggagccagtcgcaaaatgttatgtattctggttctacttata

SEQ ID NO: 438586 - DNA, 507 bp, Homo sapiens
tggaaaaatgttcaacatcattagtcattaggattaaaaccaaattaaaaccatgatacattaccactctacacccattagaatgactaaaatataaaatacagagaatacgaagtcttggcaaggatgctgaacaactggaactctcatgtgttgctgatggaaatgcagaatgacacagmtcctctggaaaacaatttggcagtgtttcacaaagttaaacatacacttacctatagccctgtcgtcccacatcggtatttacctgagagaaattaaaacttaaattcacacaaaaacctgtacaggagtgtttataacagctctattcataatcaccaacaattggaaacaatccaaaagtccttcaacagctgaatgaataaacaagcaaactattgattcatgcaacaacatggatgaatttcaaaggcattatatggagtaaaagaagccagtctcaaaggagccagtcgcaaaatgttatgtattctggttctacttata

SEQ ID NO: 438587 - DNA, 573 bp, Homo sapiens
cagttttcctactaagagtgagcttcatgagggcaagaatcatttcttaaatgcctgccctgccaagtgtgggaatcgacttctctaaatatactactgtattccttatttatttatttatttatttatttgagatggagtttcactcttattgcccaggctggagtgcaatggcatgatcttggctcactgcaatctctgcctcctgggttcaagcaattctcctggctcagcctcctgagtagctgggattacaggcacccaccaccacactcgggtaattttctttctttttttttttttgtatttttagtagagatggagtttcaccatgttggccaggctggtcttgaactcttgaccttaggtgatccacctgcctcaacctcccaaagtactgggattacaggcatgagccactgtgccaagcctattatattcttataatatttaatatctgtatcattaattcttcactttttccaggtacagactcctgtcagctggagttgtacaactgcagtgggatttatttgcatasaatgtacaatagcagctgtcctgcctttgaca

SEQ ID NO: 438588 - DNA, 562 bp, Homo sapiens
tcttttaatcacttttctccctgattgaaaggctaacaatatatgaactagggggctacaaatcttttcttctaaaacagttaagtgcatttttaaatatcctgaattctgcaatatacttgtctgtattcctgatggtatcaaagtgtacctggaatttgttttaatcggacatgagaaaatatgaatatataaatgattgttgtgaaaaaagaaactgatacacacagatccttagaaacaagaggcacagcagtcatgcagaccatgtagggmaacagccaagtgaggaggcaaagtgggggaaaagagcatggcctaaagcttttatggggttctcagggaagaaagagtggggcaagataggtatgttgagtaaatttaggattagatagttagaataatttcaatgcactctggaacttaggggtggtccctagttgtccactacctggttctaagatgatctggggcaaggtgatattgagttggtgtgtaggaatttgataaaggagatgattggggtatgggctctaggttggtttatttgcatatgaaagct

SEQ ID NO: 438589 - DNA, 521 bp, Homo sapiens
cacgtagtcttatgtaaaagatagtatggataagaacatgtatccataggtttacagaatgtttgagctagaagaaattgttggtacatccaaatacttccttacagaaatgaggaaaactgaagaccaagcagattgcctaaggaccagaactacttattggcagagacaatgggatgaaaatctttttctctctcctcctagctttttccatgataccacccacaacgttgcagttcttcccattttgagtattgagatccttggaaagtgtgttaagaggttatgcctgcatatgtgtaattctttttcccccacagactttccaaattcaatacgctgatggaagcaaagtcccyctcatcgctttcctcagagtttaccctggatttaatgctagggattaggagcgcgcctgtgccagcctgctccctgctcggcctgcctgcgctggagggctgctggtgggaggtggatgtcaaaacacagaaggcgcttgttggaaacaataggacttggga

SEQ ID NO: 438590 - DNA, 542 bp, Homo sapiens
actatttcattggtagtgcaagtaccttataacaaaatatttctaactacttcctgccctttgcatcattgctgttattcagttcacttatacgtgagccataaccatcaaatacatggctgctattattactttgaacaaactattatctattagaataaataagaatggaaaaaaagctttyctcttcacttattccttatttaatactcttcctttcttaatgtagatctgagtttctgatgtatatcattctctttctctctgaaaaacttcctttaacatttcattcaagtcaagtttactggcaacacattgtcttaatttttatctaagttttatttctccattgtttttgagggttaatataataaggtatagaattctaggttggtgatttttttctctctctcttaacattttaaatatttaattatattctctttttgcttgcatggtttctgagaagtggaatgtaatttttgtctttgttcctcaataggtaaaaaataatattacttcactttggcttattctaagat

SEQ ID NO: 438591 - DNA, 424 bp, Homo sapiens
ggtttttttccatcataactcattctcttacttttaacctaaaatcaaatttcaaatgtccatagcactgttgagaacctgacaatctcagaaactattgacataaagacacatctctccatctgccagtgtgtgaaacctgatagactacatgtagttaaagaggagagcaggtatttgagcagggcagaaactgacctcaggtaagcaaaaytgtgtatattttaaaaactatacaagctcaaataatctggaagcaattcatgtctaaaagttcataccattcaactgatttcttaaaactccagagatacccatagaaaacattaagagggaatcaacccctcagaagtttagaatttgaaagactgtaggatatcattctatattttaaatgcttgtagacattattgattatagtgta

SEQ ID NO: 438592 - DNA, 588 bp, Homo sapiens
ttttaaatgcttgtagacattattgattatagtgtacattttgcatttagaattgaagcttttttgcttttggattcattattgaggcatgaaaacttgagtgatctctgaggatttcaacatttgcagtgtggtgatgaccgagctgggaaaatctatttgttttgtccctttagttgttaaatatttctcaactcaatgagaattttgaatatatcagaagactgtaaattaaagattacaaattgttgttactgaaccaaaatactaggtgttatgttttttcaggcttattttctcrctctgtttcagattattgttttttgttaaaacgcaaatatagatattattaattgtactctatcaacatagaaaaccaatcaatactaagggtactttgaactctaaccctctatgatgctgcgttgaattccatctataataacctttagagacatggtttcagttttgcatatgtgctttatgaattaggaggtgttgtattgatagaattatagaaatttaaaccaggaagagacttcaggaatcctatactttatggctctcgatactttatggctctcaatc

SEQ ID NO: 438593 - DNA, 520 bp, Homo sapiens
ttgatgcaaaaaataaacagaaackattaaagtgaagtttatcaaattagatgctgagaagaaatatacattctcatcttgcattgcactgaccctttgctaacatgattagttcaaacctgagaataaatggaatgtgtccactatttttctgtttttctatctcaaaagtgaagtgaatagatatctcgatagagctcagctgccattttcattgacttaatgagtttcttaatgcactccattgtgtctcagtattagagaaacatatggcacatttaacttttaagtatgaatttattaaatgttttattgtgtaattttctcctgtgattttatagtttctttaagaaattatatatatgtatatatatatatatatatatataaaatatggtatgttaatatatatgatatatatgccagttgtactatttgcatgaatatatgaatgaaatggctttatcttcttagaaattaccaataaccttatgttctagaggaaaaggctaaataaaca

SEQ ID NO: 438594 - DNA, 595 bp, Homo sapiens
tgataatgctcaaatgcattgaagtatcccaggaaaagagaaatagaattcaaaattccctccaaaactgcatatacactttacctttctcttaccaatagtttagctgaggatattctatgatcttttttcttttcatcttctgtcacttgccttcttggctaatttcttgtgatatattgtgttttttcacactcaattatgtaacacaggtatactttgtttctgactaggttcatgttcgtcttctcaaggttttctataatatggatacatcacagtttgttagtctattcatgtgttgatgattgatgttttccaatttgcagctgtacaaataaaactactttaaaatgtcartgtctttgtatggacatttgattgtttcttttgggtagataactaggaatgtaacggttggatcatatggtagatgatatttaactttttaagaaactgttcatctatttttcaaggtggttgtactattttacatttctaccagcagtgtataaaagtcccagctgcttcatgtccttgtcaatacttggtatgatcaatctttttaattgtagtcattgtgatatgtatacgg

SEQ ID NO: 438595 - DNA, 590 bp, Homo sapiens
tcacaaaagtgctctatgttttatggttttattacttatatttaggtctataaaccattttgagctaatttttatgtggtgagaagtatggatcaaagttttttttatttagttttgttttgcatacagaaatccaattgttctagcaacatttgttgggaaaaaattatcctttcttcactaagttgtctttccacttttgtctggaatgagctgtatgtttatgtgtgtttctctttctaaactctttcttctaccacaatggttgatttttctatgcttacaccaatattccattgttttgattactataactttgtaataattattgaaaaaaggtaatgttaaccttgtgactttattctttttcagagatgttttggccattataggtctttgcatttccatatgaattttatgagtttgaycatgtatattttaaaaatgaaaattttgattgggattgcatcaatttatagatcaatttagtgaggattatcattttaaaaatgttgagtcttctgacccatgaacatggtatatgtctccatctgtttaaatctttaatttctgtcaataaactttttagt

SEQ ID NO: 438596 - DNA, 604 bp, Homo sapiens
cagcgttcctgcggccgcccagcctctttctgcgagcagcggccgcggccgccgccgccgctgccgccacctcgggaagcggaggctgcccgccggctcccgggctggagagcggggtaggcgcggtgggctgcggctacccgcggacgcccaagtgcgcccgctgtcgtaaccatggtgtggtgtcagcgctcaagggccacaagcgcttctgccgctggcgggactgcgcgtgtgccaagtgcaccctgatcgccgagcgccagcgcgtcatggccgcccaggtggcgctgcgcaggcagcaggcgcaggaggagagcgaagcccgggggctacagaggctcctgtgctcggggctctcctggccccccggtggtcgggcatccgggggcggcggcagagccgagaatccacagtccacgggcggccctgcggcgggggctgcgctgggactgggwgccttgagacaggccagtggttccgcgacccccgctttcgaagttttccagcaagattatcctgaggaaaaacaaggtgagttggtctttgatttactctttgctcaaggaatggttgttctggaaagaaactctgaaacaagcca

SEQ ID NO: 438597 - DNA, 606 bp, Homo sapiens
tattccttttattccttattcattttattcagttctctttccatagtgtcattctgaaaaaatatcacttagataacaacaaaacttaggtgacatttaggaagatcccacacaaccaagatagaacagacagtgtgccatattggtgttatgcagacaatttggggtaacaatacactctcatcttctgattcctaaatataattgcattttaatattgcatacctttgtgattctgagatgatataatagtatacttttcactattccagcacctgcatttctgaataatcttttaaatttgagttattcattaaaatgtcttggagtgtataaatattactaattaataggagtgaattaattatattatccagcattatttttgagtgagcagtaccacattctgggaagtcttccctrtatttgatttttttttccccctcttctccagaacaaaaagagagtaaatgtgagtcatgccagaatggacaagaagaactgatctccaaatcccatcagctttacctaggatcatcttctaggtctaatggtgtcattgggaaacaaagtatcgggtcatctatttcagaatactccaacaag

SEQ ID NO: 438598 - DNA, 665 bp, Homo sapiens
agaaagcagatcttgaaaaatttcgatgtactcaatattcatttattataaaaaagttttatattctaagcctaaaccgtagtacaatgtctagcaagtagttgaaattcaattcatatatactgagtaagaaactcttatatataatagatctctttgagactctgataaaactgaagaactctacaaaatggcgtacagacacacagttttgcatacaatttcactgggttcttgaatctcctaaatggtattcaggttagattccttggtgattcttcagttgtttctattgcattaatccacttattgaatgctatttttctgaaaagtgctagatcstgtagaggatactgaatgtaaaatattgtgctctaaaggaagttacattatacaatagagatatggtttaaaaaaaaatcctagagttactgcattatgtatgtggttttataatgatgtgcttgtatctgagaaactgaattgcttttgaccttgggagaacatccattttgggcagtattcgaatttataaaatagttttataatcataaaacttaatttatataatgccttacacattccatactctttataataatttaaggacttaatcttatcaaataggtcatttgtctaacaactcagtagtatatgaggaaatt

SEQ ID NO: 438599 - DNA, 665 bp, Homo sapiens
agaaagcagatcttgaaaaatttcgatgtactcaatattcatttattataaaaaagttttatattctaagcctaaaccgtagtacaatgtctagcaagtagttgaaattcaattcatatatactgagtaagaaactcttatatataatagatctctttgagactctgataaaactgaagaactctacaaaatggcgtacagacacacagttttgcatacaatttcactgggttcttgaatctcctaaatggtattcaggttagattccttggtgattcttcagttgtttctattgcattaatccacttattgaatgctatttttctgaaaagtgctagatcctgtagaggatactgaatgtaaaatattgtgctctaaaggaagttacattatacaatagagatatggtttaaaaaaaaatcctagagttactgcattatgtatgtggttttataatgatgtgcttgtatctgagaaactgaattgcttttgaccttgggagaacatccattttgggcagtattcraatttataaaatagttttataatcataaaacttaatttatataatgccttacacattccatactctttataataatttaaggacttaatcttatcaaataggtcatttgtctaacaactcagtagtatatgaggaaatt

SEQ ID NO: 438600 - DNA, 607 bp, Homo sapiens
ttttgtgcccatttagagaagtctttctgtatactttttctctagaccttgttactgattttccaatcttgtttcttctaacttgcttaccatccagccaaactgttagtcactgctcatgactgattccagatatgtacctctatccatatctcctgccaggcaaaatgaacaatcaggtgtatagcttgaagttcttcccgttggaaaaattttcttcaccactatacttcaaggccacacctgtagtgcctcatygtccaattcagatagtgccagaatagggcagaaccaactgtgaacaaggataaaattgttcttcctcattctgctgtaatagacagctccacataagagagaggaggtggtgtggcaggaatagaagccatgggaatttaagccactttctatgcaacttatttatgacttacttcaacatctttggaggaaaattcatctattgtttccacttgatgaagtactgctacgtaacacttggcgagtcagacaacaccttgttaatatgaatacttatggtcacctgcttatttgatggccaatactaagtgtcaggactctggtgggaacctgtaacaagaaggaagca

SEQ ID NO: 438601 - DNA, 542 bp, Homo sapiens
accttgtaatctgggcctgactcaaaactgagagcttattggattatttggtaaatggtttaaagtaagatgcccaaatcaggtatctattggaaccaaaatacagagctccacctcttagagatagcaggtgtcagatacasaaacatgttttccatctgataagagatgtttcaatatgcaccaggccctaattcctacaaattccacagatattacatgctcgtgaatgtttatagggtttattcttcaagcctctggcatgcatatctctggacaagatatctagagtattttctaccttctgcttattgggttcaatcagaatgatatctatatagtaggcttgcttgatgtcccgtagaatggagaagcaaacaagttcttggtggcctatctatgtagtagacttgcttgatgtcccatagagtggagaagcaaacaacttcctggtggactacactgtagcagagagctggagagttgaaatagtcttaaggaatgctacgtgcattactgcttctagtggttcttactaacaa

SEQ ID NO: 438602 - DNA, 542 bp, Homo sapiens
accttgtaatctgggcctgactcaaaactgagagcttattggattatttggtaaatggtttaaagtaagatgcccaaatcaggtatctattggaaccaaaatacagagctccacctcttagagatagcaggtgtcagatacacaaacatgttttccatctgataagagatgtttcaatatgcaccaggccctaattcctacaaattccacagatattacatgctcgtgaatgtttatagggtttattcttcaagcctctggcatgcatatctctggacaagatatctagagtattttctaccttctgcttattgggttcaatcagaatsatatctatatagtaggcttgcttgatgtcccgtagaatggagaagcaaacaagttcttggtggcctatctatgtagtagacttgcttgatgtcccatagagtggagaagcaaacaacttcctggtggactacactgtagcagagagctggagagttgaaatagtcttaaggaatgctacgtgcattactgcttctagtggttcttactaacaa

SEQ ID NO: 438603 - DNA, 542 bp, Homo sapiens
accttgtaatctgggcctgactcaaaactgagagcttattggattatttggtaaatggtttaaagtaagatgcccaaatcaggtatctattggaaccaaaatacagagctccacctcttagagatagcaggtgtcagatacacaaacatgttttccatctgataagagatgtttcaatatgcaccaggccctaattcctacaaattccacagatattacatgctcgtgaatgtttatagggtttattcttcaagcctctggcatgcatatctctggacaagatatctagagtattttctaccttctgcttattgggttcaatcagaatgatatctatatagtaggcttgcttgatgtcccrtagaatggagaagcaaacaagttcttggtggcctatctatgtagtagacttgcttgatgtcccatagagtggagaagcaaacaacttcctggtggactacactgtagcagagagctggagagttgaaatagtcttaaggaatgctacgtgcattactgcttctagtggttcttactaacaa

SEQ ID NO: 438604 - DNA, 622 bp, Homo sapiens
agtgtggttaaaacacaatgtgataaaagaggttggagagagatcagtatggtgttggtggcarcagtgatcaactgaaatatttaaattagtgtgatgtctcagaagccactggacagtctgagcagggaagtcaaggctgggtttacatttcacagggatttgtctgattactttgtaggaaataactgctctgcagtgcaagagaggaagcagggagaacaattatgctattcaatagtctagctgaggactgatggtggctttgaccaggactggagctgtgaccaggactggaggtgataaaaagtcgttggattaatgcttaaattattgatgaactgtgtgtgaggtatgatggaaatagaagtgccaagagtgatgcttgcatttttttctcctaaaagattgtgtgcgcctgtaatcccaggactttgggagaccaagatcagcagatcacttaaggccaggaatttgagtccagcctgggcaacaaggtgagactccatctctactgaaaatacaaaagttagctgggcttggtggcccacacctgtagtcctggcaacttgtggggctgaggtgggagaatcagttaaacctgggaggtggtaggagtgag

SEQ ID NO: 438605 - DNA, 622 bp, Homo sapiens
agtgtggttaaaacacaatgtgataaaagaggttggagagagatcagtatggtgttggtggcagcagtgatmaactgaaatatttaaattagtgtgatgtctcagaagccactggacagtctgagcagggaagtcaaggctgggtttacatttcacagggatttgtctgattactttgtaggaaataactgctctgcagtgcaagagaggaagcagggagaacaattatgctattcaatagtctagctgaggactgatggtggctttgaccaggactggagctgtgaccaggactggaggtgataaaaagtcgttggattaatgcttaaattattgatgaactgtgtgtgaggtatgatggaaatagaagtgccaagagtgatgcttgcatttttttctcctaaaagattgtgtgcgcctgtaatcccaggactttgggagaccaagatcagcagatcacttaaggccaggaatttgagtccagcctgggcaacaaggtgagactccatctctactgaaaatacaaaagttagctgggcttggtggcccacacctgtagtcctggcaacttgtggggctgaggtgggagaatcagttaaacctgggaggtggtaggagtgag

SEQ ID NO: 438606 - DNA, 579 bp, Homo sapiens
caaatgctctgaaatatgcaaaaatatggtttacattttctaaagcatgcttgagaggttctaacatctattgattttttgaaggtatctgttacacacagatactaaatcctagccctatatattactgtagaaggtatttaaaaaactgatgaaatgacaaacaaaagattgaatcagctatataycaggaactatgctaaattattttacattacttcttaatttcttaattgctcttatttctagtatttctaccaactctgtatagcctcccaattattcttcaaagtgacccaacctatcatgtctttaattatcattacatgcttagtttttaaagttgctttttcctgttcttggtcatcacttgtgctagtgttctttgctttcaaactgtcttcagaataagtcaacagatattgtggcagcttctcaaatacagtaagtcccaagctaagtaggtcattcctaagtgttctcaatcctccagtaaaagtgttctttttctcagtttctctacttttgtctctgatttttaaaatttttccttgtgtgtcagtctggaatattcaaagt

SEQ ID NO: 438607 - DNA, 564 bp, Homo sapiens
tacagtgtcttttaaagccctggtggttgattattttaattaaaatttaaaaagtgatcatctgtcctgtttgtaatcataatcaagttgttgcatgagcttttcaaaatgaaaattttacaactacatataattttaatttttcagtttttttaaaactcagacttggatgtacataaaaagtgaaggcttgtagcagatattaatatggccattaccaatgagaaatagagaagttgagtgatggtccttgaataagagcatggtaagtcagggtaaagcatagatctatgatggattttttttggcttttagactagcattkttttccccctctgatctgtactgctgcttttcttttccctttttcatgtacatgaaggtcatttgctgtgatgctaaatattgcacattctgtcctggcagagttggcacccaaatcaaaacataaataaatacagtaaaaagaaaaatgaagggctgtacgtgtctggaagtgtcttcagtgaatctgaaatttcaaggatgacttggaggtcccagtgactcatgaaacaggaatgt

SEQ ID NO: 438608 - DNA, 647 bp, Homo sapiens
cagtgcactaaacaaaaatacaaccaaacaccctcacagagtccacttttctaccctgctaccttcaccagaataggtgctagtattcaggctgaaagacctgaagatggatcacatcacaggactctttgcagacatttcccagtaccagtctggagcccagtaattccactagatggctagacccagaagagcaaaaacaatcactgcagttaggctctcaggaagccccattcctaggggaagagggagaataccacatcaagggagcatcccatggggcaaaataatctgaacagcagccctggaatcccagatcttccctctgacatagtctactcaaatgagaaggaaccagaaaacaattctggtaatatgacaaaacaaggtttcttcacacccccaaaagatcacatcagctcaccagcaatgaatcsaaaccaagatgaaatccctgaattgccagaaaaagaattcaaaaggttgattattaagctaattaaaaaggtaccagagaaaggtgaagcccaaattaaaaaaatcaagaacatgatacaggatatgaaaggaaaaattttcagttaaattgatagcattaataaaacacagtcacaacctctggaaatcaaggacacacttagagaaat

SEQ ID NO: 438609 - DNA, 647 bp, Homo sapiens
cagtgcactaaacaaaaatacaaccaaacaccctcacagagtccacttttctaccctgctaccttcaccagaataggtgctagtattcaggctgaaagacctgaagatggatcacatcacaggactctttgcagacatttcccagtaccagtctggagcccagtaattccactagatggctagacccagaagagcaaaaacaatcactgcagttaggctctcaggaagccccattcctaggggaagagggagaataccacatcaagggagcatcccatggggcaaaataatctgaacagcagccctggaatcccagatcttccctctgacatagtctactcaaatgagaaggaaccagaaaacaattctggtaatatgacaaaacaaggtttcttcacacccccaaaagatcacatcagctcaccagcaatgaatccaaaccaagatgaaatcyctgaattgccagaaaaagaattcaaaaggttgattattaagctaattaaaaaggtaccagagaaaggtgaagcccaaattaaaaaaatcaagaacatgatacaggatatgaaaggaaaaattttcagttaaattgatagcattaataaaacacagtcacaacctctggaaatcaaggacacacttagagaaat

SEQ ID NO: 438610 - DNA, 365 bp, Homo sapiens
tctggttcaccaaatagagataacagtttcatccagcccaaagccttagttagtcaagcctttatccctccctgttgtctgctgatcccactttatccttccttttgctttgcagctgctcagtgaaggagagacttcgttgaagagtattgaatttggtgatgtgtaagagacctgggaagtagagtgccaatggaagtgaatggtttggaagactaaaaagggctctagatgctccttttctatacagcgtcctgataatcttaacagattcamcaacctcccaagagaaataattcctgtagagtctatagcatatcattaaataagagaaacaactagttttcaaaagttcaatggtgttc

SEQ ID NO: 438611 - DNA, 514 bp, Homo sapiens
tccctctcctttctctttcactgctaccctcaaccagactgttgttagttttctctttcctgttaccggcacaagtcttaattctggagatcaggactaattgtattattctatagctcacaaactttccatggtgtgaggtaactataaggaaggaaaggagaaaaaggacaggaaaagaaggtaaagaaagaaggagaagagtaggaggagaaggaagagctggaatggaagagaatagaaggctaagaaattttgctatmtacaagaattgaacataaagtattgacggcaattcaaatcaacgcataaattatatttcatgtaatagttgtgaatacaatgctggaaaatatttaagttgaatttttactttccaacaaataccaaaataactttcagattaattcaaatgttaaatgtaaaaaagttcttaaaaatacttgagaaatgtctgaaataattatgtaatatcaaaatgaaaaaggtttaagtgaaaataataaaggaaagg

SEQ ID NO: 438612 - DNA, 514 bp, Homo sapiens
tccctctcctttctctttcactgctaccctcaaccagactgttgttagttttctctttcctgttaccggcacaagtcttaattctggagatcaggactaattgtattattctatagctcacaaactttccatggtgtgaggtaactataaggaaggaaaggagaaaaaggacaggaaaagaaggtaaagaaagaaggagaagagtaggaggagaaggaagagctggaatggaagagaatagaaggctaagaaattttgctatatacaagaattgaacataaagtattgacggcaattcaaatcaacgcataaattatatttcatgtaatagttktgaatacaatgctggaaaatatttaagttgaatttttactttccaacaaataccaaaataactttcagattaattcaaatgttaaatgtaaaaaagttcttaaaaatacttgagaaatgtctgaaataattatgtaatatcaaaatgaaaaaggtttaagtgaaaataataaaggaaagg

SEQ ID NO: 438613 - DNA, 576 bp, Homo sapiens
atctccaatttgtaaacgtggaaatttacttctaggatagattccaaggatcttgctagaaaaacattaacaaacaagcacatcgaataatccacctgactctgttctgagaaaagaaactttattattatgcaggaaaggaagcatggccctgtgtatcttctatggatccacaggagctagatcataacatgtcttagactactttatctaaattaagttatagaacatagatgccacatttataatgtctggataggctatggtttctctatggctacagactaagatgcctgcagagtaataaactgacttaagatatcaacacctaacaagggtcaccaccaaaaaatgaagctgaatattgataaaaatagccttaaggaaaacaaaatttaaagatggaacatttgaaaactaaatgtgccagttaatgatgatgccaattaatcaagtktcttaagaggaaggatgttcttatttaaaataacatactaaggttgtaaatatcatttggggaataaccacacgatattttaagaacataagctatccaaaacagaatcctgttgttct

SEQ ID NO: 438614 - DNA, 592 bp, Homo sapiens
tggaatcattccccttgagaatcagaagaagacaaggatgcccacttttaccactcctattcaacttagtattggaagtcctagccagatcaatcaggaaagagaaataaagaaatggcatccaaataaaaaaaacaatgagtcaaactgtctctcttcactgacaatatgtatattttatacctagaaaaccctaaatactgacaaaaggctcctagaactggtcatcaactttagtaatgtttcaggatacaaaatcaatataccaatatcagtagcattaatatacaccaataaagttcaggctgagagtcaaatccagaacacaatctcatttacaatacccacaaagaaaatgaaatgcctcgtaatacaactaaccaaaaaggtgaaggatctctgcmagaagaactacaaaacactgttgaaagaaatcataaaggacacaaataaatggaaaaacattccatactcatagattggaaaaatcaatatgattgaaatggccacactgcccaaagcaatttacagattcagtgctattcctatcaaactaccaatgtcattcttcatagaattagaaaaaagctat

SEQ ID NO: 438615 - DNA, 558 bp, Homo sapiens
aatcacagaaatcctggatttaattgctgaatgataatctgtttacaagaggcctcagatcacattgacactatttacaattcactttgtttatacagaaggtattacccagcatcctcatatttattgatcagtataaacagtggtactggtatgtgaccaagaatgattaaaatgagcttttggttttgatcctttctgggtggtcttattgctttcttcttgaataacgatatatgcataatttgtaatgagtgtgtgctttgcataatgataagagtaaatgaggtacatttcagaattttgagtcgaaacaagaaatctgttttggattttgttttgaagttcccatttagatccaaagaattcatatttacaaactagttctaggaattagttcttaaattttatttgaactataacggtgccatgaatgttacacattttaccctagattgtaaatactttctttcccttcaagtaagtggatggacatatatcaacaccctaaatgcctaacctgctgatttatgaaytataaatcataaatttaagaat

SEQ ID NO: 438616 - DNA, 622 bp, Homo sapiens
gtccttcagaggtttctttaatcagagcatatggtaacttgcatgcttactatagaaagcatatttaaacatagtaaatgttgcttcagtaaatttaaagcctggcacaaatgtacaaaaacaccaataccctatgmctactctttacattagtgaaatgctttagagttcacaaagcacactatgtaaacctgcgttgtgcaacactcccgtatcattgcatccttttgaaatatgagtaaactgaagctcaaattaaaagacctgccagtggttacacgtctcagaaatggcatgtcagcattcaaacagcagtataactccaaatctaacatttttctaagttaagaaaaaaaattcacttggcagaaaaatttatctgacattaaatgttctatcagtgcaaagtatggcattgatgggccttagaaggtgtaacatctcttcagaagagaagaaagaatcttctggtctagaggaattaaaaatcttaacaaaatacattattatttttgctaaaagagaaatgattacagtaagtaactttaaaaatggtatcgtgatcaagttgatagcttacctaatgcaaagctgtattcctgggatagagttccttatgcca

SEQ ID NO: 438617 - DNA, 535 bp, Homo sapiens
caaggttcttaattttgaatgtgctctgtacaatggtgttccaccaaagtgaagtagagaaacaattttcaacaactttcttttgattatatttcattgtgacttggtcataccaaccatgtcatccaatattaccttcaaaccaagccacatttcctgctaatgttctacttgttagacccagttttgcagattgaaggatgcttagtatacaaatttcccttgcttgttcagaatattgacttactagcattttgtcttytcgattaatttaaaaggctttggagaggtttacccattggcactcagggactaacaattgcattagaggctactcttgccaattctgatgctcaagaagaaaatataaagcaatggtgcttttctgagcaatgccaactctggaagaacaggataggggaacattcatgattagagagtgaagctcagtgcatatggattgtaggaaactcctgaggggagacccagcaccttgacccagcaggcttgaatgcagaaaattcatttacaaaaa

SEQ ID NO: 438618 - DNA, 581 bp, Homo sapiens
atatcctctgagtttttacgggtttatttgtttaatgctcaatttattaaactcataaggctaataaacaaaactctgaaagccaattttttcaggagcatttgaacatggattactaatctgattaatttctttttttttttttttttgagatggagtctcactctgttgcccaggctggagtgcagtggtaygatctcggctcactgcaagctccgcctcctgggttcacgctgttctcctgcctcagcctcccgagtagctgggactataggcacccgccaccacgcccggctaattttttgtattttttagtagagacggggtttcaccgtgttagccaggatggtctcgacttaaatcactggcagctgcagagacacacagggtatggctgattctttcacctccagtaacattggcttcctaatgtcctgggagcactccagcttctccaagcaggtcttcatgcccagatcttaaggtccagactgcatgcaccgggcttggaatcccagccctatcacttcctagcactggaatcttgcacaagtcccttctcttgagcctctgtccacatc

SEQ ID NO: 438619 - DNA, 605 bp, Homo sapiens
ccaggtttctggaaaagttgccaggaagggggtctcctcgctgtctgttgggtgacctcacccctagttgtccaccaatcctccacccaggagccctgccctcagcctcctcggaaggcttcatttctctcctaccccctccacttctaaccatggccactgtggttcctgtcctgcctcatggcctggggagtacctgggggccatcctgggggaagggcagaggagcggactgcccagatcctgaggaactttgggctctgatgacctccttttctgccctgccctagagacaactgacccmagccctcatcccatggacacataccttaacacatgtgcacacatgaggtgaccagaatggcacctacttgcacagagaaacatactgccatatacagacgtacacacaggcacctggggtcacacacagtgtgcacagacatacccagaggagcacaaaagcccaggtatacactcacacacgtgaatgtgagaggctggacaaacaagacgcgtcaaaacgaagaccccccaggcccacacggatgcccaagcaggctgcaggtgcccagggacacacccagacacacgtgaacacacac

SEQ ID NO: 438620 - DNA, 578 bp, Homo sapiens
cacatatacacaaatatagcccctcaaagagacttagggacttattggttctaggcatttaagaaaatgtcgactgggcacggtgcttacktctgtaatcccagcaatttgggaggccgaggcaggtggatcacgcaatcaggagatcgagaccatcctggccaacatggcgaaaccccatctctactaaaaatacaaaagttacctgggcatgctggcgcgtgcctgtagtcccaggtacttgggaggctgaggcaggaggttcacttgaacccgggaggcagaggttacagtgaaccaagatcgtgcactgcactccagtctggcgacagagcgagattccatctcaaaaagaaaagaaaagaaaagaaaagaaaagaaaatgtctgtccagctgttacctggcccactaaggtaacaaatcagagatttcagtagccaacacatgacaaggaatatgtcacagtagccacacatgacaaagaatatagaccttgcagaatttgttcagaaaagtcactaaacaagcaacaaaaagctaccacaaatacaaaccttggggggcagaaaggagagga

SEQ ID NO: 438621 - DNA, 578 bp, Homo sapiens
cacatatacacaaatatagcccctcaaagagacttagggacttattggttctaggcatttaagaaaatgtcgactgggcacggtgcttacgyctgtaatcccagcaatttgggaggccgaggcaggtggatcacgcaatcaggagatcgagaccatcctggccaacatggcgaaaccccatctctactaaaaatacaaaagttacctgggcatgctggcgcgtgcctgtagtcccaggtacttgggaggctgaggcaggaggttcacttgaacccgggaggcagaggttacagtgaaccaagatcgtgcactgcactccagtctggcgacagagcgagattccatctcaaaaagaaaagaaaagaaaagaaaagaaaagaaaatgtctgtccagctgttacctggcccactaaggtaacaaatcagagatttcagtagccaacacatgacaaggaatatgtcacagtagccacacatgacaaagaatatagaccttgcagaatttgttcagaaaagtcactaaacaagcaacaaaaagctaccacaaatacaaaccttggggggcagaaaggagagga

SEQ ID NO: 438622 - DNA, 646 bp, Homo sapiens
ttgtttttgtttttgtttttggtaatcaaataggcactcgaaaaccataggatttcttttaattaagaaatacttctattaataaatggatctaattcatcattgggtttactattatctgatagtagaaaattaatacaaaagaaaatggaggggaggcagcgggagggaaakcatcaggaaaaatagctaatgcatgcttggattaatacttaggtgaagggttggtaggtgcagcaaaccaccatggcacacgtttacctatgtaatgaacctacacatcctgcacatgtaacccagaacttaaaataatagaaaagaccttggaaaatcaatttctctagttgacatcttttttttatacaaagaaactgaagcaatatgtatcattagcagcaagaatattgctcaatagctatttttatctaatattccctggaatctagtgtttgatgcactccactgctatgactttcaatactgatgattgtgatggtggtggtggtagtgatggtagtgactgagaggaaaaaggatttcaggaatcaaatcccaagaaaatagtgtgtttcccaagaagtactctaagcagtttaatacctttgactttgacctgaaaatggctgcattcagaacagggaagaag

SEQ ID NO: 438623 - DNA, 421 bp, Homo sapiens
ttgtgttaaatataccataaacttacattttaactatkttaagcgtacaattcaatggcattacgtacattcacaaagttgtgtgaccatcaccactatccattttcagaactttttcatcatcccaaacaaaaactctatatccattaagtaactctccatttttcccagcccctggtaaccatcataatgacttcttgaaaatatcaagtcagcttacatccctgatctaataaaccatgttgacaatcaccttcattacttgtgttctaatgtcactccttctcaaccctggctgcatagtgtaatcacccgctaaggtgaatgctcagggcaccacggctaaacaattcaatcaggattgctgtccctgggatctaagtatttgcagcttttaaatgctccccaagtgattctcatg

SEQ ID NO: 438624 - DNA, 551 bp, Homo sapiens
tttgcagtttacagctggtctagccaatctgatcgatgggggaagacagagcagagaaagggaaggaccaccctttccacagggcagattccttgacactaacctgccagcagcgtaggtccagaaagtgggaggaagaagagggcatgccatkaatacagtggccctacccacagtaaaatgctgccctttaatttccagtttagagttattgattaaccttttctctttcagtaaggagtgaatgaggggtgggtgagaagagaaaaagcaccctccctagcactcccccaataagtccaattatctatgggctaaagctgcagtgaaaggagaatcctcccctaaaatgtgctgagtacatagaaagaactccataggcatttgttgagtaaatacatacatacatacataaattctgacgtttgaatctgtttctccagctcagccacctgtcacaaacttcagatgtgtatatttccacttctcccatgctttctttctgtaaaccaaaaataaaattctaagccccctaattgaccaatagaccc

SEQ ID NO: 438625 - DNA, 463 bp, Homo sapiens
gaaatgaggcaaccaggcccagtaacatagttctaatgggaagctcattaaaatagaaggatartacttttttgcaccatgtctcccatagaacagaattaaaatgatgggttgttttccaacagagactcagttaataactgtggattaccttcctaaaatagagggtcttattgaatattgcaagtagctaacaaaagaccagactgagaaccatctgcagtgatgtctttatagacatttctcatcagagtacatggaagttgtggtagatactacatattgattcactcagcacacactcagaccctctctaatgtgtgctctcatgtactaaaaagctagtatttgcatccttcagatcctcttgtagacatacctgtgagagacctatattgcataacacaatgggaggtggcagctatctggggagatcagatcttctgacaagaagaggcatttg

SEQ ID NO: 438626 - DNA, 536 bp, Homo sapiens
cccaggctggagtgcagtggtgcgatcttggctcactgcaacttctgcttcctgggttcaagcaattttcctgcctcagcctccagagtagctaggattacaggcgcctgccacaacgccyggctaattttaatatttttttattagagatgggcttcgccatgttggccaggctagtcttgaactcctggccacaagtgatccacccacctcagcctcccaaagtgctgggattacaggcatgagccaccgcaccccgccttattctattaattatacgtaaagtaaatttgtcacaaatgttggctttctctcttagactagacttcttcatgttttggactgtgtacttcagctcatcttaggtgaaatttttttctctttcatcctttccagccagtctccaggtttggggttgtttctacctggccgttcagagccctcaacttctacttctagtggtggctcacaactacctctctcccccacatgctgtgtggtattgcaggtattgatgatctgccaaggtgtggggc

SEQ ID NO: 438627 - DNA, 587 bp, Homo sapiens
cgcctggctaattttaatatttttttattagagatgggcttcgccatgttggccaggctagtcttgaactcctggccacaagtgatccacccacctcagcctcccaaagtgctgggattacaggcatgagccaccrcaccccgccttattctattaattatacgtaaagtaaatttgtcacaaatgttggctttctctcttagactagacttcttcatgttttggactgtgtacttcagctcatcttaggtgaaatttttttctctttcatcctttccagccagtctccaggtttggggttgtttctacctggccgttcagagccctcaacttctacttctagtggtggctcacaactacctctctcccccacatgctgtgtggtattgcaggtattgatgatctgccaaggtgtggggcttgcttaagattttggttgtgtgcttatacagtttctttctttcctggttacaaaacttcacagaagtgatagccctaaggagttttccagacttgtttcttaaccaggggagcttcattcagtcccctagtttcaagaaactcctgctccctttcagacataaagc

SEQ ID NO: 438628 - DNA, 536 bp, Homo sapiens
cccaggctggagtgcagtggtgcgatcttggctcactgcaacttctgcttcctgggttcaagcaattttcctgcctcagcctccagagtagctaggattacaggcgcctgccacaacgcctggctaattttaatatttttttattagagatgggcttcgccatgttggccaggctagtcttgaactcctggccacaagtgatccacccacctcagcctcccaaagtgctgggattacaggcatgagccaccgcaccccgccttattctattaattataygtaaagtaaatttgtcacaaatgttggctttctctcttagactagacttcttcatgttttggactgtgtacttcagctcatcttaggtgaaatttttttctctttcatcctttccagccagtctccaggtttggggttgtttctacctggccgttcagagccctcaacttctacttctagtggtggctcacaactacctctctcccccacatgctgtgtggtattgcaggtattgatgatctgccaaggtgtggggc

SEQ ID NO: 438629 - DNA, 558 bp, Homo sapiens
gcttttctaagttactgatgctttgtgtgtcagcttgacattgcccaaacttatggtgtgagtcctacaaatattaaaaccacaataaaaagatcacgaaaaaaacaactaatttgctttaggtaatccaaccctgcagtgtttatgtgttccattcttgagttgttcaaagmaactgattacatctttttcccacatccagttctctagtcctcggctaaacttaaaacctggccagtagcaaggaaagataaaggcaccctctgtttttttcaatgttttgttttgaaaccctgatggaaaagctttatttagatctggctagcctttatcctgcaaaacttcccaaacaaaggcttcatggcttggagtttttccaggtcctgttgattcctgtaaatcaagttaacccaaggcaagtttgggctttgttcaaatccctactaccctccacttccatgcctgtttcccatgccagctgtttagactacagcattctgatatctgcaacccaccgttaggttaggctatgttcttgcccagcaaaagagaatccca

SEQ ID NO: 438630 - DNA, 558 bp, Homo sapiens
gcttttctaagttactgatgctttgtgtgtcagcttgacattgcccaaacttatggtgtgagtcctacaaatattaaaaccacaataaaaagatcacgaaaaaaacaactaatttgctttaggtaatccaaccctgcagtgtttatgtgttccattcttgagttgttcaaagcaactgattacatctttttcccacatccagttctctagtcctckgctaaacttaaaacctggccagtagcaaggaaagataaaggcaccctctgtttttttcaatgttttgttttgaaaccctgatggaaaagctttatttagatctggctagcctttatcctgcaaaacttcccaaacaaaggcttcatggcttggagtttttccaggtcctgttgattcctgtaaatcaagttaacccaaggcaagtttgggctttgttcaaatccctactaccctccacttccatgcctgtttcccatgccagctgtttagactacagcattctgatatctgcaacccaccgttaggttaggctatgttcttgcccagcaaaagagaatccca

SEQ ID NO: 438631 - DNA, 556 bp, Homo sapiens
atgtttaatagcccaaatgctctctgcctaaaccatttgtttctcttcctagaattcctatggaaattttcttatgaaacagatctaagagtcagtatgtacaaagagcttccttttgaacaattgtcttccactcccctattcccagccagatcggatgaaagcaaaaaatcttctcagattccacaagcaaaattgggcctcataaaggcttataagagctaaaaaaaagtgggagccattcttcaattggatcaaatgtctgatctaaatgaaagcaaattcctaggattcctcttcagctggcatcattcagtatagccagttctcaaagtattgctacaacatccgccaacagggattgtcaccactcataaacatctgtggatttaactcaccccagagctctgaagactgggaaatccagscatttgttatttctgcagaacaaactaaccttgacccaataagggacaaaaacaaggcaaagcaaaattaaatgacaagacctaggtgtgactgatggaaggcagaatatagaaacggggagaggatt

SEQ ID NO: 438632 - DNA, 556 bp, Homo sapiens
atgtttaatagcccaaatgctctctgcctaaaccatttgtttctcttcctagaattcctatggaaattttcttatgaaacagatctaagagtcagtatgtacaaagagcttccttttgaacaattgtcttccactcccctattcccagccagatcggatgaaagcaaaaaatcttctcagattccacaagcaaaattgggcctcataaaggcttataagagctaaaaaaaagtgggagccattcttcaattggatcaaatgtctgatctaaatgaaagcaaattcctaggattcctcttcagctggcatcattcagtatagccagttctcaaagtattgctacaacatccgccaacagggattgtcaccactcataaacatctgtggatttaactcaccccagagctctgaagactgggaaatccagccatttgttatttctgcagaacaaactaaccttgacccaataagggrcaaaaacaaggcaaagcaaaattaaatgacaagacctaggtgtgactgatggaaggcagaatatagaaacggggagaggatt

SEQ ID NO: 438633 - DNA, 532 bp, Homo sapiens
tggtcatacttgttacaaatatcttgttcaagtttttggtgagtctcttgactttgcttatggtatcttttgtcacacaaaaaattccattgcactctggtatcaaagtttgtgtttccctaaaattcctatgttgaaatctagtcactaatgccatgctgttaggagctggggcctttggaaggtaaggacaaagcaacaaggctccatctatgaaccaggaaatgagtcccaccagacatcaaatctgccagcaccttaatttcagactttccagtctccagaactgtgagaaataaatttctgttgcttgttagctacctagtatacagtaatttttatagtagcctgaatggactacaacaaaattggtaccaagaagtggggtgcttttataacaaatacctaaaaatgttgaagtagctcttggacctggctgatagaggctggaagtgagattcacgstagaaaaagcctatgttggcatgaatggaccataaagggtaattctggtgagggctcagaagagctg

SEQ ID NO: 438634 - DNA, 606 bp, Homo sapiens
tggacctggctgatagaggctggaagtgagattcacgctagaaaaagcctatgttggcatgaatggaccataaagggtaattctggtgagggctcagaagagctgtagagaaaggctgaatcttcttagagaatacctacatgatcatgaacagaatggtaaaggctattctgataaggtctcagatggagatgaggaatacgctattggaaactggaagaaaggtgatccttgtcataaagtggcaaataacttgtctgaattatattattggcctagtgtttttgtggaaggtagaacttatgagtaatgaaatggcatatttggttgaataaacttctaaacaaagtgttgaaggtctggcttagattctcttgaatgtttatagtaaaacgtgagaaaggggaaatgaataaargatggatttttaatcaataaggaagcagaacttaaagatttggaaaattctcagcctgtgtatactgtaaaaagtgagaaatgtgttgggagctaacaccaagggtgtggccaaatgaccctttgataaggaaattagtatggattggccaggtgttactcatcaagacaatagaagaatgaccctga

SEQ ID NO: 438635 - DNA, 565 bp, Homo sapiens
aatgatagagaatcctaaaggcaaccagaggaataaaagacattaatggctgaggaacaaagataaaaaagaaaacaagccaggmatggtggctcaagccagtaatcccagcactttgggaggccgaggcgggtggatcacaaggtcaggagatcaagaccatcctggctaatgtggtgaaaccccatctctactaaaaatacaaaaaaattagccaggcgtggtggcaggcgcctgtagtcccagctactctggaggctgaggcaggagaatggcgtgaacccaggaggcagagctcacagtgagccaagatcgcaccactgcactccagcctaggcgacagagcaagactccatcttaaaaaaaaaaaaaagaaaacagacatcttattggaaacaatgcaagttgagaagacagtgatgtcacacttcaaaatactaaaaaaaaacactatcaacctagaattttataatcagtgaaaatagctttcaaaaattaaggctaaatattttttcacactaaaagaatgttacagcttttcttttacagcagatttgcactataa

SEQ ID NO: 438636 - DNA, 592 bp, Homo sapiens
ctacaaacagggtgcagtgtgtactgctcggatgatggatgcaccaaaatctcacaaaccaccactaaataacttactcatgtaatcaaactccacctgtaccccagtaatctatgggaaaaaaaaatacaagaaggttggagggattgttttaatatcataacaagaatattaacagagataaagaagatcactttttaaatttaaattttaagttcaggggtatatatgcaagtttcttatataggtaaacttgtgtcatgggggtttgttgtacgtattatttcatcacccaagtattaagcctaacacccattacttatgttttctgatcctctccctcctcccacactccaccctcaggcccagtgtctgttgttccactctatgtgtccatgtgtttgttgttccattctatgtgtctatgtattctcatcatttagcttccacttaaagtgaaaacatgtggtatttggttttctgttcctgcattagtatgcttagaataatggccttcagctccatccatgttgctgaaagggacgtgatcttgttctttctggcagcgcrgtgttccatggtgtatatgtac

SEQ ID NO: 438637 - DNA, 595 bp, Homo sapiens
tataaacatttagaattgttatgttgcactgacccttttattatgtttaaatgatctttttattgttggctgcatgtatgtcttccttttaaaagtgtctcttcatgttgttttcccacttttcaataggtttctgggaaagaggtggtgtttgtttacacgaacaggttctttagtggtgatttctgagatttgggtgcacctgtaacctgagcagtgtacactgtacccaatttgtagtcttttatccctcacccccatcccaccctttcccaagcccccaaagtccactgtatcattcttacgcctttgcrtcctcatagcttagctcccacttatgaatgagaaacaggtgatctttggttttccgttcctgagttacttcacttagaataatggtctccagtttcacccaggttgctgtaaatgccattgttttgtttctttttatgcctgactagtattccatggtgtgtgtgtctatatgtaaatatgtgtgtgtgtttgcaaatatgtttgtgtatatatatacacacacacacatatatatacatacatatatatacacacaaaaacatatatatacacacacaca

SEQ ID NO: 438638 - DNA, 595 bp, Homo sapiens
tataaacatttagaattgttatgttgcactgacccttttattatgtttaaatgatctttttattgttggctgcatgtatgtcttccttttaaaagtgtctcttcatgttgttttcccacttttcaataggtttctgggaaagaggtggtgtttgtttacacgaacaggttctttagtggtgatttctgagatttgggtgcacctgtaacctgagcagtgtacactgtacccaatttgtagtcttttatccctcacccccatcccaccctttcccaagcccccaaagtccactgtatcattcttacgcctttgcgtcctcatagcttagctcccacttatgaatgagaaacaggtgatctttggttttccgttcctgagttacttcacttagaataatggtctccartttcacccaggttgctgtaaatgccattgttttgtttctttttatgcctgactagtattccatggtgtgtgtgtctatatgtaaatatgtgtgtgtgtttgcaaatatgtttgtgtatatatatacacacacacacatatatatacatacatatatatacacacaaaaacatatatatacacacacaca

SEQ ID NO: 438639 - DNA, 525 bp, Homo sapiens
ggtggcacctgcctgtagtcccagctactcaggaggctgaggcaggagaattgcttcaagctaggatgcagaggctgtggtgagccaagattgcgctactgcactccagcctgggcaacacagcgaaactccatctcaatagtaataataataataataataataataatwataataataataatgatgatgataataattctgcaaggcagctttacctcctttccaaattctggatggtgtcttattttgtcttcatgacccctgtgcattataacagagaaagcatggcatgaaagaagtaaacaacttccctctgctttgggatttcttctcattttctctaatgctatgatgatcaattttcatacatggggaaacctgagaggaatatattcttttaagtcaaagatgacagatttgtggtgttagcacagttacttgcctcccctgtgtccatggcaggtggcactgatggatcatggctgagtagtcatctgtagtttgcagtcaatataaaacatc

SEQ ID NO: 438640 - DNA, 579 bp, Homo sapiens
cacttcttgtcagttacaccaaggatattgttcaggggtgagtaggacctccctgctcaaatctgccatacccagggaattctctatatcccaatggctctactaagcccctatgtgaggccaagcctgctaggtaaggaaccctctcctggtgcaagtggagggaagcatgggctccctggggcatagcactgcccaggcagctggaagaygacctaggctcaggaaggatgccagcctggacaatgggatagagctggcctgggatggtgacacggtgattccatactcaggaggctggacagctgcctctgctgagactctttaaactccaccctggtgaaacccgcagccgcatgtgggagagctggggagggtagcatggcatgcaagatgctcttcctcctcctgtttttgtttcttctgtccccagcatgccattgacctggcacatgctggggaataaagagcagtcttgtccacagagccaggtggaagcaacggggccaactctttgagcagcaagcacagcccaccaccttcagtgcaagacgccgcctcctgctgcacacacacacc

SEQ ID NO: 438641 - DNA, 488 bp, Homo sapiens
tacttcaaatctgttaatattttatcaaggatttttacatttatggttatgagaaatattggtctatagtttttttttcttgtaatattttggggataagaataatgacagcctcatgtcttgagagaggttttgatgtgcacctctaactctatagatttagaattagtttcaagcaataaacccatcctggtgttccccaaagtccttttaccctggacaatgatcagccctccctgtgagcctgagattcattgatatagacctgaatgtgtgcagaggagtattacagaaaagataaaggtagagaccaaaaactgattcccagccctggtaaaatttatcaaataactaaatggagaagtcaatagggcytaaataaaggtaaaaataacctctgctgaaaagttttctcatttgttatcattcagtctgagctgaaatgtatcgggggaaatgggtaatatttgtatatgtctgcactcctc

SEQ ID NO: 438642 - DNA, 492 bp, Homo sapiens
ggaggatccaatctggatactacagagtctgctagtaaaagagaagccaaataatgtctgctgctgagaaatgctagagaacagtattttcctctagggcagcccatatgacttctagaatttcattcctcccccctacccctaaatgtaaaataattctacttccaaaaagtgaggctataaaaacttctgcttccatccaagatggaataatagggtctwtgtttaacttcaaacaaccaaaaaaaaaaaaaaaaggaccatctataggtaacaatggtttgtaagacactgcatatctggcaatgaagaagagtaatccttgagacacaggaaacaaatgaagtgagtactatgattgccccagcacagtttcttgagaaagtttgcaggccatggtttaagggctgggagaagggggcccatatggagcccagtgaagtccttgagctgaggagaggagaggagaggagaggttgtgggagaccatgg

SEQ ID NO: 438643 - DNA, 492 bp, Homo sapiens
ggaggatccaatctggatactacagagtctgctagtaaaagagaagccaaataatgtctgctgctgagaaatgctagagaacagtattttcctctagggcagcccatatgacttctagaatttcattcctcccccctacccctaaatgtaaaataattctacttccaaaaagtgaggctataaaaacttctgcttccatccaagatggaataatagggtctatgtttaacttcaaacaaccaaaaaaaaaaaaaaaaggaccatctataggtaacaatggtttgtaagacactgcatatctggcaatgaagaagagtaatmcttgagacacaggaaacaaatgaagtgagtactatgattgccccagcacagtttcttgagaaagtttgcaggccatggtttaagggctgggagaagggggcccatatggagcccagtgaagtccttgagctgaggagaggagaggagaggagaggttgtgggagaccatgg

SEQ ID NO: 438644 - DNA, 514 bp, Homo sapiens
tagggtctatgtttaacttcaaacaaccaaaaaaaaaaaaaaaaggaccatctataggtaacaatggtttgtaagacactgcatatctggcaatgaagaagagtaatccttgagacacaggaaacaaatgaagtgagtactatgattgccccagcacagtttcttgagaaagtttgcaggccatggtttaagggctgggagaaggggrcccatatggagcccagtgaagtccttgagctgaggagaggagaggagaggagaggttgtgggagaccatggaagttcacactggcagaatagagtaccagaaaggaaagagcttcaaagagaaccctggagctctgtagcgatttccccttgagaattgaactgaatactgatcagcccatgcatacgaaaaaactaaccatagctgggaagaatgatttcaaatgattacaggtaacaatgtctggtgataagacaatgcaagaaactagaatgaaaaaccagattaatggggtatttggtatat

SEQ ID NO: 438645 - DNA, 593 bp, Homo sapiens
aattctatatccagcagaactttatttcaaaagtgaaggagaaattaaaacattcccagatgaacaaaagctgagagttcattatcacaagacttgccttgggataaatgccaaagggaatcctgcaggctgaaatgaaagaacacaacacaataacttgaagtgatgaaaagaaataactatcacagcaaaggcaaatcatgggcaattataaaagctagtattattgaagcaatgctgtgtaactctactctttgttttctacatgatttaagagactaatatatatttttaaatagtctaaaagctaatattattaagtttataactttatattatctaacttatgaaactaatgcatttaaaattcgrctaatttatgtttctgaacacacaatgtataaagatgtaattgtataaaatcaacaactgagggggtgagaacagagctgttaaaaaagaaaagttttcatatgctattgaagttaaaccggtataaattaaaattaaagtattacaaccttaggattttaagtgtaatcctcatggcaatcataaagaaaatggttaaacaacatacaaaaaagaaaata

SEQ ID NO: 438646 - DNA, 596 bp, Homo sapiens
tatgctatccacataaggatatccatatcgctgaaagtgataaaatagaaaagaatattgtatgcaaatagtaaccaaaagaaagcaaggatggctatactaatatcaggcaaaatatactttaaatcaaaaaaagacaggataaggaaagatattgtatataatatttaatccagcaagaaaatataacatatttcataatagatataacawtatatctattataaacatttatgcacctaataactgaccatcaaatatgtgaagcaaaaattgacattatggagattaaacaacacacacttagaaaacgaatgaatcaaagaagaaatcatgagggaaattagaaaatacttagtgatgaacaaaaataagactgcaacataccaatacttacaggaggcagcaaaagcagtgctaagggaaaaatttatagctataaatgcttacattaaaaaagccagaaatatctcaaatcaataatctatctttacaatgaaagcacctagggaaaggacaacaaactaaacccaaaactagcagaagaaagtaaataattaagattagagcagagatagagtggaaaaaaagagaga

SEQ ID NO: 438647 - DNA, 524 bp, Homo sapiens
gctgcttggctctaaaccatgttcccatgagaacggggcacagaactaggttgcatgtgtggcagagtgaccgaagctgtcaacagataattccatggatgttttctttacctcaaaaagaatctgcaggctcagaatgatctggagattcaccatgtggtgccccattaatccagaacacccaggagtccccatggcaggaatattatgctatcactgttgctaactatgcacaggaaaagtatcccatgggatgccgcttccagttttactaargtataattaacatactgaaaactgtgtatatatggaatgtacagtttcataaattttgccattttaaatacttgtgacggcatcactactatcaagataacgaacatatgtgtcaccccctaaagtttcttcatccctctttgcgatcccctcccttgtgcctttctccccatctttatctccaagcatgcgcagatctgcttctgtcactatgcattagtttgcattttctagaatttcatacaaat

SEQ ID NO: 438648 - DNA, 456 bp, Homo sapiens
gtccattttcaaaatggactcccacagctaccggggccccagccttgaagatttctgagctcccagaactgggctaactctgagggaggtgaagtgtccctagtcaggtcccagggggtgagatgagcttcaacaatcttactttgacaataatcctaaagtagtagaccttgatttaacctatagcttctgagacctgtggggcataccctgagcattcctgaaattgagacaaataactgattatttccacctttcatgtgasgtccaagaacagtttacccttcacaaaatcaagtgagttacttcttagcatcttagcaccttctagttttcttagtggttaataagagctaatatttattgaatgcttactaagtaagcactaagcattgttcttaatatttgcatatataaatgcattcaatattcaatataataagtagataattaaat

SEQ ID NO: 438649 - DNA, 564 bp, Homo sapiens
tgaatcatgggggcagatttcccccttgcacttctcataatgaatgagttctgagatctggttgttcaaaagtgtgtagcacttcctccttctctctctcctgccaccatgtgaagacgtgcttgcttccccttcacccttccaccataactgtacgattcctgagacctccccagccatgcctcctgtacagcctgtggaactgtgagtcaattaaaccccttttctttataaattaaccagtctcaggtagttctttatagcagtgtgagaacagacgaatacagtataattcagccacatttatcaatgattccttgacacatgcggtttaccattgacttactgacttctacctggaaagaagcaacaaaggcttctgccagagagggcagtgttctgctaggtaaacatccatagaccaagttttcaatgttgggatccttcttacagtttaaaactcatggatctccaaggcarttctcaacacaacccctccaccccaaatcccccaacccatagagcaagagtgtcatttccttcctagttgcttttggcttgact

SEQ ID NO: 438650 - DNA, 460 bp, Homo sapiens
ggacatagggaggggaacatcacacaccggggcttgttggggtgtgcggggaaaggggagagagagcatcaggacaaagagctaattcatgcaaggcttacaacctagatgacgggttgatgggtgcagcaaaccaccatggcacacgtatacttatgtaacaaacctgcacgttctgcacatatatcccagaacttaaagtataataataataaaacacacacacacacacacacacacacacacaccatttatctaacaaacccagtcttagatatgtatccatgaggaataaatttgtgtttatataaaaactgyagatgaatatttttcttaacagcatgattcacaaatgccaaaaacaatgcaaatgcccttcaacacatgaatggattaacagaccgtgatacatgatataatggaataatacttagcaataaaaaaaggtgttctgggtagt

SEQ ID NO: 438651 - DNA, 525 bp, Homo sapiens
gctattctctaatttggtcacatttacatctgtttttatcccttttacaaattgattccttgaagcaaatattagtacccacagagagtctcatcagcgctgagaatagaaggacttcaaatagcttcattctacttgttacacttctacaaatgtagtttttggtttcacagcatttatggtgtttccatcataaagttggctcaaacagatcttaaaattgataaaaatattcactaatttttataactgctgctaatatattcatactgtaatttatttgacccaagtccaggatcttagagtcaacattgttaaatttcatcttattagatwcagcttagcacataagagtctctttgaatgctgaactgccctaatgcagattccttattatcatcctctgtatcattccaattgtgaatttgtactgcacttcccctaaatcattaaactgttcaatgacacaagtgagtaatgaagcaggcctgagaataaagtcatgcgtctgataattagatatgg

SEQ ID NO: 438652 - DNA, 534 bp, Homo sapiens
tctctccccttggatatatgctggacttagtgtctcacttcgaaagaatagatatggctgaagttaacagtgtgtgagtagataattgatatggtttggctctgtgtccccacacacatctcatgttgaattgtaattcccaatgttgagggaggtgattggatcatasaggtggatctcccccttgctgttttcatgatagtgagtgagttctcatgagacctggttgtttaaaagtgtgtagcactttcccctttgctctctgtctctcctgctctgccatggtaagatgtgcttgcctccccttcaccttccaccatgattgtaagtttcctaaggcctcccagccatgcttcctgtacaggctgtggaactgtgagtcaatttaacctcttttcttcataaattatccagtctcaggtagttctttctagtagtgtgagaacacactaatacatggtattgtggcttcctctattctcagattagcagtgctggagaaagctgccatttatcaactcatggaaaggccta

SEQ ID NO: 438653 - DNA, 576 bp, Homo sapiens
ctggtaaacacttcacaactgaagaaaatacatgtaatgttttctaatggaattttaaaagtttattgtgaaaaatatgtgtatgtataaaatcatcctcaggataagattggaggaaattacttaaattatttttagaagcatttgatatacctgtttgctagagatactttcctctaagaaacaagcaaatggaatgtttattcctgattcttttctatgggagtggacaatgaraattactactttcaatgctagcttgtattttgtagtaacaaactagtatttttaaataattaagaaatataaagcttgagataattaaatacattttcatttatgccctagaataatataacaccgtgttcctaaaagatgtaaaagcaaactttatgacattaacttcaatagagaaatcatcgttaattttccatcctcttcgacctaagtgtttaaaataatttgagtagttcttttgattctacttaatattttccaatttctctaaagttgtggtcaaactttattgtactatagaatgactcaggatgcttgttaaaataaaaattttagggc

SEQ ID NO: 438654 - DNA, 576 bp, Homo sapiens
ctggtaaacacttcacaactgaagaaaatacatgtaatgttttctaatggaattttaaaagtttattgtgaaaaatatgtgtatgtataaaatcatcctcaggataagattggaggaaattacttaaattatttttagaagcatttgatatacctgtttgctagagatactttcctctaagaaacaagcaaatggaatgtttattcctgattcttttctatgggagtggacaatgaaaattactactttcaatgctagcttgtattttgtagtaacaaactagtatttttaaataattaagaaatataaagcttgagataattaaatacattttcatttatgccctagaataatataacaccgtgttcctaaaagatgtaaaagcaaactttatgacattaacttcaatagagaaatcatcgttaattttccatcctcttcgacctmagtgtttaaaataatttgagtagttcttttgattctacttaatattttccaatttctctaaagttgtggtcaaactttattgtactatagaatgactcaggatgcttgttaaaataaaaattttagggc

SEQ ID NO: 438655 - DNA, 402 bp, Homo sapiens
tggtagaatttagctgtaaaaccatacagcttttggcttttctttgacaggaaactttttttgattcaatcattttatttgttattgatctattcagatttctattatttaatgattcaggcttggtagattgtatatgtctaggttgcatgtggatgtgtcttgatatgttgtatgtgtaygcatgtagaaatttatacatttcttctaggttaaccaaattattggtgtatgattcttcatagttgtctcacaactttttatttctgtggtatcaattgttaggtctcctctttcatttatgattttatttatttcattctcctttttaaatgtagctaaatattattatcttttcaaaaaatcaactttttcattgattttttctgactattttatttt

SEQ ID NO: 438656 - DNA, 589 bp, Homo sapiens
ggatcacaggcgcacaccaccacttccggctgatttttttgtattttttggtagagacggggtttcacygtgttgcccaagctggtctcaaactcctgagctcaagcaatccacctgcctcagcctcccaaattgctgggattacaggcatgagccactgcacccggccaatttatttttaataatcacaaatataagtgttataattcacatgtgaagattcagtcatcaattactcagtctgtgtttttattttttcagttgtcatggtttgggcttttctgtctgtaccctcacacaaccaccagcactttgaaagtatagctagtacaaattaaagcacaacacaaattaaagttacaaaaaagaagagaattgtgcagagtccattgtcctttctctaattaattcaaatcatgatcagcttgtcattttctttcacttttcctgatttgaaatcaaattttcctccccttactgactcagacatatactggtctcctttctctcccaaaaaagagttttaaaatcctgaaaagtgtccttgttatatttcccttttaattgcaggaaaaaaataatgccccaa

SEQ ID NO: 438657 - DNA, 559 bp, Homo sapiens
tttttcattgcatgaagaagccctaacattcaaagtttcctttcccacttagtagctttacttctttctaaaaggacactgctagcacaattcaataatttggacaaaagtgaagaatgatgactttagattttgtttaattttagttgtaaggaagtgaaaacacacatgatcctacatttatatttattgcaattattttattaggtgcattattaaagctagattgcaagctcttcaaataatttaaccrtctgaaggtaaaggaaaaaaaaataccatatccttggcaacttcctcagtcatctaaaatcgcatgcaaaatcttttaaaatcttcagagaaaattgattttcctcccttcactataccagctgcctcttttaatgttctctttcacaggttcacaggcatttatcccagggtacaacacacaacacaactgcaaatttctgtcttttaaatggcatattagaaatctgtgagcaaagtcacttttttggcccagcactggcactgcatcaactttccaagctctactgactcaattttaattgct

SEQ ID NO: 438658 - DNA, 539 bp, Homo sapiens
tttttatatgtaaaaacacaaatgcataaaatataataatatacaaaatattgcattttgtgtgtataatatacaacatattgtgtttgtatgtacaatatacaaaaatacaaataattttaaacagattttggtttagacatatttttatagaacactctttaatatttgtttattctatttctcactcatgctgcttgtttttaagggccmcccatggactgacagtacatgtttttctcaccctgagatcaatatgagatctcagtctgagatctaggctatctgaacgctatcagtcacgaagagaaaggaagaaatctggtaaattgtacactgtttcttaaagcttctgattagagatcatataaatcaatacaactctcatttaattgtcctaagagggttccatgggtgtatttagtatcaaaactatgaagtacagtcttactgttagtctcaaatactctcatttcattgtttcctatttttgttaggtttaacatttattctgagtttccaaccttacattcaatttc

SEQ ID NO: 438659 - DNA, 565 bp, Homo sapiens
gcaatgcatccctttgtacatgtgtctttatgggtgattgtgaagacatctcggggtatagcttttgakctgtattccttttccaaaaagtttatgtatcctaaatacgattttataccaactaattgctctctggaatgtctacatcagtctatattacaatacagtatacaaaggctcttatatccttatatctcactattgttttaaaatttgtatatctctagttactaatctaggtaaacatttcttcttaaacttcagatggttattagcttttatttcttttctgtaaaattcctcttcatatccttttctatgagaagccatacttttaaattattgatataattgatatgcatacatttcttatatatttcttacttattctcaactaacccctaattgattttatatattgtaaaagtcagattttcccaatctgtcattggtttggtttgttaactttaacagttgttcttttgttcagaaaaggcattgattttgtaagtttattttgtatccagcaatctttatgcactctatgcactcttttttttttttt

SEQ ID NO: 438660 - DNA, 559 bp, Homo sapiens
tgcttatctttgaaagtctgctattattgtgaaattgatttttctatgggatcagatggactgatgctttgtggtgggtgtgtaatcactgcagaagaaaatttgggaactgaacctggaatgttagtccrtgccaattatttgaaaattagcatccaaaaagcaataaaatttgttgagaaaaattgaaagttattacactacctagttttactaggaaaagattctggcattgggccaatgatgactgataattattcatagcactattgaagagattgatgtattttactaggaatttttcaggtgtgagtgatagaaattcagctctcttaagcaaaaagataacttattgattcctatgactgggtactctaggagtggtgcttgctttagtcatagccagatccagaagattaaaaataaatcttgtgttgctgcaaagtttaggtattttcggaccattcacaatatggacagacatagcccctagttagaaatctagcagaacaagaatttttgtctcctgatactcatacatgaaatattccttgtcacc

SEQ ID NO: 438661 - DNA, 410 bp, Homo sapiens
ttttaattgcttatctttgaaagtctgctattattgtgaaattgatttttctatgggatcagatggactgatgctttgtggtgggtgtgtaatcactgcagaagaaaatttgggaactgaacctggaatgttagtccatgccaattatttgaaaattagcatccaaaaagcaataaaatttgttgagaaaaattgaaagttattacactacctagttttactaggaaaagattctggcattgggccaatgatgactgataattattcatagcactattgaagagattgatgtattttactaggaatttttcaggtgtgagygatagaaattcagctctcttaagcaaaaagataacttattgattcctatgactgggtactctaggagtggtgcttgctttagtcatagc

SEQ ID NO: 438662 - DNA, 609 bp, Homo sapiens
atcgaatcaatcatcttatgaaatgaaactcgggcagctttctactgcctaacgctgtcagccttctgcttttgggcatctgtgtggtgtgtttttaggctctgtgctcttagatggtggaaaatagatccatgtgcattcattagttcatttgggcaacagatatgtattaaacacctattatatgccaggcacggttctaggcactgaggactcagtgacattatggagtttacattctaatggggaaaacaagaaaattcttttttaacaacaaggaatgtcacatcatgtgccactgtgcatatggaagtgctccttggggatgtcagtgacactttaaatacttagcaagaatgcatgttgcaataacatatgaaagatccagccaataatggaaaaggagagtgctaagaatgatgataactgatgagttgattcccagggtgctctcccacagattctgatctaggatcaacctccctacattaagcatagcaaagagtgtcttaaggggtttgcacaattaaggtattacaaataaatataaagcaatgagttcygtgtgggtcaacgctgttctgcaaaatggggtatatctcttaggat

SEQ ID NO: 438663 - DNA, 597 bp, Homo sapiens
ccagtcatttcaaaatagtagtattttcttctttgcattctactttaatctatttagtctttatttgaagaaatgtacctgtaacagttcagttaaaaaaggaaataactggtgaaattcctttttttttccattttggcacagatcaagtttgattttgcgcaacaaataaaactagcaaatcatgtgatagataatactataaaacttaaagctctttccctagaatcaaataaagtggcatagcttcgcgaagagtggttgagggaaaagatagtctcataaattgataatgggatttccagtattaccctccattacattggctgaaatatgaagttttggataattacaaaatttgtattcttcattaatggacacacacycttgattgtccatgatttttgacccatgtggttccactgctaatgttaccatatagttctttaatatgcaaggcctgcattcaaaaagataattaatacagaaaatatatgactatctaggagaaatcagtgaacaatgacataacgctatgaaaagtattttctgtatatttacttattgaacatttgctagtgaactcagaaatgccaa

SEQ ID NO: 438664 - DNA, 625 bp, Homo sapiens
ttggctcacgtcaacctctgtctcccgggttcaagtgattctcctgcctcagtctcctgtgaagctggaattacaggtgtgtgccgccacatccagctatttttttaaacttttagtagagacagcatttcatcatgttggccaactcctggcctcaagtgatctgcgcgccttggccctcgaaagtgctgggattaatgtgtgagccatcctgctcggccaaaaattatttttcttagtcaacgataatttcgaacctgaagtgagtttttcatggtttaggtttgtttctaaaaatcgttcttcccactaaaaggcactggaatttcatagagaaattattgaaacttagtctgtagtaggaaaagtcaaggaaagtatgggctcttatgttatgccaaagcttaatgggggcacatgaaatatacacagaagccatcttcttagtgagatgtgaaacaaatttcagcatcccaaagaagtacaatggcaattaattgtaatgcatttgstactgcaatgatcagtttaaaagggatttaaaagcaaccctgctctacaatgttaattgtcactcttgacactttgttatggcaactctagtagatgaatataaaatttatac

SEQ ID NO: 438665 - DNA, 625 bp, Homo sapiens
ttggctcacgtcaacctctgtctcccgggttcaagtgattctcctgcctcagtctcctgtgaagctggaattacaggtgtgtgccgccacatccagctatttttttaaacttttagtagagacagcatttcatcatgttggccaactcctggcctcaagtgatctgcgcgccttggccctcgaaagtgctgggattaatgtgtgagccatcctgctcggccaaaaattatttttcttagtcaacgataatttcgaacctgaagtgagtttttcatggtttaggtttgtttctaaaaatcgttcttcccactaaaaggcactggaatttcatagagaaattattgaaacttagtctgtagtaggaaaagtcaaggaaagtatgggctcttatgttatgccaaagcttaatgggggcacatgaaatatacacagaagccatcttcttagtgagatgtgaaacaaatttcagcatcccaaagaagtacaatggcaattaattgtaatgcatttggtactgyaatgatcagtttaaaagggatttaaaagcaaccctgctctacaatgttaattgtcactcttgacactttgttatggcaactctagtagatgaatataaaatttatac

SEQ ID NO: 438666 - DNA, 530 bp, Homo sapiens
tattgggaatttggactttaacaaatgaattttggcgggatgcarttgagccaatgctactgaatacacaaagatgtttctctctaaccaagacgttgaaagtaacccaatgagttactttctcctttgagaaatataggtgcgacccaaatttacaagacattttgctcaagtttactcttacaaagagttcattggaggagacaagttttcaactggaatatcagataaggaagaatttgtcatcattcttttctatagtgcttttaagaaagtaagtaagaaagtatagtgcatatgcttttctaattccagtcatttcagaatggtactacttttcttcttttcattctactttaatctatttaatctttatttgaaaaaaatgtacctgtatcagttcagttaacaaaggaaataacaggagaatttccttttttttccattttagcacagatcaagtttgattttgcacaacaaataaaactagcaaatcatgtgatagataatactgtaaaacctaaagctct

SEQ ID NO: 438667 - DNA, 607 bp, Homo sapiens
gagtatcaataaagggaacgaaaggcttccgcaactactggaagaactgagggaacaaaggtcataaatgctatttccagaaaattccgaagttcaggaatcttagtgatgccccactaattatccattgtactgcagtggatgtttcttaggaaaacttccagaagcaaggaaagctactgttggtgatctcagctgctaccagcagctgctaccagataatgccttgyctttcacttggtccaagttttcttcaggtacatctcatgggggaatctaagggagaagcaagctaaaatacaaatacagctacaaatacaaatacaagctaaaaataaaatagcttgtaaaatacaaatacaaattaaaataaaaattcctaatacagattgtattaggaataaatagaaaatcaaaacaaacaaataatgagtaagttgattaaatcagtaataaaattcacctatcaaaaaagcccaacgcctgttatcttcactgctgaattcaaccaaacagtataaaaaactggtagtattttttttcaaactatgcataaaataaagatgagcagacatacacaaaccaatagatgtaacatatcacaata

SEQ ID NO: 438668 - DNA, 607 bp, Homo sapiens
gagtatcaataaagggaacgaaaggcttccgcaactactggaagaactgagggaacaaaggtcataaatgctatttccagaaaattccgaagttcaggaatcttagtgatgccccactaattatccattgtactgcagtggatgtttcttaggaaaacttccagaagcaaggaaagctactgttggtgatctcagctgctaccagcagctgctaccagataatgccttgcctttcacttggtccaagttttcttyaggtacatctcatgggggaatctaagggagaagcaagctaaaatacaaatacagctacaaatacaaatacaagctaaaaataaaatagcttgtaaaatacaaatacaaattaaaataaaaattcctaatacagattgtattaggaataaatagaaaatcaaaacaaacaaataatgagtaagttgattaaatcagtaataaaattcacctatcaaaaaagcccaacgcctgttatcttcactgctgaattcaaccaaacagtataaaaaactggtagtattttttttcaaactatgcataaaataaagatgagcagacatacacaaaccaatagatgtaacatatcacaata

SEQ ID NO: 438669 - DNA, 607 bp, Homo sapiens
gagtatcaataaagggaacgaaaggcttccgcaactactggaagaactgagggaacaaaggtcataaatgctatttccagaaaattccgaagttcaggaatcttagtgatgccccactaattatccattgtactgcagtggatgtttcttaggaaaacttccagaagcaaggaaagctactgttggtgatctcagctgctaccagcagctgctaccagataatgccttgcctttcacttggtccaagttttcttcaggtacatctcatgggggaatctaagggagaagcaagctaaaatacaaatacagctacaaatacaaatacaagctaaaaataaaatagcttgtaaaatacaaatacaaattaaaataaaaattcctaatacagattgtattaggaataaatagaaaatcaaaacaaacaaataatgagtaagttgattaaatcagtaataaaattcacctatcaaaaaagcccaacgcctgttatcttcactgctgaattcaaccaaacagtataaaaaactggtagtattttttttcaaactatgcataaaataaagatgrgcagacatacacaaaccaatagatgtaacatatcacaata

SEQ ID NO: 438670 - DNA, 604 bp, Homo sapiens
cataaaacctactaagattgaagcagaaagaaatccaaaacctgaacagatcaattattaatacaagtaatgagatcaaagccagaataaaaagtytcatagtaaagaaaagctcaggacatattggcttcactgttgaattctccctaacatttaaagaagaactagtaccaattctactctaactattttgaaaaatagaggaggaggaggagcaaatacttccaatgtgaggctaatattaccctgaaaagaaaatcagacaaagacacattaaaaaaagaatactacaggtcaatatctctgacaaatgtaattgtaaaaattctcaacaaaagaatagcaaacaaatttaacagcatactagaaagatcattcaacatgaccaaatgggatttatccttgagatgcaaagatggctcaacatacacaactcaatcaatgtaatacatcataccaacacaatgaaggatataaaccacatgattatttcaattgattccaaaaaggcatttgataaaattcaaaatccttcatgataaaacactacagaaaactgaagatagaaggaacacacccaaacataatcaaagctgcatttgac

SEQ ID NO: 438671 - DNA, 474 bp, Homo sapiens
aggatcaatattgttataatgtccatactacccaaggcaatctacagattcaagaaatcactatgaaaataccagggacattcttcacagtaatagagaaaaacaatcctaaawtttttatggtaccacaaaagctaaaggtacccaaaatagctaaagctatcctaagcaataaaaacaaaactgaaggaataacattacctgacttcaaattatactacagagttgtagtaactaaaacagcatagtactggcataaaaacagacatacagtctaatggaacagaatagagaacacagaaacaaatttacacatctacagtgaatgcatttttgacaaagggatgttgtggaaaagacagtctcttcaattaacggttctaggaaaactggattttcatatgcagaagaatgaaactagacctctatgtttcaccatatccaaaaatcaaatcaaatggataaagacttaag

SEQ ID NO: 438672 - DNA, 637 bp, Homo sapiens
cctaacttaatgtcctccctgtttattctatgctcttgaaaatgcaggatttccttttttcaaagctgaatagtattacattgtgtatatagaccacattttctttatctattcatctgtaatggatacttaarttgattccatattttggctattataaataatgctgtaatgaagatgggaatgcagataactctttgacatactgattcctttttctttgtacatatattcagtagtaggattactggattgattatatgttctgcttttcatttttgacaaactctatagtattttccataatggctatactaatatacatttccatcaacaatgtgcaagtgtgtccttttctccacatgtttgataacacttgatgtttttttgtattgttgataataatacttgttggccattggtacgtcttcttttgagaaatgtccattcaggtacattgcctatttttaaattggttaattcctttttattagccattgagttgagttccttatatatttcgaatattaacgctttatcagatatatggcttgcaaatatttttccaactcatgagttgtctcttcactctgggcattgtttactttgctgtgcagaagctttttagtttgatgta

SEQ ID NO: 438673 - DNA, 637 bp, Homo sapiens
cctaacttaatgtcctccctgtttattctatgctcttgaaaatgcaggatttccttttttcaaagctgaatagtattacattgtgtatatagaccacattttctttatctattcatctgtaatggatacttaaattgattccatattttggctattataaataatgctgtaatgaagatgggaatgcagataactctttgacatactgattcctttttctttgtacatatattcagtagtaggattactggattgattatatgttctgcttttcatttttgacaaactctatagtatyttccataatggctatactaatatacatttccatcaacaatgtgcaagtgtgtccttttctccacatgtttgataacacttgatgtttttttgtattgttgataataatacttgttggccattggtacgtcttcttttgagaaatgtccattcaggtacattgcctatttttaaattggttaattcctttttattagccattgagttgagttccttatatatttcgaatattaacgctttatcagatatatggcttgcaaatatttttccaactcatgagttgtctcttcactctgggcattgtttactttgctgtgcagaagctttttagtttgatgta

SEQ ID NO: 438674 - DNA, 637 bp, Homo sapiens
cctaacttaatgtcctccctgtttattctatgctcttgaaaatgcaggatttccttttttcaaagctgaatagtattacattgtgtatatagaccacattttctttatctattcatctgtaatggatacttaaattgattccatattttggctattataaataatgctgtaatgaagatgggaatgcagataactctttgacatactgattcctttttctttgtacatatattcagtagtaggattactggattgattatatgttctgcttttcatttttgacaaactctatagtattttccataatggctatactaatatacatttccatcaacaatgtgcaagtgtgtccttttctccacatgtttgataacacttgatgtttttttgtattgttgataataatacttgttggccattggtacgtcttcttttgagaaatgtccattcaggtacattgcctatttttaaattggttaattcctttttattagccattgagttgagttccttatatatttygaatattaacgctttatcagatatatggcttgcaaatatttttccaactcatgagttgtctcttcactctgggcattgtttactttgctgtgcagaagctttttagtttgatgta

SEQ ID NO: 438675 - DNA, 555 bp, Homo sapiens
tactaatatacatttccatcaacaatgtgcaagtgtgtccttttctccacatgtttgataacacttgatgtttttttgtattgttgataataatacttgttggccattggtacgtcttcttttgagaaatgtccattcaggtacattgcctatttttaaattggttaattcctttttattagccattgagttgagttccttatatatttcgaatattaacgctttatcagatatatggcttgcaaatatttttccaactcatgagttgtctcttcactctgggcattgtttactttgctgtgcagaagctttttagtttgatgtaatacaatgtgtgtatttttccttttgttgcctatgcttggggaaccaatccaagaaatcatagcccagaccaatgtcatgtatttttttctcttttattttcctctagcagttttatagtttcaagctttacatgwcagtcttacatatattctgagtagttttatgtagtgtgaaacagcggatcaattacattcttctatgtgtgaatatccgattttcccagcaaga

SEQ ID NO: 438676 - DNA, 585 bp, Homo sapiens
gaggaacttgttggaaactggagtaaaggtcaytcctgctatgcaaagagactggtggcatattgccctgccttagagatctgtggaactttgaacttgagagagatgatttagggtatctggcagaataaacttctaagtggcaaagagctcaagaggaagcatagcataaaagtttggaaaatgtgcagcttgtaaatgcaatagaaaataaaacttcatttttctggggagaaattcaagcctgctgcagaaatttgcaaaaataataaggagccaaagttaatcaccaagacaatggggaatatatctccggggcatgtcagaggccttcatgacacccccacccatcacaggcccagaagcccaggagggaaaaatggtttgatggacctggatcaggtccctgctgctctatgcagcctcaggactgtatcccagctgcttcagctccagctgtggctaaaaggggccaacaaacagcttggtccattgcctcagaggttgaaaccccaagccttggtggattacatgtagtcttgggcctgtgggtgcacacaagtcaagaattgaggtttgggaacc

SEQ ID NO: 438677 - DNA, 609 bp, Homo sapiens
actataaacagaaattgagtattcatattggcctaaccttcacactgaggtggagaactccattttcccatgtagcatgttgtttcattttcttcagatatcctgaaaccaccctcacaagtataactcaatttagtcccatgtgcataamtttcttgtgaagacctggatgaattaatggttccgtgttctatctgaggtggttgtgaacatggaattttttctaaatgaagaatgaaaatcaaagggttaaaaacaaataaaatacttaaattgaaatataaaactaaatactatttcggattttaaagtgagtataatttgaacaaataaaattatttaaaaacaaaaacatattagaaactcgcaaagatatattcctccaccatatctatgttaccatcctcttgttcaataatcatcttcattcatgtcttgttcatcacaaggattaaaatatgcatgaatggaaatgttatctgacatttacataatattccaaagattttggctgtattttgttcaaaaaactgaaagagtggtgattgattaatgtgcctaggtcctaatttattttgtcaggataaagtaatagacacagagaaagaa

SEQ ID NO: 438678 - DNA, 382 bp, Homo sapiens
gtgtaccacaatcattattatttaatttaaagtatttgctgatagtaaacaattaagaaagagattatttaacattttgtgacatggcaaataaatttgaagaacattgtracccagtatagcctaattctacatttagtgtgtatgcatatttttatttgtaaatagaaccgttagcaaggtagactatgtgctgagcaattaaaaaactgagtgtttcaaaatattgaaattttcccagtattctttcacaagagaattaaattagaaaccagcaaaaatcacttatctagaaaaaaacaaatattttgaaattaaacaataaacttccatataattaatcatcaacagacaaaccacaagacaaatgagaaaatatttc

SEQ ID NO: 438679 - DNA, 659 bp, Homo sapiens
cacacaattagaaaaggaatctcaaaaacccagtttctccttgtggagaagtttttggatctcacataaagcatcctgtgttttggcctttaattcactaattttggaagcagaggagattaaacacatgagagtctctctagatcacaggaaaaatggtggtatgatacaagtgctgaagagcttccagaaacttcattccttaatagcagttcagagaaggggctgaaaaaacagtcccctgtttctcccgagaagttttatgatatattcttcctgtggctacttagaggtctgaattctaaaaaacttgcagtctggattctaatgaacttgcatcaggcacttctctagccggttcccgtggctcaccccagtgatacatccaggtacattaatcactcttagaacaagtttgtccacacaaacttgagtgccctaacttttacaactttcattcagggactgtattctaaarctcttagttctgggagtagagggcacaaaatatatccagagtctatctagaccactgaaaaaagaaatggcgttttatatgggtgtgtaagcacttccaggagcttcattgcccaagagcagtgcagagaaaaggtttttaaaatgcagctcccctgtttatcctcaaaaaggtttgtgtc

SEQ ID NO: 438680 - DNA, 438 bp, Homo sapiens
agagaccgttattagcaattatatgccaacaaattggataacctagaagaaatggataaatttctagacacacagcctacgacgattaattcagaggaaatagaaaatctgaacagagtaatcatgaggcaacagattaagtcagtaataaaatgtttcccatcaaagaaaatccaagacctgatggcttcattgctgaattataacaacattttagaaaggactaataccaattcttctaaaacgactccaaaaatttgatgaggagatcatttttctaactcattctagtggcccaacattactctggaacmaaaaccagacaaggacacaacacaaaaagaaaactacaggcaaaatcccctgatgaacataggtacaaaacccctcaacactatactaggaaaacaaatcctacagcacattaaaaagatcatt

SEQ ID NO: 438681 - DNA, 659 bp, Homo sapiens
agcccccaaagcagtacaaaatatcaatgaaaatagtttttttttagataatcaaaaattgacaaagctttaaccagaataactaaaaaagagagatacggcttaaagaaacacaagatcggagatgaaaagggtgatattacaactgatatcaaaaaaatacaaagtataatgagagaccgttattagcaattatatgccaacaaattggataacctagaagaaatggataaatttctagacacacagcctacgacgattaattcagaggaaatagaaaatctgaacagagtaatcatgaggcaacagattaagtcagtaataaaatgtttcccatcaaagaaaatccaagacctgatggcttcattgctgaattataacaacattttagaaaggactaataccaattcttctaaaacgactccaaaaatttgatgaggagatcatttttctaactcattctagtggcccaacattactctggaaccaaaaccagacaaggacacaacrcaaaaagaaaactacaggcaaaatcccctgatgaacataggtacaaaacccctcaacactatactaggaaaacaaatcctacagcacattaaaaagatcattcactatgatcaaatgggtttaatccaagaaatgtaaaggtcgtttaa

SEQ ID NO: 438682 - DNA, 557 bp, Homo sapiens
agtttttaaaagacacacatacctattacttttccaaatgagaaatagaatacatttctgaaaacaaaataagagcttacttgagcagttcacttctggatcccatcttccatttatgcagactgtgtgtatccatccttcttttcctctacatctgtaccttatgttagaattatgatcgaattccttcttgttttttaaatgttcctcaagtataattaaatttgatgatttgcacttcttaagtttatctattgctataaaataaatatatttttatgaaaattcaaatgataggaatcaaaccaactattacataaaaatagttataaagtaaatagtattagcatggtaaaattatgacttaatcattataaatttcaccaaccaagttattcctgatcacattgcatcaaaatgctattatgtcaaaatataagccctrtattctgtcgctgaaatgttagagatatacctatcagaagacattttattctttgggaaatacaaaatatcattggatatttcattggataaataagtatattggacattag

SEQ ID NO: 438683 - DNA, 541 bp, Homo sapiens
taaaactcaaaaccctaagtcctagtactagatatgtgaaatgttaatatgaatttttaactctgagatacatactccttatttagcttaagtgctccataataacaattctgtggaaacctttccacaaagaagagacctcctaggacacttgaaatatactcagatgtctgtcaatccacatgcagttttctgttacatggctgagagaagaatatttgaaaagaatactaagctggtatttcttcgtttaatgtttggaggcctgtactatactagcaaattcctagttatgtgttcaaatgatcctaagtctttgtacaatttgcaatagaaagacattttctacatcagcttctactgctatgtccrccactccaactttctctcctttaggttttcatttcatgtctggtgattggaaagactactgaagcaatatattcacaattttgtgttcttttttgaagaagacccctcaaaattgtaaaagcttctggcttcataaaacctaaatttacctatcatcacagaaaagaaa

SEQ ID NO: 438684 - DNA, 490 bp, Homo sapiens
acaggtatacattattttttaaagaaaatcataacagaattttgtaaattaagagtccaaactaattcgtagttgagacatatgtaaaaaggagaaaaagactgaaaatataaattcctatgttatacaagacattttctctttaataataagaaaatcttaaaagaataattaataaaaatttagtataaaattagcttttttatgaggactaacattttttgtaaactagacctcatattaagcacagacattaaaaaaygaaaacagtatacatgaataccttattcacttcacttaacatgagtatattaaatattacttcaaatatattactgagaggcaggaggatcatttgagattaagagttcgagaccagcctggctaacatggcaaaaccctgtctctattaaaaatacgaaaattaggcaggcatgatggagggtgcctgtaatcccagctattcaggaggctgaggtaggagaattgc

SEQ ID NO: 438685 - DNA, 580 bp, Homo sapiens
atacaacagagcagaaattggtaccatctaggaatattttgtctctctactacctaaatatttatgaaaaatttctaagagggaagatattcagtattagacatatcctacagtgtcaaatctacaaattatagagtttaaattattttgatgttatgcactaggcatccatatcttcaataaaaacattgcttttgtatctaggagtaaagaatttgatgtaaaagtctaatcwtataaaacagatatatattaacagtcataaaggtctcagctaaagcaaaatcagtttaaaccagaatacacataaagctccctaacttgtttctgtaacacagaatgctttagagtaggaaaagcctgaatggaaagacagactaatatctgagtaattaatgtgaaaaggaaaaaaaattgatgtctgctttgttcctgcaggtttttttttcttatcttctcaaatgaaattatatcagcccccacaaaaagactaaagttagtaaacttttgtgtatcatctggataatcaatacaaacataataaattacttactaatgcacgtgggttgagctgaccatc

SEQ ID NO: 438686 - DNA, 580 bp, Homo sapiens
atacaacagagcagaaattggtaccatctaggaatattttgtctctctactacctaaatatttatgaaaaatttctaagagggaagatattcagtattagacatatcctacagtgtcaaatctacaaattatagagtttaaattattttgatgttatgcactaggcatccatatcttcaataaaaacattgcttttgtatctaggagtaaagaatttgatgtaaaagtctaatcatataaaacagatatatattaacagtcataaaggtctcagctaaagcaaaatcagtttaaaccagaatacacataaagctccctaacttgtttctgtaacacagaatgctttagagtaggaaaagcctgaatggaaagacagactaatatctgagtaattaatgtgaaaaggaaaaaaaattgatgtctgctttgttcctgcaggtttttttttcttatcttytcaaatgaaattatatcagcccccacaaaaagactaaagttagtaaacttttgtgtatcatctggataatcaatacaaacataataaattacttactaatgcacgtgggttgagctgaccatc

SEQ ID NO: 438687 - DNA, 526 bp, Homo sapiens
aacatgtttctaaaagggaagagaataagaaaaagacaagcatatgatcaataacattttataagaatttaagtaatatgtaaatataaaaaataatgagtcatttgtaactgaaaacctggataaccataagcattcaaatacttaagtcaaggaaaataagctcagagttgccaaagacattacatcaagactcttcatcactttttaaaacaaggctctatttaagacacttacaattatttctaagaaattattggaaatctgtttgtctaatggatttggaattctacagcatgtcagaactcaatagacaatgagtattatttcttaggactttttaatcttgcctattktagatcttctggcaattccaaatctcatttagccaattggagtatctgagatcctgtgatgatcttagaaaatctgccaaaataattttcatagcctttggctccaagaatttgaaatgtcattcttattgtgtgcttcaaagtaaatggacatgtggagttcaaagaag

SEQ ID NO: 438688 - DNA, 585 bp, Homo sapiens
tgttgatcagggaaaaaagagacaagacacaaattaccaatatcaggaatgagaaaggtgacatcactaaagattctacagatattaaaatactaataagaggatatcatgtttcatcatatgtaaataaatcaatgtaatatgccacattaacagagtgaagggaaaatacgtgatcatctcaattgatgcagaaaattcatttgacaaaactcaacacgctttcatgataaagacattcaacaaactaggaatagaaggaaactacctgaatataataaaggtcataaataacccacagttaacatcacattcagtaatgaaagactgaaagatctttcttgaagatcaagcacaagacaaggatgcactcttttgaaatttctagtcaacataatactagaattcctagccagaacaattaggcaagaaaaaataaaataaatccaaaatggaggggaggaagtcgaattgtctttggtcrcagacaacatgatgttatatgtaaaaactcctaaagattccacaaaatactgttacaactaataaatctagcaaagatgcaagatacaaaattaacatgcg

SEQ ID NO: 438689 - DNA, 562 bp, Homo sapiens
ggagcagagtggagagtggagagttagaggtaatgatgggaacccattcgtaatgatagagttagggattaaagaaggctatacataatacagatctccccatgaaaggaagtatttctggaaaatttcatgggcacttttggatcccaaattagaacttcttctgtggcagtgatggatggagaagatcaaaaccatgtgawtctgcagatactgggtattgggctatagactttttcccacacaccaacctccagtgcctccatcagttacaaatggctacgtgttattaaacagtcgctgaaaccacatattaaataaatacatatgcaaagaacaaagggctactgaatatgtaaagtggctggcacagtataaagagtcaacacatggttgattgatattgctattattgaataatcgattgaaactgtgaacaagttctaacactgcactgagctccctgagagcagaaacctcttggtatctcctacagtacagagcacagttcctgaaagatcgcattaatatagtcagtgttcagtgaatgtatttcagtgaa

SEQ ID NO: 438690 - DNA, 600 bp, Homo sapiens
caatggaagtacaagcatcgggtaagcattcctgttccaaaatgaagaaataagccaaaagaaaagctgcaggccctatgcaagttcaaaactcagcagggcagtcattaaaccttaatgttccaaaataattgtctttgactccatgttccacatatagggcacactagtgcaaagagtgggctcccaaggacttgggcagctctgccccatggctttgtagggttcagtccctgaggcagctttcaaggcctggagttgactgactatagcttttccatgctgagggtrcaagctcccagaagacttacaattcttgggtctaaagagcagttggcacccttcccacagcttcacaaggcagggccccattgaggactctgtgtggatgtttcaacctcatattttccctttacactcccctagtagaggttctctctggggttccactcctgcagcagacttctgcatgggcacccaggattactcatacatttcctgaaatctaggcagaggttcccaagcttcattcactctagccctctgtgcaccgtcaggattaacaccatgtggaaaccacaaaggcctgtggcttgcatt

SEQ ID NO: 438691 - DNA, 579 bp, Homo sapiens
gttttcacaacataaacagaaattttatttgaaatgactgacagatttatgaggtgtaaggctagtctaaagaatgagaatgcaaggcagtgccccagggatgagtgctctatgctgcggacactcctttctctccaggatcagtcattagtttgcaacattttggaattattgttagaaatattaggtttcagctcaactgtcaaactttcgacagggaagtaataactgttttaagatacttgtcatccttccagaagtccaaytcacccactgatgaataaaagcctggactgggtgtggttcccttcccaggcattggtacagtacaaattctaccagatgcctttgcattctgaaataatgttgtcccattagggtttaagagaggccaacagttttcgtgttagggtagagatgtgtccttctgccgtattagattatatgagtcaatgaggatgttttggccattagagaactcctaaatataaacattttaagaggattatgaaccaactttggggacaaagttgacattcaactattccattcaaacccccttggatcttcagacattta

SEQ ID NO: 438692 - DNA, 495 bp, Homo sapiens
ctgaactttctaacatagcagcttaccattgaaggagcctgctcctaagtgtggtgagctgtcatatgagctatgtaagcatcacgtaggcaagaggttctcaatagagagcagttctcctcttgggacatttgtcagtgtctagggtcatatttggttatcacaactggggaaaggctgctactagcatctagtgtgtagaggccagggatgataggaatcacacacagacagcaccccctcccccagaacaataaagaactatctggcccaaatggcaatagttccaaggcygagaaactctaacataggcaaacatttgctacaaaaagaaaaactactaaaatcccctctttctctgagacttctatgattggagaatgcatgctcaattattaaaatagcatgctgactatatcaggtgattggccctttgcatatagccttgaatacatttttaaagattgcaaggagctttcaaatcaagatgattta

SEQ ID NO: 438693 - DNA, 495 bp, Homo sapiens
ctgaactttctaacatagcagcttaccattgaaggagcctgctcctaagtgtggtgagctgtcatatgagctatgtaagcatcacgtaggcaagaggttctcaatagagagcagttctcctcttgggacatttgtcagtgtctagggtcatatttggttatcacaactggggaaaggctgctactagcatctagtgtgtagaggccagggatgataggaatcacacacagacagcaccccctcccccagaacaataaagaactatctggcccaaatggcaatagttccaaggctgagaaactctaacataggcaaacatttgctacaraaagaaaaactactaaaatcccctctttctctgagacttctatgattggagaatgcatgctcaattattaaaatagcatgctgactatatcaggtgattggccctttgcatatagccttgaatacatttttaaagattgcaaggagctttcaaatcaagatgattta

SEQ ID NO: 438694 - DNA, 552 bp, Homo sapiens
gtgatcttgttaaagttaggggtcagtataaaattgatgggcgggatttagactacaattataatcattctgaaattgtctttctgttttctatttctaatatctagaagakaaatttttaagaataatcaaggtatgacttttataccttttatgttatattctccaacatctatttataaaaaagtatactctagatcacattgttctagctatttagtaggtatagctattagctttagcgtcaagaaaaccctattactgcaacttgtgcctgtaatatgaagcactagtagactatgctatagtactcacaaaaataatgctagataaaatataacaaaaatatctgttgaaatgtatgcctggagtcacaaaataaaaggaaattttatatttcacaagaaaattaagagctgaatgacatagcattgactcagaagctaatgttcctgcagctactctgtggaattattggatccatgaactaacaacttgggctttactgcctacatatggcctgggcaaaggttttgagactcaacctaacat

SEQ ID NO: 438695 - DNA, 629 bp, Homo sapiens
tgtggcatcttctcatagagattctcttcattctttttacaaataaggagcttctcaaacttaccaccctcttacaaaagacacacattgaaaacttacaaatactaattataccccagtcatacctgacttaaaaatgaaaatgacatgtctctctataaagaacacagtgccagctatcacactgtttgctagtgagaacagccagcgaaagttaaaatgtgttcatttatggttaagaaattggggaacagatgccaagataaatggagcatatcaagagtatgtaaatttttgacaaacatagtaaacacaatgtttccaaaatacggcctctcggcaaatttttatcttacaaaattttaatttgtcgctctaaatctatgctatttttaaaggatacaaatgaacttacattccaatgtaatggcatttgaaaatttcctgggtaaacatgataaatgaagaaaatttattactggtaaataatagrtagtgacagaaaatgctgcaaaatgaaaaggtgttaaagctggcccaaactgcaagtaagaagaaaaaaaaacctctttactgtctagccatcaatgagcctgctgaagccaggaaaaatctggcacctctcccag

SEQ ID NO: 438696 - DNA, 499 bp, Homo sapiens
gtctagccatcaatgagcctgctgaagccaggaaaaatctggcacctctcccagatgaatacaaatgaaatttaaaaaattacaaggcacaggttactgctcatcaatgggcttgcatgcaatattagtcacatgagaaaatatacaattgctcctactgggatacaaatttattccaacgaatatatcctcccctcagagaggcgaattatgaagaaaaatttaaaaagttaagctagttctcataggaaatagaatggttgtcatttaattgaagttttaaacccagcargaatcaacaaaatcattccaagtgaactccttatatttgtaaaagggagtgaaaaacaagataaaatgttagcagaatgttatttcaagcttaactgttttataagtcaagggatgcaaactattttgcagtaatattctttattttactatttcttatttttttatcaagcttgttttctaatggatttgaaatcatttacttgtt

SEQ ID NO: 438697 - DNA, 380 bp, Homo sapiens
gtaggtcatcatacatttttataatgtagccttctgttttgtttaaattgaccttctrtggtacttacttacgtattttaaggtcatattttcagtttattttctgaggacatatttgctttttcttaaacaattttgttggatagaagacaatttcaatgtatttattctttatttctatggcttcagtttattttattaggttgggcaaaagtaatagtgatttttgccgttactttcaatggcaaaaaacccaattacatttccaccaatttaaatagatttaggaaatcagaaaaaaaatttaagattatgtttcttactgaacatataattatattctacaaaaaatgaagagtgtaattattaggggcaaaaag

SEQ ID NO: 438698 - DNA, 380 bp, Homo sapiens
gtaggtcatcatacatttttataatgtagccttctgttttgtttaaattgaccttctgtggtacttacttacgtattttaaggtcatattttcagtttattttctgaggacatatttgctttttcttaaacaattttgttggatagaagacaatttcaatgtatttattctttatttctatggcttcagtttattttattaggttgggcaaaagtaatagtgatttttgccgttactttcaatggcaaaaaacccaattacatttccaccaatttaaatagatttaggaaatcagaaaaaaaatttaagrttatgtttcttactgaacatataattatattctacaaaaaatgaagagtgtaattattaggggcaaaaag

SEQ ID NO: 438699 - DNA, 636 bp, Homo sapiens
aattaaactggataactttgtccaactaactctttattatggcttttaacatattatgatctatttttactattatatactatttactataatgttttctatgtcatcttccctatttgtaaaccctgttttgaatttttgaggcacaattagtccttttatcttcatatggctttggaaaactataacttattttatgtggcatttcatgtggcatttcctcagtacctattttattatgtaataaatattccataaaaatgtattaagttggtcactatacctttcttcttccccaaacataaagaatttagaagttgcaaaaccaaaatcttccatctcaattggcatatattgttacacagtattttatttctacctcattctctactgaaaataactcattgttcttattttcattattagcaatattatttacatatagaatgcttttcttaggtatatcagtgatttctagtttcrttgtttactgattatttataaattaaaaattttgttaaggttgacagagcatgtttctttctgtttttaaatttacctgtcaaatttttccttgtaggctacaagtttttgtaacaaatcaagtaaatgtttctttttaaatatttttgaatc

SEQ ID NO: 438700 - DNA, 546 bp, Homo sapiens
aatagtttttctgttctaaaaattttctgtgctgcacctgttcatccctcctttctctttaactcctggaaacaacatttttagtcttcttagtttttccttttctagaacatcatatagttgcaatcatacactattaatatggtttggctgtctccccacccaaatctcattttgaattgtagtttccataatccccacatgtcgtgggactgtgtggtgggaagtgataggatcctrggagtggtttcccccatgctgttctcatgatcatgagttctcacaagatctgttggttttataagtttctggcatttcccttgcttgcgctcattctctctcctgccgccctgtgaagaggtgtcttcggccgtgattgtaagtttcctgaggcttctccagccatgcagaactttgagtcaattaaacctcttttctttataaattactcagtctcgagtttttcttcatagcagcctcagcacgaactaatacagtcaattggtaacgcagagagtggggtgctgctataaagatacccaaaaa

SEQ ID NO: 438701 - DNA, 605 bp, Homo sapiens
ctcttatcagatatgtcttttgcaaatatttttcctagtctatgtcttgtcttctcattctcttgacattgtctttcgcagagcagaattttatagttttaataaagtccagctaataattatttattttatgccttgtggctttgatgatgtatctaaaatgtcaataccatatccaagatcatctagatttttccaaagagtttcatagttttgcatgttacatgtagttctatgattcattttgagttaatttttttgtaaagagtttaaggtctgtgtstagattcatttatttttgcatatggatggccagtttttccagtacaatttttgaaaggttataagattttcatacctaaaattgcaagtgttagttatttaaacataacacgaaagatgcaaagctacttttgaaattgtaataaaaaatgtatactatggtttctcccaggtcttatagaaacaaagctgttacatgcaacgcaaaacatctttgtggtaaatagaaaatattttgtttgtacagcttccttcaatgtacaccagtggaagataattagtaaacaagaatttaatgagttgcaagtatctttttgttgttt

SEQ ID NO: 438702 - DNA, 497 bp, Homo sapiens
aaaggacaaaactatgtaaaaaataagtacttctacataaaactcataacaaaatctaagtaaaagacaaactgtagcaaaatgcagaaatatcatagacaataaaattattcttatatttcaaaacttctaagaagaggggagacgtgatttagcagaaaaaaatgtaaacaaatayaaaaatagttctcaaaaagtgaaagatcaattgcttttatgtatatgaaaagataaatccagtcataataagaaaaattcaaataataactactcagatagattttctccatttctctctgttggcaaaaactcaaaacattgaaatttacttactcttcgacttatctgtggtgtaacagacctttttcatttcattatataatcataaaaaacacttcagtaatatcttaagtaatattacctaatattttgtcttaccacattttatctcaggctgtagatgttagataatatgcaatttctcctaactagatatt

SEQ ID NO: 438703 - DNA, 483 bp, Homo sapiens
tacactgttctttgcaactataatttgtcattaaaatcatatatatacattcmctgcttactttttcactgtttcttttacaactatattgtaagcactataaaggtcgaaggtcgaaattatatttctttgatttctttttttttttttttttttttttttgagatagagctcactctgtctcccaggctggaatgcagtggcacaatctcagctcactgcaacctctgcctcctgggttcaagcgattctcctgcctcaggctcccaagtagctgggattacaggtgcacaccatcacacccggctaattttttatatttttggtagagacggggtttcaccatgttggtcaggttggtcttgaactgctgacctcaagtgatccatccgccttggcctcccaaagtgatgggatatttttaattacaaagcccagaataaatattacatcactaaaagatagcgtgggctacacataatc

SEQ ID NO: 438704 - DNA, 332 bp, Homo sapiens
tgtctctcctgcccttctcaatgcctattttcatgatatgaaattaaaatcagatactgtgaactgctmgtcttggggtgaaaatttaactttagttgggaaccttgaggaagaggaagctctgtgttcttagatgtaacatcctggaccaaagcttctgttacactaatctggaggagaaagggtaggagcatgttgtggttcaagtgccgtagactctcatctttaatactgagatttagtcattttttatgaatatgtgtttatttgttgttaagtcttaggactatttccagaaagttcagtttatacataaacctgttaaatgtgta

SEQ ID NO: 438705 - DNA, 547 bp, Homo sapiens
gtgtgtgtaattagttctgtgtatttccatttacatatgtktggttaaatactttttggatctattatctaatataaaatgtgttattaacgattgacattatatattagtgtttgaactatagtgtattaaaataaaatgctttgtatgtttttatttctatgagaaaggtgttcaggtgttttaggttttaaatggggtagttgtgtggtgcttacagaagtaagactttattattgtctttatttagaaattaagtatgctttaaggtgatgtgcgtgaatgccaatttgccacaatgtggaatgtgtaagctttgtgatgaccaagtcgggtaggctacactacgtctttcagaattctctttctactgcgttttcacatgaggtaggtcacaagagatacactcttgtgagaattggaaaaggctacaaaacaaccatatagacacctcccagtgattcaatcatacactaatctaggtgctgctgtgaaggaatttttcagctctaactaaagttcttacttagttcactttaagtcttta

SEQ ID NO: 438706 - DNA, 547 bp, Homo sapiens
gtgtgtgtaattagttctgtgtatttccatttacatatgtgtggttaaatactttttggatctattatctaatataaaatgtgttattaacgattgacattatatattagtgtttgaactatagtgtattaaaataaaatgctttgtatgtttttatttctatgagaaaggtgttcaggtgttttaggttttaaatggggtagttgtgtggtgcttacagaagtaagactttattattgtctttatttagaaattaagtatgctttaaggtgatgtgcgtgaatgccaatttgccacaatgtggaatgtgtaagmtttgtgatgaccaagtcgggtaggctacactacgtctttcagaattctctttctactgcgttttcacatgaggtaggtcacaagagatacactcttgtgagaattggaaaaggctacaaaacaaccatatagacacctcccagtgattcaatcatacactaatctaggtgctgctgtgaaggaatttttcagctctaactaaagttcttacttagttcactttaagtcttta

SEQ ID NO: 438707 - DNA, 532 bp, Homo sapiens
tactacataagaaaaaatagggtaactattcaatatgtgcttcagtaacttgataggtaaaatagagataataatatcatctaccatttagatttgttactataattaagatatgtcataaaataatgataacagtacctggcccatagtaaactctttagtccttcaactggataaaacagtttcattcatttttaaaccaagggaagcagttagacatataagtatacatcgatagaattgttctaattatatttgattttaaaaattaattttatgaagactcattcacataatatgtaaaatacattttgtatattatatattattcacatatatacacacacacatatatatatacatatatatatakagagagagagagagaaagagagtaataaatgctaattaaatagttcaggaaagagttgcactagacctagcagaggtggagtggtgagcagtggtcagattctgaaagttaagctagtaatatcaggagattgttatggaatggatgtgggaagtgaaa

SEQ ID NO: 438708 - DNA, 532 bp, Homo sapiens
tactacataagaaaaaatagggtaactattcaatatgtgcttcagtaacttgataggtaaaatagagataataatatcatctaccatttagatttgttactataattaagatatgtcataaaataatgataacagtacctggcccatagtaaactctttagtccttcaactggataaaacagtttcattcatttttaaaccaagggaagcagttagacatataagtatacatcgatagaattgttctaattatatttgattttaaaaattaattttatgaagactcattcacataatatgtaaaatacattttgtatattatatattattcacatatatacacacacacatatatatatacatatatatatagagagagagagagagaragagagtaataaatgctaattaaatagttcaggaaagagttgcactagacctagcagaggtggagtggtgagcagtggtcagattctgaaagttaagctagtaatatcaggagattgttatggaatggatgtgggaagtgaaa

SEQ ID NO: 438709 - DNA, 670 bp, Homo sapiens
atccagacctcagggccctgccctagatgctgggttttggataatcaccattggcaggcaaagctaacacaaagccctgagagaatagtagttctgtgattaaaatagagatcagagaaagaagagaaatcccacaactagcttttttatattaaatttgtgcaatgaaatctgccattatatatgattacattgattagacagccttcttctaatgagacttcaggtactcagtttctgtcttcattattgctaattgtgttttttgttgttattgtgtcmaaaaatgttaaggagcagtgtctacaaataaacacaaggtaatacaacgtacttttttgccagtctgcttctctcccattcaaggtgattaccataatcattccataattactgcacgtaaagatttgagttgataaccactcctgggtaggaatataagtactccttcatataatcttataaagaattcaaacctttctgattaatcactctattttttcatagtttttcttttgttaaaatatcatcacagagtagattacaatgacttgagcaaaaaaggttagtcaaagggcctaaatacccccaagtggcactatctacctctatatgccccaggtttaagtcaagaagacaataagttaagcaattattcttagagatgtaa

SEQ ID NO: 438710 - DNA, 633 bp, Homo sapiens
tagtttgttatttgaagtagcaaaagggaaaagaaagaaaggaaatgtcctaaaggctcaagaacagaagaagagttgaatacattgtggctcatccatatagaaggatactctgaagatgtaagaagccattttatcaaagacgatggaatcatgtggaaaaatgctcatattctgatgttaagtgaagaaagtgagatataaaattacacttatgccaccaatttggtgtaaattgctacctattcatcccttggataggtccrtctacctgcccaaaaatatacactgaaaggaaacagaccacagggttaacaggtcacaccctttttccaccactcactagctatgtgactttcgtcaatctacttaatgtctctgtgcctcagctttttcacctgtacaagaaggaaacaaaagactaacgaactcataagattgttgcaaagattaagttagataatgtatataaagtgtttaattcagcacctaataaatgctagctatggaaataattatttgttatcactaagaacaccaaggtttagtatggaaacttgtgtagagtttagtcggtgctcaccatttctttgcagcaatatgataaaagaaaattttcagaagggcaggtgt

SEQ ID NO: 438711 - DNA, 474 bp, Homo sapiens
ctctacccaaaggggccttgggctgagtaggagaagccctttgtgcatgtcctgactaatacataataagaagatttggggktagcagcaaggatgggccactagaacttgattgttaaactcaagagtcatgttggggtcactgcagtgagcagggcagactgggaggggtgagagcctgggatcttatgctcctgttgtgatagcctagcaagactctaaaaaagaggccagcccagcacacaaaacagggcatcaggagcaactggttacagcaagtctcagcccagggaaccagcaggagtcaaggcagagcccacgtggatgaagttagctcaacggaagggatatagaagaaggtgtattctcaggcagaaagagtccagttgccagactgggattgaggaatatgtctctggctccttggagaggatagacatgagcagagaagacataagtgagagcatacagcct

SEQ ID NO: 438712 - DNA, 474 bp, Homo sapiens
ctctacccaaaggggccttgggctgagtaggagaagccctttgtgcatgtcctgactaatacataataagaagatttggggttagcagcaaggatgggccactagaacttgattgttaaactcaagagtcatgttggggtcactgcagtgagcagggcagactgggaggggtgagagcctgggatcttatgctcctgttgtgatagcctagcaagactctaaaaaagaggccagcccagcacacaaaacagggcatcaggagcaactggttacagcaagtctcagcccagggaaccagcaggagtcaaggcagagcccacgtggatgaagttagctcaacggaagggatatagaagaaggtgtattctcaggcagaaagrgtccagttgccagactgggattgaggaatatgtctctggctccttggagaggatagacatgagcagagaagacataagtgagagcatacagcct

SEQ ID NO: 438713 - DNA, 557 bp, Homo sapiens
gcgcattgcttattcaagtctaggttttagactctttgcccaatatgctgccctattttaaaaggcagatgggaagcatctcacttgtccacagccctatccgagtacattcaatatatttttgatgaagatggggtggtttgatgagcatgtgtgacgttgacaaggttagagtgatgctaacatgtatgccaggcttgtgctcgagattttacatacatgatctcaccccatattcaaaatagtcttgcaaacgattttccctgttttatagctataagaaaattgaagttcaataagtagcagaaatcagattcaaatgcatatttgctggactctaaacctytttcttttacatcggtgtttcaactgtgttacatagtcttacagatgatgcatacaaaaagaaatggcctgtgtttcctcacaaaatttgggaaatgccaggttatgcaaattaaaatgcagaaactctctgaacctttaatatgttattgagcattttgaatctccaagaacaatatggtgtatgcagttcatccaaatgtatttgacca

SEQ ID NO: 438714 - DNA, 557 bp, Homo sapiens
gcgcattgcttattcaagtctaggttttagactctttgcccaatatgctgccctattttaaaaggcagatgggaagcatctcacttgtccacagccctatccgagtacattcaatatatttttgatgaagatggggtggtttgatgagcatgtgtgacgttgacaaggttagagtgatgctaacatgtatgccaggcttgtgctcgagattttacatacatgatctcaccccatattcaaaatagtcttgcaaacgattttccctgttttatagctataagaaaattgaagttcaataagtagcagaaatcagattcaaatgcatatttgctggactctaaacctttttcttttacatcggtgtttcaactgtgttacatagtcttacagatgatgcatacaaaaagaaatggcctgtgtttcctcacaaaatttgggaaatgccaggttatgcaaattaaaatgcagaaactctctgaaccttyaatatgttattgagcattttgaatctccaagaacaatatggtgtatgcagttcatccaaatgtatttgacca

SEQ ID NO: 438715 - DNA, 587 bp, Homo sapiens
gactgggggagtcagagaagattttcctgaggaaataacacttttactgagatccgaggggtgaattggattgaccaggtgagtagaggagggaagagtgttctgggcacagsggggaaagcatatgcaaaggccctgtggtaggcaagagcatgacaagtacaatggccaggaaaatggcagcagggagctcagagattcagactcccaaagccttttggcttacatagctcacccaaccccagtaaggcaccagaatataagaagtgctgattgatgcttgttgaccttctttcttatagatacccccattgatgggaagtggaattgctggtcaaattggtcttcatgctctggaagacgtaagacaagacaaaggcagtgtaacaatccacctcctcaaaatgggggtagcccctgttcaggccctgcttcagaaacacttgactgctcctagcagatgatacagcagtgggctacatacaatgagagccctgagccctcaagaactcacgccagctcagccctacaccagtttccacctggagttcatgcaagggcaaaaggcagtgccatgcaagctgttt

SEQ ID NO: 438716 - DNA, 587 bp, Homo sapiens
gactgggggagtcagagaagattttcctgaggaaataacacttttactgagatccgaggggtgaattggattgaccaggtgagtagaggagggaagagtgttctgggcacagcggggaaagcatatgcaaaggccctgtggtaggcaagagcatgacaagtacaatggccaggaaaatggcagcagggagctcagagattcagactcccaaagccttttggcttacatagctcacccaaccccagtaaggcaccagaatataagaagtgctgattgatgcttrttgaccttctttcttatagatacccccattgatgggaagtggaattgctggtcaaattggtcttcatgctctggaagacgtaagacaagacaaaggcagtgtaacaatccacctcctcaaaatgggggtagcccctgttcaggccctgcttcagaaacacttgactgctcctagcagatgatacagcagtgggctacatacaatgagagccctgagccctcaagaactcacgccagctcagccctacaccagtttccacctggagttcatgcaagggcaaaaggcagtgccatgcaagctgttt

SEQ ID NO: 438717 - DNA, 587 bp, Homo sapiens
gactgggggagtcagagaagattttcctgaggaaataacacttttactgagatccgaggggtgaattggattgaccaggtgagtagaggagggaagagtgttctgggcacagcggggaaagcatatgcaaaggccctgtggtaggcaagagcatgacaagtacaatggccaggaaaatggcagcagggagctcagagattcagactcccaaagccttttggcttacatagctcacccaaccccagtaaggcaccagaatataagaagtgctgattgatgcttgttgaccttctttcttatagatacccccattgatgggaagtggaattgctggtcaaattggtcttcatgctctggaagacgtaagacaagacaaaggcagtgtaacaatccacctcctcaaaatgggggtagcccctgttcaggccctgcttcagaaacacttgactgctcctagcagatgatacagcagtgggctacatacaatgagagccctgagccctcaagaactcaygccagctcagccctacaccagtttccacctggagttcatgcaagggcaaaaggcagtgccatgcaagctgttt

SEQ ID NO: 438718 - DNA, 495 bp, Homo sapiens
tacagtaaacgcccttgctcagctccttgaacatgtgccccctctacttaaggactggcaaggaggtgtctttcctggggatgcagaaaatgctgtagccagcattaggacacatttaactgggcccaggtctyccactcttttcctaacaggcgtctctgatcaaaataaagatggatccatccagtacagcaggattgggtcagcagtaaattgcaagccatcagcttatatagatggggtgcgtcaatatattttggctttcggtagaaatgccctgacacaacaactttcttgtcacacacaatttgttaagcagctgcatcccctttgcaaacagcatcctttttctttgctagaaggggcagcttctaggtggcaggttttcaatttctcttctctctgtcgtttgctgtggtagacatgaaatttaaagcaacatctcaaggcaaccaaatgtgtggcccagagatggagaaacagcacagaggccaa

SEQ ID NO: 438719 - DNA, 531 bp, Homo sapiens
ccttccagctctgacattttaagaccatctaacttgcccaaagtcacccagctacagcatggaaccaatccccaaataagatcttccagcagcatctctccctcaggctgtctctattcccatctaacaaaggagaagacagaaatccytaaaatacgctgacttcattaggatccccagagactatcagtcctagatgcaacctgctcccagtaaccaggagcttactcagaaaaggccttccctggcttatggtagataattagtgtcagcaatttcagcgtcatcatctgttatataacaaggccaaaaaagatgatgtacatgtgcaaaacagatcattgatgcccatcattgttgttattattgacggggaaatagaatgttcttcagaacatgcacagttgcctcgaaactcaggtggtgcatctctgtatgcaccaagcggatttcagcacccaagaccccaggaacaagggcattcggcagtgtcaatccctaagggattatcatcaaatccattcagtgttt

SEQ ID NO: 438720 - DNA, 619 bp, Homo sapiens
agatcctgaattgtatttgaagtggatttttgcttactaaaggttgagaacacaagctgagttgccagttctggcaggtatactgctcagacttacctaatgaaatcaatggaaagcataagcaggagtttatttatgcaggtgtcttaatctttagaaggctttataggatgctgctaatactctaaagcagtggttctcagtctggggcaatttcatccctggggtacatttggcaatgcttggagtcatttttctcgacactagaggaaggggatatacgtttctctcatagagtgattagaggccagcgttgctgctaaacatcctacaatgggacagcctctgaaacaaagaattatctggcccaacatgtccatagtgccgaggttgccaacgatgctctraaacataacagtagctaagtcatctccattttgtttatttcattctctataacctttcccaaatgcctctcatgtcccaggcactaagctagcattatgagaagtgtaggaatgatggagccagttcctgccctcaaagaacttaaactctcctctttcatttgtagctggcacacaagtccattgaaagagagatgtttgtttttaaaaag

SEQ ID NO: 438721 - DNA, 521 bp, Homo sapiens
tatctttgcatttgattttaatgcatttaattttccaggaattcaacaactgtgcacaggagagaagactgtatttttggtttggaacactgtcaaaaggtgttcactattttggaaaatggcagtgcctgacatccctgacagaagcgcttctcatggtggtgtagccacatgacacttctgtattagcctggacttacagctgtggctttcagtagtgattctacttacaggtatatacatctgactcttatgtcttctagtgtgctcacgcctgagtatttccttatttaaatacatatatttttattacaagttctctttcttttctttctgccttatactacagttagagaattatattcattttgaaaaattrtgtagctagactacattatctatgaaattcatttcaaggtgtgaaaggaggtattgcaaatatttgtaataagaagggggtgctgggtctgcaggtggagaactacccacagattcaatcacccaagacctgatgcccattt

SEQ ID NO: 438722 - DNA, 577 bp, Homo sapiens
ctccattgtcctccatatcttcagtgaaagcaaaatgaaatgctagtcacgctggaatattgtggagcaaacagaaagtgtggttttcaaagtagggtagaactgaggccaagaggaccaaggagtcaaaatgaaaagaggtaggagaaagagagacacagaaatcacaggctccggggacttcccaggacccagaatccacatttacttctgtcaagtttaccaaaatctctgagaaaagggagatgataacaatttggtgcctttaaaaaaatctccgcatttaaatcagaaacacattttcctaagcatacaagtcattcattaaaatttctcctaactttgagatcagtaatgatactactggacagtcctgctaatgagagaatctaaatattcccaaggatattgagacagctatacaaccttgggcaagttagttactttctctggrcctccatttcttcatcttcattaattccatctaaatggaattaataatttccatctcatatccctgctatgaaaattaaataagacgtatgaaatgcctgccacatagtagccattaaattat

SEQ ID NO: 438723 - DNA, 601 bp, Homo sapiens
aattaataatttccatctcatatccctgctatgaaaattaaataagacrtatgaaatgcctgccacatagtagccattaaattattgtctgtgtatctatccatcatctatgtatttacctacctatctatccatccatctcaatttaatttaatttatgtcttgaagagtaagagattttaggcaggtatggcaccattagtcctgatgtgtggttttattgacattataattctagagagtgcttctggagatgtctatttaagacatttggccccctcaataaacagataccctggatctcaatgatgcccaatgtctgtatgaaaagtggaaagtccattgaattacacatatatttcaggatttagatgtttggcaacgtacagtagaaccttcatgtaatggttagcatttcctacatttttctgagtgctttatgtctgagttgatataccaatattagccttgtttcagtcttgcaaaatagattgatctgacctcagaagttccaagagacactgaaaaagaccaggaattctagaactgcatcttggtttggtttttgcctccttttgaaaataagacctctttgctaagc

SEQ ID NO: 438724 - DNA, 576 bp, Homo sapiens
tcttcaagaagagggaacagaggttattcctagcaagtaggaagaccctagaaatatcttgtccaggcctttcatttgatgcttggaggccctattcaacgttccaatcagtgattgtgccacttctggtgatacaccactgtttatgcatattcatccctcaaaagacagcttcacaggcaggtctcaatcattagataattatttcttatgttgagccgaaaccaggctgcacaagtcttggttgattgattgattggttgacaagaatgtgtcttgttcaaaatctggtttagtaccgacaccggagcctcttgcagccaaacaagtttgggggaaccatctgcagtggtgacatctgggatcaagccagctgctccagttctacaacttgtgtaaggmaagcacagtgtggacaggatttccagtgtaaggagacaggtgagtagcatttcagcagaataacagctgtgcctgtcaaaagtgacatgtgaaacacttccccagggagcttattaaaatgcatactcctgagcccttcctctcgaggttgccattctctaggtttgggatggg

SEQ ID NO: 438725 - DNA, 523 bp, Homo sapiens
gaaaaggcggctgtctttgagacaggaagagagcctccagcagaaaacaaccttgataacaccttgatcttggactcctagcctccagaaccatgagaaaataaacttctgttgtgtagggcacctagtctatggtattttgttgtggcagcccctgcagactagtacaccgaggtaccatctcccctaggtagtctttgtaacagccccctcccctgctcttgactttgcctaggttgacttagtcccctcccattgctcccagagactcctgcaagtcttattctcacagctcttacccaataggctggggatgtctgtcgaggtgtctatctgcccaggctaggggctccttgtcatctctgcttctccagtaccggaacagggcttagctcagaatgacgttccagtattgttagtcctctgccactctgtctttgcctagggtcttgtctcctaacktgaataaactctttgagggcagaggttgcttctgactcagctttttcatctcctcagcccc

SEQ ID NO: 438726 - DNA, 615 bp, Homo sapiens
cttctgccatttccattcaaacacttttaatttttaatgcattactaattgggggaagatttagcaaatttaattgttttgattaaaaaatgcttcaacagtgataaacaaaagtggatgaaaagaattcactggcagaagccagagtgattacttaggtggatggtggagtgctgctgaattaaagccacaggacaggctgattaatgggggctggaggatgcctgttgtgtgattatgctcatgaaagatctggcaacagcctgccacgtgatgctgggagaagagaattccagtctgacttgagaagcatgacttgactgcagagatttgccatctaagaccccaaagagggtcccagccagcaaggggagtctgtgactyacaaagaatcatagaacctgagagcccaagcactcttagacacttagctcatacttttcatttatagctgagatgcctgaggttcatgaaggttaattatattgcctaaggccatacagttaaaaaatggtgaagctgagattcacgctcaagtctgttatgtttagaagcctgtggtattttactaatctcagttattgcctcagacaaaagaattctgccatctgagag

SEQ ID NO: 438727 - DNA, 584 bp, Homo sapiens
cattcatcatgcatggtgtgtagccaatggtagtcctgaaaggagccttccaactcctcattccctgactacctcattctacaaagaagcttagagaaaggaagctaggcagaagaaggaggcaatgttgactacagtcccatgtcttcctcctacttgataagggttcttcagaggctctgactcttctccataatttcagccatgacaagagacagcgtagatgaaggccaaattctgaaacagagactacctgagctggaatgccacccctgtccaatgactatgtgggcaaattgtttaacctctcttgccccagttttcccatctgtaagatggggattttaatactgtctacctcccagggttgttgtgagtgttgaatgagttaatccatgccrtgtaatgtgctctggacagtgcctggttcagagctagcaatcacagtcaagtgttgctattactgctgttgccagaaatgctgcagcctacactgaggcttttggctcctgatttggaatctgaaaagttagaaaaagagggaggctgaggagtttgtaaaatcaggttttcttaatgggcat

SEQ ID NO: 438728 - DNA, 588 bp, Homo sapiens
atcagtcccattttagaaaggagtaggttgaaatagtttaaacttaacttagatagcttgtcacttgcccaggttatacactaagtaaataacagaactgggattgaaccaaggcctgtgtccaaagaccacgttctgtatgccatattataccgcctatgggaaagagagctaaggatggctctgggaagaatgttgacaccatctcagcttttctcctttaagtatgaagctgttctcagtgatattagaggtggaaattcaaaatcaagacaaaatcagaaggatggtgctgagagtctcagttccatgtatatgcagatgacttaaggggagtaaggayagagccaagaaactaggagtctgtcagtcaatcaataccatccatcaccgtgaagactggttgtcatggtaactggggataaagcctggagcttgttagaatctagtgactgtctgttcgggtgactggttggttagcaggagcaaaaataaataaataaataaaaagacctgctgggctgtcccagagcctttagccatgaacataggaccttttacaataagattcctgcccaccttaccctc

SEQ ID NO: 438729 - DNA, 562 bp, Homo sapiens
aaagtttttctttttgctaagtaggcctataggcagttgatcctaaagaagtttcaatcatgatgtccctttttattttattgcttttatggacatcagagtatgtttaccaaagcatcttgggccaaggccatgtgaatatttttaatagtagtccagaagactgaaaattgatatgtattcaggaaacatgaatttttaattaatgaaaacaattggagtagtgggtgtgactcaaaagygaatcatgtaatatggaaactgttattcagggtaactaatctttagcaatacttcaggtggcattgggtctgggctatgaagtataatcgatctgggattaagtcctggcatcaccacgtagtggctatggaagttgcgccagttgcttaaacttcctaagcttcattttttgtttcatctatgaaatggagataatacatatttcttagagttcttgtcaggactttagtaagtttatataaagtacttataacagaacctggtacatggtaagcctttagaaaattatttttattaccctatttctcttttgtcagaa

SEQ ID NO: 438730 - DNA, 562 bp, Homo sapiens
aaagtttttctttttgctaagtaggcctataggcagttgatcctaaagaagtttcaatcatgatgtccctttttattttattgcttttatggacatcagagtatgtttaccaaagcatcttgggccaaggccatgtgaatatttttaatagtagtccagaagactgaaaattgatatgtattcaggaaacatgaatttttaattaatgaaaacaattggagtagtgggtgtgactcaaaagtgaatcatgtaatatggaaactgttattcagggtaactaatctttagcaatacttcaggtggcattgggtctgggctatgaagtataatcratctgggattaagtcctggcatcaccacgtagtggctatggaagttgcgccagttgcttaaacttcctaagcttcattttttgtttcatctatgaaatggagataatacatatttcttagagttcttgtcaggactttagtaagtttatataaagtacttataacagaacctggtacatggtaagcctttagaaaattatttttattaccctatttctcttttgtcagaa

SEQ ID NO: 438731 - DNA, 573 bp, Homo sapiens
ttgctgggcaaggccagacctagttgtcccctccccgtagccatagctatttggcctgtgacaagccccttgtatctcttcacctctgcattactagtccaggagtccaccccttaggcagctcacagttatctctatctatcattcacattttcccctttccaccaaggctgttctttcccaccttctccttactaccagttctttttatgttttcttaataacaaaagtgttgttggttcttaaaacaacatttatttttttctgactaaaaaaaggatagctattcagtatagagaaacaggacaacattgcacatgtatcccggaacttaaaattaaactaaattaaattaaaaagagagaaacaggaaaacaaaataaaaaayttcagtgcacagaataaaatggaaatcatatgtaatcctactacctggatttttacagttttttttctatgcttatatgtgagtatgtacatttacccaaccaaattagaaatgtaatgtatacatgattgtatactttttttttttgacagggtctcgctctgtcacccaggctggagtgcagg

SEQ ID NO: 438732 - DNA, 576 bp, Homo sapiens
tgttatcctagatccatttattgaatagtatattttatccctgctaattagaatatattcaatcataaattaatttcttgagtttatttctgtactttatattctgtaaaccatgactaggtaaatagaataaatcacagaataatttgtgaaagcaaacactttaaattattttgggtttatttttgagatctgatctgatagtataagtttatgatcatgacattgaatttttttcctcaaataatctcacattcttatctctttcagatatgacttagaatatgattgaatatgaatacatgattgaagatatattataaaattgagatacttgttgcagtaagttataaattaattwgagagagttggaccttctctttcaatttgttctattactttatgcccttcaacaagcctttgtagctttgttttgttggttttttttttaatctagctcttaaatcttcagtattaaatttattcttgggtattctccttttgttactatcattaatggaatctgtgtaagtttccagtaggttttctataaggttacttatggcaatataaaaa

SEQ ID NO: 438733 - DNA, 589 bp, Homo sapiens
ttaatgtgcacttggccctcaaaacacgaatagyactgataacacttacacagcacttcctaggagtcagtactgttttatttattcatttaaacttcgaacaaccttatgggataggtattttactttcctattttacaggtgagtaaattgaggcagagaggttaagtaacaagagaaaagtggcccagctcacacaatttacaggacacacccatcccaccccctctttccagccccagggagagagagtccaaactgtcctgctgctttctggaatacaacactggcctcttctgctgagggaggtggcaatagaggaataaactgttagtgccataaccaatctatctggatacaggatgactaattaaaacagggcagcatgcaaggcctgacaaaaggtctggcacttggtaggtgcttatactatgttagttcctttcttgccaaccatgtggctgtgggtaatactctttctccattctaggaaggtgtgtaaaccgcagacttctttgcaatggggacaatgactgtggagaccagtcagatgaagcaaactgtagaaggatttataaaaaatgtcagc

SEQ ID NO: 438734 - DNA, 422 bp, Homo sapiens
cttggcaggcaggttttatccaggtctgcccctatctcccagcattggtccctccaagaagagaggtctctatttagacagtgaagggatggatttccagggcttttggggatctctgagttggtcctgtcctctagcgaggacagaggagcaagttcagaaggggccacactggcctggcatgcaccttactttcctgccatattttgcatcttctcagcctgcaggtggaagagggagaccttcccctcatatgctttaggaatcatcatatgagacacagcctggggaggggaacactgaccccgaatgggatttaccttctttctaaaaaaacccatcaaatctcaatttttaaagttgtcactagagactcttcacrtgggaggcttctctcaggattgccttataagctagttatt

SEQ ID NO: 438735 - DNA, 584 bp, Homo sapiens
tgagacacagcctggggaggggaacactgaccccgaatgggatttaccttctttctaaaaaaacccatcaaatctcaatttttaaagttgtcactagagactcttcacgtgggaggcttctctcaggattgccttataagctagttattataattcccaccttgcagataaggaaactgaggcccgggaaagttgagtgagttccagggtcacccagctagagtgtgggatagcagacattcaaagccagcagtagggtctgacaggaccctgtaggagggaactgaaggagtggctcactggccagggcacctcgggcaaggcacttatctacgtggaactttagctttatcatctgcaggaggaagttaataacatgcttctttcaaagtgctgtgaagattgaacaagtgaatgtgactaacataygaggtgctgggcagctcgtgtggtgggaagaatacagactctgttcttgctccactgtcatatttcaaagtccagtccacccattgttcccggcagggagactctgggttagtcagttaccctcatgtttctcatctgcaaaatggggataatag

SEQ ID NO: 438736 - DNA, 366 bp, Homo sapiens
ggagattaaaacaatggcagaaaagaaatacgatagacagagagtacaggagtagaaagcttaaaacagagacctcttcctaagaaagagacaaaattaaatstgaaaacacattaatcaaaaatataagaagacaatcttccctgagctgataatgcagaatgaacagctcattgaaaactaagccaaagtactgaaaacaaaacaaagctgaaacacatcctggtgaaaatgtttacttttaggaacaaatatatcctacaggaataaaagtcaaactggccctagaattctttgcagtgtgaaatgcttgaagaaaatggagcaacaactgaggagtcttgaaggaaaaacttgtgacctagt

SEQ ID NO: 438737 - DNA, 545 bp, Homo sapiens
acgtgcagggcaaggtatgggggaaggaatgtggagcttccattccctccttgggtatgccaccctccaggaacctccgtgtattcatctatccagaagctccaattgtcttcaaagagtcaataagaatccccatagaaagactggcctggtaccttgtctaaatagttcccttacaaagttcctgacctgtgataagccaagaatgtcactttccagcccaggaagctcaagatattttgggaccacaagaagacaggaattcatacaggtattataagcacagtctgatggtgaattcttggtttggcttctagccttggggcttttaaaaagttgaatttaaaattgtttataaaagttccagcaaagccaacttaaaagtctatatgacctataactactcttgctatattttatacaaataatcaggccaagtacaatagactaaaatttattttgcaaataaattggtccttatatgatttatctttggtataaatggagaaactggagagagwaaaatttagattctagccctgacc

SEQ ID NO: 438738 - DNA, 584 bp, Homo sapiens
caggctggagtgcagtgatgcaatcttggctcattgcaacctcttcctcccagactgaagtgatcctctcwcctcagcctttcaagtagctgggactacaggcgcataccaccacgctggctaatttttgtatttttagtagagacaaggtttcactatgttggcaggctggtcttgaactcctgacctcaagtgatcctctggccttggcctcccgaagtgctaggattacagttgtgagccactgtgcctggccaatgacctgtatttttatcaatagtgctctatagttttgaaaccctttcacagactataccagtcaggttccaagcaaaaaatagaatttacgcagagggtgcaatgaagagactttaatgaaggagctacttacagaagttgtgagattaaagagcaaacaatggatgttgaggcacccagagagtagcaagagtaaaaagccattacttgccctagaacctaagggatatggagtgaaaacggtattacccagagctctatgaaaagctgaagccaaggaagttgggcctcccagtttgcttcccagtatatggtacagaagcagt

SEQ ID NO: 438739 - DNA, 605 bp, Homo sapiens
attgtatcaaaatcaattaagtcagtgaaggtaaaacatatctctgcatgcctgtcctttcctctcatttgtctatgtgctatggttatgtgtaaggacttccaaatgcagtagtcttttcctcctacggtagctgagttaagactaaacamtttaatacttaaaataatcctcttattgaagttaagtgacaatagagggttcagttccttaaaagtaatttgaaaactaaatatcagatgcaacattctgttagatagagataaaggcaaaaagggaaatcagtgatagaaatgtatatataacatgaaaataatgtttagcatttttaaaagaaagagagcaaattgattagaaatgctctttattttacgataatgaatctgtttttgtgtaaataccaatctcagttttgtgctatctttcctataatggctagggaagacagatcaacttttcgttgcagttcattgagtttaacaatttcttatcctcttttttcagaaaaaaatgaatacctaattcaaagcaaaaaaaaagttacatttgattgactaaaatgacataaaattcatagagttacacagcagcttttgagagtcaaa

SEQ ID NO: 438740 - DNA, 605 bp, Homo sapiens
attgtatcaaaatcaattaagtcagtgaaggtaaaacatatctctgcatgcctgtcctttcctctcatttgtctatgtgctatggttatgtgtaaggacttccaaatgcagtagtcttttcctcctacggtagctgagttaagactaaacactttaatacttaaaataatcctcttattgaagttaagtgacaatagagggttcagttccttaaaagtaatttgaaaactaaatatcagatgmaacattctgttagatagagataaaggcaaaaagggaaatcagtgatagaaatgtatatataacatgaaaataatgtttagcatttttaaaagaaagagagcaaattgattagaaatgctctttattttacgataatgaatctgtttttgtgtaaataccaatctcagttttgtgctatctttcctataatggctagggaagacagatcaacttttcgttgcagttcattgagtttaacaatttcttatcctcttttttcagaaaaaaatgaatacctaattcaaagcaaaaaaaaagttacatttgattgactaaaatgacataaaattcatagagttacacagcagcttttgagagtcaaa

SEQ ID NO: 438741 - DNA, 508 bp, Homo sapiens
cactttcgaggagtccttcagatccatgaagtgcctcatacttaatacttactacataataatacttactacagagtcacactctcagtgggcacacagcaaatgtcaactgactcaatgaccttttcccaaccctttgtatcaagagagycagtattaaatgtcatcaaatcctatttcacagtgaaagttgattgaacatgcagtttagaggggaatttttaacttaacacgtaactaaaattacttcagcagttgctgtgtagcattgatttgaggcaaacttctgattaataaattgaaacctttcaaaatgaaatcttaagaaagaaaaatagaaaaaatccaataaagtttttgttaaatattttgctctttgtctaatttttcactatataaatactgctaatagatatttttataaaaataaaaataaaccattaataccccaaagaaagctgcataccttgttaaaatctgttttgtcactttcccttaagctttctta

SEQ ID NO: 438742 - DNA, 530 bp, Homo sapiens
ctttaaagctagctagaagaaaagaaataacaaacatcagagctaaattgaaaaaagatctaaataaacactattagaaatgacaaaggggacattactgtcaaaccccacagaaataagaaaaaaaaaccctcagttactgttacaaacaccactttgcacacaaactagaaaacttagaagaaatgaataagtccctggaaacatacaacctccaaagattgaaccaggaggaaattgacagcccgaacagaccaataacaagttctgaaattgaatcagtaatgaaaatcataccaacacaaaaagccctgaaccagacagattcacagctgaattctaccagatgtataaagaagagctggtgccaatcctactaaaaatattccaaaaaattgaggaggaaggactctttcctaactcattctatgagctcagcatcattctgataccaaaaacttggcmaagacaccaaatctccaaaaaaagaaaacttggggcccatatatttgaggaacataagtacaaaa

SEQ ID NO: 438743 - DNA, 530 bp, Homo sapiens
ctttaaagctagctagaagaaaagaaataacaaacatcagagctaaattgaaaaaagatctaaataaacactattagaaatgacaaaggggacattactgtcaaaccccacagaaataagaaaaaaaaaccctcagttactgttacaaacaccactttgcacacaaactagaaaacttagaagaaatgaataagtccctggaaacatacaacctccaaagattgaaccaggaggaaattgacagcccgaacagaccaataacaagttctgaaattgaatcagtaatgaaaatcataccaacacaaaaagccctgaaccagacagattcacagctgaattctaccagatgtataaagaagagctggtgccaatcctactaaaaatattccaaaaaattgaggaggaaggactctttcctaactcattctatgagctcagcatcattctgataccaaaaacttggccaagacaccaaatctccaamaaaagaaaacttggggcccatatatttgaggaacataagtacaaaa

SEQ ID NO: 438744 - DNA, 605 bp, Homo sapiens
atgctttggtagaaaaattgtgagtttttataatgagcagaagtcgaacaatacttttacttgtctaataaaktctgttgcctcactacacattctgagaggttttcagaagacataaaaacaactaacatatatgtttctcccagttctgagaaaacaaaaaattcttaatagaagttaattctgagtaaatacataagtctgagttgctgtacttactgtatttagaactgttaaattaattttggtgaaacgattttctttcaatttaattcaatattaaaactagctatccttcatttctttcccagaaattcttcaacaataccaccctcccccccacacacacacgcatgcatgcacacacattctctctctctctctctccactttcaaaataaaagggtggtatatctcttggtcgtacagattaccaggatataaaattccataaccatctttcatttcaccaaaaacgaggtaaagaaaatattaccactgatagggtagaaaatatattgtgagacacaagaaaagaaacttgatagcaaaagagttttaatcagtagagatcttaaactcaatacaaggcaagaggaaaggac

SEQ ID NO: 438745 - DNA, 605 bp, Homo sapiens
atgctttggtagaaaaattgtgagtttttataatgagcagaagtcgaacaatacttttacttgtctaataaagtctgttkcctcactacacattctgagaggttttcagaagacataaaaacaactaacatatatgtttctcccagttctgagaaaacaaaaaattcttaatagaagttaattctgagtaaatacataagtctgagttgctgtacttactgtatttagaactgttaaattaattttggtgaaacgattttctttcaatttaattcaatattaaaactagctatccttcatttctttcccagaaattcttcaacaataccaccctcccccccacacacacacgcatgcatgcacacacattctctctctctctctctccactttcaaaataaaagggtggtatatctcttggtcgtacagattaccaggatataaaattccataaccatctttcatttcaccaaaaacgaggtaaagaaaatattaccactgatagggtagaaaatatattgtgagacacaagaaaagaaacttgatagcaaaagagttttaatcagtagagatcttaaactcaatacaaggcaagaggaaaggac

SEQ ID NO: 438746 - DNA, 580 bp, Homo sapiens
aaggccctcccagttgtcagactctaggcttctagtgtgccctccctcactgtacagctggtcaatgcatggcactagaaagtgcaaaggcttcagtgttggatgagtgtggatttgaatcccagctgtgttgtggactagctctgagcttcagtctcttcctcttaaaatgggaataatagggtagttgcaaagtgtcattgttaaytaggccctgggctaagttctttactcctgtgattttatgaaatcctcaaacagccctgtgaggtgtgtcttgttaatatctgtattttatagatgaggagcctgaggcacagaagggtgaagaaactggcctaagtggtagagcttttcactgaacccaggcctattagagagcagaggccacattcttcactgttatgcagtgtcatgctatgttatctgtccagacatgttacgattcctggcacacaggatcagagcaaatagtagctattattcttattactattattgttctaaaattcaggcctttcttcaccacactgacactgagtaatatatattgtagctgttcaataaaactttattggat

SEQ ID NO: 438747 - DNA, 588 bp, Homo sapiens
ttgtaaagtcaggggtaatcatagtacttatttatacagttattataaggagtaaataaattagtttgtgctgagtgyctacaacaatgcctggagtgaaataagcactctgtgttagcttttattgaatttacaatgaaaaacgtccaggtcttactatctgaagtgcagttagttttttcagcaaggctttagaattagacagggctatgtttaaatcttagctctgctgtgtgttttgggggaaattactttgcctttctaagcttctgtttcctcgtctgtgaaaagggcattaaagaataaaatcagttgaatttctgagccctaattaagaaccttgagggcagagccatggtttacacttgctttttttcttctttcttactttacctggtatgccatgtttataatcactgctaaattaaaatagtaaatatttaaactgagttttcccttcagtctaccttgtagtagaaaaattaaatacttctatgttacttaaaactgcacactcacaagtttatggtggtgtattgattggttgttctgaagaatgtattctgcttgccaccatgaactgggctt

SEQ ID NO: 438748 - DNA, 493 bp, Homo sapiens
agcttatttgacctcagaaaacataatcatagaacttccctcaaaacagacctgagtaatgctaatttaggagttggagagaacaagaagtaccagcatgagatcaaggtagagaaactcaattatctttgtagaaacatttctactttgaaatagaaatagaatgatctaagctgaaatagatttttttgkgtgtgttttattatagtagtggttggagtaggggtccccaaaaagtaaggattaagggagtgaggatctttcctttatgaaaatggtatggacccgtgtcatttaatggagggttttggtggttaggaggacaggctactgggtgtgagttcagggtctaccatgttttagctggatgacataagaaattgcctaccatcacagtgcctccttcctcacctgtgaaatgtgggtaataatagtaatgactacaagagctcttctaagaattaaatgtgatgatgcatgtataatgctgaga

SEQ ID NO: 438749 - DNA, 493 bp, Homo sapiens
agcttatttgacctcagaaaacataatcatagaacttccctcaaaacagacctgagtaatgctaatttaggagttggagagaacaagaagtaccagcatgagatcaaggtagagaaactcaattatctttgtagaaacatttctactttgaaatagaaatagaatgatctaagctgaaatagatttttttgtgtgtgttttattatagtagtggttggagtaggggtccccaaaaagtaaggattaagggagtgaggatctttcctttatgaaaatggtatggaccmgtgtcatttaatggagggttttggtggttaggaggacaggctactgggtgtgagttcagggtctaccatgttttagctggatgacataagaaattgcctaccatcacagtgcctccttcctcacctgtgaaatgtgggtaataatagtaatgactacaagagctcttctaagaattaaatgtgatgatgcatgtataatgctgaga

SEQ ID NO: 438750 - DNA, 491 bp, Homo sapiens
gtttcccagctggagaaaaacctgagtcttcatacaaggagagagaaccacaatgtgtgttcctgcagtactgctgtggaagtcatgctgtatgcaagtacgtccaaatcaataatcataagtagccccgatggctgaacccaaagtctttctttataatcttttatattatttctttaaaagactctgcctgtaaaagaatctgaatctagtaaacttactcgtgatttaatttgagctctgtttgaggtgttggctctgtttgttgattatgccaggttcttttyggtttctaagcagttgaatcaagtgatagaatgtctggttttctagttgcttcatacatgaagttgcatatccatccatctatccatctatccttccatccatccatccatccacgcagtaaatatttatcagtcaagtactactaaccacttccaatttatgaagcatcctcacaaagcccccaaatgtggtttaaatatagc

SEQ ID NO: 438751 - DNA, 601 bp, Homo sapiens
tttcctactgttcataagcacttccttaagcttaatatatactcctctcagatgcagagttttgggggttgtttttccatttccatgagaataatgtaacagactgatgagatatattcagccactgtgttgggccaccttggattttcatcaaattttgttttatttaattttcaaagaaaataatgatgaaataccctaaatatccaatcactgagtgatggctaaataaaagaaataaaagaaaagaaaaacaatatctataaagacttggaaaaaayagtattatgtattaagtgaaaaaaaagcttgctacaaaataacatagacaagatgattacatttatggataaaaatgtatgcatagggcaaaaaagcctgcaaggaaatgtacccaaaatattaaaagtgattttttgtgtgtttaaaatatgagccctagtctttcactttctcagtgtttctttattttctgaattttctttggtacatatattatttgcaccttttttaattgcaataagccaatataaaaacaaaaaaaaagttcaatgtgctatccattgcactacagagccttcttatactttttaaatgtttg

SEQ ID NO: 438752 - DNA, 552 bp, Homo sapiens
tacagaaaagcagacaaaagtgacaaaacccatttcagatacaaatattttttatttgtttcagatttttaaaagaaataaaacattatagatacaacaaaagctcccagtgtacccctcctaaatcctgtctcttttcttctccagagataatctgtcctttaaatgtgatgtcttttcattcccatgcatgtttttatatttttgctctctgtgcataaatgcactgagtgctactaaaaatagtgctttgcctattttaaaattgtgtataaatgggaacttactgtacctgtcatacatcttgctatttttgctcaatgttgtgtttttggtattaaccttgttaatttaggaattgcatgttgatctaagaagttattttagttgctgtgcagtaagtatgctattgtatgaccatttcacaattaatgtacccattctcctgycttcatttttttgtgtattataaacaattttgccatgaaaactttgacttatctttctgtaaaaatgtgtgaagtttttctaggccaaatacctaggaataga

SEQ ID NO: 438753 - DNA, 614 bp, Homo sapiens
tttttccaaaactttaatgtgctcattataaatctccaaaagggcaataaaatatgtcttatacagccaaggagcatttttatttattttttgagacagygtctcgctttgttgcccagccttgagtgcagtcatgcaatcatattgggctgcagccttgaactcctgggctcaagcagtcttcccacctcagccttcctagtatttgggactacaggtgcattccactgcaccaggctaattttttaaatatattttatagagacaggatcttgctatgttgcccaggctggtcatgaactcctgtccttaaaagatcctcctgcttccaccttccaaagtggctgggcttacaggcatgagccactgtacccggcctgtaatgaagcatcttatactttggaatgctcggatcccaagtggataaatggacagtcaccacagtaattctattcttatcacgacaaaacatgtcaaacttctactctttaccaagacatcacctttttgtgctttttaaaaaagatacaagaacagagttctgcatcttcccctctttcctctcttacactctggctagtttcactccagttgatgcattaggagcaatcatt

SEQ ID NO: 438754 - DNA, 562 bp, Homo sapiens
cacacttcttagggcttttaatctcaaattaaaagtacaaaacatactcctgaaaatatgccattataatcaattcacaaacaagtgataattttataggtaacagcaaaatcaccttaaaggggttgacattgtcatcagaatatcttaaggaattaacactcttcattcacattttcaacatccatgcggagaaacattaaagcaaaaatggacccagggtaaccctgggactcagtcctcctaagtcaaaccttctcatctgtctatgaagcatccccatctttgagcctggctgcctgcccatctcctgagctaaggaaaggaaaatattcacaagcctgccttcgttactaggggaaatgttagctcctgcttttaattaagcattttatactgattttcttctttgaccataaaagataaccaactgcatattttctaaatgatccatacagatctaataaacaatgtttttccaataaaaaggcagctcccactgtctccctcrtctgccataaaaacttgagctttccaatattcatcagtttgacaaatattt

SEQ ID NO: 438755 - DNA, 620 bp, Homo sapiens
tgctctctccttgtcttgctcctgcttccctttaaaattccttggctgcccttagtgtggcatgtgtttccatttatcctatagttctcaagactcaatggagctcttgtacttctgaagggcacttactaggaagcccttctccctgacgttgagcttgcactgatcaaaacggggggccccacaaaccatcacagggatatctatgcaaagrgggaatgtttagcaccaaagttaaggactgtgcatgctttggcagaattacaaaaggaaaaataagtggacaaagtatgttactttttttttattattatagggtgtgtgtggtttatttgaacatcaacaaaaacacaacagaaaggggtaaaatgtaaaggaaaagcccctttgctgtcctccaaccctgaggaagctgttagcagttttaagtgcatccttccagaaatatctccctcatgtatggacatatatgtcctttagttagttttagaaaattcaaatggaatcataacagaattttgttctgtgccttgccgtttttgcttaatttttcttggaggtctttcaactttaagaggtaaaaatggctgtatgatatgtaacaataagtgtggctgatt

SEQ ID NO: 438756 - DNA, 604 bp, Homo sapiens
cagttatttctcatgctgcaatgatcatccttttttatatgtctcttttaccttgtctgaatattcctgtagagtaaatgcctagaagaggaatagctagtgaaaaggacatgtgcattttaaattttgaccaatattgctgaattactttcctaaaaaaggcagctgacgtatccctcacctttaaaacagcaaactatacaactctcagacctttgtctccgaatctgtgcatctttatattggatgcaaatcacgtgttgattggctggttttttttcttcctctgccttttttgcttattttcttttgggatatttgcttttttacttcttgactttcaaaactctttgctggttaataaatctaactcatagaccatgcaacgtgttagaaatatttttttctaatatgtcatttgtattttgactttcatttatggcacgtttgccacataagagtttaaattgatatgkgtctaaatttttcactgtttttcacttttggatttcaggtttgtgtttgcttagaaagtttttccccacttcgagtcagtcaaataatgtaaaaattttcatttagctattgggcagcttagaagcca

SEQ ID NO: 438757 - DNA, 586 bp, Homo sapiens
attacatggagactatttatctccagtatgactcccccctgacccaataaatatactgcacatatggcacttcatccatcagctagaagaacaaatacacttttgcttgacattatcatctatgaaatcaagaaccacacatattcaccacttaacatttgttttccatacaccagatagaaagtgagatgatatttacataaagatagcttgtgatacgagcaaaaataaataaataaataagctgtgtaacatctgaagaattatctgcaagcaaaatatatttgattgctataattctatcccatcatctccaagatttaaaattccctgactagcaagtaaggaactaaaatcaatatgtaaaagacaaatctggaaattttaaatactacaaaaatatgcacaagacatttgggygaattgaagggttagatttggtataccttaaacaaaaatgaagtagaacctgcaaaacttaaaatacataaataaaaaatttaagtttactgtcagggacaagaaattaatagtataacaataaaagcatatttcaagtatctctgaatagtccttaaagctgtct

SEQ ID NO: 438758 - DNA, 606 bp, Homo sapiens
ccttagaaagataatattgcagcacattataggtttgtgatcagcaacaaaatactttatcagctccacactaatttcaatacatataactaatattaatgacagtgtgacatttcaaaggatgtcctaaaatttaagagtgtgcttataacgtatttctgacctcatttctaaccctcattagtgagtaagtaaagggcaggggagaaattttccaggttgggtcctcaggaagtgctcttctttccccctctcaaggcttgcgattaccctccccaactcctttaattttcattcaaccaaaagcttcctacatccattcccactgagtccccacccagcttccaactctcactttacaccctttcaagaaggaggaaggtgatggggatgaacctctgtgacctctcttctcccacgcctaccagattctaccattcacaacaaaaacttcgtttaaggcatgttaagttatcaaaggtgtcaaaacacatctctttgcttagtgyctgcttgcacctcaaatcacatcctcagccttagtctcagctgttggaggagcaggatgactctttctcactttgctacccagtattctgttcataa

SEQ ID NO: 438759 - DNA, 581 bp, Homo sapiens
aaaacacatctctttgcttagtgtctgcttgcacctcaaatcacatcctcagccttagtctcagctgttggaggagcaggatgactctttctcactttgctacccagtattctgttcataattattataaaaagagttatttttaaataaaaatatttatctttttctcccatgctagcttatatgggataggaatatccttttctctttgtaacctcagcgcctggtatggttcttggctcactctcagtaacagctaatcataataaaatttcatgaatgcttactatgtgtcaagaactgtgctcggtgctttacatgcactcaatcaggtaatccaaacaattccatgacattggtactcaacaacagaggtaactgagacacagaaaggttaagtaacttatcgatggacttaaggctaaaaggtgatgaagctgggattcaaaytcaagcagttcagttacagagcccatgctctaacaaagatgctattaatacatgcagtacaggagtcaaggatcctttctccctcagccttggggaggaaggcggggctggagtagtcttcaagcagaggt

SEQ ID NO: 438760 - DNA, 585 bp, Homo sapiens
ccagaactgttggttaattggatgcgtgcttatgtgcacccatgagtttgaactgggtgaggtcatgggtggaaggtgaaagtgcggtgagggaggaataaaacataacaagtctcaggcctcagtggccaacagaagtttctaggcaggaaatctatagttccacttggaagtacaattatatccagacatatgacaagaatcaagatgttccacctgctttctcgtggaaacactgtacctcatggtagtccacgattaataatatattttaagtacawcatgggttaaataggcttttgaaggctgagttagatacctaaactctgtgtatgacatgatttccatcaggtcacagtttcaaacaactgagttaaaacaccatctaggcctccgtggagacaggggttatgtttgttttgccgcttactcaatactcagccctggcacagggtcactcaatgggtgaataaatgaacgtactgctttggagagctgggcttgtgtatatcacactgcttatatataattagaacaaaaatatatacaaaatgtacagcaactctcacaatgaataatctatgt

SEQ ID NO: 438761 - DNA, 580 bp, Homo sapiens
ggagttgggggtggattacatgattgcatgttataggactgggtatataatttgtagggtccagtgcaaaatgaaartgaatgacagacctgtttttcaaaaatcattacaaattacaagatagtgacagcagagcattaagccaagtgctggagacaggacctgaatcaggtcacacatccttgaagccaggtccgcacatcataatctccattttagaaagttgtgtaggcaattatataaagaatgaataatttcaaccagcaagagtaggggctattaggaaatttttattagcaatccaggtaagccataatgagggcctgaactaagtctgtacaagtgggagaggagagcagttttatcatcctaggtaatacgactgttcacctttactatttaattttcttcattatatttgtaataacccccaatttatgatatcaacaccatagagcttcatgcaatagaaagtacccaataagaaaactttaatgggataagaaaaaccaattataagaacaagtcaaacgtccctatgattctatgttaaaaatagccccactgaattagtgggtgt

SEQ ID NO: 438762 - DNA, 523 bp, Homo sapiens
ggagttctacccagctataagcactgccagtgttagttttgttgttaggcagtcaattgttgcatatggaaaagaagttaaaaatacttagaagttgtcactttaaaaagcaaagctctttaacaccttagatgatatgtagagcagaacatataaaaattataaaatatgcattcacttaaaattaaagaacaattaaaatccaataatcaagactatctatatggcttttagtgcttgagctacctggtcacctggaaaataggacataagacaggaatttctggagcacacacgttttcaactatcttcctaattcatattatgcatcatttaattaaaatcaactarcaagtttccttcacttactgtgtgtgaggcactgcactctggggataactcaaaatttggctgccttcttttcaatgggggtaccttccaggaggtagtgtgatgtaaaagaccaaatatcgactttggagtcacagtggcctgggtcacattcctggctgtaaaacagact

SEQ ID NO: 438763 - DNA, 572 bp, Homo sapiens
tagagactttatgcattctaggtattcaatatatatttatggaattgaatcaaacacarccattctgaagcactgcttctgtaatgtcatttctcagttccacattgctttttaattcaagtcataaagcctcaggttggtttacaaagtcttcctgatttattcacccttgctaatccttaaatcccacagttccaaatgtacaccctcgtgctgaggttcccccttacctgtttctgattgtttcagtgtttcttgttctttgcctttgcttctgctattgcccttccctgggacacttcttctccccctgttcaaatcatgtccatctccaagactcaccccaagtaccactcacctctgaagcacttcccgtgatgcttgccagcaggacctcatccctcctggacattgggtgggactcatcattaccagatactcttacaatcatattccatagagaactttattagaccccctactcagggcagactaatccagcattacagtaagcacagtacctagggcccatgacactttgaaggacgcgtgaaaatatcataacttttttt

SEQ ID NO: 438764 - DNA, 351 bp, Homo sapiens
gccagtggccagtagactggagcaagacaagatgttgagattcttctagtgcataaacaataatactktctcctgtagcaatgcctttgaaacactattttgccagaataaaaaggccaagtatattattatagcagcacaatcaacaccactggcaaacattggttacacagcaaaatctaacatgtactgtgttttaaatttttatttgcttatttatttagagacagggtcttgctctgttacccagagtgaagtgtagttgagtgatcatagctcactgtaacctcaaactcctggactcaagagattctcccgtcttggcctctcatgtagctgggactacaggca

SEQ ID NO: 438765 - DNA, 539 bp, Homo sapiens
tttttgtttgtttgctttttgcttacatggagctgtgattatttttatcagagcacttagtatgaaattaaacatcatttaaagtaatactttgaytgatgtgtctcttccaagttccacaaatgcaaagatgctcttttttgctcactgctgtgttcacactgtcacagtgagggatcagattaatgaatgagcaagcatctaggacagaaattctcaaattttctgatgtgcttatataatttaatgttactttgctttcagacgttctggttttacattagtgacttccgcatgtataattcttgtaattctattctctcctaccaagatgatatgagtaaatcatcactgcatatatattttctttttcctgtcatgatgataacttaatctgatccattcttgttcattttcactctttgttggcaaatgaaacatcattattgcatggggttaagtgcatgggctttggggtcaaactggtctggatcataatcctggatctctcagttactaactttgtaaacatgggcaag

SEQ ID NO: 438766 - DNA, 438 bp, Homo sapiens
taatgtttatttttaaattttttaatttattttttatttcagtagattttaggggaacaggtggtgtttggttacatgagtaagttctttagtggtgatgtctgcgattttgatacaascatcacccaagcagtgtgtaatgtttatttttaaaagcaaattgaaacatttcaaagaaaaaaacccctaatatttgcaaacagttaacatgtgggttattttaaggtttagcttacacatagacactgtttcagaaatattaaaaataatttaatgaacacataccaagaaatcggacagttcggcgcaccagcgggtttatatagcaacagtctccagttaaaatagttttttcctggttttcaaaatcccttgtggctagttgtaggcaaaagacagcagtttctccaactattatcttgaaagaaaataaaagat

SEQ ID NO: 438767 - DNA, 561 bp, Homo sapiens
tattaatacttttataaataagaaaaaataaatctgcacacctttgactttgagagcctcctgttctgagacattactaggaattgtcataatatactacttatactttagtataaatgttattttgatcttcattaaaaccatatgaaactaggaatagcatcctacccttttacaagtaaagaaacaccaagacttggaacacaagtgagttgcccaagaacaaggttctgttacagatgctttgctctactctgttgacttattaaaggacctggctatcttacaaccatatttgtaccattggtagtgatttttatacatggtcctcaaaatcacctagtaaggtattacaggaagtattaatattccattttacaaatgaggaaatggagatttagggaagttaaataatgtgttctttttaaggccagtcagaagccaagaagaaatttctctctaatactrtgaacaacagcatgagaaataagattaaaagaaactggagctaacagtgtgtctactaatttgtcattgtgaagtttgcttttattatgtctt

SEQ ID NO: 438768 - DNA, 561 bp, Homo sapiens
tctggcattttattttggctctcttttcctgacagaagctctccctggtggacttcattcctcctaagactttaccatcccctgctccactaaggaatcctaaatctgcatatttcccctaaaccccagatgcaggtctccatccacctattaaacagtgacatctcaacatgctcatatctacctattggaaggccacacagcctttacatccaaaataaaatccatgtgttcctcctgctcttcygtgtcaccatctcaattaatccattcaatttctacttggactcaagctaaaactctcatacatttacatatcatgctgacacctccagttccttcatttgtctcttttcatcaattgcttttatttatattatttttaattgacacaaaattatatatatttatggtgtgcaacataatgttgtgaaatatgtgaattatgtaatggttaaatcaagctatttaacatatgcattacctcacataattagcattttttgtggtgaaaacacttagaatctactctgttaacaatttttaagtatacactacatt

SEQ ID NO: 438769 - DNA, 561 bp, Homo sapiens
tctggcattttattttggctctcttttcctgacagaagctctccctggtggacttcattcctcctaagactttaccatcccctgctccactaaggaatcctaaatctgcatatttcccctaaaccccagatgcaggtctccatccacctattaaacagtgacatctcaacatgctcatatctacctattggaaggccacacagcctttacatccaaaataaaatccatgtgttcctcctgctcttctgtgtcaccatctcaattaatcyattcaatttctacttggactcaagctaaaactctcatacatttacatatcatgctgacacctccagttccttcatttgtctcttttcatcaattgcttttatttatattatttttaattgacacaaaattatatatatttatggtgtgcaacataatgttgtgaaatatgtgaattatgtaatggttaaatcaagctatttaacatatgcattacctcacataattagcattttttgtggtgaaaacacttagaatctactctgttaacaatttttaagtatacactacatt

SEQ ID NO: 438770 - DNA, 514 bp, Homo sapiens
ttcaataaaaaaaatgacttttcatgaaggtatttcctttattagcatagcatattatgtgtatgtacaaacatatatttatagacatatatacgcctgtatgattcaaatcattaactggagtttatgaagtttttgaaatcagtttcttaaaagcagaattcaagagtagcaattattttgttttacttacctcgtatggcaatctcttacaaatggccaattcttagcataacattcttaatcatctagaaacaccaagcacagatagtccaactgtctttttttctttttattcttactgtatccrttcttgttttatctgaattttcattttagatcaacctcaacaatattattagcagggggaagctgttgaagtgtttaagtgtttttaatgtttccatttgtgtatgccatatttagaggacacatacttgataaaaaccagcattatgaatacagctagaaaaaataaagtggaatagatttctaccaaacagatgttactttg

SEQ ID NO: 438771 - DNA, 514 bp, Homo sapiens
ttcaataaaaaaaatgacttttcatgaaggtatttcctttattagcatagcatattatgtgtatgtacaaacatatatttatagacatatatacgcctgtatgattcaaatcattaactggagtttatgaagtttttgaaatcagtttcttaaaagcagaattcaagagtagcaattattttgttttacttacctcgtatggcaatctcttacaaatggccaattcttagcataacattcttaatcatctagaaacaccaagcacagatagtccaactgtctttttttctttttattcttactgtatccattcttgttttatctgaattttcattttagatcaacctcaacaatattattagmagggggaagctgttgaagtgtttaagtgtttttaatgtttccatttgtgtatgccatatttagaggacacatacttgataaaaaccagcattatgaatacagctagaaaaaataaagtggaatagatttctaccaaacagatgttactttg

SEQ ID NO: 438772 - DNA, 514 bp, Homo sapiens
ttcaataaaaaaaatgacttttcatgaaggtatttcctttattagcatagcatattatgtgtatgtacaaacatatatttatagacatatatacgcctgtatgattcaaatcattaactggagtttatgaagtttttgaaatcagtttcttaaaagcagaattcaagagtagcaattattttgttttacttacctcgtatggcaatctcttacaaatggccaattcttagcataacattcttaatcatctagaaacaccaagcacagatagtccaactgtctttttttctttttattcttactgtatccattcttgttttatctgaattttcattttagatcaacctcaacaatattattagcagggggaarctgttgaagtgtttaagtgtttttaatgtttccatttgtgtatgccatatttagaggacacatacttgataaaaaccagcattatgaatacagctagaaaaaataaagtggaatagatttctaccaaacagatgttactttg

SEQ ID NO: 438773 - DNA, 583 bp, Homo sapiens
gtcaatcacatctgaggtctaatctgtaacaattcatgatccattattcccatatattctgtaataactaaaacaaacagatcacaatggagtcaactcacaaaatttgttccttatttttttctcccatcttcctgccccaaagcaatgttctcattggttctatraatgtatgctaatatatctagaatttctaacctgtttttcttattatgactatttgcttttgatctaggatgctatgatgcttagataataagcaaaaaagaccatcatgtttttattgacacaagttatttgaaggcagcaagttcaatacattcttccctgtgaatgtattgaaccttatctggttcctcatgctgacatttgaacataccttcttcctggtatgtttttattcaggttaatttctctatacatggtgaacctaacatttgcttggaagaaaggtttatcttctggtagagaactagcctctgacccagagaaggctcttaaggagcattcacatcatctatagtaaatacatatactatagtaaatggcgctttagaaaagaaggttttcaatcagtcttaca

SEQ ID NO: 438774 - DNA, 579 bp, Homo sapiens
tgtatgaaattcctaaaaatctgatctgttattagtcataatkttggtttttattttaaaacatggtacacaacagaaataccatatttccctatgagttgtgccattatcatagtgaactcaaatcagatctttaactatggtcattttaagtccttttgtccacagttaattgctttattctaatgcttttctgaaagccttttgcaagcaactgtaatcctaatgtgtgatgcattcaaataaattcatggaaaagactctgacaaatactgttttctgataactttagatcacaccatgggactgggtaagaatttctatcactctaatgaagaaaccagtgggttcatgaaactgttaaccaaaggcaagcagaataaaaattaattagatgaaataaactaataaagaattatgcattttacacttttttttaacattgctgattcttttgatttgtttttctaggtttaagaaaatatgttttttctcttaagctaccgaaaatttatagcaatttggtatagtatactttcatgaacaaaaattgaaatatttactttttctccataaccg

SEQ ID NO: 438775 - DNA, 549 bp, Homo sapiens
gagcataagttgagtaccagtgaatgcaagacagtcagaaactaaagacaggagaaaggaggccaccacagaatcataggagtaaggctacatctatgctctgctattagggggaagtgggaaatagtgtgtggtccttgtgcaaaataccctacagaatctatacggcttcagaaaaaatttgcctttccctcacccccgaaggccatctcagatacagtccagcccttacttgtccaagttgtatgagaccatagtaaaatgygggcttgggctacatccctgtgaagtttctcttgaatgtcgagttgatcgttaaattgccctaatgactcaagcaaggttcataaggagcccatagacagtctagccacaatgcaaactcatgaaaaagcttctattttaggaatagcctggtatttggcttttccctccatcagagtggagagtggacagtggctgaatttcaagggttatgtgaatttcaagggttatatatttaactttaaagtagatcatagcagtgctttataatgcacaaatttttct

SEQ ID NO: 438776 - DNA, 602 bp, Homo sapiens
gtgcttatagcactgtagtagtgtgtgttactgagatgagacacatgcctttaaatcaaaacaatagaaatatctttgaatcccttctgctgccacctactcctctacaacatttccaagcttaataggaaacaaacgatttcctacaccacccattgaaatcatcatctacgatagaacacgaagttttccatcgaagcaggaacattgaaatcgaggataaaaggtttgagaaaattttgactcctggtactgaatcactatgagtaaaatctttaaagactaattaacatgttaggataaaagtatataacaaaaaatgaaatgcacagcctttggtgattctgccattgccatcacgggactccagattggtcatctaacctcttccaaatctctttcataaatttgttgtgaaaattgattacattaatgaatttaaataattagagtctgacatacagtaatctcactaaacttctatttctcatttataaaataaatatatttaatgttagtccccaatatgattaaggaaagtactatcctggggagtattaaatgragcaatgggttaaatgcacctaacacagtggctggtg

SEQ ID NO: 438777 - DNA, 554 bp, Homo sapiens
gcaactttctagatctccacactgccagtctacactgcagattttgagcttatcacacctccacaattgtgtgagccaattatttgcaatgactctgtctctctctmtatatatatatacatattataatggttctgtttctctaaaaactatgactagcattccttatactaaattccttataaatcattgtcactcatttcacacttctttgacaaccaaacctcagctgtgaatgtgacaaaagtctccatatctgcattgtccaataggagaaccagtagtcccatgtggttctttaaatttaaatccaaataatttaaaattaataaaattagaaatttactcacacttgctgtatttcaagagatgaattgttatttgtgactagtggctagaacattaaactgtacacattatattgcatttccattattatagaatgttttatttgacagtactgcaattctaagtcaacttgtctgtgccattcccctacagaaatgtcagttaacgagatgatttgtcttctccaaaaatattccaggtgacca

SEQ ID NO: 438778 - DNA, 582 bp, Homo sapiens
aaaccaagaaatagcctgaatagacaaagtaatcctgatcaaaatgaacaaagccagaggcatactacctaacttcaaactgtattataggctacaataaccaaaacagcattgtcctggtacaaaaatagacacatagacaaatctaacagaatagaaaactcagaaataaagccatacgctattaaccatctgatcttcaacaaggtcaggaaaagtaggcgatgggcaaaggactccctgttccctacatggtgttgagataactggctagccacaaccagcagaataaaactkaacccttatttctaccatatacaaaaattaactcaagatggattaaatatttaaatataagacctcaaattgtgaaaatcctagaagaaaatctagaaaatattcttctcaacaccagcctttgcaaagaatttttgcaagtccccaaaagcaattgcaacaaaaacataaattgacatgtgggacttaataaaagtaaaggcttctgcatagaagaaactataaacagtgtaaacagacaaccttccagaatgggagaaaatattcataaactaggcatccaac

SEQ ID NO: 438779 - DNA, 582 bp, Homo sapiens
aaaccaagaaatagcctgaatagacaaagtaatcctgatcaaaatgaacaaagccagaggcatactacctaacttcaaactgtattataggctacaataaccaaaacagcattgtcctggtacaaaaatagacacatagacaaatctaacagaatagaaaactcagaaataaagccatacgctattaaccatctgatcttcaacaaggtcaggaaaagtaggcgatgggcaaaggactccctgttccctacatggtgttgagataactggctagccacaaccagcagaataaaacttaacccttatttctaccatatacaaaaattaactcaagatggattmaatatttaaatataagacctcaaattgtgaaaatcctagaagaaaatctagaaaatattcttctcaacaccagcctttgcaaagaatttttgcaagtccccaaaagcaattgcaacaaaaacataaattgacatgtgggacttaataaaagtaaaggcttctgcatagaagaaactataaacagtgtaaacagacaaccttccagaatgggagaaaatattcataaactaggcatccaac

SEQ ID NO: 438780 - DNA, 497 bp, Homo sapiens
caagggaaaacagatcattataccaaaaagacacatgtactcatatgtttattgccatactattcataacagcaagaacatggattcaatctcgtccatcagtggttgactggataaagaaaatgtggtataattataccatggaatattgcacagccrtaataaagaatgaaatcatgtcctttacagcaacatggatggagctggaggctataatcctagtgaacaaatgcaagaacagaaaagaaaacaccacatattctcatttataagtgggagctaaatatccagcacacatggacataatcatgggaacaatagacaatgtggaccaatagagtggggaaggaggagggaatgggttgaaaaactacttattgggcactgtgctcactgcctggctgcaatctacccatataacaaacctatacatgtattcttctatctaaatgaaagctgaaatcttaaaaaagacgaagacagatacattagggtta

SEQ ID NO: 438781 - DNA, 486 bp, Homo sapiens
gtttcctactcttgttgaactcacaatgtactgataaggctgcaagaaaaatgtaagtgaattactaagagtacttgaggccaaccatgacatgagattcagaatatttgacattgagaacttactgcatttattagcacatttaaagttcataactgtgctgtggatatcatactataattatgctttcttcagctgtggaggctgtgagccgacactcagagatattgaatatgttacccaaggaccaactgctaatamgtggtgagggcaatattcaaaacagacagttcaaatttcagagcttatgctcttccaaaaaccgtttgtttttaatgtgatagtggtggtagatgggcattaactttcatttgaaattcagccagggactttaagctcacacattttaaagaactacaggacacacatatacacgttaaccacatacacgcatgtgaaacgcacacacacacaggcaaatacagc

SEQ ID NO: 438782 - DNA, 538 bp, Homo sapiens
ttgagccctaaaaaggttatgtatgtcatctaactttatgcagctagtcagtaattcaagcccagacagcttcacacagactccttcaatcagacacaaaatgaaataaaatatcatttacatacatgtattagcaaattatcatatacttaatcaagattaactaaaaagcaggcattatctgttaaatgacaataagacaaaacctgttcttcaacgtaacaaatattatgtatygtattttaaatgtgatttgtggtatatttttaatgatgaactcaataaaacattttttcagctaatattcaaaatgcaaaacatgtaattttaaggggtttagggcttacatattactgttgtattatttggaataaataacctcatctactatagtaaacatatccctaaatcattctgttttaacttaataaaaatgcatttataacccataagcccccgtgaccacgtttctcattgttatatgcctttccagagcccagagactaagatgtcttcctttatcaggctgtaccctcct

SEQ ID NO: 438783 - DNA, 538 bp, Homo sapiens
caggctgtaccctcctttatgatcctctgccgcattctctacacttgtccaacagaaagagcaaggtgggagcaaagtcatggaagtggcctgcatcactttgtccacttgccattgaccggaacttagtcccatggtcatatccagtggaaaggatactaaggaacacataactgtcrgcccaaaaagacaagaaatggatgttgatgcctgcataacacagttttccatgaatattaaagatatttacaagtcaaaaagtttgggtaatgtgcacctacattaaagcaataattttgttcctaatcccattttatttttctcttgacactctttgagatatggaaacgtttaaatttaacttctgtttcaaagtttcattttgattttttttaatgtattctccagaacaaccactaaatccgtggtccaaactatacctaaagtccacaatgaagaaataacagttaaaaatttgtccattatttcattcacaaagctgattttttcccttaatttcagtaggatttctactttg

SEQ ID NO: 438784 - DNA, 538 bp, Homo sapiens
caggctgtaccctcctttatgatcctctgccgcattctctacacttgtccaacagaaagagcaaggtgggagcaaagtcatggaagtggcctgcatcactttgtccacttgccattgaccggaacttagtcccatggtcatatccagtggaaaggatactaaggaacacataactgtcagcccaaaaagacaagaaatggatgttgatgcctgcataacacagttttccatgaatattaaagatatttacaagtcaaaaagtttgggtaatgtgcacctacattaaagcaataattttgttcctaatcccattttatttttctcttgacactctttgagatatggaaacrtttaaatttaacttctgtttcaaagtttcattttgattttttttaatgtattctccagaacaaccactaaatccgtggtccaaactatacctaaagtccacaatgaagaaataacagttaaaaatttgtccattatttcattcacaaagctgattttttcccttaatttcagtaggatttctactttg

SEQ ID NO: 438785 - DNA, 592 bp, Homo sapiens
tagtttggtggaagaatttttctgattggtcgattctggtttctatggttaacctaagttaatttattgttggccatgtccaaatcatctggagaaatattaaagagggcagacaaaaaaatccatgctgttcacagctaggctttcctatttcactacattacattagaagaaattaagccyggagaggttaaaataattttactaatataattcatgtgtgttagggtagattgatccagctctgactgatttcatgacttatgatttattactaagccaaattacatttccaaaaaatgtcagttgggccaaagtagcagctgaaccttcatgctagacattttcaatgagacggtgtacattaacaagcttgaaggaaacttgtttattgtagctacatattttgaatcttgacatctagtaaagaaggcttagacttaaagaaaatcaagtttaggctcggtacaagtcatttccattctgtgggtatcttttttctcatataaacctcctacccaaatatatcatgtagttacatcaagacttaaattattgaacaaagtattttggaaagcttaatatgccctca

SEQ ID NO: 438786 - DNA, 556 bp, Homo sapiens
ggccatgtccaaatcatctggagaaatattaaagagggcagacaaaaaaatccatgctgttcacagctaggctttcctatttcactacattacattagaagaaattaagcccggagaggttaaaataattttactaatataattcatgtgtgttagggtagattgatccagctctgactgatttcatgacttatgatttattactaagccaaattacatttccaaaaaatgtcagttgggccaaagtagcagctgaaccttcatgctagacattttcaatgagacggtgtacattaacaagcttgaaggaaacttgtttattgtagctacatattttgaawcttgacatctagtaaagaaggcttagacttaaagaaaatcaagtttaggctcggtacaagtcatttccattctgtgggtatcttttttctcatataaacctcctacccaaatatatcatgtagttacatcaagacttaaattattgaacaaagtattttggaaagcttaatatgccctcatgaccaccgccccccccacccccgccaaaaaaaga

SEQ ID NO: 438787 - DNA, 592 bp, Homo sapiens
tagtttggtggaagaatttttctgattggtcgattctggtttctatggttaacctaagttaatttattgttggccatgtccaaatcatctggagaaatattaaagagggcagacaaaaaaatccatgctgttcacagctaggctttcctatttcactacattacattagaagaaattaagcccggagaggttaaaataattttactaatataattcatgtgtgttagggtagattgatccagctctgactgatttcatgacttatgatttattactaagccaaattacatttccaaaaaatgtcagttgggccaaagtagcagctgaaccttcatgctagacattttcaatgagacggtgtacattaacaagcttgaaggaaacttgtttattgtagctacatattttgaatcttgacatctagtaaagaaggcttagacttaaagaaaatcaagtttaggctcggtacaagtsatttccattctgtgggtatcttttttctcatataaacctcctacccaaatatatcatgtagttacatcaagacttaaattattgaacaaagtattttggaaagcttaatatgccctca

SEQ ID NO: 438788 - DNA, 452 bp, Homo sapiens
agggagggaaatatggaaaataaagacagctcctgagtagataaatcaatgtatggagacagaagcatattttacagaattatgaattaatcaccaaggtacaagaatcagaaatgattaatagtgcttgcatctaagggtgagactgcatgtgggaagaagctgtgtggaaaacctttgctttttttagtgggctcacacacaaatacatacatgcacacacagacacacatgaacacagatattcattatatatgtatgacttttataaaaactatactagtgattatttaaaaaataggtctagaccaaagaggctaaatttgatatagratatgaaataagtctaaaaatagcacaaatatctttcataaacaaaccacataatattctttggtgagataaatgttcgtggaggtgaataaggagagaggttattaaattttctaaca

SEQ ID NO: 438789 - DNA, 503 bp, Homo sapiens
tctgtttgaagcggtttaaggagcctgtgtagcactggcacagactggaaaagaagtgtggctggttctgttcatgacaccccagtgcagctccagatgggggagtcaarggtgtggggatcaacaagaatatcaatgactccttccaaattaaaaatgtattaaagctagagacagaattgttttcttatctctaacccctttaaaactcccacaacagtaggcacaaagtaggctagcgattattaatattttctgagcttcagaagcaaggagacgcttgtaaatagaacttcattggttttgatttaatgaatcttgggtgaaactgaggaatctcaaggtatagatatcacttaaggtaaatctggtgcctgggagccactttttgagaactactgtagttaatgttcttagattcatttttccgtacctgggctcgcttgttggcctgtccctgttctttccgttagctctcttcagcttcctccccactgccttaa

SEQ ID NO: 438790 - DNA, 503 bp, Homo sapiens
tctgtttgaagcggtttaaggagcctgtgtagcactggcacagactggaaaagaagtgtggctggttctgttcatgacaccccagtgcagctccagatgggggagtcaagggtgtggggatcaacaagaatatcaatgactccttccaaaytaaaaatgtattaaagctagagacagaattgttttcttatctctaacccctttaaaactcccacaacagtaggcacaaagtaggctagcgattattaatattttctgagcttcagaagcaaggagacgcttgtaaatagaacttcattggttttgatttaatgaatcttgggtgaaactgaggaatctcaaggtatagatatcacttaaggtaaatctggtgcctgggagccactttttgagaactactgtagttaatgttcttagattcatttttccgtacctgggctcgcttgttggcctgtccctgttctttccgttagctctcttcagcttcctccccactgccttaa

SEQ ID NO: 438791 - DNA, 608 bp, Homo sapiens
ttgttggcctgtccctgttctttccgttagctctcttcagcttcctccccactgccttaaactgactctagacggaaagaatactctctaagattaaaaatgtctgtccatttatcccagaaagcgagagtcatggaagaaataagcccaaacacagaaaaagagacttcattwtctcattagtattcaacagcagtacatgtaggaaggtttgacctctttattttcatagttgagaaatctggtattcagggaactcaaacgcctgggccaagatcccacagtttagagtaagttgggaaatgaatgacagaggcactggtagagatataagattacaagggatgcagaggtcaccacgaactggaggctcctgattttcattttaagggatcaacatttacataaaaatggatcattagtcttttagagatgaaggtttggcaaaaagtggatcatgctacacagcctggctttaaaaacacaaagcgcaagatcttagtttcagtttacacaatgacaagtaaaagccatgtaaagtgtacaaatctgaaatataagggtctggtcttatatttactaatacttaggtcatgtctaccttaaat

SEQ ID NO: 438792 - DNA, 571 bp, Homo sapiens
cattttttcataaatttccagtttcacctatatgcagttttggcaaatatataattcccaggtagctttgtgtaaactgcttggctctgatgctttttaatgacctaagtaatgttttggaagcagcatcgctatgttttataaaaccaagttattgattgtctaaggacaatttaagatcaagtttgaaagtcagagggcctttgtggcagtataaaatgaggctcttatctcttccagctggaraacagaaaaagacgtattacagtttaaagagagggaagcatctatcagaagacacagcacactttaaggtttggctattttccaatcccttgtgctgagagaacagaagacaaaggagtcatctgttttggaaggacaattaaccccaagcatgagaaggatgcagtgttgctgttacacaatggggacagggaagaagtgtttagatatatgtcacataaggaggacaggaaagatcactgagagtatccatgcagcagttctcatactgtcctatccaatttttatggtacattgacaagtgcctatgacctgagaagctcat

SEQ ID NO: 438793 - DNA, 571 bp, Homo sapiens
cattttttcataaatttccagtttcacctatatgcagttttggcaaatatataattcccaggtagctttgtgtaaactgcttggctctgatgctttttaatgacctaagtaatgttttggaagcagcatcgctatgttttataaaaccaagttattgattgtctaaggacaatttaagatcaagtttgaaagtcagagggcctttgtggcagtataaaatgaggctcttatctcttccagctggagaacagaaaaagacgtattacagtttaaagagagggaagcatctatcagaagacacagcacactttaaggwttggctattttccaatcccttgtgctgagagaacagaagacaaaggagtcatctgttttggaaggacaattaaccccaagcatgagaaggatgcagtgttgctgttacacaatggggacagggaagaagtgtttagatatatgtcacataaggaggacaggaaagatcactgagagtatccatgcagcagttctcatactgtcctatccaatttttatggtacattgacaagtgcctatgacctgagaagctcat

SEQ ID NO: 438794 - DNA, 546 bp, Homo sapiens
aattattataataatagttggaagcaactataattacttaaaataatgtttttgttttacatacaaatattggtccaaaactggtcaagatgacaagtgattgaatttggttatttcatactcagaaactgagaaaggttcaggagaaagtcagatgattctggaggtgaagagcaggaaagaaaggagaagagtatgtgtgagasattgagtaagaaatgcattttctgcatttcttctgactaatgcatgacttctgactaatgaagtcaatatgctgtaataagcctgtgttttatgtttttaaatgtcatgcccatacaacgaaatgcagaaacctaaagggcatcagcagtgtacacccacttatggtaaaaaagctatggttatagaccagtatggggaccattccaagtgtgcagagatgagaaattaggctgaagagagggacaaggggccagatctcaaagggactcatgggtcacatcaaggagtttgtattatggccataatcagcagggagcattttaatcagggcatgtttta

SEQ ID NO: 438795 - DNA, 462 bp, Homo sapiens
ctgcccaggctggactggaacttgaactcttgggctcaagctatcctcccacctcaaactcctgagtaactgggactacaggtatgtgccatgctactcagcaacattgtaattattataataatagttggaagcaactataattacttaaaataatgtttttgttttacatacaaatattggtccaaaactggtcaagatgacaagtgattgaatttggttatttcatactcagaaactgagaaaggttcaggagaaagtcagatgattctggaggtgaagagcaggaaagaaaggagaagagtatgtgtgagacattgagtaagaaatgcattttctgcatttcttctgactaatgcatgacttctgactaatgaagtcaatatgctgtaataagcctgtgttttatstttttaaatgtcatgcccatacaacgaaatgcagaaacctaaagggcatcag

SEQ ID NO: 438796 - DNA, 546 bp, Homo sapiens
gtaattttaatttccatctttatttaaacaaatggaaaaactgctctattgccaaatatattacaccttgccaattaatccattagcaaggctccgtagctgaatttcccattaaggaaaacaattttctcacaattcacttttggattgagtgctgattacccttttatctaaattttaactrtacaaagctgagaagtttgaaaaccaaatgtgaaaagcaacagtgtgtgatatagatttgtgctgtcctatacagcagccatcagccacatctgcctcttgggcgtttaaaatgtggctagtccaaatggagatgtgctctaagtgtaaaatgcaaactaaaacctgaaacttattacaaatacaaagatgttaaatgtctcaaataattttaatattatatgttgaaatgacaatattttggatatatagtttgaaatatatcattaaaattaaatttacttgtttctgtttttgttgtaaaaagtatccacatatcttagtgtgaattctgaaaaatttcacattacatatgtacagtgt

SEQ ID NO: 438797 - DNA, 546 bp, Homo sapiens
gtaattttaatttccatctttatttaaacaaatggaaaaactgctctattgccaaatatattacaccttgccaattaatccattagcaaggctccgtagctgaatttcccattaaggaaaacaattttctcacaattcacttttggattgagtgctgattacccttttatctaaattttaactatacaaagctgagaagtttgaaaaccaaatgtgaaaagcaacagtgtgtgatatagatttgtgctgtcctatacagcagccatcagccacatctgyctcttgggcgtttaaaatgtggctagtccaaatggagatgtgctctaagtgtaaaatgcaaactaaaacctgaaacttattacaaatacaaagatgttaaatgtctcaaataattttaatattatatgttgaaatgacaatattttggatatatagtttgaaatatatcattaaaattaaatttacttgtttctgtttttgttgtaaaaagtatccacatatcttagtgtgaattctgaaaaatttcacattacatatgtacagtgt

SEQ ID NO: 438798 - DNA, 526 bp, Homo sapiens
ctctcttggtaacttgacataaactctcaaggcttccttttcttctaagtcatcttcaactttatttctctgctgtgtccacgtgtaatatgcactcaagttctgttgattttgctctccaggtatgtttttttatctgccctgtttttgtattcctgtttcaaatggactagctcataaactggtcatctctaacatgaattattgcaataatcccttcatgagcctagactgtgatgattaaatgaggtgaggcatttctgaatgttagcacaggccttgacacataattagcgttcattatgaattagtcaataatagtgatataaaaataataacagtaatgaaaaaattcaaaatgcaatatcttattataacaaaggattactaagtgaataatatatctaaggcagagaatagttactatgggaaacactgaacctttgcttttcakaaacatacactgtatttggggagagaaataagaatgccaagagaaattccaaacaattaaacaaattacttt

SEQ ID NO: 438799 - DNA, 324 bp, Homo sapiens
catattggctttgttgaatttgtagcactcatgccaggttcaatgatctaaattgctggtccagygttcagctgtgtctctccctcactggcctgcaaggtctatagcaacaggtgtcttgttaatcttggatacctctgattgctggtgcccaccaaggcacttgcaaaaagagagttctcattaaatatctgttaagataatgagttgggaagtgagaatagaaaaaatctggagtctgagagtgaatgccacagagtcctaggtttatgcagaagataataaagacctgggggtaattgtcagagctgcgcttttaggaga

SEQ ID NO: 438800 - DNA, 596 bp, Homo sapiens
gggatttagttaagtgataggtagctttaattactccattaccattggcatagagcttccattatgtgagtatgtatcatttatttaactatttttcctactaaagaacatttcatttagttctattttagtttggttttggtttggtattttggtcttacacacaatgttacattgaacatactatatatctttccttgtatttatattaaggaaacctctaagaaattctaaacatttcttagattccaaacaattgctgggtccraagtacgtttacaaatattcaaccatatcaaatactatctaactatcctcaaagagtgctgtaccacttacacaactttaagcaggatataaaatcctctattttttcccatctccttgtcaatcccttgaattacaagtcttaaatatttatatgtgtgtattacaataggtatgcatttttctttttgcatttatttccaaatattatcttatagttgttagccatttgtgtttcctcctctgtgaataacatgttaataattttggcctatttttctactagcttatgtgtggttttgctctttatttgtaggacttttaagtaa

SEQ ID NO: 438801 - DNA, 596 bp, Homo sapiens
gggatttagttaagtgataggtagctttaattactccattaccattggcatagagcttccattatgtgagtatgtatcatttatttaactatttttcctactaaagaacatttcatttagttctattttagtttggttttggtttggtattttggtcttacacacaatgttacattgaacatactatatatctttccttgtatttatattaaggaaacctctaagaaattctaaacatttcttagattccaaacaattgctgggtccaaagtacgtttacaaatattcaaccatatcaaatactatctaactrtcctcaaagagtgctgtaccacttacacaactttaagcaggatataaaatcctctattttttcccatctccttgtcaatcccttgaattacaagtcttaaatatttatatgtgtgtattacaataggtatgcatttttctttttgcatttatttccaaatattatcttatagttgttagccatttgtgtttcctcctctgtgaataacatgttaataattttggcctatttttctactagcttatgtgtggttttgctctttatttgtaggacttttaagtaa

SEQ ID NO: 438802 - DNA, 583 bp, Homo sapiens
aagttctcacactgatgaatgctaatttgcctctatatattgtgctgyaaaacattcctgactttcaactacaacaaaattacaagccaaacaaaaagacaagaaaaaaatagcctcaagtaaaggatcaataatcagaattaaggacagatataacacaaactaaaattatcagtcagatatttaaaataaatgtttaatattttaaaggcactaatggaaaagatatataatatgcatgaccagatgtataacatgagcagagagatggccaatatcagaaaaaaacacaaataaatacttgaagtctaaaacactgtaacagaaatgatgtctaccttacatggatcatcagtagactcaacacaacttaggaatgaatcagtaagtctaaatatatgtcaatagaaattatccaaacttaaaggcaaatagagaaaaaaataacaaaaaagagcagaatatccaaaaactttggaacattataaaacagcataacatgcatataattgagagaagcaaaaagaaagatggaacaaaagaaatacttgaagtaataatggatgaacattttctaaactta

SEQ ID NO: 438803 - DNA, 583 bp, Homo sapiens
aagttctcacactgatgaatgctaatttgcctctatatattgtgctgtaaaacattcctgactttcaactacaacaaaattacaagccaaacaaaaagacaagaaaaaaatagcctcaagtaaaggatcaataatcagaattaaggacagatataacacaaactaaaattatcagtcagatatttaaaataaatgtttaatattttaaaggcactaatggaaaagatatataatatgcatgaccagatgtataacatgagcagagagatggccaatatcagaaaaaaacacaaataaatacttgaagtctaaaacactgtaacagaaatgatgtctaccttacatggatcatcagtagactcaacacaacttaggaatgaatcagtaagtctaaatatatgtcaatagaaattatccaaacttaaaggcaaatagagaaaaaaataacaaaaaagagcagaatatccaaaaactttggaacattataaaacagcrtaacatgcatataattgagagaagcaaaaagaaagatggaacaaaagaaatacttgaagtaataatggatgaacattttctaaactta

SEQ ID NO: 438804 - DNA, 583 bp, Homo sapiens
aagttctcacactgatgaatgctaatttgcctctatatattgtgctgtaaaacattcctgactttcaactacaacaaaattacaagccaaacaaaaagacaagaaaaaaatagcctcaagtaaaggatcaataatcagaattaaggacagatataacacaaactaaaattatcagtcagatatttaaaataaatgtttaatattttaaaggcactaatggaaaagatatataatatgcatgaccagatgtataacatgagcagagagatggccaatatcagaaaaaaacacaaataaatacttgaagtctaaaacactgtaacagaaatgatgtctaccttacatggatcatcagtagactcaacacaacttaggaatgaatcagtaagtctaaatatatgtcaatagaaattatccaaacttaaaggcaaatagagaaaaaaataacaaaaaagagcagaatatccaaaaactttggaacattataaaacagcataacatgcatataattgaragaagcaaaaagaaagatggaacaaaagaaatacttgaagtaataatggatgaacattttctaaactta

SEQ ID NO: 438805 - DNA, 583 bp, Homo sapiens
aagttctcacactgatgaatgctaatttgcctctatatattgtgctgtaaaacattcctgactttcaactacaacaaaattacaagccaaacaaaaagacaagaaaaaaatagcctcaagtaaaggatcaataatcagaattaaggacagatataacacaaactaaaattatcagtcagatatttaaaataaatgtttaatattttaaaggcactaatggaaaagatatataatatgcatgaccagatgtataacatgagcagagagatggccaatatcagaaaaaaacacaaataaatacttgaagtctaaaacactgtaacagaaatgatgtctaccttacatggatcatcagtagactcaacacaacttaggaatgaatcagtaagtctaaatatatgtcaatagaaattatccaaacttaaaggcaaatagagaaaaaaataacaaaaaagagcagaatatccaaaaactttggaacattataaaacagcataacatgcatataattgagagaagcaaaaagaaagatgkaacaaaagaaatacttgaagtaataatggatgaacattttctaaactta

SEQ ID NO: 438806 - DNA, 371 bp, Homo sapiens
tcataattgccataagctagcatccaccagaatgtccttcaataggttaatgaataaagaaacaaacagtggtacatccatagaatggaatattcatcaggaactgaaagccaattccatactaacagaataaattatttttaaaaactgaaggggaagacacaactctcccatgcacaagaattmtaaataatagatgttcaaagatgttcaaagatttctaaaataatagaaattctaaaaatatgttcaaggaagtggggtataattccctgctccttaattgtgggctgtgcatactgacttatttccaaagcacagtatgaaaactggagtgagtgggggaggagtaactttacaatacagaaacc

SEQ ID NO: 438807 - DNA, 510 bp, Homo sapiens
gttatttataaaggacctactgtttttgacagtaagacatttatttaatctattaagctaaatccattcaaactttcaggtattttaaaatatgtttaaatactacttagcagcctaacatttggttacgatatcttctcttttttcaaagagcagaatgctttaacagcctgagtttttggttgcaagagccagaagtcaacaatggataattttaacaagaaactcataaaataacaacattgagcaattgaaagaattacaaggagaaacacaaggagggctgcaaaagtasgatttgagttaacatagccaaaaacaaaaaagtatttcatagcacaccacagtactggaaaataccattggtgagcctctgagaaagacaccacagcttgcactgccgatgacactgaccacaaagcctggtgctgccctgagattattatgtaactgcagctttggaaaccccactacagccattgctatcaccactgctactctcaccagggt

SEQ ID NO: 438808 - DNA, 510 bp, Homo sapiens
gttatttataaaggacctactgtttttgacagtaagacatttatttaatctattaagctaaatccattcaaactttcaggtattttaaaatatgtttaaatactacttagcagcctaacatttggttacgatatcttctcttttttcaaagagcagaatgctttaacagcctgagtttttggttgcaagagccagaagtcaacaatggataattttaacaagaaactcataaaataacaacattgagcaattgaaagaattacaaggagaaacacaaggagggctgcaaaagtaggatttgagttaacatagccaaaaacaaaaaagtatttcatagcacaccacagtactggaaaataccattggtgagcctctgagaaagacaccacagcttgcactgccgatgrcactgaccacaaagcctggtgctgccctgagattattatgtaactgcagctttggaaaccccactacagccattgctatcaccactgctactctcaccagggt

SEQ ID NO: 438809 - DNA, 426 bp, Homo sapiens
tctcctgagttaaaattcaagcttctgatgtcagattctacctttttcctccttttwaaatacaaacctgacattccttagggcaactagcatagggcttagaaaatgatgggtattttgaaaagtcctgaaaaataatggagagagagacagtctgagggcaagaggaaaaaaaaattaatggataagcaattggataattcagtgaactaatgactttattggttctggtagaaatctaccacaagatcagggaaactttcttcttctcattttcactatcatttttatcaacattatttactgcataaagcatctgccacagtaaagtctgtgtccatttaattgacattataatttttcttaattataaaaatctcacacacacacacacacacacacacttcaatgaaactgagtaaatta

SEQ ID NO: 438810 - DNA, 426 bp, Homo sapiens
tctcctgagttaaaattcaagcttctgatgtcagattctacctttttcctcctttttaaatacaaacctgacattccttagggcaactagcatagggcttagaaaatgatgggtatttygaaaagtcctgaaaaataatggagagagagacagtctgagggcaagaggaaaaaaaaattaatggataagcaattggataattcagtgaactaatgactttattggttctggtagaaatctaccacaagatcagggaaactttcttcttctcattttcactatcatttttatcaacattatttactgcataaagcatctgccacagtaaagtctgtgtccatttaattgacattataatttttcttaattataaaaatctcacacacacacacacacacacacacttcaatgaaactgagtaaatta

SEQ ID NO: 438811 - DNA, 500 bp, Homo sapiens
gcttgttctcctttcagacaccaaggcagcagacatgatctccccaagatccagtgatggtccagagtgaaaggggctacaaaggaatggctgcggtttgagaacctgagtgcaaggtgattttaccagatgtcaggaaagagaacatcagctgctgtgcatagtcyatgtaaataagaaagtatcttaagtagcatgcacttatcccacagcatatcttgattatccctgaaatccataactgcgcatgactctgtgaggacttggattccttataatttccttagcccttgaatacctgcaattcaactcctgggagcattcttgccagctcaactgccacatgtttggaaacacagaagagcaggcaagaggataattatgtgttcttcaaagtctggaaaagcctcactcttgtgacttaaatcctgcttgatatgctctcagcaagctactatcttgacctagtagtaatcacttttgaaaagtaagtagcaaat

SEQ ID NO: 438812 - DNA, 500 bp, Homo sapiens
gcttgttctcctttcagacaccaaggcagcagacatgatctccccaagatccagtgatggtccagagtgaaaggggctacaaaggaatggctgcggtttgagaacctgagtgcaaggtgattttaccagatgtcaggaaagagaacatcagctgctgtgcatagtctatgtaaataagaaagtatyttaagtagcatgcacttatcccacagcatatcttgattatccctgaaatccataactgcgcatgactctgtgaggacttggattccttataatttccttagcccttgaatacctgcaattcaactcctgggagcattcttgccagctcaactgccacatgtttggaaacacagaagagcaggcaagaggataattatgtgttcttcaaagtctggaaaagcctcactcttgtgacttaaatcctgcttgatatgctctcagcaagctactatcttgacctagtagtaatcacttttgaaaagtaagtagcaaat

SEQ ID NO: 438813 - DNA, 500 bp, Homo sapiens
gcttgttctcctttcagacaccaaggcagcagacatgatctccccaagatccagtgatggtccagagtgaaaggggctacaaaggaatggctgcggtttgagaacctgagtgcaaggtgattttaccagatgtcaggaaagagaacatcagctgctgtgcatagtctatgtaaataagaaagtatcttaagtagcatgcacttatcccacagcatatcttgattatccctgaaatccataactgcgcatgactctgtgaggacttggattccttataatttccttagcccttgaatacctgcaattcaactcctgggagcattcttgccagctcaactgccacatgtttggaaacacagaagagcaggcaagaggatmattatgtgttcttcaaagtctggaaaagcctcactcttgtgacttaaatcctgcttgatatgctctcagcaagctactatcttgacctagtagtaatcacttttgaaaagtaagtagcaaat

SEQ ID NO: 438814 - DNA, 546 bp, Homo sapiens
ttttcttaatgttactttgtccttaacaacagatgtaatttactcagtttcattgaagtgtgtgtgtgtgtgtgtgtgtgtgagatttttataattaagaaaaattataatgtcaattaaatggacacagactttactgtggcagatgctttatgyagtaaataatgttgataaaaatgatagtgaaaatgagaagaagaaagtttccctgatcttgtggtagatttctaccagaaccaataaagtcattagttcactgaattatccaattgcttatccattaattttttttttcctcttgccctcagactgtctctctctccattatttttcaggacttttcgaaatacccatcattttctaagccctatgctagttgccctaaggaatgtcaggtttgtattttaaaaggaggaaaaaggtagaatctgacatcagaagcttgaattttaactcaggagaggaaggacacttgaaaatatttttttttttgataagagtatatatgagtctgtttgtgcttctataacagattacagaagttct

SEQ ID NO: 438815 - DNA, 546 bp, Homo sapiens
ttttcttaatgttactttgtccttaacaacagatgtaatttactcagtttcattgaagtgtgtgtgtgtgtgtgtgtgtgtgagatttttataattaagaaaaattataatgtcaattaaatggacacagactttactgtggcagatgctttatgtagtaaataatgttgataaaaatgatagtgaaaatgagaagaagaaagtttccctgatcttgtggtagatttctaccagaaccaataaagtcattagttcactgaattatccaattgcttatccattaattttttttttcctcttgccctcagactgtctctctctccattatttttcaggacttttcraaatacccatcattttctaagccctatgctagttgccctaaggaatgtcaggtttgtattttaaaaggaggaaaaaggtagaatctgacatcagaagcttgaattttaactcaggagaggaaggacacttgaaaatatttttttttttgataagagtatatatgagtctgtttgtgcttctataacagattacagaagttct

SEQ ID NO: 438816 - DNA, 546 bp, Homo sapiens
ttttcttaatgttactttgtccttaacaacagatgtaatttactcagtttcattgaagtgtgtgtgtgtgtgtgtgtgtgtgagatttttataattaagaaaaattataatgtcaattaaatggacacagactttactgtggcagatgctttatgtagtaaataatgttgataaaaatgatagtgaaaatgagaagaagaaagtttccctgatcttgtggtagatttctaccagaaccaataaagtcattagttcactgaattatccaattgcttatccattaattttttttttcctcttgccctcagactgtctctctctccattatttttcaggacttttcgaaatacccatcattttctaagccctatgctagttgccctaaggaatgtcaggtttgtatttwaaaaggaggaaaaaggtagaatctgacatcagaagcttgaattttaactcaggagaggaaggacacttgaaaatatttttttttttgataagagtatatatgagtctgtttgtgcttctataacagattacagaagttct

SEQ ID NO: 438817 - DNA, 546 bp, Homo sapiens
ttttcttaatgttactttgtccttaacaacagatgtaatttactcagtttcattgaagtgtgtgtgtgtgtgtgtgtgtgtgagatttttataattaagaaaaattataatgtcaattaaatggacacagactttactgtggcagatgctttatgtagtaaataatgttgataaaaatgatagtgaaaatgagaagaagaaagtttccctgatcttgtggtagatttctaccagaaccaataaagtcattagttcactgaattatccaattgcttatccattaattttttttttcctcttgccctcagactgtctctctctccattatttttcaggacttttcgaaatacccatcattttctaagccctatgctagttgccctaaggaatgtcaggtttgtattttaaaaggaggaaaaaggtagaatctgacatcagaagcttgaattttaactcaggagaggaaggacacttgaaaatatttttttttttgataagagtatatatgartctgtttgtgcttctataacagattacagaagttct

SEQ ID NO: 438818 - DNA, 650 bp, Homo sapiens
ccttacttattatgttcactataacatatattctcctctaaatcatttgatccactcttctgccatctgctgctgcaattctttcagcagtgggtccagaaatccactttctgaagtgggtccatcactttcaacaaatggacccacccagcartgtgttagacccatcctttctggtcctttacagggtgttaaatatgtaatcttttatgagtgctagcaaatcattaactatccctcaccagattttgtcttccaattccctcccctcctccagacgaaactctcagaatctagtactcccataagtacttttctggttcacattggaaagaaatgtctaggtttggaagttacaaggtacagcatcttttattctttaggaggtctagcgtcttcctggccatattgtgctgtaacttaatccttattattggactggtagtaaggagaaaaagtaggatcagattctggaaaacataagaagatgatatattttcttgcaagggagtgggcactggattattgtctagcagaggtggtagggtagcagggtgacactagcctttacctgtgagaaatgagccatttttactagtccagaggtttcattgtaatcagaaaatttaaaaaattaaatggtcattcct

SEQ ID NO: 438819 - DNA, 525 bp, Homo sapiens
ttgaaaccttcaggattgtcattgacaatgaagctccagaagaatactttccatgagagtctatacacagtgtgcccttaaccttcttatccttctactgaaacccaacactgctgctgtggatagtagtgtctggctgaacaagcagtcaatttgctgaattcagttgatggcaatttctttaattcactgctaaaaactcccttgggaagcaaaaaatctatttcactgtataattgtcacatgtgctttgtaaaacacatataacagtttctctgaatttatttaattaaatgattttaaatgttcttaacataatggcaagaaccaaactttcctgaatttcatcatgtgtaaagtgaaggcatattggggtttacctagcacagtgacttctaaacttagaggctgcagttgtcctgaagtcaaggraactgataacaggaacccaaacatacttgtaataatccaaatactcaatgaatatttatcatctaatcttggttgattgtatcttccattttt

SEQ ID NO: 438820 - DNA, 623 bp, Homo sapiens
ttgttcaaatctaaattatatcaaaatataaaaaaataccccttgcagggaacatgggtgtaggtgttgtacatgacagcaaaacagtgtcttcaggctccctgccagtaagtccctctgcttcacaaaaccaggagttggctttcacctctagtcttctttgtccaaaacagttttgttttaccatgacttgcagctacaagtgcctagaggatagcttgagggacagtatcttccaagaaacaaattacccattaaaagcaaagagtctatatgtcagagactggccaagttcatttctaccactctgtgccaccctctgcagtttacgctcagtttcatttttttaaattttgtctcttttaaaagagggtcttattttgacttaaaaacagttttggaaccctttttggaaagagttggtatatttcaggtgacctgattttgcatttttggtatacttcctcttccccccacagcctacagaaggcraggtggaggcaaaacctcagagctcactttgctttcttaaggagagcactactcttgtaaaaccagtttgtaggaaacagtaaaattatatgaaggtcagtaaagtagctcattagtgtggagtcaggctt

SEQ ID NO: 438821 - DNA, 637 bp, Homo sapiens
ataacgtcttagttggtgtgatttcatgttccttaaattagtttacccaaggcaaaatcttccatatgttctaatctactattggctcatatccaagacatctctctcttcactaagtccctgtatcagtccatttattttcatcatgctataaagaactgcctgagactgggtaatttataaaggaaagagatttaactgattcacaattcagcatggctagggaagcctccagawatttacaatcatggaagacagaaaggagtaagcaatgcaccttcacatggtggcaggaaggagaagtgctgagcgaagtgggaagagccccatataaaaccatcagatcatgtgagaactcactatcacgagaacagcatgggggaaaccacctccatgattcaattacctctacctggtctctcctttgacacatgggcactacagggataatggggattataattcaagatgagatttgggtggggatacaaaggctaagcatatcagaccccttttaaaatatttacagtaatctgtcccatggtgttttattttgttttgttttattttgttttgttttatttgttcacgattatttgtgtggcagggcaaaatgctttaaaacatttttataaat

SEQ ID NO: 438822 - DNA, 637 bp, Homo sapiens
ataacgtcttagttggtgtgatttcatgttccttaaattagtttacccaaggcaaaatcttccatatgttctaatctactattggctcatatccaagacatctctctcttcactaagtccctgtatcagtccatttattttcatcatgctataaagaactgcctgagactgggtaatttataaaggaaagagatttaactgattcacaattcagcatggctagggaagcctccagaaatttacaatcatggaagacagaaaggagtaagcaatgcaccttyacatggtggcaggaaggagaagtgctgagcgaagtgggaagagccccatataaaaccatcagatcatgtgagaactcactatcacgagaacagcatgggggaaaccacctccatgattcaattacctctacctggtctctcctttgacacatgggcactacagggataatggggattataattcaagatgagatttgggtggggatacaaaggctaagcatatcagaccccttttaaaatatttacagtaatctgtcccatggtgttttattttgttttgttttattttgttttgttttatttgttcacgattatttgtgtggcagggcaaaatgctttaaaacatttttataaat

SEQ ID NO: 438823 - DNA, 571 bp, Homo sapiens
ctttatatgaggaagccacttgctttatccaaaaatatttgtgtactcctcaaggtagggatttttctcagttggggactgattgagcattttgagtggtaataaacaaaaataccggtgaaggatgaagagtaatggagaacrctgccattggctctttcctctagctggttctcccagctggaaactcttccagcttatagagcaaggtcaggtgtttctctgggatcttagctccttgatgccggtgatttcagcatcaggatgttgttcatagtgtgtcacctgcagcgactttttgaaaacaaagctgtgagggtgaatgctgtgaactccctctgtgtcatctgcagtctcattgtcctgatatcacctgtcttacagaaatgtactcaggaaggaaacgggctaccaggaggctactggtgcctcagtggagagacaaacctatctccaaacatgactgacacttctgcattttagaaatatggtctgggtcagcactcgtgaaaaaggaaaaaagcaataaataaaataaaacatgctctggcaaaaggcagaaacatggcag

SEQ ID NO: 438824 - DNA, 571 bp, Homo sapiens
ctttatatgaggaagccacttgctttatccaaaaatatttgtgtactcctcaaggtagggatttttctcagttggggactgattgagcattttgagtggtaataaacaaaaataccggtgaaggatgaagagtaatggagaacactgccattggctctttcctctagctggttctcccagctggaaactcttccagcttatagagcaaggtcaggtgtytctctgggatcttagctccttgatgccggtgatttcagcatcaggatgttgttcatagtgtgtcacctgcagcgactttttgaaaacaaagctgtgagggtgaatgctgtgaactccctctgtgtcatctgcagtctcattgtcctgatatcacctgtcttacagaaatgtactcaggaaggaaacgggctaccaggaggctactggtgcctcagtggagagacaaacctatctccaaacatgactgacacttctgcattttagaaatatggtctgggtcagcactcgtgaaaaaggaaaaaagcaataaataaaataaaacatgctctggcaaaaggcagaaacatggcag

SEQ ID NO: 438825 - DNA, 571 bp, Homo sapiens
ctttatatgaggaagccacttgctttatccaaaaatatttgtgtactcctcaaggtagggatttttctcagttggggactgattgagcattttgagtggtaataaacaaaaataccggtgaaggatgaagagtaatggagaacactgccattggctctttcctctagctggttctcccagctggaaactcttccagcttatagagcaaggtcaggtgtttctctgggatcttagctccttgatgccggtgatttcagcatcaggatgttgttcatagtgtgtcacctgcagcgactttttgaaaacaaagctgtgagggtgaatgctgtgaactccctctgtgtcatctgcagtctcattgtcctgatatcacctgtcttacagaaatgtactcaggaaggaaacgggctaccaggaggctactggtgcctcagtggagagacaaacctatctccaaacatgactgacacttctgcattttagaaatatggtctgggtcagcactcrtgaaaaaggaaaaaagcaataaataaaataaaacatgctctggcaaaaggcagaaacatggcag

SEQ ID NO: 438826 - DNA, 620 bp, Homo sapiens
ttattcacctaagtaaaattgtctctgtttgcatcttgctctagttggaggcccagaaagtgaaataaaataatctattgaagtccaaaaatcaggaaccatggaataaactgattttgaaatagtatgctagttgtactaggaagtactatgttcaatatgttttccttcaaccactatattttaggaatgtccaaaaattctagaagcacaaggaataamatatatttatgtcctgccgattgagtatattcatcattcagaaccatgatagacagcaaaatcgcagcaacattatcctatatcaataatatgcgtttaatctaagtttaaaaataacttatctgagataatttttctttctttgctccttccaagaattcagttccaacttgatttgcgagtggaatgaaggttccgagatagttttaagttaaaatttttaaccaggacacagaagaacaggaataattcttcagacctgcagtatatgtttcgccagagatcaattgttggatgtctttggttcagagttgcttgtacatccaacatgttccataagaatgggcttaaataaatgcactctcttgaataattggacatacagcaattatataatt

SEQ ID NO: 438827 - DNA, 378 bp, Homo sapiens
agaaaatggagattcccttttgagataatttctcaatattaaccagcggtaacacaatagctggagaacaccaaggtaaagcccttggtctctggaacccactgcctagatcttccartcttctatctgccactactcactgtgtgaccattggtaaatacttaacttattttttgtttcagtttccatatgggtaagtggggtaataatagtgtatacctatgagacaacacatgtaaagtgctcagaaaaatatgtgacataaagtttccactaaataaatgtcagctgcaagtgttatgtttcccgaagcaccttaatgatcaccttgcctccatgttgcaatcctgaggttggtagactggggattgccatggc

SEQ ID NO: 438828 - DNA, 602 bp, Homo sapiens
tgggacatcttttgccctcagatgtcagtgtccctggttttagacctttccactcactgagacttacatgattggctccytggttctcggagtgtagggttttaactgaattgttctagggatgtttctcagcctccagcttgcagatcataagacttctcagcttctataattctataattgtgtgaggcaatccctcacaataaatctctattattctgttatcctctactgtattctattctctattctattctattctatcctattctactctactatattctattctgttctattgtttctgtttctctggagaaactgattaatacaggcaggttctttggcttctctcaacctcatttgttttatctgttaaaagtagtttaaatggtttaaaatactgtcttgtagtattatgaaaagtaaattcaatagattataaagcgtgccttgtaaaaattagatgtttactgaatatcagttttctccctcttacctttgccctacctgaagttctacccctggagccagccacatttgcatattttgatgccagttgtctgcttgaatttccatattattctcaccctaagctggca

SEQ ID NO: 438829 - DNA, 439 bp, Homo sapiens
acacgggggatattcagggtagyagtgaaaaaaataagaacttcttcagagtgtagcctagaatttggagaagagtaatctttcatgggtaagagggagaacatggattttggaatctgggtgtgggttcaactcttcttccacttgtgtagtatagggcaagatctaacctttctgggcttcagttttctcatatgtgcttaagaataaagactttggagagagtttgatttaggtttatattctggctctcttaattgatagctttgtaatctctggagagggctgaactctcagagcttccattcttcaactgtaaaatggggataatagtgcctcattggattatcataagcttgaataaaactgtgagtaaattcttggcatatatcagtatatcttagatttcattaatattgttgttgctgttgttgttatt

SEQ ID NO: 438830 - DNA, 576 bp, Homo sapiens
agtcactggttggtacagaggttccacctactggtgggctccagggccaaggaactaatcacattggatggaagctgactttggtaattatgagtcatggtaaaataagtgacattagatttgaacctagaaaaggttgtgagtgtctaatgcagggttaatttgaaggttaatgcatggaatactgtaacgatctaatatcttatacttattttgttcattaccataacacatggcactgaggtctgtctgggaacctaattgaccatttgacatgagtgatggcaaattcaggtttccctgttttgtgaatagagtgcttagttgcctgctttcatactgaagtggctcatggaagaracccaagccatgaaaaccatgggataattagtagaataaaaccattctttggtctggagaacacaactggatgtagttaaattaagtttaatgattcacttttcagcatattaacttcagaagacttcacattgcatccaactgtaggccccagtctttaaaattgctgattgtgctttaaaaataaaacaaaaaataataaaattaggccacaga

SEQ ID NO: 438831 - DNA, 560 bp, Homo sapiens
ttctggcttttctcaactcttccttcctctctctagcatcttaatgagaagtgaatggggccctataaataaaacatctgtgtctgtggaaaaatatcctgatatatctacttgcacagctgttaaaaggcctaactccctgcaaaggagccaacatgggccattctcacaagaaccagaaatgttatcatggggctagataggagggaagattaaagaagagaagtacaagaaatacaaactgtaccctgcatatggtagcttctcaatacatgttcagtgaaatgaagctggttcagaaggcaagagaagattcacagttggttgccccacagaaggtgtctggggtatatgagagatttggaattaatgccacaaagccaatkttctgcctcacaccatgccttagttctatcagagatgggctaaatggctatgatactaacgttggtgatcatttatcatgtgtgatggttaatattaagtgtcaacttgattggattgaaagatgcaatattgatcctgggtgtgtctgtgaggatgttgccaagggagattaa

SEQ ID NO: 438832 - DNA, 435 bp, Homo sapiens
ttttgttgcccaatgggttacttattttctagctattgagttaaattcattatatattttaaccctttatcagatgtatggttctcaattattttctcttccattctataggttgctcttcattctgttaatttttttttttttttttgctstgccaaagctgtttagtttgatataattccatttgtctattttcattttgtttgcctgtgttttggggttatataagaaaaatcaatgccaaaatcaatgtcatggaatttttttcctatgtttcttctattagcattacaatttcaaatcttacatttaagtctatcccattttgagttgatttttgtataaagtgagacaggctggtctagtttagttcttctgcatgtggatatctagtcttcccagcaccatttattgaaaagactatcctttccccat

SEQ ID NO: 438833 - DNA, 570 bp, Homo sapiens
ttttgtatattttgggacattagtggtacttcagtaaaccacttagaaaagatgctaaatcctgaaacgatcaaatattcccagagtgtacccaattagaaggaaatatttattagaaaaaaaacttgaaagccattccctaattctaaagaaaatccacagactcatcatgttgagaaagtatctactacgcattatcaaactttaggcatccttcttttgtcttttcctgaaacttaacctctattttatcctatttgaagatcagtaaggatcaataaaccactatcatagaagggaaggaggaatctaagccccaatatttattctactcttatagcctaacatatgtatatatayacacacacacacacacacacagagagagagagagagagagagagagagagagagatcagaatgtataaagcatgactttccatttgagcttgatttgcgcattataagccatagaactttgaaaatctgagagtagctactcttttctactctacttcagtttgtcatacgaatgttgtggcctcaattctagatcattaagggagctgt

SEQ ID NO: 438834 - DNA, 570 bp, Homo sapiens
ttttgtatattttgggacattagtggtacttcagtaaaccacttagaaaagatgctaaatcctgaaacgatcaaatattcccagagtgtacccaattagaaggaaatatttattagaaaaaaaacttgaaagccattccctaattctaaagaaaatccacagactcatcatgttgagaaagtatctactacgcattatcaaactttaggcatccttcttttgtcttttcctgaaacttaacctctattttatcctatttgaagatcagtaaggatcaataaaccactatcatagaagggaaggaggaatctaagccccaatatttattctactcttatagcctaacatatgtatatatatacacacacacacacacacasagagagagagagagagagagagagagagagagagatcagaatgtataaagcatgactttccatttgagcttgatttgcgcattataagccatagaactttgaaaatctgagagtagctactcttttctactctacttcagtttgtcatacgaatgttgtggcctcaattctagatcattaagggagctgt

SEQ ID NO: 438835 - DNA, 547 bp, Homo sapiens
ctcaccatcaatgagaatttcaaatgtcttggagtctttgttctacatatattagattcattgtactatacttctggtagtatggttctgcttttgatgaattatttcaccatttgtatttctgaaaagttttgttttctttttatcacctgtattgagctatatgacatacaataaaatgcagacatttaagaagtgtaagtgaattcattttgatatatgtacaaacctgaaaaccrtcactgttgcaatatagcaaacaaagtcacccttcccaagtcgtcaactgttccccttaaaatatctttctcccactcttaccaaaccactctagacaaacttgatctgctttctgtcacagtaagttagtttggatcttttagacttttatataaaagaaagcattaagtataaactcttttttgtctgacttctgtaactctgcacaattattttgagattcattcatgttgtagaatatatcaatagttcattcctttattgtggagtagtattgtgttgtttttattgtaagggtatctaaaaa

SEQ ID NO: 438836 - DNA, 611 bp, Homo sapiens
gtggctcacgcctgtaatcctagcactttgggaggccaaggtggatagatcacttgaggtcaggagttcaaaaccagcctggccaacatggtgaaaccctgctctactaaaaatagaaaamaaatagctgagcatggtggtaggtgcctgtgtctgtaatcccaactacttgggaggctaagtcaggagaatcacttgaacccgggaggcagaggttgcagtaagccaagattgcaccaccgcactctagagtgggagacagagcgagactgtctcaaaaagaaaagctcaacatcactgattattagagaaatacaaatcaaaccacaatgataccatctcacagcagtcggaatgactatgattattattattattatttcttcaacttttatttaagttcagaggtacatacgcaggatgtgcaggtttcttacatagctaaatgtgtgccgtggtagtttgctgcccagattatcccatcacctaggtattaagtgcagtatccattagctattcttcctgatgctctccatcccccaatcccccaccttcctataggctccagtgtgtgttgttccttcctatgtgtccatgtgatctcctcattc

SEQ ID NO: 438837 - DNA, 574 bp, Homo sapiens
tatttagaatgttgagtgttatactgtcacaaaataatagccatgtacttgggataaacaaccaaaactttctggaaaactcgtacagatggaaacacatacagatggaaatagaggtgataaaagaaaaatcatagaggtctgttgtggaattcttccatacctattaattcacactttcaacctattcccttcacagtgtattttcagaaactgcttttaaatgcaattcagtttaatttgtcacagacagaagatcaaaaccaatgctaggaaggtctactctgcttttgtttacttgagaaaattttaacgrtaatattttctcactctcttaagagtaagtgctgttacattttggacatttcatatgtgcctgacattgtgctaaagtcattcaatgtattagtgcatattatttttacacaaacctctaagtgcttttattattcccattaaagagcgtaatgggattcttactccaaagtcgggtttttaggagtgaactttacagtttgtaaaaagctgtgatgctatgattatgaagcccattctagtttatgtaatatgctac

SEQ ID NO: 438838 - DNA, 525 bp, Homo sapiens
tttgagttctgacagcattcatcacctgctaactgaaaagcccttgggccctgaataaccagcatcaatactcaggcactacattgaaggccttgagtgagtctctgagacttgctggcttcagctgakactcatcacattaccagctatggtggctataggataaaacttctgcttcagaaaagcagagggaaaagtaaagagacattgtcttgtaccttaggtaccaaaactcccacaggcagtagaataccaagcagggtcttggggtccccgattccaggacttgacttttggacagcatttctggaactgctctggaccagaggggagcccactgccctgaagggtgagtcccaggccaggcagcattcaccacaagctgacttaagagaccttgggccttaagaagactttggaccttaagggaacatcacggttagtcttccagtactcctcatggcatagggtgacagcggctatggggtgaggctcttctgcctttgggaaagggagagaagagtg

SEQ ID NO: 438839 - DNA, 583 bp, Homo sapiens
cactgtagaccaaatggatctaacaaatttacagagcatacagatccaagagctgcagaatacacattcctttccccagcacatggattattcccaagkacacaccatttattaggtccccagacaagtcttaaagcatttttaaaacactgaaataatatcaaacatctctgaccacaatggaataaaactgtaaaccaataacaagagaaattatggaaactatacacatacatggaaattaaacaatatgctcctgaatgaccagtgggtctatgaagaaattaagaagaaaattgaaaaacttcttgaaacaaatcataatggaaacacaatatactaaaacctatggaatacagcaaaaccgttactaagaggaaatttatagctataaatgcccacagcaaaaaagaggaataattgcaaataaacaatctaataatgcatcctaaagaactagaaaagcaagagcaaaacaaaccccaaattagagaaataataaagatctgagtagaaaaactgaaatgaagaaatcaatacacaagatcaatgaaacaaaaagttgttttttttttaaattaaa

SEQ ID NO: 438840 - DNA, 583 bp, Homo sapiens
cactgtagaccaaatggatctaacaaatttacagagcatacagatccaagagctgcagaatacacattcctttccccagcacatggattattcccaaggacacaccatttattaggtccccagacaagtcttaaagsatttttaaaacactgaaataatatcaaacatctctgaccacaatggaataaaactgtaaaccaataacaagagaaattatggaaactatacacatacatggaaattaaacaatatgctcctgaatgaccagtgggtctatgaagaaattaagaagaaaattgaaaaacttcttgaaacaaatcataatggaaacacaatatactaaaacctatggaatacagcaaaaccgttactaagaggaaatttatagctataaatgcccacagcaaaaaagaggaataattgcaaataaacaatctaataatgcatcctaaagaactagaaaagcaagagcaaaacaaaccccaaattagagaaataataaagatctgagtagaaaaactgaaatgaagaaatcaatacacaagatcaatgaaacaaaaagttgttttttttttaaattaaa

SEQ ID NO: 438841 - DNA, 590 bp, Homo sapiens
tcatgtccttggagggttgccctggctctccagaactgaatcccattcatgccctccctgcgcaagaaatggcccattactgtgcttccacagacctctattttcatgaaaacttttctcttaaaaaaaaaagaaaaacaaaaataaaaaraaacctttttcctctgacatttattaaatgactttgttaagccaaatgacaggccaaactctacaggctgtctcataattccattaataaacctaaaaggtaatttgagttattaactccactttaaatatataggaattgagtctcagaaaggttaagaaattcagctaaggtcatagaaatatgacccgtttacttcgtgtacttatctgagccaatgtccaaattacacattgaaaactgtggatagtataaccatattatactattgtaaccataaatatatatatatatatatatatgtatatgtgtgtatatatatgtgtgtgtatatacatatataatatttactattttaaaaatttgggggttctgttgtatgttttcttctaatattttctctcatttatctttataccaaacttttaaaaaggacaga

SEQ ID NO: 438842 - DNA, 637 bp, Homo sapiens
aaacaatcccttgtttatacagttcagtttgctaaaatactgtcattcaatgagtttgcatgactttaattgcaaaacagagggtattagaggaaagctgtgctggattcgaccacattagaactcttcaggatcaccagatagaagctgycaactttgggaacaaacatctctgccttgttccttggatgacagtttttaaaccaactcttagtaatttctaaaggcatgctttgtagctgtcagaatgagtgtccccttgccctggagatgtgcaatcacataattctgggttcctttattcccaccccaacggaaaagtaaggtggaaaaggagcactgtgtgcctgaacagttggcaatgtaccccgaggtttatgtcacttttctgctttagaagatggaccccttaaagagaaacagaaactgcaaatgtcatcccactcatttctaattggaatggtggggaccaaacagctatgagagcttccagtataaaatggcacatgagggataatatgtcaccttcagtgccactgtgactcaagagcttcaggctgccactgtttaaacatgtagtcaaatttaatatgcctctccctgacagatttaatgtccatcaggacctggggaaaga

SEQ ID NO: 438843 - DNA, 602 bp, Homo sapiens
tacccatttgcaaattgaggacagatgaggacaaaggagaaataaggcttttcttttccccaaaggaatcacaatgattcaggaggcatttgagtgaaatacagactgaargttattggttacccatccagaaagaagggaacaaggtgttcctagtttctttctcttcccagtcaataactgggtatgtgagggagagaaagaagaagtgtccccctttcttctgtccttatatccctgagtcccagcgaccttggcagggttccacccatgggtgccactgtggctttcacccatgttaacagggaggcataggggtgggaattatccacattcacccacgtgctgcctattcttcctgctgttggtaacttttgagttccctaaaccttacctatgccatggatgctagcacgttctctgtccatgagatgggatgaggtggctaatcggcaggaattagtcatgctcacctgcactgtgccttttgacttccattgtcatctggcctctggatccagttttccttgctaggacttcaacccaaagcttgtaattgactttgggacaaaaatgtgcctcagaatggttcatggactcat

SEQ ID NO: 438844 - DNA, 602 bp, Homo sapiens
tacccatttgcaaattgaggacagatgaggacaaaggagaaataaggcttttcttttccccaaaggaatcacaatgattcaggaggcatttgagtgaaatacagactgaaggttattggttacccatccagaaagaagggaacaaggtgttcctagtttctttctcttcccagtcaataactgggtatgtgagggagagaaagaagaagtgtccccctttcttctgtccttatatccctgagtcccagcgaccttggcagggttccacccatgggtgccactgtggctttcacccatgttaacagggaggcataggggtgggaattatccacattcacccacgtgctgcctattcttcctgctgttggtaacttttgasttccctaaaccttacctatgccatggatgctagcacgttctctgtccatgagatgggatgaggtggctaatcggcaggaattagtcatgctcacctgcactgtgccttttgacttccattgtcatctggcctctggatccagttttccttgctaggacttcaacccaaagcttgtaattgactttgggacaaaaatgtgcctcagaatggttcatggactcat

SEQ ID NO: 438845 - DNA, 580 bp, Homo sapiens
tccactttcttatccagatttgcaaatattttagccattatytctttgaatacactttccagccatttctccctttcttccttattttacttccatacacgcatattggtccacttaatggtgtcctataagtcctttaagctttcttcacttttttccctctttttccttttatttattttattaatcctcttcctcagctccatgatttttgtttggtactttaaaaatattactatctattttttgatattgtaaatactcacatattgttcttctaaccttgctgtcctcagcagttattttgaaatctctttcatataaactataataactccatttcatgagggtcaatttctagatatttattctgtgtctttgtttgggtcacatttccctgtgtcttcattttccttgactctctatgttggtgtctgcacataagacaaaacacccacctttcaagtctccaaagagtggacttttacaaaataagaccctcaccaattagcctggccagagattctgggggcctctccaaacttcatggtggtccagcttgctttctttgttgttagtg

SEQ ID NO: 438846 - DNA, 596 bp, Homo sapiens
tatataatatataatagtaatacataatatatattataatatgtaacatgatatataatcatatattataacataattatatgtaatatataatatataattatatattatatataatacataatatatacctatatacaatatataaatatgatatgtaattatatattataatatagtatagattactataatatgagattactataatatataattatatattatattgtaaatatattgcaatataaaattatacatcatatatccaaatatattttatatttatatacatattttttgagatggagtctcactctgtcacccatactggagtgtaatggcatgatctcagctcactataacctctgcctcctaggttcaagcacttgtcctgtctcagcctcctaagtagctgggactacaggcacctgccaccaagcccggctaatatttttgtatttttagtagggacagggtttygtcatgtcaattaatatattttaaagttgtttatttacttttctccacacgtaattttattttggacttcttttaaactttttccttctactttatcacgtttatggttcccc

SEQ ID NO: 438847 - DNA, 566 bp, Homo sapiens
tggaaatgtaaacataattcataaatgataacacgtggttctttctggcttcacattcaactaacttcatcccaagttatttttattaaaaacatstataaagtgtcagtacctttattgaaatatatattttatagtcaaaatacaaacaattgagttttcttagagtcacttttatctcactttatctgagcttaccaaattctaagagaataaacagaaaaacattaatagataagtagctagaatatttaggacaacccaaactatgcaaatacagcatttataggtttgtactctaaagaatctaagtgaattgttcccttagaggagcagcctcaggtagaattaaacaagaggaataataatgaacagagtcaggtgaaaactaaaggactgaaaattagaatcaccatatttactgaaaatggatccatcttctgttagctgtaacaataaagaaaatattcaagtgggaaaagtactcaggaatggaaatgaagaccctgccttttgaataagaataaagaacactgtgcttcttcaactgtggcattttctcccct

SEQ ID NO: 438848 - DNA, 566 bp, Homo sapiens
tggaaatgtaaacataattcataaatgataacacgtggttctttctggcttcacattcaactaacttcatcccaagttatttttattaaaaacatgtataaagtgtcagtacctttattgaaatatatattttatagtcaaaatacaaacaattgagttttcttagagtcacttttatctcactttatctgagcttamcaaattctaagagaataaacagaaaaacattaatagataagtagctagaatatttaggacaacccaaactatgcaaatacagcatttataggtttgtactctaaagaatctaagtgaattgttcccttagaggagcagcctcaggtagaattaaacaagaggaataataatgaacagagtcaggtgaaaactaaaggactgaaaattagaatcaccatatttactgaaaatggatccatcttctgttagctgtaacaataaagaaaatattcaagtgggaaaagtactcaggaatggaaatgaagaccctgccttttgaataagaataaagaacactgtgcttcttcaactgtggcattttctcccct

SEQ ID NO: 438849 - DNA, 567 bp, Homo sapiens
gcgtctgtttaaaataggttactagaaattccttacctaatctcatttttacaactggctcttttactttactctcaacaatagcctacacaatgattttatgaaactatgaaattaaaatagttcctaaatgttaagcagtagttctaatggaatataatttcatatcttggataatgttccttcttctgtcattttataagtgaattggaaagataaattaattggaatgtattcagagactgtgagaaggctgacaaggaaattatctcctacatggaataggcaatggaataaaacatatttagctcatggaagggaaggttcagaacagacataatagctctttataaatttctgaataattgttctctgggaaaaagtagtaagctcattgtaatccttcaggaactcagaccacaattaggaattagaaaaaagaaaaatgaaaacttcagaaaaattactagagttgctctaaatgggaataagctgcttcttgaagtactacacctgtagtcactggaagtgtycaaaagaaaagctaagtagccacctctccagcac

SEQ ID NO: 438850 - DNA, 606 bp, Homo sapiens
gggttgagggccaaatcgatggttattcctttaaggcaaaaagattcatagttgtttgttatgcagcagtaaaaaaatgacaaatatgtacaaagtggtacagaccaaaaaaaggtaattatcttcggagtgaaaaacgtcatggagtcctgtggttctcaggaatttcttgaaaggaaaaagygcataaatgagtttgaaggatgggcagaatataaatagagggataattaggaactgcaaagtaggaaatattatgaacagtatgacccagttgttctttgattgcaagaatagaagacaactttggctaaagataaagaggaatttgtgtggagacagggaaaatagtttagaaaaccaaaggagagactaaacaaacagtcccttcaaagggcaatgcagtaatagggcaagtatgagactcttagtggcaagaagtaaacaccattctcttaagaacactactcctggtataaattacctttaatttgcctttcaaaatctgccctggtataattgctccatgtttaaactcctgggagaggagttctaacttgcccaagatgatcactcactcaacccttggccagagaaggaaaggca

SEQ ID NO: 438851 - DNA, 665 bp, Homo sapiens
ggcaagatggggttggaatagtttatgaatagtagcattattctaattcttaaattaaaagattagagaaagtttataaaaatatggagaatgatttaatacaattgcaataatcactttcatatatataacattttcttcttacgacaaacttcttcaggatagggagaaatatcagaccttattaataaaggaaaaaaaacgtattattggaaaaatattcaaccagtcatacaaatgttaggaagactatccaatctgtgtgtattttctataatgctaatgaagcaacatatggaatttcctttccataactttgagctaaaatacctgtcctagtattaagacctactctaaggagcagtagaaaaacagaagttcwattagaactggggcttgagaaggcagagaaggttgagcaaaggtttgtttgttttttttgtttgtttgttttttgtttttgttatgttttttgttcgttttttgagatgaagtctttgctctgtggccaggctggagtgcagtggtgcgatctcagctcactgcaacctccaactccctgattcaagcgattctcctgcctcagcctcccaagtagctgggattacaggcacatgccaccacatgcaactattttttgtatttttagtagagatggggcttca

SEQ ID NO: 438852 - DNA, 562 bp, Homo sapiens
catccatttttaatgatcaatatttaggtcactctgactgtaaaataatttgaccctcacttctgcttaccctttagtggaatcggaagaatgaagtgccttaagcagccatgaataaatcaccaacgctaaatccattatataaactttagaagtgctttttaactaacttttaaccagatacatytgtcactttattatctgaatgatttgttttctttggccatgctttgctataatttttttaatagctgaattcttaggtgactcagtagcatcttctacatcacaacttcaacaagctattttcatctatatgcaaattctttcctactgcttttatgcaaactctgcccctcttagatatgaaatatcaacaaataacttcgaacctgatttgttttcttctcctttctcttcctcttctttctttcttttctttttgtgactgtttcctgggaacaaagatgattaagaaaaaaaactgatgaatatgttgctgtattatacaaggttctattggtttctgggagcaggagcagagaggactaagaactacctc

SEQ ID NO: 438853 - DNA, 576 bp, Homo sapiens
gaatgctgggcctgaggtcccccgggcagtgtgtggtcggattggaaggcaagcccaggtctgcctgactcaaacactgcgctcttcttgctgcccatacccactcctctctttcccaacttcatacatgcatctgtccctacacctgtgttctctctgcctgtggattcgatggattagtcaaaaagaattgtttttgcccggtaccaaatccagaagtgtgaaacccattttaatattcggcgcctttggaggatgagctcaccctgctgccagctggaggaacgcttgtctattccaaggcagcccaactgctttcattaatgtcattccactcagagaataagaatacttagcaatggaagagccccatctgccttgtaagccgaatggtccagaagactttgagcaaaaaagaggcagtcagtattttctttctggggacttgcatgacttcrgaatgaatgggcctatttagaatgacatattcagaaataggatgaatgtgattgatgaagggctaaggattttgatcctgtcttcagtgtttgcagctgttatggattgattatgtct

SEQ ID NO: 438854 - DNA, 586 bp, Homo sapiens
tttttgcgacatgtggtttgtttctccatgttatttaacactcatttgtccaatagctgatttcatataatttagcaccaacaacttctaacttttcataggttgtttctttttcaaacatccttttaaagcagtataagaaagtgatattgaacggtgaaattctgagagtggatgttgcttagtattgattaactaggtagattgaactaggactagaaaacagattctggaatccaaggctatagatattaatttaaagtgaatgcaataatgatgaaaacataatttccttgtagtcttctagccctcctggcaatataagggtcagtgatgacttttgcccagaaattacttagcagaattaaataatgactaagggtactaagagtaggaaaaaaaaagataaatgagggggagtaaggagggaataatggaaaaaaagatgtgaaagagtggcgttgacacaygtactgctgagatgccccagaaaaaccccccttgggtatccttgcatcctgctgttttgggagtgatatggtttggctctctgtccccacccatatctcatgttgaattataatcc

SEQ ID NO: 438855 - DNA, 613 bp, Homo sapiens
ctttttcccccacttttaatgccagtagaggtgaagcaaatttacaaattcttccttaggttttataccaggaaaatgtttgcccaaagaactggctatatttgatggagttgaccactgtctcactacaggttctaatgtttgacaaacagttttattttatgattgcacccagagctcctcatcattacaaaraaagtgtattttgctttttttttcctgctaccaacaggataaacctcctcagctgcagcttgtggtttggaaaagattacttttttaaaaaagctttgaatcttttcctagagatcaacagcaattatgcaactccctgttaactgagttagatttaaaaacacaaacacaaaatataaatcccccaattccaatagctaagcagctgtgctagaaggcacgggaatgcatttattctctcctgtttgattccttagtcatactttagatgcgtggcaaatcagttggacattcagaatgccataggcttctggaaggattactccaaggtgattgcagtagttagaggtatagataatcttacctcaggtccatgtcgccatcgacccaataggccaagatattggaggcagttcct

SEQ ID NO: 438856 - DNA, 613 bp, Homo sapiens
ctttttcccccacttttaatgccagtagaggtgaagcaaatttacaaattcttccttaggttttataccaggaaaatgtttgcccaaagaactggctatatttgatggagttgaccactgtctcactacaggttctaatgtttgacaaacagttttattttatgattgcacccagagctcctcatcattacaaagaaagtgtattttgctttttttttcctgctaccaacaggataaacctcctcagctgcagcttgtggtttggaaaagattacttttttaaaaaagctttgaatcttttcctagagatcaacagcaattatgcaactccctgttaactgagttagatttaaaaacacaaacacaaaatataaatcccccaattccaatagctaagcagctgtgctagaaggcacgggaatgcatttattctctcctgtttgattccttrgtcatactttagatgcgtggcaaatcagttggacattcagaatgccataggcttctggaaggattactccaaggtgattgcagtagttagaggtatagataatcttacctcaggtccatgtcgccatcgacccaataggccaagatattggaggcagttcct

SEQ ID NO: 438857 - DNA, 530 bp, Homo sapiens
gggaagagccttctccatgagtactactctggacaaaggatggagatgaggaagtgcactgtgcatttaaggaagcatttccatgtagctgtgctaaatgtcccatgagggggatcattgcatgaatggcagaaaaggaagaggatgaagtgraaagtttcagtgatctgaaagtgatgatctgagtttatagtctgatatggtttggctgtgtccccacccaaatctccgttttcgtgacagtgagtgagttctcaggagatctgatcgttttataaggggctctttcccctttgctcctcactcttctctctcctgctgccatgtgaagaaggtcctctgccttccaccatgactataagtttcctgaggcatcccacagccatgtggaactgcgagtgaattaaacctctttcctttataaattatccagtcttgtaatatttttatagcagtgtgagaatggactaatacataatccttctacttattaaccacatgcatttgggtgtcatttaccttttggaacc

SEQ ID NO: 438858 - DNA, 567 bp, Homo sapiens
ttccactgtgggcggaaacacaaagttctgcggtgtgtggctgattgccgggaagccagagtgctgggcaggcagggccatacaaggggagggccttcggactttgctttcacgttgctctgttttcctatggatttttgctaggctacgtgtgctatttcagtattgtttgtgttgttactccatttattgcattctaactgtgactgaataaaccaggtaatagcaagggggtacattagaagaaaaaaaatgaaagtttaaaggttcttaaaaatgccaaagcctttattccattgtatgtggattttatttggctacttcaacattgaaaagtattttgaacaaaagcgcaagcacaaaagagcacataatgttttctgcacatggtgcaatgcttaagagtctaggttttggagctagacagatggattctgagttttgtctcctcttygctatgtgaccttgtcagattacttactgtcttccagctcagtttatcttctgtaaagtgggtgtgatgatgatactggagtctcttaagattttactaaagattaaatgaga

SEQ ID NO: 438859 - DNA, 576 bp, Homo sapiens
gttccactggccatgaataattattaataacagttacttgggcttagtcatttttatatttgcaaggcaatatttttgcagggctccaactattcacaaatgctgtttcactaactcacagataaacttatgagagaaataagagcgtgtttggctacttattcctattttgctggatgtggaagcagcttccttggaaaytttgaagttagagatatgacttggaataaagccaaaaactgaacatagttcttctcatttcccagcctttgatttgccaacccatgagtaatgacttagcactttatattaataatgaggacgatgattataataatagtttttgagtttcttgttttgagcaattcaacctgcttaccccaagcccttcatccattttttaaaaataggcaaatgagaccagagcctaattaacagtcaggatgactttttcctctttttctctcgcaatcactggatactgttgtgtcttagaaatgtccattaggttcaccctcccctctccagtcgctttgctgtttccaatcattacttcatcacacaatatatggattt

SEQ ID NO: 438860 - DNA, 633 bp, Homo sapiens
ttaatggttgtatgagttacacctattcaagtgccttatattttaaagtaatacaccatttattatgacacagtctaaaagtgaagattagactatctcaattcttatttaaagtgaaatgcagcttataaaacctagagattcaaaacagtggtggcttttatattaatagctatggaggttgtataaagcatcaatgaggtagtttctataggataagcaatattagcagcaatcatttttgaggtaaatttaaggaacttgtggcaatgttataagatctttccaagaaagtaaatgatagaatcttgaaagtgaggatatgatgtttgggtttttcttttccagtgtttactttgtaaastactgacctagaaacttccatcagttttctttgaagtcatcaaaaaccctttaaaagaataatttgcttggcaactttattgtgcaaataataataaataaaagaataacagtttactcatattctaaccaaagtatctgaaattgagtattttaaaatcttctgtccttcaaaaaaattgagtcagtttgcctactggtatttcatttgaggtcaaacactgcacagcccacatctcagaatctgtcagagatttgcaacaactgtag

SEQ ID NO: 438861 - DNA, 620 bp, Homo sapiens
aggatcattattattatcatcatatttttatttttttagagagagtctcacgcctatgcccagtctagtctcaaactcctgacctcaagcaattctcctgccgtggcctcccaaagtgctgagattataggcatgagccaccatgcccagccttccaaggctcattatttactactgacctttcttccagtcaccaggtctctcttcagctgtatctaatctgctgttagaacatctatgttttcttaattatatttttaattccagaatttccattttattcttttttataaattctaattctcaaatgaaattatcttcttgtaatctgttttcttgaacatcttaatccaccccttttgtgcccttccctggtcttacccttcaggaacactgatcttttccccgaccataagcttgagtactgtcatattacagtggtagtaaccttcagwtattccatttctaggctgtagagatcttaaaagtgttggaaaaaaaggacagtagagtgaaaagtgcagctgcaaccaatctctcagccctgtattatatggtaagtttttttactactaagagttaatcatatgctatttttatattgctaaatttctgcccaa

SEQ ID NO: 438862 - DNA, 542 bp, Homo sapiens
gatggaaggagcaggatcctgctcccctccttgtgtggccttagccaggtttcccaccaagggacctaggccagggagcccagcacctccaggacttttttggcctgacctgctcctctacactcctgtttctccattgccaactttggggttcttactgtttttttttaattttttttaattccataaagaacatttaaaataaaatgctagcaagctctaccttagaccattctgaatttgtgatttaaaaggcaatgatgattgaatggattcagaagacctcttgaagtctaggcctaggacaatagctaaatggtttagtattatatcattttaacaaaaatggagaaggtctatttttttctcatcttgagcataaacatttcaggtcctatggttcacacagcattgagaaggggaaagarcccttcctcccactgacagaggaaattttaaacaaacttccccttattgtcttggaagtcctgttaaaataatcaatttaatgatgtgaaatgcctcagcttcactgagctagg

SEQ ID NO: 438863 - DNA, 545 bp, Homo sapiens
gggtgcccagcccatcaaaatatgcatcccaccccattctggattgcttttccctgtgcattaggaataaaacctctctaaggggaaggcattttgaagtaagcctgtttcaggcctgtgagaggkctgcagaaacacccccagcgtgagcactgggtcaccccacagcccctgcctttcggaaatcctggtgtagagtccgctccacaaggagctccttcctctgtttgaaggctggtcgtcttcactgtgtctccgcgattacccaggacgtgggcatggccatgcttctcacacgtcctctctttgactcaggatcatcgacttgtgcctctgcctcctccacatctggaagaggcatcttcttttcccttttcacaggctacttagagctggagagggattgtgtctgtcaatccttagatacatgattaattaatcaacgcatgtttttcagttgttactttgctgggcactttgagagatgcaaaatgagcactcttagtatatttctctcaaggacatacaaaataagaagaaaaata

SEQ ID NO: 438864 - DNA, 573 bp, Homo sapiens
atcattcctggaggccaaggccgtcgtgaattcactgcagacagctgtctctccttggtctggggtggtttgtctctggcttggactggagaggatacactgtgtattcttggctttgagttccttgactgctttctgctgcgtgggagttttccaggcatgtttggagagcggacagggttcagccagctagacctacctgcctgctctggagaaatttggttcacttgatccaagttcagatgcacaatttatggtgtccaactctggtccacacactcaggagctcctctaagctcacgaggtccttgggggatcagtgctagcagccgcctttagggcacaagtgttgatggactccttgcagcccttgaaatgaaatactggttttaaaatacagcygtaaactggaaggttatcatgaaggagacttagacccattggggaacacatcgaagtgaagcagatcaggacagctggaaattccaggcagggaggattaatcagtgcagcagaatcaggagatgcgtgtttccctgaaacatgtattgtttcactttccttcccattgta

SEQ ID NO: 438865 - DNA, 573 bp, Homo sapiens
atcattcctggaggccaaggccgtcgtgaattcactgcagacagctgtctctccttggtctggggtggtttgtctctggcttggactggagaggatacactgtgtattcttggctttgagttccttgactgctttctgctgcgtgggagttttccaggcatgtttggagagcggacagggttcagccagctagacctacctgcctgctctggagaaatttggttcacttgatccaagttcagatgcacaatttatggtgtccaactctggtccacacactcaggagctcctctaagctcacgaggtccttgggggatcagtgctagcagccgcctttagggcacaagtgttgatggactccttgcagcccttgaaatgaaatactggttttaaaatacagccgtaaactggaaggttatcatgaaggagacttagacccattggggaacacatygaagtgaagcagatcaggacagctggaaattccaggcagggaggattaatcagtgcagcagaatcaggagatgcgtgtttccctgaaacatgtattgtttcactttccttcccattgta

SEQ ID NO: 438866 - DNA, 514 bp, Homo sapiens
tgtcatgtaccaagagttctgcagttctcaaaacttagtattactaatagtggaacctcttcatgtgatgcaatttgaatatcacatcacctaaaagatagtcttgccaggtgtgtttaatctgaatttcattagttttaaacttaattttactttataggactgatgtagtttggatatttgtccccacaaatctcatgttgaaatgtaatccccagtgttaaaggtggagcctggtgggaggtgcttgggtcatggaggcaaatcctgcatggcttggtgcttttttttttttttttttttttgagatggagttttgctyttgttgcccaggctggaatgcaatggcataatctcggctcaccacaacttccgcctcccgggttcaagcggttctcctgcctcagcctcctgagtagctgggattacaggcatgagccaccacacccggctaattttgtatttttagtagagatggggtttctccatgttggtcaggctggtctcgaacacc

SEQ ID NO: 438867 - DNA, 575 bp, Homo sapiens
gcagatttttttttttttttgagacgacatttcattcttgttgcccaggcggtagtgcaatggcataatcttggctcaccacaacctctgcctcctgggttcaagtgattcccctgcctcagcctcccaaatagctgggattataggcatgggctaccatgcctaattttgtattatttttagtagattcagggtttctccatgttgatcaggctggtcttgaactcctgacctcaggtgatctgcccrtcttggcctcccaaagtgctgggattataggtatgagccaccgtgcccagccccagatgatttcttgttgctcattaacctccttttatttcagattgaaggactccctttagcttttttttttaggacaggtctggtgttgatgaaatctcttggcttttgtttttctgtctttatttttccttcatgcttgaaggatatttttgctggatatactattctagaataaaagttttttccttcagcactttatatatgtcatgccactctctctctggtctgtaaagtttccactgaaaagtttgctgccagacatactggagctc

SEQ ID NO: 438868 - DNA, 593 bp, Homo sapiens
cagcatacataaaaggtaatgtactgtatatattattctgcactagttttaaaaaatttaacagtatgtaactggagctccctttgtatccatacataaagagcttctttctctctgttacagtagactatgagaatgtaccatagtttaaccagtcagtcccttagagatggataccgtattgttattgcaaacagtgctgcagtcagtaagcttgtgtatatcatgattttgtacatgtgcaggtatatctatagaataaattaccagaaatgaaattgctgtgtcaaagggtaaatgtatttgtagtcttgatagatattgccaaattatcctccrtagaagttgtacattttgaaccattaccacattgtataaaagtgtttgcttataatttacgaggaatcttaaaatacatacttttctcctaaatttaaggaataaagcaataaaatcattgttctctatgtccctccttgtgacaaatagagcaataaaattctaaaggcttttgatgttgaaagttgtttaagatttttttccccagtcttttggcttcatgtcacgtttgagtcctcattacaatcatagtc

SEQ ID NO: 438869 - DNA, 560 bp, Homo sapiens
atatgtatttgtttgggttcactcttggtcttgattcagaaccaagtgctctacccttccatgcctgatcttcatgatctgcaaaagagggataaaaatacctcctactcccttggcatttcaaaccaactggggtaatcactgtgaagtacattaaattctgtccaatacaggctgcacaatatccttatggtttaaatgtgatttactttttgaataggtaatagattcacatgattgagatttcccaaaggtacatcagaatctagagtgaaaagtttcctaaccgcttctgtcccttctccactcattttcccagcacaaagccaatccatattactagacagatttgtataattcatttacataatttgtttacycttcggtaaatagactaaatttctaaaacaattcttgcttttttttttgcaattaacattttagcctggtgattatattcatacatacaatatcctcattctttttatccattgtatagttgttagttataagaatatattataatttgttcaaccagtgtattagtccattttcacact

SEQ ID NO: 438870 - DNA, 571 bp, Homo sapiens
tcttatcaaattggctctctgaagatttacagagagcaaagtcaggaatacttcccttcagcaaagagttgcaatcaggaagaaagtgagcaaggtgaagtaaatgatattttaagacatggttattttagtaccaaatgaaatttccattcagatataatttgcgaacccctygggtgacacttccatgcaatgaaataatactataatgacacaatgacagaattttctaaatctatcaacccttaaaatttaacagtgagcagaattttcccaacctctctcttgccaattgagggcgtaaatatgacagttagtcagctagtagctgtgggcatcaggaactactacataatgatgtctgagcaatatatttcatttacacattttatataaactttcttacaaattgttgaattccatgcagtttatgcaaacacttcttgtttctttctgttttctagttacattatttatgttgactgtaataatgtaccttataaagaatgaaaactgaaaacaggaatattcaagaaagttctctaagcacacaaacatagataccaatatg

SEQ ID NO: 438871 - DNA, 600 bp, Homo sapiens
agacatgaatttaacttttagatgtatgaaagttccttagcattaatttattaatccacatttccttcctgactcttgccactataaaaacaacttttatttctctcaatccagaaattcctgagcattatgcaattctaagccaaataattgyctttggttgagtagatttatttggtactgtaacgaggccaaatttatgatttccatatgctaataccatttagtctttcttttccatattttccaaagctttccatctttgtagcacatagtaagagaaatatagtactaggtgcagtcagttctgcaataaggccacatatgcatttctaaaaatcacctcgctctgcaaaataggcaataaaaaccacagagcttatggggaaaatggattagagataagacgtggcaaaactttgtcagagacacattaaaaaagataactgaataaaaattatagcacagttttactcatactaaatggtcaagaaacatataaatataactctctctctctgtctctctctctctatatatatatatacacacacactttccattgaagaagatctgaaatttgcttttggaagtagctgt

SEQ ID NO: 438872 - DNA, 600 bp, Homo sapiens
agacatgaatttaacttttagatgtatgaaagttccttagcattaatttattaatccacatttccttcctgactcttgccactataaaaacaacttttatttctctcaatccagaaattcctgagcattatgcaattctaagccaaataattgtctttggttgagtagatttatttggtactgtaacraggccaaatttatgatttccatatgctaataccatttagtctttcttttccatattttccaaagctttccatctttgtagcacatagtaagagaaatatagtactaggtgcagtcagttctgcaataaggccacatatgcatttctaaaaatcacctcgctctgcaaaataggcaataaaaaccacagagcttatggggaaaatggattagagataagacgtggcaaaactttgtcagagacacattaaaaaagataactgaataaaaattatagcacagttttactcatactaaatggtcaagaaacatataaatataactctctctctctgtctctctctctctatatatatatatacacacacactttccattgaagaagatctgaaatttgcttttggaagtagctgt

SEQ ID NO: 438873 - DNA, 600 bp, Homo sapiens
agacatgaatttaacttttagatgtatgaaagttccttagcattaatttattaatccacatttccttcctgactcttgccactataaaaacaacttttatttctctcaatccagaaattcctgagcattatgcaattctaagccaaataattgtctttggttgagtagatttatttggtactgtaacgaggccaaatttatgatttccrtatgctaataccatttagtctttcttttccatattttccaaagctttccatctttgtagcacatagtaagagaaatatagtactaggtgcagtcagttctgcaataaggccacatatgcatttctaaaaatcacctcgctctgcaaaataggcaataaaaaccacagagcttatggggaaaatggattagagataagacgtggcaaaactttgtcagagacacattaaaaaagataactgaataaaaattatagcacagttttactcatactaaatggtcaagaaacatataaatataactctctctctctgtctctctctctctatatatatatatacacacacactttccattgaagaagatctgaaatttgcttttggaagtagctgt

SEQ ID NO: 438874 - DNA, 522 bp, Homo sapiens
tatcaccattattactaattttctggttaactaaagttagagaatctctttgattgcaatgattttatataaaaagtccttcaaaatatatttatctacatcttaatagacttgtaagactcagcttgctatccaattagaatatggcttttgtcagacataagctttctttgtcttttcacgaggcaactgatttcttatcctctctttgtcctcgaaaatcagctaaatgtcacctatatgtagcattccattctttccattccwctccaacaaacagaatcattagtttctcactctttctggtcctcatgattctttataccaagctattataaaacatatgtcactgtatcttagttaatcccttatgccctcattcaattgtatactttttaaatggtgagatactaatctttgtacatgtcaccccttcacctttccttctaataagcattctttaaaaagcaccttgagtaaataataattataattaaatttttcatattatgcaacacacca

SEQ ID NO: 438875 - DNA, 652 bp, Homo sapiens
ttcttgcacaatatttcatggcactattgcttgggaaacaacatatgggggttggaggaaagtatcctgtttaaaagtggaggagaaactaaatgacttgtcaaaatttctgctgaatttatgattctgtgaaagatataaatgaaacttcttggagtaagttgtatgtgwttattcatgttagcataatcctttaagccataaaatatactccactgctctcacatctgctaatcaatggtcttttggaccatgaataaatcttcctaagactgttctcataacagcttattatggaaaaagctgaaaacatctccactcttcatcacccataaaagttttaaatatcttttgagttaccagaattagccatttaaaatcctgtattattccacaatgaaaaattaaagaatatctttagatgtagccagaagtcctcatgtccaaattgaatggacttacaaataggtataagcaaatacggaagagagaatggcacaggttcccctcctaacaggaaataaacacaagttcgtaccaagaaacagagtccaactctgttagactctatctagtcttaaaattatcttcaaaaaatatttggcaataaatttccccttgacctgctaaattttccctggtttaatgcagg

SEQ ID NO: 438876 - DNA, 582 bp, Homo sapiens
attttagcttcacaaaaataatgctgtgaagaaagttactgttattattgccagttttttaactgacgactaataattgtacatttcatggggtacttagtgatgtttcaatacatataatgtggagagatcagatcagggtaattagcatatccatcatctcaaacatgtattatttctttgtgttatgaatgtttgcagccataaagaaaactagtgatcaggtgaagytgactgtcaagcagaaatgaatacacacttttattagatttagagaggttaagttagcttgcacaaggtcatgctacttagctcctagtactatttcattatatgtttgttgactatatcaatgaacaagactttaaccaacgcatagcatttcttcaaataatgtttttcatggagaaaagaggagacattatatttatgttagagaaaaaatgtaatgtgtcaataaacacaatcactttaggaaagcctcctaaaaggtaagattatttcagagcagccctcacaagaaacattcctagcttttccattataatctcagttttaaatatcttatcccaccaacggtag

SEQ ID NO: 438877 - DNA, 582 bp, Homo sapiens
attttagcttcacaaaaataatgctgtgaagaaagttactgttattattgccagttttttaactgacgactaataattgtacatttcatggggtacttagtgatgtttcaatacatataatgtggagagatcagatcagggtaattagcatatccatcatctcaaacatgtattatttctttgtgttatgaatgtttgcagccataaagaaaactagtgatcaggtgaagctgactgtcaagcagaaatgaatacacacttttattagatttagagaggttaagttagcttgcacaaggtcatgctacttagctcctagtactatttcattatatrtttgttgactatatcaatgaacaagactttaaccaacgcatagcatttcttcaaataatgtttttcatggagaaaagaggagacattatatttatgttagagaaaaaatgtaatgtgtcaataaacacaatcactttaggaaagcctcctaaaaggtaagattatttcagagcagccctcacaagaaacattcctagcttttccattataatctcagttttaaatatcttatcccaccaacggtag

SEQ ID NO: 438878 - DNA, 582 bp, Homo sapiens
attttagcttcacaaaaataatgctgtgaagaaagttactgttattattgccagttttttaactgacgactaataattgtacatttcatggggtacttagtgatgtttcaatacatataatgtggagagatcagatcagggtaattagcatatccatcatctcaaacatgtattatttctttgtgttatgaatgtttgcagccataaagaaaactagtgatcaggtgaagctgactgtcaagcagaaatgaatacacacttttattagatttagagaggttaagttagcttgcacaaggtcatgctacttagctcctagtactatttcattatatgtttgttgactatatcaatgaacaagactttaaccaacgcatagcatttcttcaaataatgtttttcatggagaaaagaggagacattatatttatgttagagaaaaaatgtaatgtgtcaataaacacaatcactttaggaaagcctcytaaaaggtaagattatttcagagcagccctcacaagaaacattcctagcttttccattataatctcagttttaaatatcttatcccaccaacggtag

SEQ ID NO: 438879 - DNA, 547 bp, Homo sapiens
gggtttgtgcgtttgtgtttctgttgcttttgcccttgttctttctgattcaaactgattgtgctcagtttctatgcaatcagagaggataattgatgttttcattgattactttttttctgaggtattatatgccaacaaatgtttgaccttgccattaagtgaaacaaacatagatgttgctacctcccaaagttcttagatgacttaggtttgttaaagtatcttttcctacatctaggttctgatgtgattcagggaattagtagtgctaaatggccagagaygccatcaatcatcaatccctatgaatagaatataagttaggagacataatccatacactggcaccaggttggttctgaaaatctctttatagcaagtgaataaatgtttctatccgtgtccatgaggacctgttcatttaaggattctttctttttatgttttctttcctatatcagctttcctggcccccatggctgccctgacacctctatccagaagccttctatttgcgtttatccctgagggctgccacaggaac

SEQ ID NO: 438880 - DNA, 570 bp, Homo sapiens
attaattaatttgctacttgatcattcatgtttctatagtctggcatatgtaactatataccatttgggatggtaatttatatagtaaatttccttccgatattacaaatgttgggggagaatattcagtgacattacccaagaggaatcatagcatttttattttagcccagtttgattggcagcgatggattagatagacattttcaggttagccctaatttggttggttctcttctcaccagaaagggtcgaatgggatccctcctttcagaattcaaatgtagctaaggccaaaagccagagtcctctgcagagaagagcttaaggrttctgagaatgaagaatttaaaattttattaaaagctttggcagcataatttatcctcctaattcatccatggttgatattttatagaatgtaaaggaggaaacacacatccttagatctaccactgataaagattaataattaaagtgaattggagtttatcaacattccaaactgaaaagtttcagtaaacacaaatatagtatctctccagcacctagcacatgtctatatgtagt

SEQ ID NO: 438881 - DNA, 570 bp, Homo sapiens
attaattaatttgctacttgatcattcatgtttctatagtctggcatatgtaactatataccatttgggatggtaatttatatagtaaatttccttccgatattacaaatgttgggggagaatattcagtgacattacccaagaggaatcatagcatttttattttagcccagtttgattggcagcgatggattagatagacattttcaggttagccctaatttggttggttctcttctcaccagaaagggtcgaatgggatccctcctttcagaattcaaatgtagctaaggccaaaagccagagtcctctgcagagaagagcttaaggattctgagaatgaagaatttaaaattttattaaaagctttgrcagcataatttatcctcctaattcatccatggttgatattttatagaatgtaaaggaggaaacacacatccttagatctaccactgataaagattaataattaaagtgaattggagtttatcaacattccaaactgaaaagtttcagtaaacacaaatatagtatctctccagcacctagcacatgtctatatgtagt

SEQ ID NO: 438882 - DNA, 610 bp, Homo sapiens
cagagtataaggaatatagaccttcaagtagcatagaattggccacttgaaacaagggaagatgcctttgcaaaaacgtgtttggcagtaactggagaaatgtttttttaaattgatacaatgatagctttttcaggctcmctaaaagaagaaactaatcaagaacacttttaaaacaacatccagctttacattcagtctaaaagacaggtattgaaatttatcaagcaaggggacaatgcagggacagtgagtttatttgcctgacaggatactttgcattttcactcctaggagtgagccattaaagcctgacaaacaactcttaaagaaaaacaaacgtaaaagaggcttaggaaatactccaaccttgagctagccaatttctaaatcatgttagagaagtttccagaagaatcaagcattccagaaaataccatcatatatcacgcatttccccctcctggaatatgtgcaaaaacaagcctttcttcaacaggaaaatggtgctggtgtaggacatctactcacggcatccaggaagtagatctagcagcccagaggtggagaatcacccagcaggaaggtcagagctcagctccctagcatg

SEQ ID NO: 438883 - DNA, 610 bp, Homo sapiens
cagagtataaggaatatagaccttcaagtagcatagaattggccacttgaaacaagggaagatgcctttgcaaaaacgtgtttggcagtaactggagaaatgtttttttaaattgatacaatgatagctttttcaggctcactaaaagaagaaactaatmaagaacacttttaaaacaacatccagctttacattcagtctaaaagacaggtattgaaatttatcaagcaaggggacaatgcagggacagtgagtttatttgcctgacaggatactttgcattttcactcctaggagtgagccattaaagcctgacaaacaactcttaaagaaaaacaaacgtaaaagaggcttaggaaatactccaaccttgagctagccaatttctaaatcatgttagagaagtttccagaagaatcaagcattccagaaaataccatcatatatcacgcatttccccctcctggaatatgtgcaaaaacaagcctttcttcaacaggaaaatggtgctggtgtaggacatctactcacggcatccaggaagtagatctagcagcccagaggtggagaatcacccagcaggaaggtcagagctcagctccctagcatg

SEQ ID NO: 438884 - DNA, 610 bp, Homo sapiens
cagagtataaggaatatagaccttcaagtagcatagaattggccacttgaaacaagggaagatgcctttgcaaaaacgtgtttggcagtaactggagaaatgtttttttaaattgatacaatgatagctttttcaggctcactaaaagaagaaactaatcaagaacacttttaaaacaacatccagctttacattcagtctaaaagacaggtattgaaatttatcaagcaaggggacaatgcagggacagtgagtttatttgcctgacaggatactttgcattttcactcctaggagtgagccattaaagcctgacaaacaactcttaaagaaaaacaaacgtaaaagaggcttaggaaatactccaaccttgagctagccaatttctaaatcatgttagagaagtttccagaagaatcaagcattccagaaaataccatcatatatcacgcatttccccctcctgsaatatgtgcaaaaacaagcctttcttcaacaggaaaatggtgctggtgtaggacatctactcacggcatccaggaagtagatctagcagcccagaggtggagaatcacccagcaggaaggtcagagctcagctccctagcatg

SEQ ID NO: 438885 - DNA, 496 bp, Homo sapiens
ctgttctatcaggtaacacctggtttgaatgttgaatttgtttacatacaggttaagaaaaaaagcagctctgaattggaaatgtgatatttcctctctccaatcccaggtatcaaaaaagcatattgttggtgaggattgaccttacattgtcagtgtaggcagaagatctttcagtgtctatatggtcttgaagaggaagtacagggctgggagccagcacacttgggtttctacctctggctcagtcctcgattagcattgactcacaactccagrcttccatctccttaactgaaaatggtcatctttctgtctcaaaagctctatgcttttccccttggttcatggccaaggaagttgtatctaagcctaaaccaagttgacaatccaatctatttaaatttgaaaaagtggatatactggcagtggattccttttgaaaaaaaaaaataatctgcaatgtcctacttagagtcagcccaactctttgtga

SEQ ID NO: 438886 - DNA, 496 bp, Homo sapiens
ctgttctatcaggtaacacctggtttgaatgttgaatttgtttacatacaggttaagaaaaaaagcagctctgaattggaaatgtgatatttcctctctccaatcccaggtatcaaaaaagcatattgttggtgaggattgaccttacattgtcagtgtaggcagaagatctttcagtgtctatatggtcttgaagaggaagtacagggctgggagccagcacacttgggtttctacctctggctcagtcctcgattagcattgactcacaactccagacttccatctccttaactgaaaatggtcatctttctgtctcaaaagctctatgcttttccccttggttcatggccaaggaagttgtatctaagcctaaaccaagttgacaatccaatctatttaaatttgaaaaagtggatatactggcagtggattccttttgaaaaaaaaaaataatctgcaatgwcctacttagagtcagcccaactctttgtga

SEQ ID NO: 438887 - DNA, 508 bp, Homo sapiens
agagatgggcagtagcacatcgttgtacagattttccaccatgcagacacaatagaggcaagtaacctcaagagaaaaggtagacaaataattaggaagtgatgagttctgaggatacatgacctttacttttaacctaatttgtttaattgcaagtctatatgatttaattgttattgatgactgtcttcacaaccagctcagaacaattgtgaaaatataattggcagctcccgtgagccaatacaggccagctccaacacagcaytgcccagtgccccccactgggcctcactgacactttgttctcagctcctcactgccccatctgtactggcgcttagatagacccctccctgttccttactgggattcaaggcagaaactaaattgaaagcacaagtgatcctattatgacagataaaggtgctcatgatatcaaaatgcaagtgctcacagccttgtccaaaacaaagctcacagataagatggccctaagggagacaag

SEQ ID NO: 438888 - DNA, 619 bp, Homo sapiens
catcttttattatctgggtgggcccagtgtcattataagaatgcttaaaagtagaggctggcgcggtgactcattcctgtaatcccagcactttgggaggccgaggcaggtggatcacaaggtcaggtgttcaagaccagcctggccaatatggtgaaacctcgtctctactaaaaatataaaaattagccaggcgtggcagtgtgtgcctgtagtcccagctacccgagaggctaaggcaggagaattgtttgaatccgggaggtggaggttgcagtgagctgagrtcatgccactgaactccagcctgggcgacagagcaagactctgtctggaaaaaaaaaaaaaagtagaaaaggtactcagaagagtgaggtagaggaagattgactacagaaaaggaggtcaaaatgactcagtgtgagaaagactcagtgcatccttgctggctttgaagatggcagagcagtgccaagacatgtgggctgcctctggaagccggacaaggcaagcaagtgtatgctgccctagaagctccagaaaggaacacagccctgctgacatagccctgctgacacttggattttagcccagggagacccattttaaacttttgacc

SEQ ID NO: 438889 - DNA, 597 bp, Homo sapiens
tgacttaatttctagttcctacagtgacaccataagcctcacagtagtgtagggacactagagaggttctcaaggcattatggmggtgctgactacaaaataggaaaataaggcttggaaaagctttttaacaaactcagtctctctctctctctctctctctctctctctctctctctctctctcatttttaaggtgttgtttgtgcataaagaaataaacacaaggcaatactaacaagacatgacttctgtgagctacagtgaaaagaatgaaacccttactcataaattaatcatagagggaagctctccaaaaactacacagatataactcttagcaactctgttgtcacccactcctaactctggctgacagcagattgtagagtagttaagggtcattgttgaacaagtctcagttttaatctagtaaagaaaacagaaacttgagaaattagtcagagaaaagtatgtcctatgacatcctaattattcattatttattcagataattaaatgacgtaagaatagtaggacaagaaaaataaagatgtgagtattcaaaaatagagggctgtctttattcatttaacac

SEQ ID NO: 438890 - DNA, 597 bp, Homo sapiens
tgacttaatttctagttcctacagtgacaccataagcctcacagtagtgtagggacactagagaggttctcaaggcattatggaggtgctgactacaaaataggaaaataaggcttggaaaagctttttaacaaactcagtctytctctctctctctctctctctctctctctctctctctctctcatttttaaggtgttgtttgtgcataaagaaataaacacaaggcaatactaacaagacatgacttctgtgagctacagtgaaaagaatgaaacccttactcataaattaatcatagagggaagctctccaaaaactacacagatataactcttagcaactctgttgtcacccactcctaactctggctgacagcagattgtagagtagttaagggtcattgttgaacaagtctcagttttaatctagtaaagaaaacagaaacttgagaaattagtcagagaaaagtatgtcctatgacatcctaattattcattatttattcagataattaaatgacgtaagaatagtaggacaagaaaaataaagatgtgagtattcaaaaatagagggctgtctttattcatttaacac

SEQ ID NO: 438891 - DNA, 597 bp, Homo sapiens
tgacttaatttctagttcctacagtgacaccataagcctcacagtagtgtagggacactagagaggttctcaaggcattatggaggtgctgactacaaaataggaaaataaggcttggaaaagctttttaacaaactcagtctctctctctctctctctctctctctctctctctctctctctctcatttttaaggtgttgtttgtgcataaagaaataaacacaaggcaatactaacaagacatgacttctgtgagctacagwgaaaagaatgaaacccttactcataaattaatcatagagggaagctctccaaaaactacacagatataactcttagcaactctgttgtcacccactcctaactctggctgacagcagattgtagagtagttaagggtcattgttgaacaagtctcagttttaatctagtaaagaaaacagaaacttgagaaattagtcagagaaaagtatgtcctatgacatcctaattattcattatttattcagataattaaatgacgtaagaatagtaggacaagaaaaataaagatgtgagtattcaaaaatagagggctgtctttattcatttaacac

SEQ ID NO: 438892 - DNA, 584 bp, Homo sapiens
atgtttttcagttatctactcctcatatttcctatttgtctctctccttctgtaaactataagctctttgaagacagggactgggttttgttcacaattaaaagtccagcgaagatgctcaataaattttgcatcaataaatgtrttttgaaatatacaataagaaacagatggcatttcaagcaaatattgtgcaagaaggagctcctgtaggagataagaagggtttcctagtaagtgggcaagtatgtgattaaggtatctgggagcagactcctactcaagtcagggagggatctgggaatcagtccctggggaaaaggaaagactggagcaaagtgaaggcccagatttatatggacttaaaatcagaaaggaggatcaatacatggcacagagtcgctattagggctggtacaatatggaaagttggctccaggagaatggtggaagccctgttacaactggggcacatgatcaaaaaataagcaaggagtttcattagatattgaatcactcagctcataatgaaaaagacttcttatacttccttctgaaggtcaaaatcagtcctaaagcctaag

SEQ ID NO: 438893 - DNA, 584 bp, Homo sapiens
atgtttttcagttatctactcctcatatttcctatttgtctctctccttctgtaaactataagctctttgaagacagggactgggttttgttcacaattaaaagtccagcgaagatgctcaataaattttgcatcaataaatgtgttttgaaatatacaataagaaayagatggcatttcaagcaaatattgtgcaagaaggagctcctgtaggagataagaagggtttcctagtaagtgggcaagtatgtgattaaggtatctgggagcagactcctactcaagtcagggagggatctgggaatcagtccctggggaaaaggaaagactggagcaaagtgaaggcccagatttatatggacttaaaatcagaaaggaggatcaatacatggcacagagtcgctattagggctggtacaatatggaaagttggctccaggagaatggtggaagccctgttacaactggggcacatgatcaaaaaataagcaaggagtttcattagatattgaatcactcagctcataatgaaaaagacttcttatacttccttctgaaggtcaaaatcagtcctaaagcctaag

SEQ ID NO: 438894 - DNA, 584 bp, Homo sapiens
atgtttttcagttatctactcctcatatttcctatttgtctctctccttctgtaaactataagctctttgaagacagggactgggttttgttcacaattaaaagtccagcgaagatgctcaataaattttgcatcaataaatgtgttttgaaatatacaataagaaacagatggcatttcaagcaaatattgtgcaagaaggagctcctgtaggagataagaagggtttcctagtaagtgggcaagtatgtgattaaggtatctgggagcagactcctactcaagtcagggagggatctgggaatcagtccctggggaaaaggaaagactggagcaaagtgaaggcccagatttatatggacttaaaatcagaaaggaggatcaatacatggcacagagtcgctattagggctkgtacaatatggaaagttggctccaggagaatggtggaagccctgttacaactggggcacatgatcaaaaaataagcaaggagtttcattagatattgaatcactcagctcataatgaaaaagacttcttatacttccttctgaaggtcaaaatcagtcctaaagcctaag

SEQ ID NO: 438895 - DNA, 545 bp, Homo sapiens
tatgacttacatgactggtggtactcaggtgttctcagagctcagaacatattccagagcctgatttatttcctgatttctttacaataaatcactctgaaaaccaagaacactagaatatagactgcttgtacactaaaatcagagctcctttggaaatgggtggcccattcctgggaggaacaatcatatctcaaggtgcatttatcctgggtagccacatcagccctgtgttttctctttacatagttccagtagcctgcaaggtcactgatgggtagctctctaataatggcttagtaactcaaaatatttggatcccagatttatttggctgctatgtggcttattttttttaagtgagccctacttccattgagcacatgttctctgtcagaaaattttcataarcatacagtctatcgtgcaaaacatcagactatcaattacttccacttactctgagcaaagaatatcattagtataccaaaaaaaatagttttctatgaatggcatccttgttcacattccctgaagagcagaat

SEQ ID NO: 438896 - DNA, 561 bp, Homo sapiens
gccttcagcatctaacatgcctgacacacagaaaagactcaataaatattaaatgaataatcttgtcagccggacagcaccccattgacttaccacaaaactctgaaagttgayttgtgaagcgaagagtggaaggagatgtgaagggaagagatgtcagggggtgacgtttgagacagtgagtactttagaatggggagtagtttaaacccacaaagaaaacacagcatggttgtgttacctgaaatccccagatcacagactgctaaattgatagtcattatttcagcgggtctcagcttcttctttcgtctagaagacatgtaaaggacatatccatttccaaatgtggacagaatccctacaaggaaaaataaaaattccaatcgttaaaactaagatttcgagttcactcagatatgaaacacttctcaacttcaaaaatggacaccatagatttagagggtagtgagaggactctaaataaaaaaatctaaattaagaagatgaaataaaaagcatgagttgtgagtgacaggccaatggggcaggagtcaggga

SEQ ID NO: 438897 - DNA, 530 bp, Homo sapiens
aagtgggtgacaatcgagaacctgggcactgtccctcccaccaaggggagagaaagtgaccctcaacccaccgaacctaccaacaatgccataagtgtgttcccactttttcatatccttttattaatgactagttgcctttggcattacaatgaaactgttcraaagttcttacaaacccagtttaaatccaaaaagacccaatccctactgactttatttaagaaaagaatacacctacttccatagcttaacatgtagagtagatttcttcaggaattcttgcttcatagtgtagctgtgtataaatgagaatctggtacagctgcctttagtagtaaggaataaggagagtattaacaggagaaacccagagttttctattttaatttctacttctccaccacaattcattttgggggcaaagaaagaaatgtgtgattcagctgatggtatgaaaccaccaggaactaactgcattgtgctcttaggaaattctgactccctggagtcagtgctgcttaatggtc

SEQ ID NO: 438898 - DNA, 652 bp, Homo sapiens
agtttaataaaaatgcaatgtggattttacagagataagacagtytctgttccagcagaatgtttgcccattttattctctgctctattcccagcaacttaaaacagtggcaaagagtgggcgctcaatatatatttatgttgaaaagagatggggactcatttataagaaacagaatttaaactagtaaaacactaacaacaataaagacaaagacccagggaatcactttacagcagaatttggttgaatcacatgagttccttttgcctcaagtactgaccatagagggatatcaagtattttctaatgagttttgctactttcaggaggttaaatgaaattcttagccagtaataaatagatgagagagggagaaaaagagagaaagggaggaagggaagaagggtggaagagaaagatagaaacaaagagaaaagagagagagagcaagtttgacccaacatctgaaaaaattaaaggcaaacaaacctaaagacataacccaccttcacactggtcacccaaagttaaaacaacaattttaaatttaagaaaagtatggtttcttttcttaaatttaaataggtggttaaattaaatcctaactgtctagattagtgctatccagtataaatgtaatgtaagccag

SEQ ID NO: 438899 - DNA, 538 bp, Homo sapiens
ggcaagtccttcccccagcccccagcattttaaagatgtcatttcactctcttctggcctttatgttttctgaagagaaatcagtaatcatttgagttcttgtttctctgtatataatgtgtaatttttctctggctttttaaaatattttctttgatattctgcagtttgactattatatgcctgggcattttttttttctttgtacttatcctgctaagggtttgctgagcttcttgaatatgtaaatttataccttttactgaatttggggaaattttcactgttattccttcaaatactgtttcctcaccattttctctttcctctccttttgagactccaattacttgtatgtaagatcttttgatactcccccacatatccctgagactgttcatgtttttaatcatttcactatctattcttccaaaaggatcatttatattgatctacctttaaatttgcagacatctgttgttttcrtgttactattggacccatcctgtgcaattttttaaattgtacagtttttaga

SEQ ID NO: 438900 - DNA, 592 bp, Homo sapiens
cacatttggttggatggatggatggattaatgaattgttctagcttggtataatggagaccttatgtgaagacaggagatgagctgaataacctttgaccttagcttgcaattttattttccacatttctgtacctaacattgtgtgtagcacttcaaaattccagattgattattaatatgtaagtaattagaaatttaggtcctgaactcctcttttgtttcatctgcagaccaaaaatgtcactaaagcattaaccacmtatgttgtgagtgccagcatttcagatgatatgttcattcaaaacttagctgacccagtggttatcactctgcagcatattggaggaaaccaggtaatatatctattttcagctcagaatcaaatggcctcaggaactcttcacgacttttctgttaaaagtaatttgttaattaacagatgtgattctaacacttaatgaggaatgtcctattccaggtagcaaatgtgtgttataattggaaccttccagaaataatgccttatcctaaagtgatagggaatgatgggcattctagcactgtgacagattggtggggcagtgactgga

SEQ ID NO: 438901 - DNA, 565 bp, Homo sapiens
gtatacatatgtaactaacctgcacaatgtgcacatgtaccctaaaacttaaagtagaaagaaaaaaagacaaaaaaaaaacagacaaaatatgaactactacactagaatgcctaaagatatcaatgacgtatacctttatttagtgctgaattgatatatatctttatggtactgaacagatacatacttttaaacttttccatgcaacctatataacgaaaaaatgcagataaaagaaatatatttcagatgaaaatcagcccatctttaytgcagctcaatcattcacattttcctattttattttccaagaagcaactggtgccatgatattgtgatatttgtccttatgaacagaatcttgaggtttcaaaacccaattttctaaaatatgaagttcatttcacttttattctcctttttggggtgatctttggtgcaagaacacacccagcctctagcaacagcaagttagactgtactagtcagcattccatagcaccatgctactagcacagactctgtctgaacacattgctccatgccctttcttaggaataca

SEQ ID NO: 438902 - DNA, 565 bp, Homo sapiens
gtatacatatgtaactaacctgcacaatgtgcacatgtaccctaaaacttaaagtagaaagaaaaaaagacaaaaaaaaaacagacaaaatatgaactactacactagaatgcctaaagatatcaatgacgtatacctttatttagtgctgaattgatatatatctttatggtactgaacagatacatacttttaaacttttccatgcaacctatataacgaaaaaatgcagataaaagaaatatatttcagatgaaaatcagcccatctttactgcagctcaatcattcacattttcctattttattttccaagaagcaactggtgccatgatattgtgatatttgtccttatgaayagaatcttgaggtttcaaaacccaattttctaaaatatgaagttcatttcacttttattctcctttttggggtgatctttggtgcaagaacacacccagcctctagcaacagcaagttagactgtactagtcagcattccatagcaccatgctactagcacagactctgtctgaacacattgctccatgccctttcttaggaataca

SEQ ID NO: 438903 - DNA, 541 bp, Homo sapiens
ataccataggtatagagaatgacaatagcacaaactctgaagtagccaccattaagaaacaagaagtaagctcatattttgaaaattaaaatgagttttgtaagggtaatgtatcacatggtacaaattcaaaatgtacaaaaatgtacaaaatgtacaaaaaaactgccatttttcctgtgtccagtatgtaaagcatttcctcattctttttgttaatagctgcatagtgttgtatacttagcatcgcttatttaatcagtcacctactgatttatatttaggctttttctratattttcctgttaccaaaaaatgctgcaatgactaactttgtatgtaaatcacacatatatgagtacatctgtagaacaaatttctagaagttgatctgttaggacaaaaggcatgtgaattttcatagaaagacaatttatacttttactaccaatatacgaggcatgcttggtttcccatattttcgtccacaaaatgtgtcattaaactttgtcaatgttgtaggtaaaaatggtattgtggc

SEQ ID NO: 438904 - DNA, 555 bp, Homo sapiens
ggttctataagctacttccaccctcaggactatatccattagaagtaagcaccttttctaattgatacaaaggtgccatatggtccagcagccttggccatgggtgacaccccaacccacctcaccatttatcctttgctcctttctgactgatccctcaggaggatggttttatatgtgatttgactcagctcygtctcttttatgtgcacgcctgcatttgctgatatgtgaaaagtaacaggatgtaaaagagcactgtactcttcatcaaaagccttcctttttttaactaacttcatgactacaggcaaagtacataaaccctctgagccttgctttcctcatttatcaaatgagtactggtaagatctactttactggcttctctaggttattgtaaggatcaaaatcagcaacctaagggaaagccctttgtaaattgtaaggttctgtatgaagttaaggattattacaaagggactagatggtatatctttaaatccctttgcaattctccccagctccagagctcagtgccctgcatgtggtggc

SEQ ID NO: 438905 - DNA, 531 bp, Homo sapiens
gcaatctgtagggtgatatccccacattacagcaccgatgagaactattttccctctaatattttgcaaagggaaatccactcagtgccacaatgcagctcagcctctagggtttgggggagatgctcaggctgcaacagtggagtctctcagcsgttttgcatcaaacagaaatactacactcaaagtagacattttccttcctaggacagtagctgcccctatcattaaagtttataggtatttgtatatgtcattactgttaccagtttttcctgagtcctggggagagtccagctgaatgcctgtaaaatacagcaagttcctaagagaaagatgctctctaaaggtatagtattactataaatttcaactacttccccaagcttgaaaatgctgtcctggagagaatgatcacttaacaatcattgactcatttcccaagctcgtaggaaaccagcctaactcccaggcatggtaaatgtaaaggaatggggtaactggggcacagggcagagaaaatactagcca

SEQ ID NO: 438906 - DNA, 347 bp, Homo sapiens
cataatcgaatgcaatcgaaaggaatcatcattgaatgcaatcacatggaatcatcacagaatggaatcgtacggaawcatcatcgaatggaattcaatggaatcatcaattggactcgaatggaaacatcaaatggaatcgattggaagtgtcgaatggactcgaatgaaatcatcatcgagtggaatcgaatggaatcatcgaaaggactcgaatcaaatcctaaaatggactcgaatggaatcatcgaatgcactccaatggaatcaacatcgaacggaccctaccagaatgatcaaatggactcgaatggaaccattgaatggaaatgaatggaatcattgat

SEQ ID NO: 438907 - DNA, 347 bp, Homo sapiens
cataatcgaatgcaatcgaaaggaatcatcattgaatgcaatcacatggaatcatcacagaatggaatcgtacggaaacatcatcgaatggaattsaatggaatcatcaattggactcgaatggaaacatcaaatggaatcgattggaagtgtcgaatggactcgaatgaaatcatcatcgagtggaatcgaatggaatcatcgaaaggactcgaatcaaatcctaaaatggactcgaatggaatcatcgaatgcactccaatggaatcaacatcgaacggaccctaccagaatgatcaaatggactcgaatggaaccattgaatggaaatgaatggaatcattgat

SEQ ID NO: 438908 - DNA, 347 bp, Homo sapiens
cataatcgaatgcaatcgaaaggaatcatcattgaatgcaatcacatggaatcatcacagaatggaatcgtacggaaacatcatcgaatggaattcaatggaatcatcaattggactcgaatggaawcatcaaatggaatcgattggaagtgtcgaatggactcgaatgaaatcatcatcgagtggaatcgaatggaatcatcgaaaggactcgaatcaaatcctaaaatggactcgaatggaatcatcgaatgcactccaatggaatcaacatcgaacggaccctaccagaatgatcaaatggactcgaatggaaccattgaatggaaatgaatggaatcattgat

SEQ ID NO: 438909 - DNA, 429 bp, Homo sapiens
agtcgaatggaaacatcactgaatggaatcaaatgaaatcaccgaattgaatcaaatggaatgatcatcaaagggaatcaaaggaaatcatcgaatgggatcaaatggagtcaacgaatggaatcgagtggaatcatcgaatggatttgaacagaatcawcatcaaatggaatcgaatggaatcatcgaatggactcgaatggaatcatctaatgcactcgaatggaataatcatcgaatgtaatcgaatggactcatccaatggaatcaaatggaatcatcaaatggaatcgaacggaatcatcatcaaaaggaaccgaatggaatcattgaatggaatcaaaggcaatcatggtcgaatggaatcaaatggagacatcattgaatagaattgaatggaatcatcacatggaatcgaatggaatcatc

SEQ ID NO: 438910 - DNA, 429 bp, Homo sapiens
agtcgaatggaaacatcactgaatggaatcaaatgaaatcaccgaattgaatcaaatggaatgatcatcaaagggaatcaaaggaaatcatcgaatgggatcaaatggagtcaacgaatggaatcgagtggaatcatcgaatggatttgaacagaatcatcatcraatggaatcgaatggaatcatcgaatggactcgaatggaatcatctaatgcactcgaatggaataatcatcgaatgtaatcgaatggactcatccaatggaatcaaatggaatcatcaaatggaatcgaacggaatcatcatcaaaaggaaccgaatggaatcattgaatggaatcaaaggcaatcatggtcgaatggaatcaaatggagacatcattgaatagaattgaatggaatcatcacatggaatcgaatggaatcatc

SEQ ID NO: 438911 - DNA, 562 bp, Homo sapiens
atcatcatcaaatggaatcgaatggaatcatcgaatggactcgaatggaatcatctaatgcactcgaatggaataatcatcgaatgtaatcgaatggactcatccaatggaatcaaatggaatcatcaaatggaatcgaacggaatcatcatcaaamggaaccgaatggaatcattgaatggaatcaaaggcaatcatggtcgaatggaatcaaatggagacatcattgaatagaattgaatggaatcatcacatggaatcgaatggaatcatcgtaaatgcaatcaagtggaatcatcgaatggaatctaagggaatcatcgaatggaactgaatggaatctttgaatggattcgattggaatcatcatcgaatggacttgaattgaattatcgaattgatttgaatggaatcatcatcgaatggaatccaatggaatcatcgaatggaatcgaatggaatcatcattgacttgaattgaatggaatcatcaaatggactcgaatggaatcatcatagaatggaatcgaatgcaattatcgaatggacttgaatgaaatca

SEQ ID NO: 438912 - DNA, 559 bp, Homo sapiens
ggaattgaatggaatcatagaatggaatccaatgtaatcrtcatcgaatggaatcatcatgaaatgaaatcaaatggaatcatcgtatggactccaacggaatcatcatcgactggaattgaatagaagcatcgaatgaaatcaaatggaattatcatcgaacggacccatatggaatcatcattgaattgactcatatggaatcatcgccgaatggattccaatggaataatcatggaatggattcgaatggaaatatcatctaattgaatcaaatagaatcatcatggaattgaatcgaattgctcaccgtcgcatggaatcaaatggaatcatcgaatggaatcgaatggaatcatcatcgaatggaatgaaatggaatcatccaatggacgagaagtgaatcatcattgaatggaatcgaatagaatcatcaagtgaaatccaatggaatcatcatcgaatagaatcgaattgaatcaacatcaaatggaatcgaatggaatcatccaatataatagaattgaatcaccatcgaagagaatcgaatagaatcatc

SEQ ID NO: 438913 - DNA, 559 bp, Homo sapiens
ggaattgaatggaatcatagaatggaatccaatgtaatcgtcatcgaatggaatcatcatsaaatgaaatcaaatggaatcatcgtatggactccaacggaatcatcatcgactggaattgaatagaagcatcgaatgaaatcaaatggaattatcatcgaacggacccatatggaatcatcattgaattgactcatatggaatcatcgccgaatggattccaatggaataatcatggaatggattcgaatggaaatatcatctaattgaatcaaatagaatcatcatggaattgaatcgaattgctcaccgtcgcatggaatcaaatggaatcatcgaatggaatcgaatggaatcatcatcgaatggaatgaaatggaatcatccaatggacgagaagtgaatcatcattgaatggaatcgaatagaatcatcaagtgaaatccaatggaatcatcatcgaatagaatcgaattgaatcaacatcaaatggaatcgaatggaatcatccaatataatagaattgaatcaccatcgaagagaatcgaatagaatcatc

SEQ ID NO: 438914 - DNA, 559 bp, Homo sapiens
ggaattgaatggaatcatagaatggaatccaatgtaatcgtcatcgaatggaatcatcatgaaatgaaatcaaatggaatcatcgtatggactccaacggaatcatcatcgactggaatwgaatagaagcatcgaatgaaatcaaatggaattatcatcgaacggacccatatggaatcatcattgaattgactcatatggaatcatcgccgaatggattccaatggaataatcatggaatggattcgaatggaaatatcatctaattgaatcaaatagaatcatcatggaattgaatcgaattgctcaccgtcgcatggaatcaaatggaatcatcgaatggaatcgaatggaatcatcatcgaatggaatgaaatggaatcatccaatggacgagaagtgaatcatcattgaatggaatcgaatagaatcatcaagtgaaatccaatggaatcatcatcgaatagaatcgaattgaatcaacatcaaatggaatcgaatggaatcatccaatataatagaattgaatcaccatcgaagagaatcgaatagaatcatc

SEQ ID NO: 438915 - DNA, 468 bp, Homo sapiens
atggatttgaatggaatcatcatcgaatggaatccaatggaatcatcgaatggaatcgaatggaatcatcattgacttgaattgaatggaatcatcaaatggactcgaatggaatcatcatagaatggaatcgaatgcaattatcgaatggactkgaatgaaatcacctttgaatggaatcaaagggaatgattgaaaggaatcgaatgccatcatcatcgaatggaatcaaaaggaatcatcgaatggaattgaatggaatcaccattgaatggactcgaatggaatcatcatggtatggaatcgaatggaatcatcatcatatggaatcaaatggaatcatcgaatggacaagaatggaatcgtcgtcaaatggaatcaagtggatcatcgattagaaactaatggaatcattgttgaaagaaatggaatggaatcattgaatggaattgagtggaatcaccaatg

SEQ ID NO: 438916 - DNA, 468 bp, Homo sapiens
atggatttgaatggaatcatcatcgaatggaatccaatggaatcatcgaatggaatcgaatggaatcatcattgacttgaattgaatggaatcatcaaatggactcgaatggaatcatcatagaatggaatcgaatgcaattatcgaatggactggaatgaaatcacctytgaatggaatcaaagggaatgattgaaaggaatcgaatgccatcatcatcgaatggaatcaaaaggaatcatcgaatggaattgaatggaatcaccattgaatggactcgaatggaatcatcatggtatggaatcgaatggaatcatcatcatatggaatcaaatggaatcatcgaatggacaagaatggaatcgtcgtcaaatggaatcaagtggatcatcgattagaaactaatggaatcattgttgaaagaaatggaatggaatcattgaatggaattgagtggaatcaccaatg

SEQ ID NO: 438917 - DNA, 468 bp, Homo sapiens
atggatttgaatggaatcatcatcgaatggaatccaatggaatcatcgaatggaatcgaatggaatcatcattgacttgaattgaatggaatcatcaaatggactcgaatggaatcatcatagaatggaatcgaatgcaattatcgaatggactggaatgaaatcaccttkgaatggaatcaaagggaatgattgaaaggaatcgaatgccatcatcatcgaatggaatcaaaaggaatcatcgaatggaattgaatggaatcaccattgaatggactcgaatggaatcatcatggtatggaatcgaatggaatcatcatcatatggaatcaaatggaatcatcgaatggacaagaatggaatcgtcgtcaaatggaatcaagtggatcatcgattagaaactaatggaatcattgttgaaagaaatggaatggaatcattgaatggaattgagtggaatcaccaatg

SEQ ID NO: 438918 - DNA, 468 bp, Homo sapiens
atggatttgaatggaatcatcatcgaatggaatccaatggaatcatcgaatggaatcgaatggaatcatcattgacttgaattgaatggaatcatcaaatggactcgaatggaatcatcatagaatggaatcgaatgcaattatcgaatggactggaatgaaatcacctttgaatggaatcaaagggaatgattgaaaggaatcgaatgccatcatcatcgaatggaatcraaaggaatcatcgaatggaattgaatggaatcaccattgaatggactcgaatggaatcatcatggtatggaatcgaatggaatcatcatcatatggaatcaaatggaatcatcgaatggacaagaatggaatcgtcgtcaaatggaatcaagtggatcatcgattagaaactaatggaatcattgttgaaagaaatggaatggaatcattgaatggaattgagtggaatcaccaatg

SEQ ID NO: 438919 - DNA, 473 bp, Homo sapiens
gatattcagaatatatagagaattcctagtcaacaataacaatgacaacattaaacagcccaattcaataatgggtaaatgacatgaacagacatttaacctaagaaggtatacagatggccaagaagcatacagatattcttaatatcaccaattagtagggaaacacaaatcaaaaccactatgagatacaacctcatacccatcagaatggttgctctcaaggaacaaaaaacagaaagtaacaagtttgatgaggatatggagaaaatggtatccttgtaccctgttggtgagaaaattaaaatgttatagccgctatagaaracagtatggtggagcctaaaaaattaaaaatagaattaccacatgattcagcaattccacttctgagtatatacccaaaagatttgaaagcagggtcttagggtctgaaagagatatgtatacacccatgttttttttgttttttg

SEQ ID NO: 438920 - DNA, 645 bp, Homo sapiens
tatggtggagcctaaaaaattaaaaatagaattaccacatgattcagcaattccacttctgagtatatacccaaaagatttgaaagcagggtcttagggtctgaaagagatatgtatacacccatgttttttttgttttttgagacggagttttgcttttgctgcccaggttggagtgcaatggtgcaatctcagctcactgcaatgtccgccttccaggttcaagtgattctcctgcctcaggcatgtgccaacacgcccggctaatttgtgtatttttagcggagacaggttttcaccatgttggtcaggccggtgtcgaactcctgacctccagtgatctgctcacctcagcctgccaaagtgctgggattacaggggtgagccacggcgcccagccrtgtatacacccgtgtttatagcaacattagttgcaatacctaaaaagtgaaagcaacacgagtttccctcaacagatgaatggatagtcaaaatgtaatatacacatacaatggactagtattaagccttaagaagaaagggaattccaacccatactacaactggaatgaaatttgaggatattataagtaaaataagccagtcaaaaatacaaatactgattacacttatatggggatgggg

SEQ ID NO: 438921 - DNA, 631 bp, Homo sapiens
agatgatgcataaagataaactctctgagctttaatcaagaaggaaaatggaaatccactggaaacmtgacagacaccccacattctgggaaggagagttcaggcaaacagccaccatgatggcgtctggctgataaaagtgagtgatgccctgttatgtgagaggggcagagagcctccctctgtgactcacctttccactagggatccaagtaacttaggccaagagagagcaccttgtttctcccaagccccaggactatcttggggagaggcttggagacactgagagggaaagacaccaggaacagctgcaggcattttcccagacctgggactgaaagcaggatgccagttttaatccaggttcatacaaagtcagccatactttggcaaacggcaggcatttttgcctcaggctagagattggaacacctgctgtggagcagcataggagttttcacagccagattgtggaaagtgcctccccagtaagcactggaattttgctctcccttgtcacaggcctgggatgggaggagagctgctacagtcatagtttattctgggtgactagacttgtgtcagggcttgcttggtgacttggaactggtgtgtgtgtgtgtgtgtg

SEQ ID NO: 438922 - DNA, 631 bp, Homo sapiens
agatgatgcataaagataaactctctgagctttaatcaagaaggaaaatggaaatccactggaaacatgacagacaccccacattctgggaaggagagttcaggcaaacagccaccatgatggcgtctggctgataaaagtgagtgatgccctgttatgtgagaggggcagagagcctccctctgtgactcacctttccactagggatccaagtaacttaggccaagagagagcaccttgtttctcccaagccccagractatcttggggagaggcttggagacactgagagggaaagacaccaggaacagctgcaggcattttcccagacctgggactgaaagcaggatgccagttttaatccaggttcatacaaagtcagccatactttggcaaacggcaggcatttttgcctcaggctagagattggaacacctgctgtggagcagcataggagttttcacagccagattgtggaaagtgcctccccagtaagcactggaattttgctctcccttgtcacaggcctgggatgggaggagagctgctacagtcatagtttattctgggtgactagacttgtgtcagggcttgcttggtgacttggaactggtgtgtgtgtgtgtgtgtg

SEQ ID NO: 438923 - DNA, 631 bp, Homo sapiens
agatgatgcataaagataaactctctgagctttaatcaagaaggaaaatggaaatccactggaaacatgacagacaccccacattctgggaaggagagttcaggcaaacagccaccatgatggcgtctggctgataaaagtgagtgatgccctgttatgtgagaggggcagagagcctccctctgtgactcacctttccactagggatccaagtaacttaggccaagagagagcaccttgtttctcccaagccccaggactatcttggggagaggcttggagacactgagagggaaagacaccaggaacagctgcaggcattttcccagacctgggactgaaagcaggatgccagttttaatccaggttcatacaaagtcagccatactttggcaaacggcaggcatttttgcctcaggctagagattggaacacctgctgtggagcagcataggagttttcacagccagattgtggaaagtgcctccccagtaagcactggaattttgctctcccttgtcacaggcctgggrtgggaggagagctgctacagtcatagtttattctgggtgactagacttgtgtcagggcttgcttggtgacttggaactggtgtgtgtgtgtgtgtgtg

SEQ ID NO: 438924 - DNA, 590 bp, Homo sapiens
ttaactagcctgaatatagaggcacccaacattggagtacccagattcataaaacaactacttctagacctataaaaggacttagatagctacacaataatagtgggagacttcaacaccccaccaacagcattagacagattattgaggtagaaaactatcaaaaaattataaatttcaccctgcaccaactggacctaatagacatctatagaacactccacccatcaaccacagaagatacattcttcttatctgcacatgaaacatactccaagatcaacaacatgctcaataataaagcaagtatcaataaatttttaaaaaatgaaattatatcaaccatactctcacaccacagtggmataaaaatagtaatcaataccaaaaagtagaaaccacataattacatggaaattaaacaacttgctcctgaatgatttctaggtaaacaacaaaattaaggctgaaatttaaaggattcttagaaataaatgaaaacaaagatactacataccaaaatctctgggatgcagtgtaagcagtgctaacaggaaagtttatagtgctaaacacctatttcaaaaagt

SEQ ID NO: 438925 - DNA, 590 bp, Homo sapiens
ttaactagcctgaatatagaggcacccaacattggagtacccagattcataaaacaactacttctagacctataaaaggacttagatagctacacaataatagtgggagacttcaacaccccaccaacagcattagacagattattgaggtagaaaactatcaaaaaattataaatttcaccctgcaccaactggacctaatagacatctatagaacactccacccatcaaccacagaagatacattcttcttatctgcacatgaaacatactccaagatcaacaacatgctcaataataaagcaagtatcaataaatttttaaaaaatgaaattatatcaaccatactctcacaccacagtggcataaaaatagtaatcaataccaaaaagtagaaaccacataattacatggaaattaaacaacttgctcctgaatgatttctargtaaacaacaaaattaaggctgaaatttaaaggattcttagaaataaatgaaaacaaagatactacataccaaaatctctgggatgcagtgtaagcagtgctaacaggaaagtttatagtgctaaacacctatttcaaaaagt

SEQ ID NO: 438926 - DNA, 590 bp, Homo sapiens
ttaactagcctgaatatagaggcacccaacattggagtacccagattcataaaacaactacttctagacctataaaaggacttagatagctacacaataatagtgggagacttcaacaccccaccaacagcattagacagattattgaggtagaaaactatcaaaaaattataaatttcaccctgcaccaactggacctaatagacatctatagaacactccacccatcaaccacagaagatacattcttcttatctgcacatgaaacatactccaagatcaacaacatgctcaataataaagcaagtatcaataaatttttaaaaaatgaaattatatcaaccatactctcacaccacagtggcataaaaatagtaatcaataccaaaaagtagaaaccacataattacatggaaattaaacaacttgctcctgaatgatttctaggtaaacaacaaaattaaggctgaaatttaaaggattcttagaaataaatgaaaacaaagatactacataccaaaatctctgggatgcagtgtaagcagtgctaacagkaaagtttatagtgctaaacacctatttcaaaaagt

SEQ ID NO: 438927 - DNA, 548 bp, Homo sapiens
cggcagaattgagaagttgcaatggacactgtatggctctcaaattctaaatacttactatctgaccttttatagaaaaaagttctccaactcctgaaatagagtataatagaaaggatgctatataatatctaagactaggccatagaagatcatgcagcttctgctttgttctcttggaatgcttgatctttggacactccttggaacattattttgaaacctacccattawgctatgagaagtttaagccacagaggaagatacatgtaggcacaccaattaacagcccctgttggtctcagtcctcaagtcattccatctcaggtgccagatatgtaaactaaaaacatgtaaatgattccagtaccagccatttgaagtcccatgagctgaagctctagacattagttgcggaatagggataagctatccctgctatgcactgtctgaactgctgacccacagaatctatgcacatattaatatttttgtttccatgctaagtttgtagtgctttgttatgcagcaatagttaactggagcac

SEQ ID NO: 438928 - DNA, 548 bp, Homo sapiens
cggcagaattgagaagttgcaatggacactgtatggctctcaaattctaaatacttactatctgaccttttatagaaaaaagttctccaactcctgaaatagagtataatagaaaggatgctatataatatctaagactaggccatagaagatcatgcagcttctgctttgttctcttggaatgcttgatctttggacactccttggaacattattttgaaacctacccattatgctatgagaagtttaagccacagaggaagatacatgtaggcacaccaattaacagcccctgttggtctcagtcctcaagtcattccatctcaggtgccagatatgtaaactaaaaacatgtaaatgattccagtaccagccatttgaagtcccatgagctgaagctctagacattagttgcggaatagggataagctatccctgctatgcactgtctgaactgctgacccacagaatctatgcacatattaatatttttgtttccatgctaagtttgtagtgcttkgttatgcagcaatagttaactggagcac
